United States Patent Application Publication US 2026/0103690 A1 - sequence listing, part 88

SEQ ID NO: 435140 - protein, 394 aa, unidentified
MPKTKLQNRNDFNGQRFYVGLDVHKKSWAVTIRSLKIELAHFSQPPGAEALSNYLHREFPGGDYYSAYEAGFCGTDAHEQLCKFGIKNIIVHAADIPSTDKQKKNKTDLHDSRAIADHLERGNLKGIYVLNHEQQELRSLFRLRESKVIDVTRANNRLKSFLMYYSIKLPENISKNEFLSGKVLDWLNIELGSASGTFALQQHIEELKYQRRQLLQITQSLRMQIQCLHKQTYIDLLSVPGIGAVTSMGLIAEIADFSRFEDPDHYASFLGLCPWEDSSGPVIKTKGVQPRCNGHLRPLLVEASWKAITKSRSLFAYYSKHANKSGKKAIIKVARKLAMIAKGVATSGQPYQEDYLKKKQAEKDLKAERFSLGITEQHINKQPGIGLQVAAMPG

SEQ ID NO: 435141 - protein, 349 aa, unidentified
MSILALDLGKYKTVFCDYNPTNGKHEFGKVNTTPKEIHDLLVAREPATVTLEVCSVAGWIFDIAEALGIKVEAANPMHDAWRWKNVKKKTDKEDALKLAKLSCMGQLPTVHMPKKDVREKRALIKYRQRLVSYRTSIKNAIRAVFARQGITIVSTKALWSREGLEWLKSHARAFGKISDAEQLWRGQLHTELGLLETITKSLKKVERKLNKMGASDKRIKRLQTIKGVGPRLAETVVAFLDDPKRFKNAKQVGSYAGLAPRQYQSGQSERQGKTGGRGNKLLRNLLIEICWVSLGTNKWARETYKRLLRGSSSRKKIAITALARKLVVRCWAMLRDEQDWKDNTQKDVA

SEQ ID NO: 435142 - protein, 373 aa, unidentified
MNNSITYVAMDTHKKEHKVALHYPCHEEIVRFAVKNTAREIKKMVNKIKKKAPTDIKFCYEAGVCGFTLKRRIEALGCQCMVIAPSLTPIKPGDHIKTDRRDALKLLTMFKAGLLTEVHAPNAEQEAARELTRCRQTAQENLKRIRHQVLKFLTRHGYVYADGNHWTQKHITWLRSLEFDQHLLADVFDNYFTQMNHCLQRLDSLDKQVKNLAESNCYKEIVGFLRCFHGIDTLTAITIITEIFDFGRFSSPGQLMSYLGLTCSEDSSGQKERKGSITKAGNKRVRRLLVETSWHYRHPYNLSNALKMRRKNQPQWVIDIADQARQRLRRRYRYLTNNGKIPCVATVAIARELAGFIWSVFNEYEARNNKKVA

SEQ ID NO: 435143 - protein, 265 aa, unidentified
MATSSYVGIDVSKDRLDVAVLGGQYGSVPNTREGIVKLVQWLQEVSPELIVVEATGGYQRAAVEALFEAGLAVAVVNPARVRQYARACGLLAKTDKLDAQILAVFGQRVEPRRYEAKSEAGKQLSALLVRRRQLDEILKAEQNRLRTISQSLKGSVERIIACLKDEKKLLDTQIQQFMKEQEEWQEQTEILSSAPGVGKVTTATLLADLPELGKLDRKKIAALVGVAPMNFDSGKKRGYRKTKGGPEMFGVCCICLPWWPRATIR

SEQ ID NO: 435144 - protein, 354 aa, unidentified
MSQKLNSEIAVIGIDIGKNSFHLVGQDRRGSIVLRQKWSRGQVEARLVNLQPCLIGMEACVGAHHLSRKLQALGHDARLMPAKYVRPYSKGEKNDYRDAEAIAEVVQRPTMKFVATKTADQLDLQALHRVRERLVSQRTGIINQIRAFLLERGIAVRQGLHFLRAELPGILAKRTDVLSPRILRIIEDLAGDWRRLDERIESLSAEITRVVEQDPACQRLTTVPGIGPIISSAMVAAIGTGDAFAKGRDFGAWLGLVPKQMSTGDRTILGSISRRGNRYLRRLFVQAAWVVLVKVGPEQWERYGLKSWIEAAKKRLHHNVLAIALANKLARIAWAVLHKGRAFECVKTNASRPV

SEQ ID NO: 435145 - protein, 356 aa, unidentified
MKTSQQIRQKLDFSGDSIYAGIDVHKKQWNVFIMSEYKEHKGFVQPPDPSILAEYLRKNFPGATYYSTYEAGFSGFWIHEALKQEGIHNIVVNPADVPTTDKERKKKSDRVDSRKLCKKLRDKDLEGIYVPERSQLEDRELMRLRTKLVRDVKRCKCRIKGLLNFYGINPTCSTWTKKFITWLKARELQSANGTFVLHKLVQELESIDEIKKQVAKQIRIGLLKNEKYSKRIKLLFSIPGVGLIGALTILTELGDTKRFKNIDQLCNYVGLVPTLYSSDEKEHVGNLTPRGNSYVLPVLIQCAWAAVGKDPALLKSYHQWRKRMKSQEAIIRVARKLLARIRHVLIHDTEYKLATV

SEQ ID NO: 435146 - protein, 343 aa, unidentified
MRTSTVYVIGIDPHKGSHTAAVLDVGEQLVGELCVVADRRQRERLLRFAEPFTPRAWAVEAAGGLGALLAQQLVAAGETVFDVPPTLSARVRLLDAGRTDKTDPHDARSAAIVALRHDGLRAVTAVDHHAVLRLLADRHHDLVAHRTRVICRLHALLCLLIAGGLPRSLSAERAGRALRTLRPADVVDVEPKPMASELLADVRRLDSQLATIKNRIAIAVDTSGTKLTDVHGVGPIVAALIVGHTGDVRRFPTAGHFARYNGTAPIEASSGPRVRHRLNPRGNRRLNHALHVAAITQVAHDTAGRTYFQRKLGEGKSPKEALRALKRRISDAVYRQLLTDDRR

SEQ ID NO: 435147 - protein, 420 aa, unidentified
MQEQPSQFAAFIGIDWADRKHDVCLLVAGADTFELSVIEHRPTVIDTWARNLRKRFDGRPVAVCLELSQGPIVSALLEYDFFVIFPVNPSTLARYRGAFTTSGAKDDPTDATIALEILRRHPEKLAPLRRESVDMRALRRLVESRRDLVQDRVRVTNRLIYALKAYFPQVLDWFRDKETDVFAAFLERWPSLPEAQRAKRDTMIDFFHAHNVRRANTIEKRITAIKSEKPLTSDPAVIGPALLLVETLLPQLRALSAGIVRFDEEIARRCNALPDFPLFSNLPGAGKVFSSRLLAAFGEQRDRFATAAALQKLTGVAPVTERSGKKHWVHWRWACPKFLRQTFVEWAASSIPKSFWARAFYESHRAKGSSHNATVRALAFKWIRVLFRCWVDRVPYDESRYLAALQKRHSPILKFAAEAS

SEQ ID NO: 435148 - protein, 386 aa, unidentified
MPQLNDLSRSLVILEQDATLIAVIEMGQSSWLVAGIVPGVERSPLKKLAVDESALLKLLHRWREEAEQAGHRIKRIAVAFEAGRDGFWLARWLRARGIEPHVIHASSVAVSREHRRAKTDRLDTELLKRAFLGWLRGERDHCKMVAIPTLAQEDAKRPNRERESLVGEQSRIVNRMKAALARLGIRGFNPKLKKAVERLDGLRTPEGEPIPPNTLAELKHDMERRRLVRSQIRDIEGTRLERLEQAPGDGPHVMVRLLARVIGVGVETADMLVQEVLSRNLRDRRAVARYGGLTGSPDESGKKRREKGLARSGNARVRRGMIQLAWRFLMFQKDSALAHWFYARTKNAPQTRKTMIVALARKLLIALWRLVREGAIPEGVVLRPAL

SEQ ID NO: 435149 - protein, 373 aa, unidentified
MFHFTTLFIGMDVHKESFSLCYYDMMTNQFKHSTKVGPNVSYIVNYVNELRRLYGQDAEVLCGYEAGCLGFTLYHQLQAHGIPCIVMAPTTVMKEGSKRVKTDKKDAAQLAKVLAFRSYRPVHIPTVEDEQVKEYIRMRTDHKVALKKIKQQIFAFCLRHDFRYTEGSSNWTQKHVRWLHSLNPKGLYAEILTEYLLTYEKLVDQIERYDARIVQLAQSDSYQEKVSQLSCFIGVKTLTALSIVTEIGDFNRFATAQHFASYLGLTPSENSSGDKERRGAITKAGNSYVRRLLIEAAQSLAKGTIGYKSKELKRRQSGNRVEVIAYADKANERLRRRYRTLVLGKNKKQNVAKTAIARELSGFIWGMMTGRIA

SEQ ID NO: 435150 - protein, 403 aa, unidentified
MNAVGIDVSKGTSTVAILRPFGEIVASPFEVAHTDSELSKLAKMLKSLDGETKVVMECTGVYHLPVAYTLHDAGLFVSTINPIITHNYDNNSIRKARNDKTDAIKIANYTLTNWLKLTQYVPEEDVRHMLKMYSRQYNKYIKLNTMLKNNLISLLDSTFPGINELFTSPPRTKDGHEKWVDFVACFWHCKCVCSISQKAFTERYRKWCKRTRYYFNEAKAEDIYTESLGHVSVIPLNDTTKLLIKQAASQINAISETTEIIAREMKSLAASLPEYPVVMGFRCVGDILGPQLIAEIGDISRFLKKSSLVCFAGLEPVENQSGKFRGNETISKQGSPHLRKALFQVMDCLLKHAPADDPIFQFLDRKRAEGKHYYSYMNAGSAKFLRVYYARVNEFIDKLEADV

SEQ ID NO: 435151 - protein, 371 aa, unidentified
MSANQNSIFVGMDVHKVAINVAVALRGKREPEAEWQLANEPRAVKKLMKKLKEMTHGAVVAAYEAGPCGYALQRQMCEQGIDCIVVAPSLIPVKPGEHVKTDRRDARKLASMLQAGLLTEVHPPTPEDESVRDLTRSREDTKQDQMRARHRLAKMLLRHGFVFRSGKNWTKRHGEWLGQIRFEGGVSQHVFDGYLLVAQQVEERLKRIDEQLEEVARSERYRERVGWLRCLRGVDTVTAMTILAELHGFQRFTNPRELMSFLGLTPSEHTSSSRVRRGSITKAGNSHVRRILIEAAWHYRHRPSASAYMRRRRDGQPSKVLAIADRAQERLHHRYFKLKEGYKKPHNVVAVAIARELVGFVWAVLHHSEAA

SEQ ID NO: 435152 - protein, 400 aa, unidentified
MKVSGLDIHKSSIFCSIYNGKKHQKVKEFTTLTSDIVSMGEYLKTDGVKKIAMESTGIYWIPIWNILESLGFELMLVNPYLIKQMPGRKSDVKDAQWIAELLHKRLLRGSLVPGETIRELRTYSRRYIKLKQRHTNLLQSIERTLEICNICVSGFLSNITGKSFLNVVRLVVGGETSAEILIKKIHGRIINKHGKEIIRASLEGFVTEHHRFILEQLLQEYDLIACQIETIEKKMEELVMAHYEKEMQLLQTIPGISKIAAIIVLAETGADMKAFASSNKFSGWTGLRPRNDESAGKYKSTATTKGNKYLRAILAQIAWAAVRTKGSYYKDKFAKLAMRKSRKKALIAIARKIGVVIWNVLSKQEAFNPERFPVYDPIKVKARLNYHQREVARLTELIEI

SEQ ID NO: 435153 - protein, 353 aa, unidentified
MLQAKTINIKTKEAEMPQYHYVGVDLSSQKLDTWIDGKYKQYPNTEAGFARFLKAIRKLKKSVLVAFESTGSISLYFAEQLDREGIARACINPSWVRQWVRHYAKSIGRIAKTDRIDSELIANYANLNKIQADKPMSSDILRMRQLQRYRSMLIKHRAQQKASLYTYRDSEIITRIKERISKLDEEIKEVQKEVEQLIESNEEMRNRYRMFLKIGGIGEKTAKVLLCNLPELGYLNRREIAALVGVAPFNWDSGRKTGKRFARFGRRDVRTALFMSIIAIKRIKDNPIHEFYDKLKAKGKRHKQATIACIRRLLVRINAQVRDWIAKGMPPIENEAKRASKKTQPKQKVKSAA

SEQ ID NO: 435154 - protein, 340 aa, unidentified
MTHITRIGIEVAKHVFQLHGVDAQGHTVLRRRVSRAHLRQVVAHLGPCLVGVEACGSAHDWAREIRALGHDVRLLAPQFVAPYRKNDKNDGNDAEAICEAVGRPHLRFVPIKAVAQQAVLTVHRVRQLLVAERTALVNQTRGLLAEYGLIGPVGIGALRRTWATLLEAPALPVLAREVFTDLADRMRGLDDRITTYDRRMAQLARQREPAQRLMQGSGVGPVTAPAVVATVGDARTFRNGRQFAAWLGMVPRQHSSGGTQRLGRITKRGDVYLRTLLIQGARAVMRHLGRRTDATSRWGTARKARRGFNKAVVALAAKQARILWALLATGRPYQPATACP

SEQ ID NO: 435155 - protein, 338 aa, unidentified
MLNTTTGKVEEKRLAHPDEAEKYYRALASAGETVRIGMEASGQARWFERLVAELQFDLWIGDAGEIRAKRGRKQKTDRQDAQHILKLMLKDDFPKIWVPNWENRDLRQLLWHRHRMVQARTRVMNQLQAVALNEGLHCKKKLWRERGRQQLESFALAPWASRRRRDLLDLLDRLNPAITELTQAIEREVENYPAAQRLRTHPGVGVLTSLAFVLILGDAERFRCGKQVASYLGLVPLENSSGNRRRLGHITKQGSSIVRFLLVEAAQVTVRSLPEWRSKYFHLVLRRGRKIAKVAMARRLAVQLFWMMRKEWNYEQLKKFGSHVGQPGHRDGVQSNTE

SEQ ID NO: 435156 - protein, 336 aa, unidentified
MVQIYGIDLGMSSFDVSFLSESGSVRHLSGVKNTVHGISKFLLSLPSSAVLCAEHTGVYGDLLLRLCTLNRTCLCFVPGYQIKHSLGLQRGKSDPLDACRIREYAERFYDLLRPCFYPGEEMSELQELYRTRSLLVDSRKRLDTLNIGDNCKSSVSLAADHARRAVLAELNTQISGLDHEIEALIQNSSEFSRNYQILTSIVGVGPVTSCELIIKTENFRKLDTAKKCAAYAGIAPYPKESGKMKCGHKISPMGDKQLKTLLFLCARSAKEHNKEIRLYFLKKHKVEKKHFFVAMNNIANKLLRLIYSLIHKQQTYDRDYIQRDPRCVVISDTHKC

SEQ ID NO: 435157 - protein, 381 aa, unidentified
MQVLGVDPHKGSHTAAAVAPDGTVLGRTRVVSSRRQAQRLIAWATPWPDRVWAVEGATGVGRLLAQQLVAAGESVLDVPAALATRVRVLSGQSGRKTDAHDAVAVATAAIHHPRLRVVQAEDHNAVLRLLSVRRTQLTVSRTQAVSRLHGLLAELIPGGAPKNLAADRAAELLRSIRPSTAVDATRKALARDLVDDVRRIDRKLDANKADIIEAVKTSGTTLTEIQGIAEITAAKILGQTGRIDRFEDRAHYASYAGVAPIEASSGAISRHRLSRRGNRQLNSAMHGIAITQATHPGRGREFYLRKRDEGKTEGEARRALKRHIIDLVFVTITADTERAHRSPGRQVGATHESSAAGQSPTANTSERSVPGLRKQATPRVA

SEQ ID NO: 435158 - protein, 423 aa, unidentified
MKSSGTQTFRAYVGIDWADTKHDFCLQERGSDRREFGCIAHQVECIDEWAKSLQQRFGTPVAIALELAKGPIVYALQKYDFLVLFPINPLTLAKYREAFKPSRAKDDPSDAELALDLLMRHPERFAALQPQSVGMRTLISLTERRRELVNDKIRLTNRLTHTLKEYYPQALDWFDQHDTVLFCDFLTRWPTPLQARRAHQASLKAFFHAHNAHRPQIIAARLKAIKAAVPLTQDPGVVVPCRLHVLVLIEQLRLALQAIEQFDRHIAELAPTLLDYRLFAGLPGAGPHLAPRLLVAFGEDRERFQRAEELQKYAGIAPVTERSGKKTWVHWRWQCPTFLRQTFIEWAGQTINKSFWAGAYYYQQRARGSTYQAAVRALAFKWIRILYSCWKTRTPYDESKYLNALKRRQSPLLNNLVPIPQNA

SEQ ID NO: 435159 - protein, 376 aa, unidentified
MGDYSEAFVGFDTSKLRNSVAIADGGRGGEVRFLGEIENTPAATAKLVRKLAARYKRLTFCYEAGPTGYGLHRQIKGLGFECVVVARSLIPKRPGDKVKTNRRDALSLAKLLRADELTAVWVPDGHHEAMRDLTRARETAMLDLRTKRQHVSAFLLRLGRSYPESKKSWTKAHLSWIAEQKLEHPQQRLVLEEMMLAIRQAQERLARLEQAIAAAVPEWSLAAVINALMAMRGMDMTSATTLLAEIGDLSRFQTPTELMAYLGLVPSEASTGDAIKRGPITKAGNRRARRMLVECSWSYQHPPRVGQAKQPKVDAAPPAVREIAWKAQCRLYRRYRTLIRKGKRKTVAIVAIARELAGFIWAVARAATTARVVAVA

SEQ ID NO: 435160 - protein, 350 aa, unidentified
MDTITQPLASIGIDIGKEVFHIVGLSTNGKIAFRRKIKRLALVETFRLLPSSVVGMEACLSAHFVSRALRQLGHQPRIIPAIYVKPFVKGQKNDYNDAEAIAEAALRPNLRVVREKTQDQLDLQALHRVRSRMVSRRTATINQIRAFLIEQGIAVRAVARALRNSLMAILENRQDEISPRMRGLIAGLYEDWIYLDERIETIAGEIETIGEKEANCRRLMSVPGIGPLISTAVVAAIGTGEAFERGRDFGAWLGLVPRQYSTGGRSILGRISKRGSKYLRTLFIQAANVILMRPRNWERFSFGTWLLNAAPRLHRNKLATALANKLARIAWSILRNEKTFDAPRHEVMAI

SEQ ID NO: 435161 - protein, 421 aa, unidentified
MRAIGLDVHRDFCEVAIAEQGKVRSAGRIATRPEVLELFAQSLTRDDRVALEVTGNAWEIARIIEPHVARVVVVSPSDTGIRQARAKTDRLDARTLAKLLAAGSLDSVWMPDERTRVMRRRLSRRSQLVEARTRVKNEIHAILIRRLKGRPDVSDLFGRKGRAWLAELELPIEERETLDSGLRQIDFLDAEIKLVDRVIAHDALNWPEARRLMTVPGVNLIVAATFLAAVGDIHRFPDRRKLVAYLGLDPKVRQSGDAPASHGHISKQGAAPVRVALVEASWSVVRQPGPLHAFYARIRARRGHQVAITAAARKLACLFWILLWREEDYAFGQPSLTAKKLRRLEIMAGAPRWQDRKGVWIAHRLLRDAELNVARQAEHAYAQTVRDRQAAGAIKAGASATPGRASQQPIEGKAARQTTSP

SEQ ID NO: 435162 - protein, 345 aa, unidentified
MTITTVGLDIAKQVIQVHAVDVRGKPIIRKQLKRHQVLPFFANLPPCLIGIEVCGGAHDWARRLMALGHTVKLMAPQFVKPYVKANQHDAADAEAICEAVSRPSMRFVSVKAQEQQALLALHRARQGFVTARTAQANQLRGLLAEFGLVVPKGLAALKRRIPDILEDAENGLPGAFRELLQRLGDHLTELNRQVEDLTQRIEAEHRANPLSRRLAQIPGIGPLIATALLAAIGDIQGFANGRQLAAWLGLVPKQSSTGGKTRILGISKRGDTYLRTLLIHGARSALRAAQRREEPGATWLTRLADRRHPNIAAVALANKNARIAFALLAHDRDYQPGYRPVQATT

SEQ ID NO: 435163 - protein, 403 aa, unidentified
MNAVGIDVSKGKSMVAILRPFGEIVYSPFEIKHTSHDINSLVDLIHSVDGESRVVMEHTGRYYEVLAHQLSEADIFVSTINPKLIKDFDNDSLRKVKSDKADAVKIARYALDKWQNLKQYSLMDELRNQLKTMNRQFGFYMKHKTAMKNNLIGILDQTYPGVNTYFDSPARSDGSQKWVDFASIYWHVDCVRKMSLNAFTDHYQKWCRRKKYNFSKSKAEEIYGKAKELVPVLPKDEITKRIIKQAVEQLNSASSTVEELRTLMNDTASKLPEYPIVMAMNGVGPSLGPQLIAEIGDVTRFTHKGAITAFAGVDPGVNESGTFSQKSVPTSKRGSADLRKTLFLVMDVLIKTMPQDDPVYQFLDKKRSQGKPYYVYMTAGANKFLRIYYGRVKEYLASLPQSE

SEQ ID NO: 435164 - protein, 460 aa, unidentified
MNRVRKARPAAKTAKPVAEVDALTLINPNAAGIDIGMDEMWVSVRADRDAEPVRRFGMNTPDLITAADWLKACGVETVAMESTGVYWIPPYEMLEARGFKVYLVNARHAKNLPGRKKDETDCQWLRRLHAFGLLNNSFRPAGEMRAVRAYMRHRADLIEHRAAHIQHMQKALQQMNVRLSPTVKDITGVTGMAIIRTILAGERDPVKLARLRQPGCAKPEAEFVKALTGNYRDEHVFALKQAVALYDAYTQQILECDQELERKFSALKPVPDDDLPPLDTRDKRNTHSKNAPAYDGRSLLYQLLGIDLVAVDGLNEVTVQIIISEIGTDMSPWQDDKHFCSWLSLAPHNDISGGKLLRSRTLKTHNRAGQAFRMAAQAVGKTDTAYGAFFRRMRARHGPKKAIVATAHKIARAVYFMLRDHKPFHSTSAEEYHQREREREIARLTKKATKLGFTLAPATA

SEQ ID NO: 435165 - protein, 403 aa, unidentified
MVVVTVVNIFERWYFFMFYVGIDIAKNTHWASVMSSDGEVIKEPFSFSNDNSGFKKFISNLESLDKTKILIGLESTAHYGENIISYLFNLDYEIGLINPIQTANLRKSNIRKTKNDKVDTFIIIKALTLGNYSLITSRDINNLKLKGLCRSRRNLVTLRSKAKIQLVSYLDQIFPELAQFFKGNLHLNVSYQLLKEYSSPKQISTLHLTKLSNILHDKSHGRYGKQDAIRLRELAKSSVGIDNPSLSLQIKHAILQIELYNEQTAEIESLYKSILDEMHSPILTIPGMSYNQAAVILGCIGDISRFTHSCQLLAYSGLDPSVVQSGNFQAKSTRMSKRGSGMLRYSLVYASHNVVLNNKTFKEYYDLKRSQGKSHYCALGHVAHKLVRVIFKMLKDNVAFNLD

SEQ ID NO: 435166 - protein, 436 aa, unidentified
MEVTHSHCAGLDVQKKVVVACSLIQTAPRKLQRTIRSFGTTTTELLALSDWLTTQGVTRVAMESTGEDWKPIYNILEFNFELMVVNAQHLKNVPGRKTDVKDAEWIADLLRHGLLRGSFIPPLVQRDLRDLTRQRITLVRERARVTNRLQKVLEWANIKLASVVTDITGVSARRMLRAIVDGQTDVHSLAQLAKGRKGHKLPQLEEALLGKVRDHHRFLIQQHLNHLEFLEAQIIQFNQHIEQSIKAQNYFESRNQSESESNSSDSNSDEPTESASTLSWTQAVSLADTIPGVAQNTAELLVAEIGTDMSRFPSASHLAKWARLCPGNHESAGKRLSGQTGRSNPWLRTSLVQAANAAVRCRNSYLRFVYRRLAGRCGRKKALIAIAHRILIALYHMFKKCEPNPRLGSQLPVQSIPTTAFCSASSFSSSPIRLST

SEQ ID NO: 435167 - protein, 330 aa, unidentified
MRIVVLGIDLGKNLCSLAGLDETGAVVLRRRMKRASVLPFTAQLEICTVAMEACCGAHHLGRQLVAQGHVVRLMSPAYVQPYVKAQKNDERDAEAIAEAATRPTMRYVEIKSEAQLEVQSLHRVRGRLVAERTALINQLRALMLERGIAVPQGRCKLAGLGPRLRQLIEDIREEWRSIDQRIKGYDDELAEQVRNEDTAKRLISIPGIGVLTATALVAAVGNAQTFSCGRDLAAWLGLVPRQATTGGKPRLLHISKRGNGYLRMLLIHGARTALPGLAKKDTPLGRWVKALLARAHRNVVTVALANKLARIAWAVLARDRQYVTVQAIGK

SEQ ID NO: 435168 - protein, 344 aa, unidentified
MLYVGLDLSRKRLDWQALDLYGERVAVGAVPPDRDGLAKRGQRLGDAAVLAVIESMSGARFVHDQLERAGWDVRIADALKARGLAPLACKTDKIDCWVLAELARLNLVPEIWLPDPEVRAERERARFRLHLVKHRRALKNRVHSILFQHGVANPHSDLYGVGGRRLLERLALPEPWASTVESSLSLIDTLDEQIHACEREPRRLGADHPYIPLLVTCPGIAWTLAYTIAAELGDLSRFASPRKLVGYTGLCPKVEQSGERDRRGPLRKNGPDYLRWALIEAAHVAGRNPRYQPIVERMRARHGRTRGSKIAAIEIARRLTESIWHMLTTKQPFAPAGAPCPLAA

SEQ ID NO: 435169 - protein, 347 aa, unidentified
MNYIGIDCHISSLDFAVVNERGTVTQKAKVNTGVKEFMAFVKSIPKPRKIFIEEGELAGWMLETSLKFGEQLIITDPKINKWIGKAGQKNDPIDAEKLAQLARGKYIKEIYHPVNNRRRFKDLVFAYHDTVKSRTRIKNKIKANFRRNGIKCSGDTVYSDKYRDKWRERLSKNKITRLIIEELWVQLDQVGESKEKLKRNIRIQSKQYPEIKRFTKVPGIGLIHASTISAIIETPHRFANKKKVWMYAGIGLMERSSGETVYSRRLTREYNRPLKNAIKKAAEVAILAKDNQFRRQYLRLTIEKGIASHRAKLTVARSMLAALYGMWKKGEEYDPEIDNKRDKGNKK

SEQ ID NO: 435170 - protein, 449 aa, unidentified
MREPQEVEDRGHEQAVARVAAVDVAKASGVVCTRVPREGVAGRFVTKVWPVEATTNAILELADHLVALEVEKVVLESTSDYWRPFFYLLEAAGLNAELVNARDVKNAPGRPKTDRLDAVWLAKLAGWGMLRPSFVPPPEIRQLRDYTRLRTDLTRERTRHWQRLEKLLEDALIKVTTVASRIDTMSVRDMIEAMIAGQRDPRQLADLARGRMKAKRAALIEALTGRFDDHHGELAAILLAQIDSLTAQIGTLTTRIEDLITQIPAAQGVDPDGSTGPQAGRGPDAPVMPAIDRLEEIPGISRHAAQVILAEVGLDMTRFPTAGHLVSWARLCPRTLQSGARERPGRTAKGNPYLKGVLGDAAAAAGKTSTFLGERYRRLARRRGKLKALVAIARTLLVIIWHLLADRAARYDDLGDDYYITTINTDRKMRSHIRQLEALGYTVTVAPAA

SEQ ID NO: 435171 - protein, 344 aa, unidentified
MKLFIGLDVSLAKTAVCIVSEHGKIVKEAEVGSDPAALTQFALEQQGEIAMIGMEAGPLSQWLHRGLTEAGLEVVLMETRQVKGALKAMPIKTDRRDAEGIARLLHLGWFRPVHCKSVSAQEIRALLGARKSIQQGVIALEMSLRGLLRNFGLKVGAISKGRFDARIQEQVASNTTLVAATEPMLRARATLRHELARLERHVRSLAQDDPTCRLLMTMPAVGAVVALTFKSAVDDPARFSSSKKVGPWVGLPPSRQQSGERDVTGGITKAGDAHLRRALCQAATVMMNRGRGSWLRTWASRVAKRRGTKRAMVALARRIGVILHRMWLDGRNFRSEGAPEPIHA

SEQ ID NO: 435172 - protein, 365 aa, unidentified
MNKCHSNTELSSPEETRCQFNGGTGAIKLGIDVHQDFYVVVEQVGGSNPKPPQRFQKQAFLHWATRLKHKSGAEVYALYEACGFGFTLQRQLSALSIHCYVVCPQKLDEQNRRVKTDGLDAKALCLKLDRFVQGNRDALAIVRVPSEKEEQARAIHRQREQLVKVRKQLEAQGRSLLVNHGLEPVKSWWKRSNFGALHVPEWMKELLQNSQPILLGLQEKIAALTIQLQSAAAPNQPRGLGLMTSVIIDREIGDWRRFNNRRQVGSYTGLCPGEYSSGNTRLQSCVTKHGNPRLRAALVELAWRLVRFQPNYKPIVKWRAILAKGALATGAARKKAIVAVARQLAVDLWRIKTGRLRAEELGLIN

SEQ ID NO: 435173 - protein, 321 aa, unidentified
MDKAEVFVGIDVSKKRLDVATHPALETWACANDGPGIAKLVERLEALQPAGVVLEATGGLQLPVVAALVVARLPVTVVNPRQVRDFARATGKLAKTDTLDAGVLARFAAAVRPPLRPLPDAQTQALGSLVARRRQVVEMLTAEKNRLRTAGAPVRPRIQRHLGVLEQELSEIDDDLGQMLGESPLWREREKLLRSVPGVGPTLTSTLMAELPELGALNRRQVAALVGVAPLNRDSGTRRGKRTVWGGRAPVRATLYMAALVATRFNPVIRAFYQRLLGAGKPKKLALTACMRKLLTILNAMLQHQTPWRPLAYPIIGPEAV

SEQ ID NO: 435174 - protein, 463 aa, unidentified
MRTLGIDLAITGTHKAVTVDERGNAIGGVIRFRTDPAELEALLRRAREGADENEPLRVVMEPTGLAWLPVASYFIQRGVIVYLVNTQQVSDLRKFYSKHARSDRISARVLARLPWVNPDTLHPLQLASADYLSGQRWCKQQEELAQLMTATKNRVQAWERAFWPGLEEIVGDLFAPWVRRWRQVWYDPWQLQAAETRQLAAFLLEAGANPEKAESLAAGLQAVARRVVALFGTPQGGPSPYVDYATLQDQVLRELRLLAYYEAEHQAVSRQVQRLYRQVYPGRELESIMGVGPDGAAVYVFFVGDVERFTSQKKFRGWSGLVPGSDQSGDAEKKGLRLTHAGPDLIKKYAYINAEVGRQWDPQLAAIYYDQMVHKGKHHVQAVCCCATHILDRVRAVLRDGRPYELRDVDGTPVTWQEARAIIAERYQVPDEVRQRNSKRARQARRDQQAERKRKKRRSRPGR

SEQ ID NO: 435175 - protein, 418 aa, unidentified
MNEDGNTRGSRRYIALDIHKKYCVIGGVDREGRVVLHAVRVEHADLEERLKKNLRSTDHVVFESTTNAWHVYDLLEPLVERVVVANPAKVKQIANARVKTDVRDTFILARLLAANLVPDVWVPPVHVRELRQLLSQRRQLVETHTQIVNRMHSVAHRHHLKHERGRRFNEKNTGWQKDKRLSKMEQFQLELEMENRVYIAKQISRIGKEVAKMSHQQPWAEGMTYLMQLPGFGVITGMTVLAAIGEIQRFESAKHLASYSGLTGGLDQSGTKLVQKGITKEGRKELRWALVEVAQRAVKSDPLWKHRFQEMQKRMHRNQAIVAVARRLLELVWYVLTRRQPYRHFSQERIAYKYLTWAWQMDEQARDGLTRQQFTRYYLMRLGIGHDLTRIALDPKHPRKLASEAELLALRPELNHIE

SEQ ID NO: 435176 - protein, 333 aa, unidentified
MHYIGMDVHSKVTMICILDEAGKLLKEQVVGGPLTEVVAAARRWPRPFKVCYEASCGYGWLHDQLKGLAAQVVVAHPGKVRMIFSAKRKTDRIDARKLATLLFLEQVPVVHVPSAARRQWRALIEYRHRLVARRTAVKNMIRALLRSQGLKAPRSLWSGKGRAWLLGQEMAEWDALRREMLLEEVDELGRRIDRLEQQLDRQASAEPGVSLLRTIPGVGPRTAEAVVAYVDDPDRFGRNKSIGCYFGLVPREDTSVKRRLGHITHEGPPTVRRLVVEACWMAVRRDAGLKAYFERIRGDKKDRKKIALVATAHHLLRAMLAMLRTGEVWRAAA

SEQ ID NO: 435177 - protein, 313 aa, unidentified
MSDPTCYVGIDVAKDTLDVCINPSGELLSLQYAESELSDLVKRLKTLDAELIVVEATGGYEMDLVVALAAQAMPVTVVNPRQVRDFAKATGTLAKTDRIDARVLAQFAEAVQPEVRQLKDEQARELDALILRRRQLIDMLVAEKNRVKRSAKAVRKDIQAHITWLNKRLKDTDNHIDRLIKSSPLWRVQDELIQSVPGVGRVLSFTLLARLPELGQLDRRQIAMLVGVAPLNRDSGKYHGRRCVWGGRKDVRNVLHMATLAAIQYNPILTDYYQRLCSAGKPKKVALTATMRKLLVIINAMVKNHSAWSLATA

SEQ ID NO: 435178 - protein, 344 aa, unidentified
MTKYAALDVSMEQTAICVVDENGRKIVEGKVPTDPGAIAAWLAEKVGDVARVGMETGPLAVWLWNELVMRGMPVVCLDARHANAALSMMPNKTDRHDAAGLAQIVRTGWYKEVRIKSHGAYVVRALLSARDALVGIRGKIENEIRGLLKTFGVMFGKKVGGFTRRAKEIVAGELTAAPEIKRVVEVLLEARRSILDRLKTLDARVHAVAKQNAMVRLFMTAPGVGAVIALSVASAYDDASRFRRSSSAGAYLGLTPRRYESGEVSRNGRISRRGNKLTRTHLYEAANVILTRQTTFSSLKVWGLRIAKASGFKKAKVAVARKLAVILHAMWKTNKPFRFGAAAA

SEQ ID NO: 435179 - protein, 313 aa, unidentified
MESAVYVGIDVAKAQLDIAVRPSAEQWVSPHDEEGITALVARLQALRPTLVVLEATGGREAALAAALATAGLAVAVVNPRQVRDFARAVGQLAKTDALDAQLLARFAEVVHPTPRPLPDAQAQEFSALLARRRQLVGMLTAERQRLDTASPAVRRHIQRHIAFLEQELDDLDRHLHDAVQASPLWREQEDLLRSVPGIGPTTALTLLAEVPELGHLDRKAIAALVGVAPLNCESGTLRGRRIIWGGRARVRATLYMAALAATRHNPVIRAFYQRRCAAGKPKKVALTACMHKLLLIANAVLRQRIPWRAPAGA

SEQ ID NO: 435180 - protein, 405 aa, unidentified
MNAVGIDVSKGKSTVTIRRPGDIVLMPPCDIPHTQSAINDLITIIQSLDGETKVCMEHTGRYYEPVATWLSDADIFVSAVNPTLIRNFGDDSLRTPKTDKADSKKIARYTLDRWAKLKQYGNMDKTRNQLKTMNRQFAFYMDQKTAMKNNLIALIDQTYPGSNAFFDSPARSDGSQKWVDFVHTYWHVDCVRSKSLKAFTEHYQNWCKRKGYNFSSDKAEKIYHLSSDLIAVFPKDDNTKMLIQQAVAMLNTASATVESLRLKMNETAATLPEYPVVMAMNGVGPTLGPQLIAEIGDVTRFTHREALTAFAGVDPGKNDSGQYIQKSVRTSKKGSPYLRKTLFQIMDSLIKRSPVDDAVYAFMAKKRAEGKSYYVYMTAGANKFLRIYYGRVREYLATLPENEDA

SEQ ID NO: 435181 - protein, 371 aa, unidentified
MGWTAPYGISCARMRLSETHSWEPSVEQIIRIGMDTSKYIFQLHGVDAAEQPVLRKRLGRKAMLAFLAKLPSTVVAIEACGAAHHLARELGKLGHTVKLIAPQLVKPYVPRNKNDGRDAEGLCEAASRPRMRFVPVKTVEQQAALMLLGVRDQLVARRTQLSNTIRGYAAEFGLIEAKGLDKIAALLATIAHDESVPVLARELFATLARDYAQVQVELKAIEAKLVAWHRTNALSRRLAQIPGVGPVTAAALVMKAPDPHAFRSGRLFAAWLGLTPKDHSTAGKTRLGKITRAGDESLRRLLVVGATSVVKQAKGKHKRGSGWLLELLERKTPKLAAVALANKMARIAWKLMTTGESYDSTRTDTRVASAA

SEQ ID NO: 435182 - protein, 433 aa, unidentified
MGLIVLNARHLERADQPMPYEWCVGIDWGSQRHQVCVLDRNRRLVGERTVSHDGTSLAQLASWLWTLSEGHPQRISVAIEVPRGAIVEGLIERGFHVFAINPKQLDRFRDRHSVAGAKDDRRDAFVLADSIRTDLPSFRRLRLDEPQLIVLRELSRAEETLLEEFRRSANRLREQLHRFYPQMLQLGLAADEPWLWDLLELAPTPAHAALLSAEQVQRVLKAHRIRRVKATEVLVCLQAPALPVAPGVLEAAQAHCGFLLPCLRVLTEQLRLCAQQVQALLHTLAEEPGEAGGPSDVAIVQSLPGVGRKITAWLFAEASQPLAERDYQVLRTHGGVAPVTRQSGKRRQVVMRRGCNPRLRQALYHMARVAMQRDAHFSGVYAALRAKGQRHGQALRHIGDRLLRILVAMLRHRTCYDPSRIRQRLVVQMGRKM

SEQ ID NO: 435183 - protein, 349 aa, unidentified
MMIFAMDLGSSKSAICTLDTGSGQVQHGSCPTQAAKIRTLLQRRRPDLVVVEVSPLAAMVHDVAVELGLAIQVADPTQDAWRWRNVKRKTDRDDALKLARLAALGQINPVHIPEPRMRQWRELVEYRQSLVAERTRVKNRIRQVVLVHAEHRPRAGKYGWSQTARAALRELARPLTECRADELWRGLLAAELDRLADLDGRLAVLEQQLDRLGRADARVALVQTIPGCGGRVAEAVVTALDRPERFANRRQVGAYAGLTPRRFQSGQMDRSGRTSKRGRPLLRQMLNQAAWQAIRRDTYFRALFLRVGRGVKGRRKIAIVAVMRQWFVVAWALLRDHQRYCPARLARAA

SEQ ID NO: 435184 - protein, 326 aa, unidentified
MNSSDYVAVSLPVLGLDVAKASVQGELRSSGDKVRFGFDNNLKGFAQLARLLKQHNVPKVWAGLEATGPYSHALALWLHGQGHRVSLLNPRRVKQYARSAGNRNKTDLLDAAIIADFVRAHEPAPWQPPTLEVAQLQALVRRREELSLMLQAEKNRLEGVAPNVRSSLGRIITTLSAEKARLEKLITQQIRSHQQLSRDHQLLCSIKGIGSLTAAIILAEMARPGQVERARQAAAHAGLVPRREQSGTSVRRNRGLGKEGNRYLRKALYMPALVAIKYNAPLRYFASRLRAAGKPKMSVICAVMRKLIHIAFGVLKHQSPFNPSLA

SEQ ID NO: 435185 - protein, 358 aa, unidentified
MKTDLDNTSFFENILLFIGIDVHKLKWVVTIRTYDLELKTFSMQPSAEELEKFLIKNYPGADYRIVYECCFSGFWIYDYFSEKGYKIIVTPTNRIYKDGSTIKTDKIDSRKLAFQLSRELLREVIVPAKRIREYKYIFRIYDKQKMRQGQILRQIKAFLEQKNHLLKWSKWNKGLLGKLKELKFEDKLFDMQFGNLLKEYEYVASQIKESEKIITTIKEDEELGKRIELIEKINGIGIISAVRMSLYLFDKKERFESSEKLNHYLGLTPSERSSGEKITRGRSGMCGNRQLRSIIIQLAWMTVRKDGSLLEKFDRVYKKSGSKQKAIVASARKLMTKIYAVIQKEEEYRINIRTGKAA

SEQ ID NO: 435186 - protein, 344 aa, unidentified
MVVLGTDAHKRSHTVVAADEAGVELGSVTVAATPEGHLKLVTWAARWPERRWAIEDCRQLSRRLEADLLGVGESVVRVPPKMMAGVRRSARTRGKSDPIDALAVARAALREPDLPVAQLDGPSRELRLLVDYRESLVKDRTAAQNRLRWRLHELEPGYDPPAGSLNRYKTLDEIEQLLTSHTSMVAELGRREVARIRELTREANQLERDIARRVMELVPSLLEIPGCGGLTAAKLVGEAADITRFKNRDAYAMWAGVAPIPVWSANNQRFRLNRGGNRQTNAAIHRIAITQLRIHPDAQAFIKRRLETGSTKREALRLLKRKLANVVYRTLLADVQQPALTTAA

SEQ ID NO: 435187 - protein, 345 aa, unidentified
MQDVSGVVTFVGLDAHFERTTIKAVDRKGRAVLETEVKTTVRSLRAALRKLRGPVWCMMESSTMSFFVKECVEPVVDRAIVCETRENRWIAKSEKKTDPHDADRLARLLRMGEFQEVHVPARPRQEIRELVQAYQKAVNDVVRAKNRLNAKYRRHGIAVDGSLYVEERERGLAQIKRPNLQVILNAQYGILDAALEAREALAAKLHAILSHTKEYRLLCTIPGVGQIVAAIFVAVIDAPERFETKRKLWAYAGFGLRERWSGDPGKARKGGSKKGNRLLKYAALLAAKSAICGKNRFARRFCEMTANGIHPEMAKKTIARNILATARAMWMSGTAYRDDMMADAA

SEQ ID NO: 435188 - protein, 440 aa, unidentified
MKKRKDRVCGADVHKDLIVATITGDDVPSIQENFGTTKSELERFRSWLVANKCEQVAFEATGIYWMPIYDSLSKSIDTIVANPLQIKTIPNDKSDSKDSKHIATLCLNGQIKRSRVFSNEDRDLRTLTRARSGYVKTQTQFRNRIHKYLSACGIKLSSTMDDIFCKSGRHILNGLAEGKPIEEILKGIPSGKIRKKKDLIRSALANDLGETNRMLVRDALEILGDIESKIEKTSHEILKKVQQRSKDLAIVMSIPGIAFVSGSVVLSEIGNYRDFQNPEQLAKWCGLNPGENESAGKKRKCGITKRGSKFIRVVLVQAAQTISNMGSKTRLSRFYQRLIKKKEHNVAIIAVARKLICLIYHLLINQELYLEDDCRKRRSKKDKSCQAPSFQEEYLADKVAAIVDAFYNLSDSSRKNALMRALGDISEINVGQKRPSKGGG

SEQ ID NO: 435189 - protein, 347 aa, unidentified
MRYVGVDIGKWKCRAAVMDPEGSIIEEFTFPNDAEGIHDLASRLTTEDRVVMESTGSVWETLYNHLDERHIPVVLANPLKTRAIASARIKTDKVDARILAHLLRGDLVAECYVPPRDLREIRALVRHRASLVRARTTVKNRVHAIVDQHGLRCEYSDLFGKRSLEWLRGLELGALDRLMLDNHLGHVESLNGQIRRVDEMIRSRGSLDEDVRLLLSLTGVDIYTALLIRSEIGSISRFPDYKRLVSWAGLAPSLHQSGSVEYSGGITRQGSRMLRWAMVESARTAVRHDERMRGFYERVKRRRGDGKAVVAVACKMLKVIWFMLSRREVYQSRNEGRYGRKLKSLDR

SEQ ID NO: 435190 - protein, 416 aa, unidentified
MTDQRQWYTGVDWASENHHVRITDGGGRDIGEKLFRHGGEGLAELADWLLAASGATDPGQIHVAIEVPHGPVVETLLERRFNVYAINPKQLDRFRDRFSPAGCKDDSRDAEVLASALRTDPRCFRLLAVADPIVIELREWSRITEDLVAERTRLTNRMRQQLWRYFPAMLDLGSDLGSEWLLDLWQLVPTPREAARIREASVAKIIKRNRIRRFDAAHVLSVLRRQPVTVADGTTQAASAHVATLVARIRLVNQQLDDAHRRLDSLTQRLALSQETEPGQQRQHDAVILASLPGVGRIVLATLLAEAWDALQRRDYAALRSLTGVAPVTKRSGKSRIVIRRHACHPRLANAVYHWARVAVQHDPRCRLKYATLRGRGHSHARALRSVADRLLNVACAMLRAGTTFNPSLVPQNAPC

SEQ ID NO: 435191 - protein, 382 aa, unidentified
MPAYADPTPKPISADTIFLAFELSGTSWLVALHAPDADKVERHRLSAGVAAEVLGLIARTKARVTRRLGTTPRVACCYEAGRDGFWLHRVLEAEGIASHVMDPTSLQVDRRARRAKTDRLDAQALLRALMAWSRGERQVCSMVRPPSPEHEDERRLSRERGTLLKERLRLSNRIKGLCAAQGIYDYEPLGADRRERLARLVTGDGRALPGRLAAEIGRQLDCFELVLRHLAEVEAVRDARAAQAREEGGSKLATLLRLKGIGPELATVLELEVFHRHFANRRDVAAYAGLAPSPYASGGTSREQGISKAGNRRARKALIELAWLWLRHQPESALARWYRDRVGTATGRVKRIAIVALARKLLVAIWRYVETGLVPAEATVRT

SEQ ID NO: 435192 - protein, 411 aa, unidentified
MDAILERCAGLDVHQETVVACMLYGPLDVKPKKDTKTFGTTTKDLLLLFDWLTEHECTHVAMESTGVYWKPVWNILEGSFTLILANAQRIKNVPGRKTDVHDAAWIAQLLRCGLIDSSFVPPEDIRDLRDLTRYRRKLLGDATAEKNRIHKILQDANIKLTTYVSDVFGVSGRALVESLVNGEVLDPNQVKGLVKTKLKNKVPQLIDAMNGRIRMHHRTMIRMHLDHLLYLEKQLEELEQEIYKQVKPHREAIDLLITIPGIQMDAAASILAEIGNDMSVFPSEAHLASWAGVSPGNNESAGKKKSTRTTKGNKGLKSVLCQAAWAASKSKNSRLAAYYYRLVKRRGPKKANMALAHLMLRIIHQMLSEKVPYQELGRDYLPTKQRNVDYWVKRIQEMGYAVQIQETETAS

SEQ ID NO: 435193 - protein, 421 aa, unidentified
MKQKDNADRDDRYAAWVGFDWGDQEHVWALQWTDTGERERGRLEQTPEALDVWLGQLMSRLNGRRIGVAIEQKHGAVVWMLLKYECVEIYPVHPQAAGQFRQALYPSGSKSDPADGELLLELLVHHRDRLRPLEQDDEPTRRLLMLVEQRRHWVEEKKRHGNRLSARLKVYFPQVLNWFDDIGAAPVLDLLARWPRLEQLQKAQRKTLETFLRQHRRTPEEAAAWAKQVSAAVPAVQDSVLLDSYVLEVAALVALLKQMQTSIKKFDTAIAETSRQHPCWAIAQSLPGAGPVMAPRLLAAMGNGKRYQNAHEMQCATGIAPVTVASGRTRIIQFRRACPKFLRQTFHEWAQHSMKSCRWARVYYDQLRAVGKRHHAALRALAFKWQRILFRCWKDGIAYDESKYIASPKKRNSPLSTWLPE

SEQ ID NO: 435194 - protein, 452 aa, unidentified
MGQGNNGLSRGDANRNARLAGLRAVLPSDHAILGIDLAQSRQAAALTDHDSRVLARWRPRCSPWQLGDLLERALRSALSAGFSGVTVACEPTGHRWMIVQQLAAGRGIPLVCVQPLVVARAREAEDYTRGKNDDKDAVLIARQAAQLHCYLPEQAGVAWARLRHLGARRTRLIDDSSACMQQLRDLLEVAWPVVLGAAGEPLNSATWLACLGVALAGGDGDLDAVHAGGQRAFIDTARAGLGTWGAKRVCRRIAEAVYAALPDGAGVLAQRPGALERALSALRDWKVVRDELAVVNDAMLQLLGQMGLLEVAGSIPGVSALSVAAILAETGDPSRFSTARAMVKHAGLAPVDNSSGNRSGEAKISRRGRPTLRLAAWRAVWGALRHNSVYATRHRELISRAVDKLTVQQANAAIAAALIRQIHAIITARTPWDADVAAGRRRPGQQEAAKAA

SEQ ID NO: 435195 - protein, 344 aa, unidentified
MIYYAGIDVSLRTVNICVIDDEGELVAETKLASDVHDIVAYLDDLELDIESVGLEAGTLTQYLTYGLQAAGFEVICMEARQVKGALSAMRNKTDKHDARGIAQILRSGWYSRVHVKSMQSHHIRMLLSSRKAVLSKCVDLENEVRGLFKIFGIKLPPKLGHGAFDAAVRDIIEIDETLSHALLPLLDARLVLYRTFRVLDNRTRKMAHADPVCVRLMSVPGVGFITALTFKAGVDDPTRFKRSRTVGAHFGLTPRRFQSGELDIDGHISKCGDADVRSTLYTAANALLTRSARWSPLKAWGMKLAKTRGHRRAVIAVARKLAVILHRVWIDETQFRWGTEGARS

SEQ ID NO: 435196 - protein, 359 aa, unidentified
MIAIGVDVHKRQCTIAIEREDGELRCFGPMENTREGWRKLLGQLPAEAEIALEVSTSGYFAMSVLEEEGWRDRAHWVHTAGMESLRKQKYDRLDAQRLARKLAVRERDPLPEAWFPPVEIRALRLRARQRCWLAVMRTQVRNRVQSLLQMHGLRSPMTDLFGEAGRAWLKAQAMPEATQETLDQLLRVHDDLSQEIVQAESNLRAAGRGFPEVARLRTIPGIGEILAPLIWSEIGRLERFRSARALVNYTGLVPSLYESGEVTIRGGITHQGSAWLRWALVAAANSAVQGVNPFARRYRQWRRRKPPNVAKTAVARALAHCVYGVLRSGANYQAARWERRQAGRSRSWGAGQPEVAMGH

SEQ ID NO: 435197 - protein, 375 aa, unidentified
MSNHSEAFVAFDSSKLRNAVAIADSGRMGEIRFLGEIGNTATTTAKLVRKLAGKYERLTFCYEAGPTGYELYRQIKSLGHECIVVAPSLIPKKPGDRVKTNRRDAVSLAKLLRAGELTAVWVPDRHHEAMRDLTRARDTAVDDLRSKRQQISAFLLRKGLHYCAGKKTWSQAHLNWLMSQRFEYPEHRLVFEEMMMAMRQAQERLERLEQAMRAAVPDWSLADLVTALMAMRGIDLISAATFLAEIGDLSRFQSPSELMAYLGLVPSEDSTGDHIKRGPITKAGNRRARRTLVECSWSYQHPPRVGKDKQAKVAAAPQAVREIAWKAQSRLNRRYRALVRRGKLKTVAITAVAREFAGFIWAVAREATAARAAAK

SEQ ID NO: 435198 - protein, 369 aa, unidentified
MPHVTSIGLDVHARSVAAAAFNPFTGEVVHRDFGTDAAEIAEWALGFEEPRACYESGPTGFHMARELRALGLDCAVAAVSKMQRPAADARRKNDRRDAEFIARMLATHNIVEVPLPDAAVEAARDLDRALDDATRELRRSRQRLNMFLIRLGHVWDERNADGARRKAWTRAHWRWVSEIRLEGPQRDALEYYVTAARCAESDRRQLERRVVALAGTDRWRATVEALSCIKGIDTLTAFRLAAEAGSFSRFRSAPAFASWCGLTPSEHSSGESERRGGITKAGNALARTALIESAWHYSACSPKPKAPAPGTDVPPAIRSRADDCTARLHRRREALADAGKPACRANAAVARELACWVWEIGCRSEGTIL

SEQ ID NO: 435199 - protein, 322 aa, unidentified
MPEAILGVDIAKRKFDVALLINGKLKHKVFTNNQEGFEALLAWLQKQNVVHVHVCLEASSTYGDELATSMHDAGHTVSIINPARIKGFARSELLRTKNDKVDSGLIARFCLAMHPEPWTPVPPGMRRLQSLVRRIDTLISMRTQEMNRIDVSHESIRSSLSDHIAYLDKEIKSLKEQIAAHIKDDPELKTKRDLLKSIPGIGEATIAAILAELPMFERCDRVEKVVAFIGLAPRQFISGSSIKGKPRLSKIGNARLRKALFMPALVSIQCNPIIQTFYRRLKENGKNGKVIVCAIMRKLVHLIFGILKSGKPFDAYYTPYCA

SEQ ID NO: 435200 - protein, 344 aa, unidentified
MDIVIIGIDLGKNSCSLTGMDASGRVVLRRRMRRNSLERFTKGLGRCIIAMEACCGAHHLGRIFATQGHEVRLMSPEYVRLYVKSQKNDDLDAEAIAEAAMRPTMRFVEVKSQAQSDIQALHRARERLVSERTALISHLRALLLERGIVAPQGRRKLEEELSVFADEDGIEALSPRIRLLIEDLRAEWRALDERIAAFDGEFVRMARDDEAVRRLTKIPGIGTINATALAAAVGNARAFRRGRDMAAWLGLTPRQMTTGGKPRLLGISKRGNRYLRKNLIHGARAVLPYLVERETPLGRWARGLLARAHKNVAVVALANKLARIAWAILAHGCAYDAGYEMVSA

SEQ ID NO: 435201 - protein, 429 aa, unidentified
MNGNTQFAAYVGLDWEDEAHSICLLPADGGAAQQYELKHDPEAIATWAADLRQRFGGRRVGVCVEQSRGGLIYALMQYEFIVLYPINPKQLSDYRSALFPSGAKSDPNDAALLARFLCEHHDRLRAWQPEDAVTRGLRLMTEQRRKWVEDRVAKTNELQQRLKESYRLALDFCDGDLWTESFLDLLERFSSQQELQRASPRQLEKWLPKKRRRADDPPAEELLRQRIAAVRKAVPLTSDRAVLEHARIAITHLVVMIRALNRVIAEADAKIAELFAEHPDAPIFSSFPGAGKALAPRLAAAYGTDRDKFQGAEDIQQLSGIAPVTKASGKTRVVQMRWACPKFLRQTFHEFALASTRFSTWAKAYVTMRKAAGHRHQEIIRGLAFKWQRILTRCWKDRQPYNELRYLRRLRETGSKLATCLPPEPAITT

SEQ ID NO: 435202 - protein, 353 aa, unidentified
MQYVGIDWAYREAQWCALAAGGGIAGEGRIPADRDGLAHLVLRLGAEVKACVEMMSGAAWVCEELCACGWQVEVADARKVKAIAPLAAKTDKVDARLLAELSRRDLVPALWLPSLDERALRERLRRRMHLVRLRTSAKSRIFGLQTQWGVRVSLERLRRADGLALLEQAGLPDVWRRSISECLSVVDFLDERLEPLDAELIPFAHADPRAVLLDTIPGVAELLALTIAVEIGEVSRFASPQQLVSYARLAPRVRQSGEGRPRSGPLSKSGSRLLGWAAVEAAQQAWREANPWHELYLDVGRRAGNPNSAKAAVARKILSAAWHMLSRNEPFKPAPRRTRGTSVPATSPPPVAA

SEQ ID NO: 435203 - protein, 398 aa, unidentified
MTRKNTLKSLPTDTEFRVVGLDLAKSDVSVAAIPVDDNTPSLVDRMTYADLLDWAGKISPTLFAMEPCNGYSLLCLQLENLGHEIKVISGSTVSMWINTHLSGQKTDLNDAIALARLAVSDAELTPIRHKSITEIRIQTVQAVRQQLMSQRSKSIVSFKALAQQWGIPCAARHRNLKKLRESIEAKVDLITRPVANAMLFLLDAVKSLDRQIGQLNQTLQELVMSDERGRLLQSVLGVGTQISARVITVVGNVERFNSPRSLVAYVGVAPRNFITGHKNLTKKKHGNCPDLSHKGQGKISRRGDKLLRSLFIQGAACLYMQFCKDQLPECQLKRWILKQLAMQKPYGKLMVSLAAKLIRIVWAVLTYREKFSIQKAGMTRSMWSEMELEKPINKEVPA

SEQ ID NO: 435204 - protein, 470 aa, unidentified
MHAQSRARRHKRSGGTARQRQRFLEKVHLNAAGIDIGSTAHWVAVPEDRDERPVRSFTSLTHDLERLADWLEACGIETVAMESTGVYWIPLYEILEARGFEVLLVNARHVKNVPGRKTDLVDCQWIQQLHAFGLLRASFRPKANIATLRSYLRHRDTLVEGAAAFVQRMQKALVLMNVQLHNVITDLTGLTGMRILRDIVAGHTDPEQLAEHRDRRIHASKQQIADSLRGNYREEHVFQLRQALEFYDFHQAQIVACDQKIEAQLETLLTQCDRPDLPLPASRRLRKAANEPAFEIRTPLFTLCGGVDLTQLPGVGTYAALKLISEVGLDMSRWATEKHFVSWLTLSPNVRISGGKLLSSRTQPSANRAAKIFRLSAMSLGRSDHALGAFYRRLAVRIGKAKAITATARKLAILFYRTLTHKVLCPHQTAEDYDRRHRTRLLRSLRQRARTLGLQLIDPATGDVLGSEVS

SEQ ID NO: 435205 - protein, 331 aa, unidentified
MLKIVYPNCCGIDVHKTFVVAVIAITNNQGITEYHRKRFSTFTNGLTQLRDWLEYYSCFDVCMESTGKYWIPVFNILEEQTNICLAHPKYVKAIRGKKTDKKDAQWIADLFKHDLVASSFIPPLKIRQLRDLFRYRMKLTQLQVGEKNRYQNCLTWSNLQIASVVSDVFGKSAQAIIKSILDNPQDKPNIEQLVHKRMKNKVQDLEIAMEGALTPEQAEKIRVIKAHYDALAICKEDLEQMIREMGQDYQHQVKLIQTVPGFKEDLSALRIISEIGCDMTVFDSAAKLCSWAGLVPANNESAGKKFSTRISKGGKILETFPCSSRKRCCQI

SEQ ID NO: 435206 - protein, 424 aa, unidentified
MQRRKIKRMKSWQDLTHYAGFDWAKDHHAVLILNQQGEIVADFEFEHSLQGWNSFAEKTSAWPNLAVAIETSQGAAVDQLLQKDYTVYPVHPVAAQSYRERKAPSGTKTDHLDAWALADALRVDGHGWKTLQPMDPMTQQLRLLCRDEVVLIEQRTALVNQLQQALLEYYPAALEAFDDWTDSFTWEFLLAFPTPQALVQAGKRRWEKFLHTHKLWRPETAEKRLKLFAQADQFKASDPIVRAKSQLAVSLAKLLCTLGQQLKLYRKQIEALFRDHPDHDLFGSLPGAKQMLAPRLLASVGGDPHRYGGHEVLQCIAGTAPISYQSGKLNKVRVRWACDKFMRYTVHLWADCFRKASAWGQTYYQQKRQEGMTHACALRCLGQRLLKILYRMLVTKKPYDAEFHAQNQQKHGSWVLSLVKKSAT

SEQ ID NO: 435207 - protein, 414 aa, unidentified
MEKENKVRRYYLGVDWADEFHQVWVSAAEGKKVAEMTIEQSMKGLSEFGRWLHECKGEGIELWAAIEKPQGRIVDFLLEHAVVVYPVNPKALDRARDRFRMSQSKSDSFDAYVLAEFLRTDHVHLRALQPDSEQAQELKMLTRDHHRLGRHKTRLLNQIEVTLKEYYPRPLEVFSDLESQIALDFLQHYPTPRALAELTRRNWNRFAQREHRLGEQRCKELWEKLSQPQLKIPEHVVRTKAQLLLVLVIQLRSLAEAVKNYSEEVERFFASMPAAELVKTLPGGKSGTTVPMLWAELGDAKSRWQSFRHLQAEAGGVPVTKASGKSRVVQFRFACNKLLRYASYWLSFNSLNRCEWANKYYRDQRRKGHSHPQALRALAAKWLKIIFVMWRDHQPYDENLHLANIARQQMRQAA

SEQ ID NO: 435208 - protein, 346 aa, unidentified
MPIVDSSRPITGGVDTHLDNHVAAALDANGGLLGVESFPNSATGFVALHDWLRTFGAVARVGVEGTGAYGAGLSRYLQSCGLVVIEVDRTNRQVRRMQGKSDPVDAIEAARAALSGRAQGIAKTADGNVEAIRALLIAQRSGRETRGRCLNQIRHLGFTSPDSLREQFRNIPAAHLAERAAGLRPRADGDPVLHATKLAMRTLGRRALAISDDMHDLDDVLAELVTRTAPALLACHGVGVDTAAILLVAAGDNPERIRNEAAWAHLCGVAPLDASSGKHRRHRLSRAGNRQANHALWRIVFTRMGSDRRTRIYVERRTEEGLTKREIMRVLKRYVARETYQLLPRG

SEQ ID NO: 435209 - protein, 314 aa, unidentified
MNKDKEIHGVDISKDVFDVCDHQGSHHQYPNTLKGFKDYCSALNSNSLVVMEATGYYHYLLAQFLFDQGMAVSVVNPLSVKRFVQMKLSKVKTDKSDAKVNAVPLYDGKGEDQAESLQLLALMDIYLKQRTQIKNKLHGEKVLGIPSRAVHLSLVRSLKSLDRELEALQSRLLALVKKMQQRQLTNLKSIPGLGDKTVALLIILTDGFTKFENAGQLCNYAGITPTIRRSGCSVRGKSRISKVGNRKLRNLLFLCAFSACKHNKACREMYERITAKGKSKKLALIAVSNKLLKQAFAIAKSGIPYDENYVSRLA

SEQ ID NO: 435210 - protein, 459 aa, unidentified
MKSTLVLGVDVSKGYGDFVLLDTCKKVVEESFRLDDNKQGHDILKRQLLHWKKEHSVARLLLVTESTGGYEDNWLRVSKDKALCSFVESYRINAKIIFHEYEAQRRNSIDDGISALTIAEHVVKNLENFSVTKSFHETAYTPARSLVRHYASLQQERSSHKNGLLKLIYQYLPSLEAIKPSEWPSYWLEIFVRYGSRKSIQIAASKGFKQLKRVPNGKAKEIAEALANGIDVRHTPQMVVFAIRSKARQIKRINEELQEIKKMIIDQAPVDADQVDLLKSIKGMGDITPVILLSFIEEVSRFKDAKHMASFFGVQPRVKRSGDGSYKTKMSKQGAGLVRRELYLLAFRTLSQEPYLRAIYAKARAKRMVHDAALGVLMHKILRIIYGMLVSNTRFNAGIDQLNQHQTGAESKLQKQKKNAARRFQPASTVAPVSFRQRKKRKRDHELQADGISESTESS

SEQ ID NO: 435211 - protein, 315 aa, unidentified
MKAPVVYIGVDVSKDQLDVHVPEGKTFRVANTAAGVRRLFARLDGVDGTVQVCLEATGGYERLLMEACWLASIPVARLNAWHIRCYAQSQGMLAKTDRLDARMIAAFAAHRKPDPTPQPAAWRAELREIWTLRAHLILVRSGDTARLEHEREAICRRTVREHIGWLDRRIAKLEARAHAIIASQPEAAALVSRFRLVKAIGLTTAITLLVEAPELGTLGPKRVAALAGLAPMCDDSGHHKGPRRIQRGRFTLRRALYMSALVAARYNPILAAFYRRLISAGKKPKLALVAVMRKLIVLLDRIAGDPDFVPSGVPT

SEQ ID NO: 435212 - protein, 375 aa, unidentified
MKEKVRFLGLDVHAETIAVAVAEQDGEVRSLGTIANRAESIRKLVKKLGPVDQLRACYEAGPTGYVLYWQLAELGVKCEVIAPTLVPVKAGDRVKTDRRDAEKLARCHRGGDLTAVWVPDAGSEALRDLVRAREAAKQDQLRARHRLSKFLLRSGQRPAAGLKAWTQLYMAWVRQLRFEQVAQEWTRLDYLHEVEHMAERVVRLEQAIAEAVKLASPEIQEVVKDLQALRGIAQISAVTIAAELGNITRFESARQLMGYSGTVPREDSSGKRAQRGSITKTGNAHLRRIAVEAAWSYRLRPGIGPALRKRQDGVPEDLKEIAWKAQHRLHKRYSRLAAAGKDQRKIVTAVGRELLGFIWAIGVKAETAAKQRMAA

SEQ ID NO: 435213 - protein, 326 aa, unidentified
MYLIGIDISKFKHDCFIATETGLVIKDSFSFDNNQEGFKKFLNVLLSLDQTQEIRIGLEATGHYGTNLKLFLHENNFSFIEFNPVLSERYRQVSSLRKTKNDKIDAKLISKMLLSYDYKTNSSISYHILKLKSLTRFRKRLVKNRTVFKERLINILDIAFPEYSKHFTQVWGKVSFYILKNYPTAKDIANINVEEVMTNNFKTATIPGIGIISAASIVSEYEDFSKFQNPNQLLSFAGLEPAIYQSGTQQTYGHMVKRGSSYLRETIMNIIPYVMAYNSVFYEYYRKKKSEGKHHRVALTHLAKKLIRIIYHLETNNISFDSSKIK

SEQ ID NO: 435214 - protein, 392 aa, unidentified
MTICVGIDVAKDTHWACALDAGGRVLLNRAVRNTQADLDALSADLRAFPEPVQVGLDVDGSIATFLQALLLADGVALVHVPGLAVNRAAHGYAGGERKSDPQDARVIADLVRTRDGLRPIRPDDDATASLRLLVSRRRDLVQDQNLRMSRLRQLLSQVHPGLEAKLDITCKGPLILLTHYVTPAEIGKASAKAIVRHLRRTPNLRDPERLAELARDCAAQQRTAVPGEATIARLVREMAAEALLVRSRLAEVDKELETIVLAHPKGALVRSLPGMGAVLAAEFIATAGDITRFRSSAALAAAAGLAPVLRQSGHSRTLRRARRGDRDLKRILYQSAFCAFSTHPDSRAYYDRKRREGKHHVQAVIALARQRTNVLWAMLTHDKPYDPNHRAA

SEQ ID NO: 435215 - protein, 410 aa, unidentified
MAVLLLGIDWGDQKHDVCIMNEAGTVLASFTIPHSQEGLEQLRDRVRTLQDAETEVLCAIETNQGLLVNFLLEQGWTVYAINPKSADRYRDRTRTVRAKSDQLDGWVLADILRTDRHLHRPLLPDSELAREIRELTRGRDSLVQEQTRLHNQLKACLKAYWPEALSFLPDLLSLWALAFLLRFPTLEDAQKASLKVLQAFLRERKHPQWRTKAQEIYDTLRGPHITVPDYLVRTRSRQMQHLAKQLLTVVQDIKAYDEEIERLLKEHPDGQLFLSLPGAGPNLAARMLAEIGDRRERYATANSLQCEAGTAPVTRKSGKSLSVVSFRRACKKPLRQALHLFAGCSIRRCSWAHALYEQQRAKGKRHHEAVRAVAHKWAKIIFAMWQSKTCYDERIYLAARKQFLERSSAA

SEQ ID NO: 435216 - protein, 338 aa, unidentified
MDRQYVGIDFHRRRSVIVRVDGDGTKLASVRVPNDPSEIAAAVAEAGEDAEVIVEATYGWYWVVDMLDAAGHSVRLANPQGLNWGQRRVKNDERDALDLADMARLGRLPEAWIAPPATRELRELVRYRAKLVALRSGLKAQVHAVLAKEGVLPAVGDIFGPAGAAELAGIRLGANYQWRVTSLRRLIERYDVEVRSLERMIRAQLRGHAGYRAIQAIHGIGPTVAAILVAEIGDVSRFDSAAALCSWAGLTPKHRESDTKVVQGAITKQGSRLVRWALIEAISRYHGGPVLSATYRAIAERRGINKARVAIARKVLTLVYYGLRDGEIRCLQTPATAA

SEQ ID NO: 435217 - protein, 388 aa, unidentified
MFYLGIDIGKNFHVASLLDEHKNIIFQGFEFKNTTDDAKRLLEKLAPYSELEIGMEATGHYWLALYSFLVKNHFIVHVVNPIQTDSWRNSTRIRPHKTDKIDSLIIADFIRYGDFSDTELASEEIIELRNLSRFRFSLVSQIGDLKRQTICVLDKVFPEYESVFSDVFGKTSREILTLFRSPADFEDIGADKLQKLLERVTLKKFARKKLNELSLKAKNSFGITFGIQSLTLQLQLLIAQISFIEEQIYQLDTKIADLLKQINSPITTIPGVGAVIGATILSEIGDIKRFATPAKLVAFAGLDSKIDQSGTSQDSTGKMTKRGSPYLRTALFRAALVASNIDPVFKAFYQKKRAESKHHFTCIGAVARKLCYTVHAILSKNSPYEIFS

SEQ ID NO: 435218 - protein, 372 aa, unidentified
MGHNTEAFVGIDTSKLRNAIAIADGGRDGEVRYLGEFPATEAAIRKLVAKLAAKYRHLTFCYEAGPTGYGLYRLLKSLGHECLVVAPSLVPKKAGDRVKTNRRDAVSLAKLLRAGELTAVWVPDERHEAMRDLSRARQAVKKDLQGKRQQISSLMLRLGRIYPGKTTWGPAHMKWLMAQKIEHREQRIAFEELLEGIRQESERVERLEDAIREVVPEWSLAEVVAALQAVRGIDLIAAVGVLAEIGDLCRFQNPRELMGYLGLVPSENSTGDKVKRGGITKAGNGRARRILVEAAWSYRYPPRVSRDKQPKVEAAPRRVREIAWKAQTRLCGRFRSLERKGKRRTVIATAIARELSAFIWAINRELMAHRQA

SEQ ID NO: 435219 - protein, 342 aa, unidentified
MNLTTIGIDLAKSVFQVHGANEKGKAVLKKQLKRAQMLPFFANLTPCRIGMEACGSAHYWARKLQALGHTVQLIAPQYVKPFVKRNKNDAADAEAICEAMARPNMPAVPIKNASQQAILSVHRARQGFVKARTAQANQIRGLLTEYGIVIPKGISHIAKRVPEILEDGENDLPGSFRLLIGRLTDHLKELDRQVGELEVQIQLWHRDNSASKKLEKIPGIGPMTASAMVASIGDARNFKNGRQLAAWLGIVPRQHSTGGKSTLLGISKRGDTYLRTLLIHGARAVIRVSERKPNADPWLKNLLARRHKNVAAVALANKNVRTIWALLAHDRDYEPGYARVAA

SEQ ID NO: 435220 - protein, 368 aa, unidentified
MQELITGFVGLDAHAESTAIAVAEAGRAAPRFVGSVGARLSELTKALSKLGAPQSLCVVYEAGPCGYGLARELTSLGYRCEVVAPSRIPRRPGERIKTDRRDALNLASLARAGELVPVTIPDERDEAIRDLSRARVDAVRARLKARQQLKALMLRHGQRYSGKTSWSAAHERYLARVSFAHPAQDIAFTEYRQAVGEGEARVQRLRESLTREVEHWRMHSLVSAVMTLRGLDLVAATTVVAELGDLRRFAHPRELMGYLGLVPSEHTTGSKRRLGAITKTGNGHVRRVLIEAAWNYRFPARISPALQMRQERQPPDIRAIAWRAQLRLNHRYRRLKARGLHHNKICVALARELAAFVWDIGRHVAPSP

SEQ ID NO: 435221 - protein, 408 aa, unidentified
MQVVHQRCAGLDVHKDSVVASARWMRGARVHYEVAQFATTTRGLLHMADWLQERRISHVAMEATGVYWKPVWHVLEGRFQIILVNAAHVRNVPGRKSDVNDATWLSDLLAHGLVRPSFVPPTQVQELRDLTRTRKQLVREVSKHTLRIQKTLEDANIKITGVVSDLLGVSGRAILQALIAGESDPERLLACTTGRLTAPRARLLEGLTGLVREHHRFLLRLHLEQIQALHHGIAQIEEQIARLIDPYSQQILLLTTMPGVSTTVAHTLLAEIGADMQRFPTAGHLISWAGLCPRMDESAGKKRSTRIRRGAPWLKTVLVTAAWAAVGAKDTYLRAQFHRLKARRGPKKPIVAVAASMLTAAYHILRDQVPYHDLGGQYFDQRDRSSVLRRLKHRIEALGYHVEVRPAA

SEQ ID NO: 435222 - protein, 367 aa, unidentified
MEYYTTIGADVSDRTTKVCVMTKAEGGERRIVVETTCATTKAGFEEAFAKFDRSWPVVFETGTHCRWMDRLFRKMGFKTIVGNPGKIPSITKSNTKNDRNDARELARLALADPAMLHPVFLRDEVYQQMLRFHHARNMLISQRTQTINQIRGFAKSMGHRIECSSTEKFHEQGKADWPRELEECAWPLMGSLKTINLKIKAYDRLIERLAERPECKQMGERVRVVYGVGIVGSTVFVAAIGGRPDRFDHARDIGAYLGMIPKQDQSGDDDKQLHIVGGRRQAAAHHPCGVGHRPHGARGVRGRGDDVERERHGPQAQGASHCDARRENRKEEGESRRGEGACRDDARHAAAPRAGVRPAVGGRQEGI

SEQ ID NO: 435223 - protein, 409 aa, unidentified
MSNNVAAIDVHKKLLVVVVADTAQPDVILQARRFGTGAAELHHLACWLEELGATEAVMESTAQYWKPVWMELETRMRLHLAQAQSNRAPKGRKTDFGDTKRLLKRFVAGELMLSFVPGTEQRAWRMVTRGRLQLVRERVHLQNQIESLLEEGRIKLSLVISDLLGASGWRILRAMAKGETNAETLAELGDPHLRCGREGLVDALTGSMSDIHRQLLKQHLDRIELVDRQIEELNKLAAAQMQEHQAAVVRLIEVPGIGAEAAQEILAEIGPAAATFPSAAQLASWIGVCPGSSQSADQNHSGRSAKGNRFMRRLLCQAAHAAARTKGSYLEALFKRLIVRLGYVKAIWAIAHRLCLIAWNILHKGVRYVEHCEAVNPKAVKRCINHHLKALRRLGYKIPATAPTITLTR

SEQ ID NO: 435224 - protein, 353 aa, unidentified
MDGQAMQNEVILGVDTHLDLHVGAVISGTGKLLGTLATATNASGYLQLLAWARSLGCLRRAGVEGTGTYGAGLARTLCEQGIEVLEVNRPDRSKRRLKGKSDPTDAESAARSVLSGQAAAIPKSHTGAAEAMRTIAVARRSAVKAKTQAINQLRAILVSAPQEIRDRLWKTKAEQCVAGCAHLRPLGSTTLLLALTSTLRLLAKRWLMLAAELKELDAELEKLTTQFAPHLREQFGVGPLTAATLIVVAGDNPERLRSEAALAALCGVNPLPASSGKTVRHRLNRGGNRQANNALWTIAMVRMRSEPRTLAYVQKRTMEGMSNKEIHRCLKRYVIRELYPYILADLGATAGNH

SEQ ID NO: 435225 - protein, 391 aa, unidentified
MIYVGIDVAKDKHDCFITNFDGEVLFKAFTIANNLDGFNDLYQKIVSVTEDITKVKVGLEATGHYSYNLLGYLIDKSLPTYVINPLHTNLYRKSLSLRQTKTDKVDARTIASMLMSDVNLKSYSDISYHNEELKSLTRYRFDKVKERAKLKSSVSRLVCILFPELEKLVPTLHMASVYSMLSEFPGAKHVASAHLTRLTNLLSEASKGRYSKDTAITFREAARASIGSNMPAKSLELKHTIKLIQELDSEIDEIENEIKVIMDEINSPILSIPGINYRMGAMIIAEIGDFSRFDSPDKILAYAGFSPSTYQSGQLDGAYAHMEKRGSRYLRYALYNAAKYVCHWDPTFAGYLAKKRAEGKHYNVAISHAVKKLVRVIYHLEKTKQQYIKVA

SEQ ID NO: 435226 - protein, 343 aa, unidentified
MEIRSVGIDLGKTTFHLVALGDNGKVLLKKKFTQRQLIAFTANLQTCLIGMEACSGAHFLGRTLREQGHDVKLIHAQFVKPFVKSNKNDFIDAEAIAEAVDRKNMRFVPIKTDDQLDLQALHRVRDRLIARRTSVINQLRAFLLERGLVFAKSPARLRERMPEILENADEDLTPRMRNLLALLWNEWKDLEQQLVDLNQEVERIASSDAACTRLRQIPGIGPLVATAIVAAIGNGAAFRKGREFAAWMGLVPKQYSTGGKAKLAGISKRGNRYLRKILIHGARAVVLRSKRDRIAMGEWMTALEARAPRNVLIVAMANKLARIAWAVLSSGQDYRAVQEPVAA

SEQ ID NO: 435227 - protein, 385 aa, unidentified
MKEQNFVPREFDIFGGLDVDKKTIAVTFMNQEGILRSFSVPYRAEHLLNYVSKHFAGKKVAFAYEAGPTGWGLYDRLTAEGHPCVVAAPSMIPKVPGQRVKTNRLDSQKLSEHLRGGQLKSVHIPSEPYRQLRHLTQLRDTFVKDVVAMKLRIKGLLLFEGIEFPPAPPGSQWSFLVKDKLRKLSCSASVRFKLDRLLESLEYSEKQALQTIKEIRRFYKQDAELCQAMAHLKSIPGIGEIVASHLLARIGDPQKIGNVRQLAGFIGLAPSEHSTGERIARGRITRTGDGRLRSKLIQAAWSAIRQDAELREFYRSVSQRHPRDRAARKAIVAVARKLTTRIYAVLKQRRPYVVREKVHSAPLTQEETVPQGTTRRLAEPGETLS

SEQ ID NO: 435228 - protein, 327 aa, unidentified
MMFIGIDISKEKIDLSWLRDQLTNKIKTKVFKNKHQDFEKIEKWLLNTTKSVASELVITLEPTGVYHEALMYFLHEQGFNIILANTGKAKKYADALNIIHKTDKSDATMLAHYGCAKHAVVDYWQPEALEVRELKALIRRLDALESNRQREANRLEASEFSNVSARVRQSIKVTIAFLDDEIKQLKSDIDDHIDNEPGLKRNRKLLESIPGIGHVLSRELTYLFAAKKFNKAKEAAAYCGLIPRHNESGKLKGRTSISKLGPARIRCKLYMAAIVAGQWNKRIKRHKLTLINNGKTPMQAVCANMRKLIHICFGVIKNQEAFKLQVS

SEQ ID NO: 435229 - protein, 428 aa, unidentified
MSARGTVQMEPEFVAFVGIDWADQKHVWCLQKANSRQREAGELQHRPEAVEAWVGELCQGFGHGPIAVAVEQVKGALVYMLSKYECLHLYPVPSTMSASMREALYPSGAKDDPRDADLLLELLVLHRDKLRRLTPDHEATRRVQNLVEEGRKLVEEKTAQLNRLTGYLKVYFPQMLEWFAKLDSKLACDFWERWPSLEELQAVPAGEVKKFFRHRPGRQGELTEWRIQGIRQAMPAIRDRAVIEAKRTVVQVIAQLVRTLLDGIATLDGKIAEAAEAHSDFFIFQSLPGAGAALAPRLLAALGSQRDRYPSATEVQKYSGIAPVTERSGKKKWVHFRWACSKFLRQSFHEWAGHSIAQSVWARACYHRQRERGKEHHAAVRALAFKWIRIVFRCWQDRVAYDETRYLAALAKRGSHLASAFTGATVSM

SEQ ID NO: 435230 - protein, 397 aa, unidentified
MYIVGIDIAKRKHEAAVIDGEGTVIIKPFSFTNNCSGYNRLLAMLAKAKLPLDEVSFAMEATGHYWLALFTRLQKEGFRVQVINPVQTNSIRNFYIRQAKTDPRDALLIAEVIRFGHFSESTLHPENIYELRELCRGRHAIVSMQADVKRKVVALLDQVFPEYETAFTNLFGDTSMAILQACPTPKELSEMPLEELCHLIEVPSRKRFRMEKAQELQALARNSFGFAMAGDVFSTMIRLYAKHLDFLKQQVREMDRKIAEIMETLDTPITTITGIGPTLGAYILSEIGDISRFPSAAKLAAYAGIDPTMRQSGEYNGVRNRMSKRGSPYLRHAIWLAASSAVLHDPALKLYFQKKRDEGKPYMASVGHACRKMVSIIYAVMRDNKAYTPCIPNEISA

SEQ ID NO: 435231 - protein, 486 aa, unidentified
MSGASASRRRPSKDNTRASQSKTNDKGGPTVERQYVGIDLHRRRSVIVRRTPAGETLETVRITNDPVALALELAKAGPDPEVVLEATYGWYWASDVLQANGANVHLAHPLGNNWGHRRVKNDERDATDLVDLLRLGRLAEAWIAPPELRELRELVRYRAKLVALRSGLKAQVHAVLAKEGVRVPMSDLFGVAGRALLDTCELGRAYTTRVESLRDLIELFDREVGMLEGLVNRQLAGHPGYRAVQAICGVGPVLGAIFVAEIGDVHRFPAAPQLCSWAGLTPAHRESDTTVRRGHITKQGSRLVRWAAVEAVQRQRGGTFLQAHHHRVADRRGKGIGKVATARKLLTLVYYGLRDGEISKLDRELSKRIGDLRRALDASITELHLQPENVERVVRTALGLARQPDLVESTVDRAGRAVRVFTLPRLTGSWARAAEGLAHPVTGKVRPVTFDHKVASDHDDVVLAHLGHRLVQQALWLLRAEIRRIG

SEQ ID NO: 435232 - protein, 357 aa, unidentified
MDYRIGCDAHKHYSQFAVLDQDGRLLAQHRVDHAPGAVRAFLETLPEGTPVALESVGNWYWIADEIEAAGCIPLLTHAARAKVMMGNVNKTDKLDAKGLAKLLHLDSLPTVWLPPGEIRDERELHRTRMALSKLRTALKNRIHATLAKYGITNTEHSDIFVGAGRAWLKTTLSQLPPETGRCVAQELEALDGLRLQIAQLEDRIRDRVAQTPSIQVLKTLPGVGDILAIVIEREIGCTDRFCTAGQLASYAGVVPTVHASGGKTRFGHMRKPSNQYLKWAFIEAANVVVRHRRHPAWKTKYVCRVYNQVCQRKGHAIAVGAVARHLAEAAFWILKRQQTYRPPAVRQAFPKQVQGRA

SEQ ID NO: 435233 - protein, 366 aa, unidentified
MTSLALAAEWIYLGMDVSRDKIAVAVLRPGEDVPAVEVISHDGEMVRRLIGKFADRSVLAACYEAGPGGYELYRLLTSMGVACDVVAPALIPKAAADRVKTDRRDSVRLALSHRAGLLTAIRVPSEQEEAVRDLVRTRADLVDDRKRMMQRVGALLQRHGRVWRAPRWTYEHRAWLDRQSFAEPALQAALRTYLAAVDARDAELAVLESQLRGCWASVDPLAQMVRQLGCYRGIAELTGLTLAAEVADFRRFPSAPAFMGFTGLTPSEYSSGARTRRGGITKAGPQLIRSTLIEAAWAYRHQPAIGAGLRRRQAGCAAETLARSWKAQQRLHATYAKLTRRGKIPSVAVTATARELAGFVWAEMTS

SEQ ID NO: 435234 - protein, 412 aa, unidentified
MQVVHPVCCGIDVHAKMLVACLILANGEKKKRTFSTMTAELLQLRDWLVAVQCTHVALESTGVYWKPVFNILEDALTVILINPEHAHALRGRKTDVKDAEWLADLLRHGLLQPSFIPPPVIRELRELTRYRESVVGEQSSVANRIQKLLESGNLKLGQVASDALGVSGRMILKALAKGESDPRKLAALARGKLKEKSLSLEQALQGRLTGNQRFVLGELLSRWEQLEAADARVTSEIDKYAQANPKLARARELLDSIPGIGPRVAEVIMAEIGIEMASVFADAAHLASWAGICPGNKATGGKRLSGRTRKGNTYLRSALVQAAWGASLKKHCYLSSQFHRLVKRIGRKKALVAVGHSLLVIIFHVLQDDQTYTELGGDYFDRRHVEQQRDYYVRRLQMLGLKVTLEELPQAA

SEQ ID NO: 435235 - protein, 341 aa, unidentified
MDKELYFGVDVSKKTLDLAYYDGEAIDWKNAHIKVSNDDSGFKKIGSWIAKVGKDFGTFLFCMEYTGLYNQNFRLWLESQKYIYGMVEPRKMHHFEPDLDDDQRSLDRIKTDELDAFRIAIYCEQNHKKILRNPSKLPSPVYFKLKRLLAERKQNTKQSTLYKQQLHDICAYDTDLSVERKKLQLKNMQENQKAIDREIDSYMNEDASISKNYDLLTSIPGIGRIIALETIVLTENFTAISNSRKYACYIGIAPFKKESGTSVRKRTSVSKKGFSEAKADLSIAVLSAIKNNPSIRDYWIRKRKEKCGGIVLNAVKFKLVLRMFAVIKRGTPYVETDAYKN

SEQ ID NO: 435236 - protein, 360 aa, unidentified
MKGKNQSKQIAVREKEVFVGIDVHKESWQVTVRMEGEEVFHGRIPGQYPVLRKVLDRFRGGRMKVAYEAGPCGFGLHDQLREDGVEVIVVPPSLVPIESGNRVKTDKRDSRKLARLLEGDLLKKVFVLTEEEREHWELLRTRQQLVSHRGDVARQIKSKLLFHGISSPFPNKYGWTQKYVQWLRGLSFSSPYLKEALEIMVDLHEYLTRQLMKIHRKVVELSRTSKYSGRAKLLRTAPGVGLLTGMEVLVELQDMGRFQSSEEVASYLGLTPSEYSTGEYTRQGRITRCGNWRVRTALVESSWILITKDPGMRSVYLRLKRLKGSKKAIVAIARRLIIRLRSMLLKNMPYRMVTPAAQQG

SEQ ID NO: 435237 - protein, 353 aa, unidentified
MDSKKYIGMDVHKESISIAVRNAAGKIVMECVIETKASVILDFIHGLRGELHVTFEEGTWATWLYDLLRPHVTKLVVCDPRKNSRQGNKNDRIDARELADRLYMNKLSSVYHGGAGVRTLKELARSYLTISKDLARVMTRVKAIYRSWGIPCAGKQVYAPRHRAEWLAKITEVGVLRRAQFYYQQLDALRSLRHEVRRELLAESKKHKATKLLCQIPSIGPIRAALLIALIQTPHRFRTKRPLWKYSGFAIETHSSADYRNVKGQLERTKKQISVRGLNRDCNHDLKNLFKGAATIASVKPGPFQEFYAALVAKGMRPEMARLTLARKIAAIVLIVWKKGVSFDAQHLKSQTA

SEQ ID NO: 435238 - protein, 420 aa, unidentified
MSFKIFKFNCCGLDVHKTWIYACIGITDSNNRTEYKQARFSSFTKGLNELCDWLAKYNCKDVCMESTGKYWIPVFNILEQHSFWVTLSHPKYTKPMKGNKTDRKDAKWICDLYMCGMVKPSFIPPADIRELRDLVRYRFKLTCMITGEKNRAQNCLTVSNLKLDDVFSDVFGKSSRSITEHILQHPGEKFDIAPFVDSRCKTPITEIQAAVDGAISKEQVVKLRQCLDHIDELNKHISEVEQEILRLSDKYEAALNLIRTVPGFDKNPLTAIQVLSEIGGDMSVFPTAKHLVSWAGCCPRNDQSNQKIKSTRISRAGSYFKPILVQVANALIKSKKHSEFTSRYKRIKARRGHKKAIIAICRMILTAIWHILTDLKPYTPEGFLESRPVNEAKVLTASQALNLMRQRGYIIKDDMSPVMN

SEQ ID NO: 435239 - protein, 345 aa, unidentified
MNCFCGIDLGAKRSQVCIIDDEQKVLVNRKVANDINVIHKLIRPHGLVPTVIESTFNWYWIVDGLQNRKIPVTLAHSLKLAAISSAKVKTDKRDALVLATLLRAKMIPESYIYPAEDRPLRDLMRRRWDAVALRADEYRKMRGLLYRNGICTVGTNEVRLMGEEQVKELLDHPLIRTQMLFNIERVELLTRQVSCMEKEILSQVKGRQDFTNLMTIPGIGKVLALTILLEIGEISRFAKSRHFASYCRVAPGCADSGDSHRRGRGNKQGNPYLKWALTQAAEYAKRFDSHFAAYFAKVLHKHPGASGTIITHCIVAHRIALAVYHVLRHGVPYDQEKTFRSNPDS

SEQ ID NO: 435240 - protein, 330 aa, unidentified
MKKWEFTLGVDVSKNTLDISCSELNEHVKIKNGTEGFTVFLKWCKHFKIDLKQSFLVMEFTGGYEYKLIQFCESRGILYTRIPGLAIKNSLGITRGKNDKVDSSRIAQYGEEKNKSLTPSRPLNPAIVSLKELLSFRKRLGRENAGYQATIKERIHMYGGNKKDIIVKKLEQKLKENIKNIAAIEAEMLNIVAQDEKISINYSLITSIKGIGKINGLMTIAFTENFTSFTNPRSYAVYVGVVPFDHSSGISIKGRKRVSHIANKELKQELNQAARSAMEWDKEMRSYGEEKLKTKCYKIVLNNIKFKLILRMFAVVKRGEIYVENYRNVA

SEQ ID NO: 435241 - protein, 466 aa, unidentified
MENNYILYVGMDSSKGKADAAILKVSDRRSVKPKFLRKKLSFKFVKSEVTSLLETVRSYSDDNCTSICFALEVTGIYSTNVYNFIKDNLNDNESIKFLNTDFVNQWRNAHNIAKSDPLDAQTISTIIGTDSDVQYVNDNVFENKNGYQDLKALVHRHYQIKKIYSQEINRLIAQCDCLFPELQYVFEPKSAAFIAVLSSYPTTHDIINASRLEVFNVVYEATKHRCSMDKIDKLFDLCHDTLVPDNISSYGRSIILDLVENIKNIKGQLKMIERYIRDVASLNPAYKLLLTITGCGPLTAATVIAETGDIKRFKNADCFVSYSGTSPRNKRSGTSVETMGKISKRGSRYLRHAIYMIAEFARRHNPVLKQQFERIKNGNKKRHKLANIAIANKIARYIYSIMKNESGFVIFHEHIMRLPEETQNTFFNSISLDFPENTRKQIYQYSDIDGEVHKFVYTKLEETMII

SEQ ID NO: 435242 - protein, 366 aa, unidentified
MAQRAKETAMHEDKDIILVADYHAENIEFRWFNQATGEERTGKFPTSQAGILHLIDQATQELEPGGQVVWIMESTTGWARVKDLIGPRAKFLLANVLQMPLPPKARRRKTDKIDTGRIMREYLHGSLPLSFQPEVWWRRLRRLVDLRQDLVERQTAIKNWIGSLLHHETWQNRKNLWSDCGLRRLRAMRLPAEDRVLVDLKLDQLEQLEQELVQVEAQMRHIYDAWPEAQWVDEVRGIGMVTAVSLLAHIGPIGRFPTAEDLISYAGLAPGMWQSDGTCHHGRIGGGGTDSHLRYLLIEATMWLRQIPRYRPTYERVVKKRGKKIARIVVARLLLWSLHKMLTERVRFNAMPRPTAKETATAGCSK

SEQ ID NO: 435243 - protein, 362 aa, unidentified
MPNGMRWVGLDVHAHASTLAVFDDVTGEVITRRVNGRPLEVLDVLHRLPRPVRAVYEAGPTGYGLVRRARAEGLEVVVCSPGNIERRAGDRIKTDKRDAIRLARLFAAGDLRPVWVPSEEQEQLRDLVRCREDLRADLMRARLRLAAFLLRRERYLAGPGERRTLRHRHWLSQQRFDDAASRVTYADYLHAHDVLLARRELVARELERIAPSCVWGETIARLRCLRGINTLTALALCAEIGDWSRFEHRDSIAKYVGLVPSEHSSGQTRRPGKITKAGSTHARRLLVEAALHYRLAPAVGGKLAIRQRGQDPAVIDQAWRVQRRLHARWKLPREGRGKPAGVVTIAIARELIGACWEIATAT

SEQ ID NO: 435244 - protein, 343 aa, unidentified
MEHYVGIDVSLEESSVCIVDATGTIMREVKIASEPEALVHYFDELELSVIRIGLEAGPLSQWLHAGLVAAGRDAVLLETRHVKAALSAMPVKTDRKDARGIAQLLRMGWYRPVHAKSVTCRDSRALLVGRKLLQGKLLDVELSIRGILRGYGLKVGEVSRGRFEARIRELTAGHVTLETVIGAMLAARAALWSAFTKLHREMLKIARVDKVCRILMSTPGVGALVALTYRSAVDDPTRFGKSSTVGAYFGLTPKKYQSGETDRDGGISKVGDAMVRTALFEAAHIMLTRATRFSILKHWALDVAKRRGMKRAKVALARKLGVVLHRMWVDATEFRWSKATTMA

SEQ ID NO: 435245 - protein, 302 aa, unidentified
MVESYIPLGIDISKATFHVALLKGQKQSKYQQFTNDDEGFTKLSQWLEQQGSDRVHGCLEATSIYGHALALHLYQQGHRASIVNPMRIKGYAKSQLTRTKTDRADAKLIAQFCRDLKPAAWQPSEAEVVTLQAYTRRLGALEQMLPQEKNRLKISPDELKDDIEVHLAFLKEQVKSVKKRLLKHIQSHNNLKEQHSLLTTIIGVGDDTAARVLAEIGAIEHFDSARQLAAFAGLTPQEHESGTSVKGKTRLCKIGNRRLRKALYFPALFLLQRCPLAQTFRERLLAAGKCKMQDASGRSIDA

SEQ ID NO: 435246 - protein, 438 aa, unidentified
MSNKVIFNLDELFISVGIDVGADFSWMSIALPNQQFVGKPYKILHNSIDSLTTAVSKIKEAEELYSLESRIFLESTGIYHYPLFCYLRDKGFNCSVINPIITKNSTNINIRKVHNDRFDSKKAALVGLKPDLKVSLMPSDLALNCRNLCREYYDLMDNRSAYVNKLQGELRMAFPQYLGIFSKVTVNTSLTLLETYTSPSAFLEADKQEIIDIIKSTARFGLTYAQNKYNAIIQAATDANQFGYIIDSNIKRIRLYISFIRKYDEEINSILESLHELVDANEDSDFVKQIHLIETFKGAGFLSAVSIMGEIGDFSAFSKPKQLFAYFGLDPAVKQSGKFEGTKVQMSKRGSAIARRVIHTLTLQSISISRNGEAKNPVLREYYIKKCDSKPKLVAMGAVSHKVCNMIFAILRDNKPFKIIAPQEHIKQYNAAKCDIAA

SEQ ID NO: 435247 - protein, 347 aa, unidentified
MKFYTNQHKYYCGIDLHTKKMYVCILDEKGEIREHRNLNTDRDAFLKAIAPFREDIVVAVECIFTWYWVADLCHNEGIPFVLGHALYMKAIHGGKAKNDKIDSQKIAVLLRGGMMPMAYVYPSKMRATRDLMRRRNHLMRKRSELFAHIQNTNSQYNLPDSFGCMARPKNRDGIIEQFEQPSVQQNIAVDMEMINTDDSILSQLEKSIIKLANNHDPVSYALLQSIPGVGKIIALIILYEIENIRRFASVQDFVSYSRLVKCAKESNGKKCGSGGSKIGNAHLKWAFSEAAVFFTKGNDPAKKYLDRLTTKHGKSKALSILAHKLGRAVYFMLKNKEAFDQKKFLNV

SEQ ID NO: 435248 - protein, 343 aa, unidentified
MQITTIGLDLAKNVFQVHGVDATGQVVVRKSLRRSQMLPFFAKLPPCLVGIEACGTSHHWARELIKLGHEVRLMPPAYVKPYVKRGKTDAADAEAVCEAVTRPTMRFVPVKSLEQQAALSIHRTRDLLVKQRTQLINMIRGLLAEFGVDIPKGLERALLMARQIVDGKAPEVPFEAAKIVGTLSQQALDTHVRLREIDRDLAVWLRGNDVARRLMTIPGIGPVGATALAASVTDPHQFRSGRQFAAWLGLTPLQKSSGGKERLGRITKMGDKYLRKLLIVGMTALVHRAKQNPEFNPRLADLLARKPTRVATVAMANKTARVIWAIMARGETYRAGHRPALAA

SEQ ID NO: 435249 - protein, 360 aa, unidentified
MEIYRTSVGLDVHARSVVACGLDRSTGEVFERRLTPDYREILEWVGSLPGPAMVTYEAGPTGFGLARSLVGAGIECVVAAPSKLQRPAGDRVKTDVRDARHLARLLHLGEISAVTVPSVEQEAARDLVRAREDCRGDLMTLRHRLSKLLLRQGIVYYGGKAWTGKHELWLRTHRFDVRGLQLAYDTAFDAMLAALDRRDRLDEAIAEMAADSEFTPVVTRLGCVRGIATLTAFGLATEIGDWHRLDGRSIGAYLGLVPTENSSGASRSQGGVTKTGNGHARRLLVEAAWHHRTRYRPGPELRKRWDAASPAARARGQAANRRLHARWARFDERKKRSVVANAAIARELAGWCWSLAVLDD

SEQ ID NO: 435250 - protein, 434 aa, unidentified
MQVTRGMRRQSMKLVRRRGRLPVDALIAGVDLAKKESVVVFSRAADRGRLAKLTIPTDRTGVERLVARAAELRERHALGELVVAMEPTSHFWKIVARALEAAGVRYVLVQSFVMAMSRELDNLTRDKTDARDAGLIADLTAELRFTDTQLPEGPWAELELLAEARDGRVVERGAALQEQRALLELVWPELLRDCPDLAGTHLQALLRTGLTPQQVSASSEARFLAGLRRHHPRRFLRWMGRRLRAAASRTEATPETAGAALRWRLAAERVALAETAIADLDARMAELLEATDYGRLRGQIRGLGDVGLTNLLALTGNPARFDDGRCLVKLAGSNPTERSSGERQASGGIHRRGRPTLRVVAYQAAISLARYNPDFRARYLELIAEDRPRRLTKKQAYVALANKLLRTLWALAVRGAPYRSEIARGEVRPQPIAA

SEQ ID NO: 435251 - protein, 428 aa, unidentified
MNKAENIRLEEFRQLKKQLRGAKDYLIVGIDLAKDTHNSFFGTPTGKTLLKRLVFENTIEGFERLLIQADALKVQHALKKTVFGLEPTANYHKPLGEFLIKAPHMVVLVSGVAVKRNRELLDGRWDKHDTKDSANVADLISQGKCLFYEYPSMALRELRSLLSLKKRLKKQEHGLKVRIRNHLLAIYFPELDRYFGQSESDSLEIIKWCLNPSVIAGLEYEQFLQMVAPQKRRICQQNRLKAIWKKAVDSIGCDAGESLEFEAKVMVEGLRQVRESISEVSDKIEDICLQFPEYSYLLTIPGFGPDVSSKVIGAISNPFRFNSGKQVLKMAGMDLSANRSGKNSDSAIPVISKKGKADLRYALYQAALIASIRDRYFIAYYTNKLRGREKEKGIKTKMRVKLAAKLLIIAWTLMKKKERFSPDYLKID

SEQ ID NO: 435252 - protein, 431 aa, unidentified
MKYKQSKKQNQRILQITESTLVVGADIAKETHVARGIDFRGLELGRDCVFHNDQAGLSKLVTWMKELQRQHAKADVIFGIEPTGHYWFTLAEFLRNEGIKLVIVNPHHVKKSKELEDNSPTKNDYKDAKVIADLVRNGKYSEPHLPKGVYADLRILMNLREKVMMNFGQVQRRIQNWLDRFFPEYRQVFKDWEGKASLITLREFPTPQEIITLGSFAILKRWKQDVKRAIGIKRAEKLVQAAKASIGIQEGLSAAKIEVKALLEQYEMFSRQLQDIMTQVEQLLKQIPGTEEMLTIPGVAIVTLAGFLAEVGELQGYEHGQQIIRLAGFNLKENSSGKKKSKSTITKRGRSRLRALLFRAVLPMVTKNAEFKALHQYYTKRSHNPLKKKQSIVALCGKLIRVLYTLGTKCIRYNAKDVLGPVRQSQLQMAA

SEQ ID NO: 435253 - protein, 378 aa, unidentified
MEEVSTAFVGLDVHADTIAVAVAEPGGEVRSHGVIPNRIESVRKLIGKLGPARQLKACYEAGPTGYVLYWQLTQLGVACEVIAPSLVPTKAGDRVKTDRRDAEKLARCYRAGELTAVWVPDAAHEALRDLVRAREAAKKDQLKARHRLGKFLLRHGRRPEGMKAWTKQHLEWIKTHVRFDQPALEATLLDYLHEVEHVAMRIVKLEKAIDEAVQTAPMEIRTVIEALQALRGVAQTTAATIVSELGSLSRFQSPRQLMGYSGLVAREHSSGNRVQRGSITKTGNAHLRRVLVEAAWAYQHRPNVTGFLLRRQKSLSLSDEVKQIAWKAQHRLHKRYKTFAARGKNKNQIVTALGRELLGFIWAIALNTEQKHKLAIAA

SEQ ID NO: 435254 - protein, 314 aa, unidentified
MTTPNEVFVGIDVSKATNEVAIFAQDGVESFANNPTGHRALANFLEPLEPTLIVIEATGGLERDLASHLLETGFAVAVVNPTRVRDFAKALGRYAKNDPIDAHTLAHFAQAIRPEVRQLQSAQEAELLALVRRRRQVVANIGQERNRLHTVPAKAKKYIQDHLAYLQAQLQVLNAEIDALIQAIPQWRQKAQLLCSVPGIGPVNAFTLLAELPELGSVSRQKIAALAGVAPYDKDSGKKKGRRKTFGGRYGVRSTFYMAVLAAIRHNPIIKRFYERLIKNGKEHKVAMVACMRKLLSIANVMLMRGEAWRSAAN

SEQ ID NO: 435255 - protein, 392 aa, unidentified
MMVSVGIDVSKDKHDCFIVNSEGEILADVFTIPNNMDGFHYLLQRIQDCANTQNKIKVGLEATGHYSYNLLGFLLDNGLPTYVLNPLRTNIYRKSLSLRKTKTDRVDARTIASMLLSDVGLKPYTDTAYHNEELKSLTRYRFDKVKERAKLKSSIARLVCILFPELEKLVPSLHIASVYALLEEFPGAKQIAAAHLTRLKTLLETASKGHYKRDMALEIRDAARNSIGSWMPAKSLELQHTIRLIRELDDEIAEIEKQIQAIMDELNSPITTIPGIGFRMAAMIFAEVGDFTRFDSPDKLLAYAGMSPSTYQSGQLKNCYPHMEKRGSRYLRYALYNATKYVCHWDPTFAAYLAKKRAEGKHYNVALSHATKKLVRLIFAMEKSRQPYRLVA

SEQ ID NO: 435256 - protein, 413 aa, unidentified
MELLHARCAGIDISKKDAKVCVRVQGRGKSPTAAVVTTWGAMTNQILALREHLLAEKVTCVVMEATGAYWKPFYYLLDDGLDVMLVNARDARNVPGRKSDVSDAAWLADLGAHGLGRASFVPPPPIRELRDLTRTRTVITRERSREAQRLEKLLEDAGIKLSSVATDITGASSRRMLEALIDGQRDPTAIADLVHWRMRPKIPALIEALTGRFSEHHRFMTRLFLDRIDAHSADIARLDTRIEAAMEPFAAARELLMRVPGISRITAEVFIAETGADMSVFPTAGHLASWCGLSPGSNESAGRVKSTKTRPGNPYLKGALGIAALSVIRRKETYFWAKYRRIIVRRGPMRALVAVEHAMVIAAWHMLTNGEFYREPGPDYFTRRVPAKAQARAIAQLESLGYKVTLEPLADTA

SEQ ID NO: 435257 - protein, 392 aa, unidentified
MIYVGIDVAKDKHDCFITNSDGEVLFKSFPISNNREGFETLFQRIQSVSDDLSKVKVGLEATGHYSYNLLGFLLEKGLPTYVINPLHTNLYRKSLSLRKTKTDKVDSRTIATMMMSDMNLKSYSDTSYHNEQLKSLTRYRFDKVKERAKLKSSVSRLICILFPELEKLVPTLHMASVYALLSEFPSADAVANAHLTRLSNLLSESSKGRYGKDTAVMFRDAARSSIGSHMPAKSLELKHTIKLIQELTAEIDEIEAVIKQIMDEEIQSPILTIPGISYRMGAMIIAEIGDFCRFDSADKILAYAGMSPSTYQSGQLDNCYSHMEKRGSRYLRYALYNATKYVCHWDESFRVYLKKKRSEGKHYNVALSHATKKLVRLIFAMEKSGRAYLPIA

SEQ ID NO: 435258 - protein, 341 aa, unidentified
MGEYIGLDVSLKETAISVRRDGKRIWRGKCPSDPSLIAEVVRKHAPEPKRVVFETGPLSVWFYHALSAEGLPAICIDARHAKAALDMAPNKTDANDADGLAHLAEVGFYREVRVKGYDSMLVRTLVAARSRLVQITTELSNQIRGLMKTFGLVVPRGKGAPFEAEVQRLLAGQDELARIILPMLEAWRSVRTRASALGRQLLACARQSAACQQLMSIPGVGAITATSFTAAIEDPANFKTSRSVGAWLGLTTRRYQSGEVDYDGHISRRGDAHLRGLLYEAATVILTRTHADSDLRRWGLMLRERIGFKRAAVAVARKLAVIMHAMLKSGEVFNRAVSAPA

SEQ ID NO: 435259 - protein, 369 aa, unidentified
MSNLLLSNKIQETMQTQITKKIDFKGKELFIGLDVHKKSWSVTIIVDGIEHRTFTQPPDPGSLCNYLHKMFPGATYYSAYEAGFCGYVIHRELNSLGIENIVINAADIPTTQKDKLQKRDPVDSRKIARSLEKGSLHGIHIFDRELEELRSLNRTRFYLMRDLRRSKNRIKSFLQYYGEPIPPELDNNQWTLKFVVWLKQIKMQTMSGQDAFSSLVHSYEYHRTQLLNLSRQIRQRIREYDNELYSLLKSISGIGPLTSSALITELGDINRFTNIDQLGSYVGLVPRIRESGETTHTGGITFRCNTFLRTLLIESSWQAIRMDPAMMQYYHKHLVNNKGHKVVIKVARKLLNRIRYVMKNRQPYKTGVA

SEQ ID NO: 435260 - protein, 333 aa, unidentified
METQAEFVVGERRCMGLDVHREFAQVAVWQGGLVWQAGRFATTPDGVRAFAQELGPADEVALEATGNTWAIATVLASRAGRVVVSNPAKTRAIAEAKVKTDKVDAEILAQLLAADYLPAVWRPDPDTAALRRQVLRRAHLVRQRTRLKNQVHAILHRNLIPRCPAADLFGHKGRRWLAEQDLPPDERAAATALLRQLDFHGQELREIDTDLGKVALGRPEVLRLMSVPGIDATVALSIVAAVGDFTRFRTPEKLVAYLGLNPRVRQSGGQPASHGRITKAGPAHARGMLVEAAWSASKAASRCGRSTSGCRPAAVCRSLLSRPRASSPCCAGI

SEQ ID NO: 435261 - protein, 331 aa, unidentified
MNYSHFVGLDVGKKTFDASLMSADEKELSHKSFDNTPTGIQSLLDWIAGYHLSLSKLLFCAENMGSYVTELSVSSVSMGFSLALVCPLTIKKSIGLQRGKNDRIDAKRIANYAVLHYRKLELYKLPNKDLVRLRGWIIIRDNLVKQKVSSIKLLETFSWMAKLADVTESISFLEEQLKSIKEKILEVEEDMEQLIAASTSLYTNYLLLRSIKGIGIINAIVLLCVTDNFQRFDNPRKFACYCGVAPFEHTSGISIRGKTQTSSLANKEVKVYLTRAAITAISWDPQMKAYYKRKIAEGKHKASVINAVRAKIIARSFAVIRRQTPFVTLAV

SEQ ID NO: 435262 - protein, 376 aa, unidentified
MQTHPSLATERHQLLYVGMDIHKDTHTAVATSVFGEKFFEVELGNNKEDFSKLVATAKKVSEHNYLTPVFGLEDSYGYGLRLARYLSSQGLTVKMVPPVLVDRERQYETHPEKNDLKDALGTAKVLIQRIDTLPCFIITDQDELAKEIKELALDREFLVKEQTRLKNQLHRLFHKAWNGSYREKFRDPFSLKALRYWKLHPAPKDTEDILGDPEILKHQIVRKVKRLLDIREETQEIETELAILMERSGQKITTLNGCGITLGAQVMAEIKDIHRFHSSSALAKYAGLCPREKSSGKTFRHVKTKAGNRRLNTAIHRIALSQISRSGNQYAKEYFQRKITEGKTKAQSLCCLKRRLVDIIFMMLKYKQPYQYAPLT

SEQ ID NO: 435263 - protein, 343 aa, unidentified
MSEVTTIGLDLAKNVFQVHGIDALGQVVVRRQLRRSQLLPFFEKQAACVVGIEACATSHHWAREIAKLGHEVRLMPARYVKPYVKRNKNDAADAEAICEAVTRPTMRFVAVKTEDQQSVLMLHRTRQLFVRQRTTLINAIRAHMAEFGIVAGVGRNGVGRLLRLIDEGSDERVPPVARECLQALRAQLVLVKRQILEADRRILAWHRSNELSRRLETIPGVGPLIATALVASIPDPHAFGSARDVPAWIGLVPKQNSTGGKERLGSISKAGNRYLRSLLVVGALSVIRRAKQVGYTRRAWLAELMARRPVKVAAIALANKIARVAWALMVSGTRYREPVPQAV

SEQ ID NO: 435264 - protein, 423 aa, unidentified
MMRIVYPICCGLDVHKNLIVATIVTTGKDGISEYQQKSFSTINSDLQKFHDWLIENNCKHVCMESTGKYWIPVFNYLENDIDVSLTHPKYVKAIKGKKTDKKDSKWIADLYKFDLVRCSFIPPKDFRQLRELARYRFKLVCMKSSEKNRIQNCMTVSNIAIASILSDPFGKTATELMSYLLQNTADTIDDKAVRKLIKKGARAKSDEIFEAIKGYHIGSDQHKKLDLARAHLNYLDDMIRQTEIELYVRIKPYYEFVEHIATLPGITQLSATIILAEIGVDMNVFDDAKQLCSWSGLAPSNNESAGKKKSVRIAKAGAYLKPLMVQCALAAIRSKKQPYFAIKYGRIKKRRGHKKAIIAIARMMLICIYHMVIKKESFNPTDYSELMDPHFNQHKVILNDKNVFAYLESQGYDTSSLVKCNDN

SEQ ID NO: 435265 - protein, 332 aa, unidentified
MKFKDAIGIDVSKNTIDVFIHGPKLTQQFENDLKGFKKMYKWATSHYSGDDFDHVIFCFEYTGIYSTPLSIFLDDLKQAFILVAPLQIKKSMGMVRGKNDKVDAYRIAEYAYLRRDLIKPTKIPSKNIMKLQKLISLREKLVKQRAGFSADLKEYRTVLGKERHGPIINVQNKMLNYLAKQIKAIEQELKELIKNDEHINKIYKLVTSVDGIGLILAVNLIVTTNCFMNFDCARKYACYAGIAPFEKQSGTSLRSKSKVSHTANKNMKSLLTLAAFSAIQKNSELKNYYRNRLEKGKSKMGTINIIRNKIVHRVFAVVKRQTPYVNVHAFAN

SEQ ID NO: 435266 - protein, 392 aa, unidentified
MQAAADRAEAPTAIQTDLRAIFVSLELSRSTWLITSLSPSGGEKMSKHSVPAGDIAGLLRRFAQLKEKARARTGRDFPIIVIQETGLDGFWIHRMLQSEGIESHVVDAASILTSRRGRRAKTDRIDGETLVRTLMAFKRGEPRVCSMARAPTPQEEDRRRVCRERRTLVGERVTHVNRIKGLLFAQGVFGYQPLRKARREQLEELRTGDGRPLPVHLMAQIVRELDRLEVVLEQLKTVEAERNALLKPATGAAASPPAMLLELKGIGPETAAVLWSEGLFRQFDNRRQVAAYAGLAPTPWQSGSIDHEQGVSKAGNPRLRTTMVELAWLWLQNQPASALSLWFHERVRRLGGRMRKTTVVALARKLLIALWRYTTAGVVIEGAVMKSAPATI

SEQ ID NO: 435267 - protein, 407 aa, unidentified
MEVVYRCCCGIDVHKKVIVACLVNGGKQELREFGTTTSEIKTLANWLTESGCEMIAMESTGVFWKPLYNLFELMDLDAMIVNAAHMKALPGRKTDVKDAEWIADLLRHGLLKASYIPNREQRELREITRYRKSLTEERCREVNRLQKILEGANIKLDSVVKDITGKSARKLLQRIIDDDIPDSDEVSKLVHGRMRPKLDQIVASIEGITTPLQRKLLAQIIDHIDDLNCRIGELDKLVQEYMAEYEAAIEAIDEIPGIARRSAEVILAEIGLDMGRFPSAAHLCSWAGVCPGNYQSAGRRKHGKTTKGNKALKTILTQCAKSAKTVKSSYFFAQYQRISARRGKNRATLAVAHSMLIAIYHILKNKTAFHDLGSDYYDSFNRDRKINSYLKRLKALGWEPDAIPSSA

SEQ ID NO: 435268 - protein, 481 aa, unidentified
MRLPYPVRILGLDLGIISAHRGVVVDGEGRVRARRSAVPTAESLTALEAAALRGAEPGARLMVVIEPTGPAWLPIAVFFGRRGHLVVRVSSAKAADLRRFLSRHAKTNGIDAETLARLPLVAPESVEPVELPGAARASLDRRVRAVGRLTAEIGERKTRIRALAAALMPTVDHALGKPVTRADLAVLARWGDPRALQAVSLRRLTAVVAKASGGHSGEGKARAFHAAAEQALALWAGDSAVALADLAAELATEIRLLHAAEIERAEHETVRDAALATVDPDGLAASLPGVGPVGASVLTAVMARPGRFPNAAAFKQFTGLAPRANQTGDTDRKGQPMSKAGPRGLRSVLIRCADTARKQDPQLAAVYHQQMTTRNAPHLKALCVVAARLAERAWVTLADGQPYQLRDVDGTPVTAEEAKQIIAERYTVPPEVRRRRRSGNQKGKIPQQPSAGGKSRPAAGHEATFPTPTVPHRRPRVKQPT

SEQ ID NO: 435269 - protein, 472 aa, unidentified
MERRIVGLDLGVATDHTAVMMDEGGSERGQRRVRPTRKSLEALLASALAGAGEGTVVEVVIEPTGPAWLPVAVFFSERGHRVYRVSCQRAADLRKYFRRHHKTNRIDAATLARMALLDGDALQPVELRRGAMAALDREVRVTERLTKEISSRVTRIRDLARQLMPTVGQALSKQLSRTDVEVLRAYGDPRALVALGVDALTEMVVEVSHNRYGRPKAAAFMEAAEEALELYGDSDAVPFQGLAADLATEIALLEALVAARTAHQRQRENLYGEVDPGGLARSVPGVGEQGGPVAVTRVVRAGRFPNADAFASFTGLVPKASETGETDRKAQAMTKAGDRTLRSMLYRAADTARKEDPQLARIYFIQMVERGANHTKALSVTATHLARRLWRTLERGTPYRVCDIDGHPVPKEHARRIIAEHWTVPDDVRQRRRSKKVGKAPHNVLAGHSNNGARSASTRRPSPKAMFCPLPT

SEQ ID NO: 435270 - protein, 368 aa, unidentified
MRHCTYIGLDVHKDSIHVAIADTSPTYEVRHYGTIGGDLASLDRVVRRLRSKKTELKFVYEAGPCGYGIWRHLHQQGLDCIVVAPSKTPKKPGERVKTDRRDAITLARLHRAGELEAIYVPLPEDEAMRDLTRAREDAKIAEKKAKQRLNAFLLRHSRSYSGKSKWTLAHRRWLSDQSFPHPAQQIAFQEYIDSIEQCEARVKRLTEQIETLSPEWRLYPVIEAFQAMRGVSLINAVTLVAELGDIMRFDNPRELMGYLGLVPSEHSSGLSTRRGGITKAGNGHARRALIQGAWTYRHPAKVGRRLRDRRARLPEAVSQIGWNAQLRLCQRYRRMRARGKPSQVVITAIAREMAGFLWDIARQVPMAA

SEQ ID NO: 435271 - protein, 422 aa, unidentified
MSYCPVAGIDVSKKFSDMCILSPDNKIFAQEKIYHDETSINRANALLQKAERLFFSKPVIVMESTSHYHLILFQFFSEHGYDVIVVNPLQSNSMKDFSIRKRKTDRVDAFKLAMMYRTKTLRPSQIPQTATRALRQLCRHRAELLNDVSSYKNRLTALLDQTFPGYDKVFSDVGGVTSCAVLVRFPTPTILLVEEESELVEVIAAASKSGYSFAKKKARLLISAAQKAQTLGIHSCADETLIVCTIQMLRTLSESVLQIETAIDNLLAQIKGMRNNVSLLQSIPGIGSHSAALLLGEIGDISLFKKPKQLAAYFGLDPTERQSGSFRGTKNKLSKRGSPYARAALHMGVVNSICKRGKDSAANPVLLSYYEKKCKNKPAKVAQAASMHKLVFIVFAVLRDQKPFELKTPEQHAVEQGFVKAA

SEQ ID NO: 435272 - protein, 456 aa, unidentified
MAHRKKKIPAQIVEDEDYQLRHERVAGIDIAKANAVVCTRLPPARGGSRRRSKIEEVAATAAAITALAAAWLAEGVELVSMESTSDYWRIWYYTLEAAGLNVQLVNSSQARQLAGRPKTDRADAQWIARLTEMGLLRPSFVPPAEIRALRDWTRTRLQLVRDRTAEWQRLEKLLEGALVKVSSVVSSLAGNMTARAIIEALIAGQRDPRALADLARSRLRGRRGDLEQALQGIAFGAHHAWLARLHLDRIDALDRQVAAIEDEIEACLAAIPASWGIDSAGVPSPDPGPGAAVLPAAQRLAEIPGISVNLAMAIIAETGLDMSVFPTAGHLVSWAGLTPVARQSGARQRKGKKGQGNSCLRRYCTQAASATAATGTFLGERLRRLARHKGGTRARCAVGRSILIIIWHLLKDPQARYTDLGDDWHTRKTDKDKKTRNLIRQLQALGHDVTITPRAA

SEQ ID NO: 435273 - protein, 390 aa, unidentified
MSQPFDVSRSLTAFEQDNTLVAVIEMSQSKWLVAAMIPGVTRRPLKKLDADANALLKLLQRWCEEAHKAGRAVKRIVCAYEAGRDGFWLARWLQARAIEAYVIHPASIAVSREHRRPKSDRIDTELLMRSLLGWLRGEKRHCSMATIPTMAEEDARRPGRERESLVSEQTRIVNRVKAVLALFGIGGFNPRLRKAAQQLETQRTAEGTPLPDNARAELRRDLERLCLLRDQIRAIESARLQRLTAAPATSQGPHAMVRLIARVLGIAIETADMLVNEILSRNLRDRRAVARYAGLTGAPDERGQRRREKGLARAGNGRVRRGMIQLAWRFLIFQKGSRLANWFRERTADGRRTTRKTMIVALARKLLIALWRLVTTGQLTEDIKLRPAGT

SEQ ID NO: 435274 - protein, 422 aa, unidentified
MRSVALDVHLDFCEVAIVEDGEVRSAGRIDTKPQQIELFASSLGPDDRVALEVTGNAWEIARLIEGHVAQVLVVSPSDTGIRQARAKTDRLDARTLARLLAAGSLDAVWMPDRETWVMRRRLSRRGQLVHARTRAKNEIHAVLMRQLVGRPPVSDLFGVKGREWLAGLELAFEERETVDGAMRQIEFLDAEIAEVERLIASDALSSAEIKRLMGVPGVNVIVAASFLAAIGDIHRFQNPRKLVGYLGLDPRVRQSGSGPATHGHISKQGSVRARHALVEACWSAVRQPGPLHAFYERIRARRGHSVAIVAAARKLACLFWCLLRREEDYAYAQPSLTKKKLRRLEITAGAPRYSANAAGIWSANAAVRQAERELARQAEVAYARTVRDWHAAQTANVGASVTPGRASKKPSKGKAARQTTSP

SEQ ID NO: 435275 - protein, 426 aa, unidentified
MNYKQNEKILQVTEKTLVVGIDIAKEVHYARAFNYRRIELDKVISFTNNQQGFKTFKNWILEVMKKNDLDNIIIGFEPTGHYWYNFAEFCRNNDFKYVMVNPYHVKISKEMDDNSQTKNDRKDPKTIAKLVVDGRYFETYVATGIYAELRNVVKMYEHVIGCKSVVENKIIQWLDNYFPEFATVFSNWDCKSAMITLKQFPLPSMIVELGEVKVLETWKKEIKQGVGIKRAHKLFEAASISVGCTEGLKMGQKELEYLIKEYEMYLEQLEEIKSEMEKLIIQVPGAKEILEIKGIGLVTATAIIAEIGEISRFEDARQIQKYAGLNLIENSSGKHKGQTTISKRGRKRLRGFLFKVIMPLVAKNVEFKKLHEYYTTRKENPLKKKQSLILLCCKLIRILFVILKKGIAYDGNKLMADIRRPDGVVA

SEQ ID NO: 435276 - protein, 348 aa, unidentified
MWIIGCDFHPRYQQVAALNRSTGELVERSLSHEKKEAETFYETLPPGALVGMEATCAARWFERLLDRCGHQLWVGHPAQIRASVVRKQKTDARDARHLLALLEKDQFPRIWVPNPSERDARQLLLHRHKLVQWRTQVRNQLHALARSEGVWTHRPRQRWESIALDRWADHRRQDLLRMLDQLEDRIKYLTGQVEQQAGRRAEVLELMTQPGVGPITGMAFMLTLGTASRFPGGKHVVSYLGLNPSECSSGGRQRLGHISKQGNQMMRWLLVEAAHVAARKDPEMERFYKRLLFRRGRKIAVVPVARKLAVKLYGRLRTWEETKQAQPPAPMQGSPALCLVNAGGSPQL

SEQ ID NO: 435277 - protein, 369 aa, unidentified
MLYLGIDLHTRQLTVCLRDEAGNVLQRRQVGTHPEKLQPWCDELQGAANGQGGVVAMLEVCGFCDWLVARLKELGCREIVVIQPDRAARKKTDRRDAARLSELLWINRLHLLAGRPAPGLRRVELPSTTDGENRQLTALRQRLGVQRTRTINRLKHLIHKHNLIHEQPTKTFGTKAVLAWLKKLPLPFVDRLEMDLLLEQLANTESQLAKVSVEIEVRAERDPACRLVRTIRGCGAFTALAITSRIGRIERFARGRSLANFFGLTPTCSSSGESGERLGHISREGSGIVRFLLGQLVTRALRVDPGLRRWYQGVRRRRGAKIAVVGVMRKLATSIHAMLKNQESYELLVVRKARDRKQRGAVQPGASTS

SEQ ID NO: 435278 - protein, 342 aa, unidentified
MREKRAIGIDLHRKRFTCCVRLENGRNYLSEWSLEQLPQFVSKLRRSDEIAVEVTGNTRWFYQAVAPHVARIVVVNPNQFRVISHSVKKTDAHDARNLALYLAKGLLPEVRMKEKEQAELASLTQTRDRLVKLRTALKNKVNHLLSARGIELAKESLSSEKGLTWVLEQKLEPLTQFELEVIVEQIRSLNGSIARLEGAIEEAGKKLGGYSNLTSIKGIGSLGASILLSVIGNVNDFAHEGKLAAYFGIVPRVQDSNQTEHRGRITKRGSKLGRTALVQCALIAQRYSPYLHCYYERIRARRGTGKAIIALARKFLGVIYHTLKNNWTFEDFPNFVLAGAKT

SEQ ID NO: 435279 - protein, 419 aa, unidentified
MNRIETKKLRVVNSQTLIVAIDIGKTTNTGYCRCPDGKDIKPFEFSNNAEGFRKLWDCICWMKRSHHLEEVVVGFESTGAYGEPLGHYLKDKAVRLVQVNPMHTKRMKDLQGNSPGKTDRKDPKVIADIIGLGHALSVVIPEGAAAELRRLTLARERCLQRRTALYNQLQDLVFILFPEFLQVMKDVKTKTAQYLLRHYPTPQDIGTCGVETLSSVMKRVSRGKLGRVRAQALYGAARESVGLKEGTKGILLEIDEIVFGLEVCHRFIEKMEEEMVFYLQEIPYSDSLLSVKGIAEVTVAGLIGEVGDFRQFHALRQVMKLAGLNLFEISSGKHKGNRHISKRGRPVLRKLLYFAAINTVRKGGVMHASYQRHLERGMPKTKALIAIARKLLRILFALVRDHSQYVETYSQKEALNLAA

SEQ ID NO: 435280 - protein, 347 aa, unidentified
MAAVMIGVDPDKGSHTAVAIGTGEEPLGELRVRASAAQAQRLLAWAAAWPERAWAVEGAAGLGYLLAQQLLAAGERVLDVQPKLGARVRLLAAGAVNKNDPNDARSVAVAALRSASRREAAADDHAAVLKVWSKRHRDLGRTRTQVACRLRAVLCELIPGGVSKRITAAHAAGLLGAFTPSGAVQAARCELAAAFVEDLRRIDAQMCDAQKKLTVAVAASGTTVTEVFGVGPVVAAIVIGAVRDVSRFPSRDHFAASNGTAPIEVSSGHRKIYRLSRRGNRRLNHAIHMAAVTQISHRHSDGRACYERKLAEGKTPKEALRALKRQVSDAIFARLQADAQRPAAGTR

SEQ ID NO: 435281 - protein, 331 aa, unidentified
MKNKEIVGIDVSKNTLDVYILSNNYHLTVKNAPEGFACLIETTISHVKEKSHPPFFCFENTGRYSRLLSVFLEDGGFHFALLDALDLKRSMGLTRGKSDKKDARMIALYAWRRRDELTSSQLAGPVIDQLRQLLTLRDKLIKHRTTYKNTTQDLHDGYCDGEFDFIKERHQSMLKHIQQEITLVENEISRIIHLHEELSSNYNLLRSVPGIGNVLAIYLIVLTQNFTRFNDPRKFACYAGIAPFEYTSGTSVKGRSKVHPCANRQIKSLLNMAAMASIQLTGEYKIYYQRRLAEGKNKMSTLNIIRNKLVFRAFAVTKRGTPYVNLHKFAA

SEQ ID NO: 435282 - protein, 319 aa, unidentified
MNSHHFIGVDVAKDKFDVCWVKEDNSLLQKMFTNTHCGFKEFTTWIKKQSHNPWVCMEATGHYSEILADFLVSQDVKVSVVNPVQIKYFAKVKLSRNKNDKVDAKIIAEYGKLMNLRLFEPRSSEQKYIRELIQLEDTLRTQRTQLKLQQGCAQSKEIKKEFEKTLRMLDKRLEMLAKLIQSTIAVHTQWHELVKLITSIKGFGELSAYRLLAYLPDLTLFKNAKQLAAFIGVSPKQKESGKYAGQTQLSKLGNARLRNILYMPALNAKRHNEALQPFVKRLENNGLTPKAIVGAVMRKLVHIIYGMFKTKSCFNPNLV

SEQ ID NO: 435283 - protein, 347 aa, unidentified
MVTLGSDSHKRTHTFVAVDENGKQLDYQTLPATTPGHLEALRWASQWPDRRWALENCRHLSRRLESDLLHAGEAVVLVQARLMATVRVTGRQLGKSDPIDALAVARAALREPNLPVARLEGKSREVKLLLDHREDLVGERTRICCRLHWNLHEIEPGMELSDSALIRWCVMDRVERVARQHSCLLAEIVLEQLESIRRLTRRIKALELQLRALMHQLTPNLLELQGCGTLCAAKIFAESADIRRFETRAAFALNNGTAPIPVWSGNNVRHRLNRGGNRQLNAAIYRIAIIQARDEGLGRTYMAKRLALGNTRREALRSLKRRLSDEVFRRLWLDLPLALNVRFWAAA

SEQ ID NO: 435284 - protein, 402 aa, unidentified
MSSSVAQAGLAVVVAVDVGKTAAAVLVTDAGRRRLLGPIEVSMTSSGVDQLIGKIRAVIPAAGLTRVGVEAAGHYHRPLLTGWPRDWQVVELNPAHVTEQRRVMGRRRVKTDAIDLEAITELLLAGRGVPVTVPLAAVDALTGWAAHRRRRVQTRTATKNQLLGQLDRCFPGLTVALPDVLGTKVGRLVAAHFADPHRLAVLGAGRFVRFAAARNIRVCAAPAERLVAAAQDALPSPEAAVARQVLAADLALLADLDAQVAAAEDQMAALLPLTPFAPLTTVPGWGVVRAGNYGAAVGNPHRWPGHPQIYRASGLSPAQYESAGRRRDGAISREGSVELRRALIDLGIGLWHSDPAAKRYGQALRVRGKKGGVIACALAHRANKIAYALVRDQAGYDPARWA

SEQ ID NO: 435285 - protein, 338 aa, unidentified
MKVQILGIDLAKNVFQLHGVDRKGRSVLVRRVRREQLLKVIGELEPCLIGIEASTGAFYWQRQFEKLGHAVKIMAPQYVKPFVRRQKNDTNDAEAICTAVQQRNMRFVPKKTLEQQDIQALHRARQRLVNHRTALISQMRGLLLDRGIAIAVSATRARRLIPKILATPSDELTALMREIVSSLYAFMLQIDERIKAFDRKIDAIFKASEVCQRIAKIRGIGPKTATAMVAAIGDGSDFKNGRHLAAWLGLVPRQHSSGDRRVMMGISKRGSQHLRTLLVHGARAVVRTAVRKTDSRSMWVNELRQRRGYNRATVAVANKNARVIWAVLTSGEPYRSAA

SEQ ID NO: 435286 - protein, 342 aa, unidentified
MEITTVGIDLAKSIFQVHAVDAAGHVVVRKALRRAQVVPFFAKLPRCLVGIEACGTSHHWARELTKLGHEVRLMPPAYVKPYVKRGKTDANDAAAICEAVTRPSMRFVPVKSTEQQAALALHRTRDLLVKQRTQLVNMIRGLLAEFGIEMARGLRHALELAARLSAGDAAEVPPLAQRVVTGLADQIGALQIQLTRLEKELLAWHRENDLSQRLATIPGVGIVSATALAASVSEPERFRSGRQFAASLGLTPLQNCSGGKERLGRISRMGDRYLRRLLVVGMTSLVRRAKAAPTSVDSRLPALLQRKPVRVVTVAAANRTARVAWAIMTRGGTYRAPAATAA

SEQ ID NO: 435287 - protein, 389 aa, unidentified
MYDEPAEGNVPEIRAGVDIGKTHHHTVVINKEDKRLLSRRVAHDETEPLALIGDALEKSADLLWAVDLNHGGAALIGLRIGLLVRHGQPVAYLTGQAVHRASATYKSGEEKTDAKDAFDIADQARVHRDLDLLRPGDEVAADLRTLTTHRLNAAFDRTRQINRLHAPLLEILPAPERALDLTNRGPVMLLTGYQTPAAIRRAGTSRIQTWLKNRKVRSAATLAKTAVEAAQAQTTALPGEKLAAAMMVRLAKRVMTLDEKITELDALIEAKFRKHPHAELIRSLPGMSAKPGAEFLAATGGDMDAFGTSDRLAGVAGLAPRTRNSGRVSDNLRRPRHYHHGLLRTMYPSAMLSLQGCPASKAFYDRKRSEGNSHKQALPALTRRRLNAL

SEQ ID NO: 435288 - protein, 356 aa, unidentified
MSRDIKYIGMDVHKEAVVIAVLNSSGKLVMESIVETKASSILQFIHGLRGELHVTWEEGTWAAWLYDLLQPHVQQVLVCDPRRNALLKEGNKSDKVDARKLADLLRTGRLRPVYHGEHGLRTLRELARSYQTISKDLNRVMNRIKALYRGWSIPCAGTQVYAPRYRQEWLHKIEHAGVRRRAELLYQQLDGLQRLRRTLRPELLAESRKHKAAKLLRQIPCIGPIRAARLLALMQTPHRFRSKRQLWTYSGLGIETRDSAQYRFVCGQLQRSKKPQQLRGLNRNHNHEMKEIFKGAATRASCGVGPLREFYVALLDKGMKPEMARLTLARKIAAITLTLWKKEEGFDAELLKTQAA

SEQ ID NO: 435289 - protein, 433 aa, unidentified
MVKINYMSTLFVGIDVSSKSNVVYAMDFDENKYIDASFGNNQPGADELAGKIAACIQKHPHLNTIIVALESTSVYSIHIANFLSSCELLMPYKPYVYCLNPKMTANYRKSYVGMDKTDHMDAFLISDFARVGRTKKCEPWRGSQYLALKRLTRHRLHLAECITREKTYMVSNLYLKFSELQLLDNDSQPFSNIYGATSSAVLTEFMSLQEIIDSPEEELLQFLASKSRNRIADISRTSELLKKAARDSYRLDKCMYEPLNVSLASSFNCIQTYQKEIKLIDQAIEKCINGMNPNAFIILKSIPGIGPVWAAGILSEIGDITAFHSSDALAKYAGLTWLKNDSGDFVSEDNRVSKAGNTYLRYYFGEAANSVRRYVPEYAEFYSRKYAEVTKHQHKRALALTSRKFVRLVFGLLVKNQLYTGEKLDAELNTESE

SEQ ID NO: 435290 - protein, 344 aa, unidentified
MTKDTMIGVDLAKHVFQVHGASMFGEVRFRKKLTRQRFQQFMAEQEPCVVAMEACGSAHYWAREMARLGHEVKLVAPRYVTPFIKRHKNDAADAEAIVEAAQRPGMRFIEAKTEAQQARAILFRTREQLVRQRTDLINALRAHLYEYGYIVAQGIGHLGRLEEILNEPNSELPELVRELGRVLLEQIAGKTEAVQGLDRRIKDLAAQSRDARRLQTIPGVGPITALAIEAFAPPLEAFRCGRDFAAWLGLVPRQHSSGGKQRLGRVSKAGQRDIRRLLIIGAMSRLNWLGRKSIRHGSWLDRLAARKPRMLVAVALANKMARTIWAMATRQEDYRDPARVVTAC

SEQ ID NO: 435291 - protein, 354 aa, unidentified
MKQTTKYVGFDVHQQTTVTCVREEGGRIVGRHILATEESPILAFVRGMRGTIHVALEEGTQAQWLHDLLEREVQSVIVSNRRGETSRGNKSDWRDAEELSELLWQGKLRAVYHGSPQRGTLKELTRTYCQLVEDSTRVRQRLKALFRARGIKTPGQAVYHPQRRATWLAHLTNAGVRFRAETLYRELEVVETLRPQAKQAMLAEARRDPAWRLLRSIPFLGDVRVALLLAILQTPWRFRTKRQLWSYSGLAVVTRGTAQYALEQGRPVRQRRPPMTRGLNPNHNRVIKNVFKSAATAATVRPGALQSFYQALLQRGMQPDLARVTLTRKLAALTLHCWKRGERYDPTQLTVQAT

SEQ ID NO: 435292 - protein, 392 aa, unidentified
MYIVGIDIGKNHHEASIVSPKGKQIGRSLRFATTHKGADSLMSFIFKNIGNSPCVFGMEATGHYWYPIYSFLKAKGYTIYVINLIQSDSLRKMYIRQTKNDSIDSFLIAEVIRFGQFGTTSMADENILAMRQLCRYRDSVISSRTEIKLRIGTIMEQIFPEYEKQFSSLWVSTSMGILEKYLTPENIENAPIDELFEIIKDKSHNRLTRAKAISIKEAAADTFGIKIAQDAFSFQLKQLIDRMNFLDKQIEALDCQILEYYEKFDCYLHTIPGIGMIAAATILAEIGDISRFKNSSSLIAFAGIDPTVRQSGEFNSTHNHMSKRGSPYLRHAIFLAATTCSFHNSPLNAYYKKKRDQGKHHLTATGAVARKLTTVIYAVLRDSKPYEPKSFC

SEQ ID NO: 435293 - protein, 421 aa, unidentified
MHVLYQRCAAVDIGKDVIAVAVRLPGDGPEHRQTIKRTFKTFYGVLKHAAGWLTAQQVTHVAMEATGIYSMPVYHALIEHGQFEKVLVCNAGHVRNVPGRKTDLSDAEWLVHLLECGLLRGSFIPPAQIKAARDVIRYRTKLTESRTSELQRLGNVLQDAGIKVDSVASTITTRSVRAMVEALIDGERRPLLLAELAKGRMRARIPDLQRALEGRFDDHHALMCRLHLDHLDHLEEMIARLDTQIQDMMQPFRAQRELLTTIAGIGPFAAAAIISEAGADIGETFPSAGHFASWIGVCPGNHESAGKRHSGKPRKGNQHLQHVLVECAWAASRTPGYLQSLYRWHVRKFGGSRNPTAKNKAIVAVAHKLAIIIWHVLATGKPYTDLGADYLDRRIDPAKETRRLIARLQALGHTVTIEPAA

SEQ ID NO: 435294 - protein, 318 aa, unidentified
MDQEPIYVGIDVAKAQLDLAVRPTGQEWQSPNTPEGIAQIVGRLQALAPTLVTLEATGGLQLPLAAALAVAGLPLAVVNPRQVRDFAKAIGRLAKTDRLDAQVLAHFGEATKPQPRPLPDVQSQALRDLLARRGQLIGMLTAEKNRLGTTSAPVRPRLQAHIHWLQEELASLDQDLGDAIRQSPLWRAKDNLLQGVPGVGPKVSATLLAHLPELGILTRQQISALVGVAPLNRDSGLMRGRRRVWGGRARVRAALYMAALVATRHNPTIRTFYQRLLAAGKPKKVALVACMRQLLCILNSMLKHGRPWNPKFVPQQIS

SEQ ID NO: 435295 - protein, 349 aa, unidentified
MAKDISTIVGLDVSDRFSSYCVIDARSGEILEEGKVMTRRESLTTQFGAAPSMRVVIETGTHSSWIARLLRGFGHEVLVADARRLRFIYMSDRKDDEIDARMLAKVGRLDPSLLHPVRTRSPETDRALAVLRSRDALVEARTKLVNSVRGQTKKMGHALPRISTDAFAAKAREHLPEELRAILEPLLDAVAEITAKIRAYDAQIETLCRAHPETERLRQVKGVGPVTSLAYVLVIEDPSRFTKSRQVGPYLGLTSRRDASGETDRQLGITHAGDKLLRRLLVGSAHYILGPFGPDTDLRRWGLVHAARGGGHGKKRVVVAVARRLAVLLHRLWVGGETYRPLREIPATA

SEQ ID NO: 435296 - protein, 312 aa, unidentified
MMTNDNIGIDISKDFLDAHRLSDGCTATFHNAPAGFRALMSWMGCDMPARVVFEATGPYHRSFERVFSGKLPLVKVNPLQARRFAQACGTRVKTDAVDARMLASFGNALSLEPDQPVDGEQFDLRELFSARGALIKDRTRLINRLQTQTLALVKRQTKARINQLTRQLQALQHDINKRLQNCPSRVRANTILRSIPGIGEVAASTILIEMPEIGSLRKKKAASLTGLAPMTQQSGKWRGKARIQGGRKPLRDALYMPALVATKHNPDMRDKYKAMVDQGKPKKVALTAIMRKLIELANALVKADREWLPNNT

SEQ ID NO: 435297 - protein, 341 aa, unidentified
MERFKHYVGIDIGEANFTCTILTRPDLPLIAREEFGNHTEGFAAFEQWLFKHGVDQAHAVLCMEATGVYGEALCYALTSKHFQLAVEPPLKVKRAFYPKGHKNDRVDSKQIAEYAYRFQDQLYFWQPKAQLVEQIATLLGTREQLVEQKTASLNALTALKKKVVKNEVAQKIYHETIETLARHIEELEQELAKLINQDQQYRIGVTWLDTAPGVGMLLAANLLVITEGFTKHLEYERLAAMIGICPYQHQSGSSVWKPDSSAGFGPPRLRKLLHLAARSVKTHNATFIKYYARKEAEGKPKKLILNNIANKLLRIMCAMLREQKPYIKNHVSVNPRLLKNA

SEQ ID NO: 435298 - protein, 529 aa, unidentified
MVSSARTRRRGRSKSSSRNARNRTNLQKPNGVIGPRVQRVGGERFAIVCVDPAKHRSEWMMADYFGNVLIQPQTLEHKAVFFKLAVEQIRQAQEQHHIQDMIVVVERTGNYYLPPKRAFASAGFDTRTVHPFATKQYRQPADPGNKTDETDLYAQHRAAVAGFGLNEFELESPYRELRFRARHRRNLVENAAALACRIRDHLHLAMPGYADLFDRLFEFPAPLAMARRCDSPAMMLQLGQIGLSQYLRDNKIRHRGRTIDRVLAWAAQATHDDIQDGPMHYAIWTDLHELYQHFRRKTSNLEQQLASGLARTPYVRLLAIPGINVVSAAELAGEMGPIKRYANANAITGRSGLYPSRHQSDQTDYDSGPIIRQANRRLRCALMRIADNLACHCNYYRGQAEVDQTRGVDKRASRVKIAKRFSRLALACVAGDEPMRHPCFQQPDSILEKLRRFHHDHETPIGCLMEDLHATVPQLPYNTRHHEAQVVAAVLEKQTERHRGGVAIGELLPAVLARLAVNTTTSKENRDRP

SEQ ID NO: 435299 - protein, 378 aa, unidentified
MNRIIKIGMDVHTTNYTLCIFEPSFEHDGTVHCITQVKPEVKNIIHVIETFKKKHENEELNIVCGYEVGCLGYSLYHELKEKGVECVILAPTTMKTEKGGRKLKNDYRDAKMIAECLAYGGYSAVHVPTELDNSVKEFIRMRDDIKENLKSIKQHIIAFLTRNGKQFEGKSFWTRKHIDWINTVSFSDPLLQDTLKEYMIEYNHLCDRVETLDKQIEEISLKEEYVEKVQQLQCLIGIKTHTALSLIVETSDFNRFKKGNMYSAYLGLIPGDDSSAGHENKLGITKAGNSHLRKLLVEAAQGYTRGKVGFKSKDLKSRQEKCSSEVVAYADRANERLRRKYYRMTLRGKRYNVAKTAIARELACFVWGIMTDHIDLCN

SEQ ID NO: 435300 - protein, 431 aa, unidentified
MKYAGLDVHKRVVEATVLDESGAVVHRERFDCTRAELQRFAVQHLGADCKVALEATTNTWGVYDVLSPHVGEVVVSNPLRTRAIAEAKVKTDKVDAMVLAQLLRTDFLPRVWRPDEQTQRVRRLCSRRAGLVSDRTRIKNRIHAVFHQRLIAVPHDKLFGNKGMAWLKSAPLDELGRAAVDSELRLLEAIERELNDLSIELARVGYQDPRIKLLITLPGVDVTVAQALVSTLGDVARFPDPDRAAAYLGIVPSVKQSAEHCYHGPITKHGKSHTRWLLVQAAQHVASHPGPLGVFFRRLLKKKNRNVAVVATARKLVTIAWHMLKNNEPYRYAQPLPTERKLQALRTKGGGQRRKPGTQKGKPRPPNYGTGTSTRRLPGLQALYDAEGLPQTKPLKPAEKRMLKETRTARFADKIQREQRIPRKSANSKAS

SEQ ID NO: 435301 - protein, 415 aa, unidentified
MKTYSQLSHFGGLDWAKHHHDVCILEPQGQIVERLRFEHSGPGWEKFREQIRKYPALGIAIETSQGAVVEQLLGSGVTVYPVHPKAAKAYRQRQAPSGTKDDELDSWSLGDALRMDGRGWRALSPQDPMIAELRLLCRDEEELIGQRTALVNQLQAALGEYYPAALEAFADWTVPYTWEFIARFPTPQQLAGATVHRQRVFLHTHKLWRPGTADKRLEIFARADQFCGGAAVTRAKSRLALALVKLLQAVQKQLDEYRVAIERLFAEHPDHDVFGSLPGVGQKLGPRLLGSLGADRGQYPDVQGLQCVAGSAPVSFKSGQMRRVKIRWHCDRFLRHTVHLWANCSLKTCAWAAAYYKTKREAGQSHACALRCLAQRWLKILWKMWQTHTLYDPEYHARNQQRHGSWVLQLNPKKA

SEQ ID NO: 435302 - protein, 329 aa, unidentified
MSVYAGLDTSLDAVAICVIAETGEMLWQGKVLGDPDAVTAALQRWRDDLVRVGLEAGATSEWIGGHLVDEGFPVVCLESRHVKAALGAMTVKTDRNDAQGIAHIVRTGWFKAVHLKSAAGQRLRTLTAARKAAVRAVTANEQVIRGLLRPLGLKIGSVTRVRFEARVRQLVGADRLLLGIFEPLLQMHRCLRENLADLHRLVLRAVRVDPICRRLMTMPGIGPVTALTYRATIDDPKRFRRSRSVGAYLGLTPRRYQSGEVDRVGRITKVGDSETRTASFEAANVILRPTTRWSSMKAWAMKIAKSTGCPTCEGRPGQMNGSHPSPHVG

SEQ ID NO: 435303 - protein, 418 aa, unidentified
MRPPGPRTNTILKEAIVFFAGIDWADDHHDIAVLDQQGQLVGSLRVSHSPAGLAQLQAFLLGIAGDPQQTPCFVETNHGLLISSLLEAGFPVYPLNPKTVDRRRKASGAKTDAIDAYLLARTGRSDLADLRPLQPDSPLVQELKALSRDLEALIQSQTRLVNQLTACLKAYYPVALELFSKLHQPSTLAFLQAYPTLEGAREASVQEIARLLRQHHHPQGQRTATKIYSQVRQPQLQADPVTTRTKARLMLVLAQQLALLVEQIKAYDQEIHRFFVLHPDNSLFCSLPGAGRRLAPRLLAEWGDDRERYVAAGSIQALAGTSPVAYQSGSYRKAHKRYACVKPLRNALHQFAWQSTLREPWAGEFYQRKRAEGKSHSMAARALANLWVRIIYAMWLKHEPYDASSFLAARQAHARVAA

SEQ ID NO: 435304 - protein, 319 aa, unidentified
MSIKRILVNQIDTNLEYEVIGIDLAKNCVSAILLTTDGEIFGIDRLDYQELEKSAQELSPTIFAMEPCTEMNYMVQKLEDWGHQCIVISGKNVKDYVESHFSNQKTDLNDAQALAFLTKDTQLRTVKAKDPEQLKYASLTTLREQYVKQYRQTMVSLKGICQVWGLNISKGISGKARLKDMIENHADFPAELRTALVGMVAHAQAVQKDLKSVTKILEELAKKDKACQLIQTVPGLGTICSCRLRATVGDIKRFKHPKDFPAYYGLVPRSMATGHNEKKGKITHRGDKTMRSLMVQGAGIVINQATKGNLNSKQLTKWI

SEQ ID NO: 435305 - protein, 297 aa, unidentified
MKEKVRFLGLDVHAETIAVAVAEPEGKVRSLGTIPNRAESIRKLIKKLGPAAKLIACYEAGPTGYVVYWQLAELGVECEVVAPTLVPVKAGDRVKTDRRDAEKLARCYRSGDLTAVWVPDEGSEALRDLVRAREAAKQDQTRARHRLSKFLLRSGQRPPTGVRPWTRPYLIWVAQLRFTHIAQEYTRQDYLHEVEHMRERVLRPEQAIAEAVKLASPALQEVITDLQALRGIAHISAVTIAAELGQVSRFPGARELMGYCGAVPSESSSGKRTRRGGITKTGNAHLRRIVVEAAWSY

SEQ ID NO: 435306 - protein, 298 aa, unidentified
MAKIIRIGMDTSKRVFQLHGVDENERPVLRKSLRRRDVLTFFAKLEPTKVGIEACGASHYWARELKALGQEVMLLPPVYVKAYVKRGKNDKIDAEAICEAMSRPTMRTVPIKSVEQQAAQILIGTREALHRKRTQVSNSIRGYASEFGLVTRKGLIHIEPLLARLQEDTMIPELAKEMFLMLAGQFRYINAQIKEIDAKLMAFHRSHEQSRRLAEVPGIGPISAVALTIKVTNPKVFGCGRNLSAWIGITPKDHTTANKKRRGTITRAGDEMLRSLLISGAMSVIQQAKKGRGRLRPG

SEQ ID NO: 435307 - protein, 428 aa, unidentified
MKSRPYRAMRVKDVELEKVRWKRDGKAVSVGTDVSKGELVMMARWGPESYERPWKAENPGGIHELVALLKGLGEGREMGVAMEPSGTYGDPLRQALTEAGIPVYRVSPKASRDYSEIFDGVPSQLDGKDCGVVAELHAHGKSRPWPYVRLAEPEEEFRYRVANMAAHDKMLTAWVGRIEGLLGRHWPEASQYLRPSSATLLKVLAEYGGPAGVAEAGEEAEKRIQEWGGHFVEKETAWSLVRSARETVGLKYTDRVRDWIREWAGEALEQREVIEAQRRKLAQLAEGNETIRRMISAVGLACACAIWVDMGDPHSYDSPEAFRKAMGLNLKVRESGESKGQLKLAKRGSARVRMYLYFAALRMLWDTDVKAWYERKVERSNGKKMGAIVAIMRKLALATHCVAVKGVEFDPGKLFCETKKKRPEKAGR

SEQ ID NO: 435308 - protein, 352 aa, unidentified
MEMVSGLDLHRSQITFRTVDLRTGEVQRGKIYPGAREAVREWLERLEPGTDAHFALEGTTGWRFVVEEIEGRGFTAHLADPAELSERRGPKRRAKTDHADCELMVNLLLEGRLPGSWIPPAHILELRALVRLRKTLVDQRIEWQQRLQAQLFHQGVVPGLRLRNPSDRRRLAGMEMSPAGRQTMQTGLIMLDDFDAQLGPLSAQLVALAKTQPGCRALESQLFGVGWLTAVAIVAELGECRRFHSADQAVRSSGLDITVHESNGRRPGGHLARQGPAVLRWALFEAAQCAARRSSPDHAYYLKVRDHIDHNRACLSVARKLCRRACHILKDLGDAAMAPPTPPSARREPSAA

SEQ ID NO: 435309 - protein, 427 aa, unidentified
MGAMSESEVQELQFAALVGIDWADQKHAWCLQAADTTHRENGEVEHTPEAIEAWVGQLCRRFANRPIAVAVEQVKGALVFMLSKYGFLHLFPVPPTMSAKMREALYPSGSKDDPRDADLLLELLLQHRDKLRRLSPDSEATRRVQNLVDERRKLVDEKTAQINRLTHQLKIYFPQMLEWFEQLDTELVCVLLERWPTLEELQKVPPQRLRTFFHKQRCRYPELIERRLVGIRQAIPAIRDRAVIEAKSTVVKVSAQVIRSLVRGITDLDRKIEEAAAAHPDFFIFESLPGAGAVLAPRLLAAFGSQRERYTSAEEVQTYSGIAPVMKRSGKKKWVHFRWACPKFVRQSFHEWAGHSIAHSQWARSYYQQQRKRGKGHHAAVRGLAFKWIRIVFRCWKDRAVYDESRYLITLAKRNSPLAAVPGGTML

SEQ ID NO: 435310 - protein, 343 aa, unidentified
MSKLYAGLDVSLELTSVCVVDAEGRIAAEAKVPSDPAAISAALLALDGSFERVGLEAGPLAQWLYFGLKDAGLPVCCIETRHAKAAIAAMSHNKTDRNDARSIAQLVRSGWFKSVHVKSVESQELRTLLTSREFLVNKVRDHENEVRGALRPFGLKVGRIGARAFAPRVRELVAERPHLALCMEALLTTREALVKQLAALHAVLLRTVKNDELCTRFMGIPGVGPVTALAFKTTIDRPDRFRRSADVGAHLGLAPRQFQSGETDRRGRIAKTGDAFTRTALFAAANVMLSRSTQWTALKHWGITLAKRSSLKKAKVAVARKLAVIMHRMWRDGTPFRWTAQEA

SEQ ID NO: 435311 - protein, 403 aa, unidentified
MQEATQHDAVDVFVGVDVDVGKGQHHAVALDRNGKRLYNKALPNDEVKLRALIAELKTHRRLLFVVDQPSTIGALPVAVARAEGVLVAYLPGLAMRRIADLHAGEAKTDARDAAIIAEAARSMPHTLRSLRLADEQLAELTMLRGFDDDLAAQLTQTSNRIRGLLTQIHPALERVLGPRLDHPAVLDLLERYPSPSALAAANEKTLANRLTKLAPRMGKNWAAEIVQALNEQAVIVPGTQAAAIVMPRLAQQLAALRKQRDEIAAEVERLVLAHPLWPVLTSMPGVGVRTAARRLTEATQKAFATAAHLAAYAGLAPVTRRSGSSIRGEHPSRRGNKVLKRALFLSAFAALRDPVSRAYYSCKIQQGKRHNQALIALARRRCDVLFAMLRDGTIYPPKSAPDA

SEQ ID NO: 435312 - protein, 351 aa, unidentified
MNSIDYIGFDIHKKTISFCAKAQDGRILDEGTIPARRSDLSAWAKRRSRPWWGAMEATLFTGWVYDHLKPLARELKVAHPAMLKAITASKKKNDQVDARKIADLLRCDLLPECYMAPSAVRELRRVLRYRNLVVREATRMKNRIAGLLMETGTLYNKERLHGKAYFSELLGSLREIPASVIELLKLSRAQVEFFATIQQRLVKGLRADAGLRERVERLQSIRSVGEILALTWALEIGEVRRFPSIADAVSYCGLTSAQRNSAGKEQRGPISKQRNKHLQTILIEAAKLAPRYNPQLAAVHERELQRGDRNQATLAVARKLVAYLMAVDKSGKPFQVRASAGEESKDEQPVG

SEQ ID NO: 435313 - protein, 340 aa, unidentified
MKHIGMDVHSTTTDACVRNGSGVVVLQRRIRTTQNELIDFVSSIQGQKRVVVEEDQMADWVTRLLQPHVDEVIRSQPQYNKLISGSEDKCDKMDAKALSELLYLNRVKVVHHPEMKYRILREAVRAYWVASRDLTRAKNRLKGWYLFNGLYENGRSIYSVRNRSAHLKAMQQEGRNTELAKLLYEQMDACRQLKAKHIQMLRKTARPVKDMVKLVMTMPAIGPISGYTLVSLLEDGWRIPNKRKLWRYAGLSLRRHESRDFGIKGASKTGNRLLKRVAMSAAITIVARGESNGLLALWEKDIRQNVSPKRARRNLARKIVVIAQHLLRSKQEYIDERIKV

SEQ ID NO: 435314 - protein, 459 aa, unidentified
MKRKGYKNASREQQDWSLNLDVVHPNAAGIDIGNESHYVAVPPDRDAKPVRQFACFTEDLRRMMEWLKSCNVDTVAMQSTGVYWLPVYEILAEAGLRVFLVNARHTKNLPGRKTDVQECQWLLQLHTFGLLNNSFRPPEEICVLRAYWRQRAQHVASAAACIQRIQKVLTEMNVQLANVITDISGVTGMAILQAILKGERDRYKLAALADVRIQATREEIARSLEGNWRQELLFILQQELDLYHIYQQQLAECDAAVGAHLQSLEDRIQPGSQLPPAKANKKAGSNAPTSFDLRGELYRISGTDLTQIDGINVMNAQTIIAEVGVDMSRFPSEAHFASFLGLCPDNRITGGKVLRRGTKHVENRAATALRMAATSLWRSKTYLGAKFRHLRARLGAPKAITAMAHTLARLVYRMLRYGDQYVDKGMQFYEEKYRQHQILSIQKKAKDLGLAITLTPAAA

SEQ ID NO: 435315 - protein, 418 aa, unidentified
MVATLEIFLLLGGMLMNAVGIDVSKGKSMVAVMRPLGELVVKPFEVHHTANELKDLSDLLRGLDGEVRIIMEFTGRYYQPIARYLVEAGFFVGVVHAKLIHDFGNNSIRKVKTDRADAIKIANYGLSNWISLKRYTPEDETRLLLKTCNRQYNQYMKLKVSLKNNLIAILDQTFSGLDEMFTSPVRADGHEKWVDFAEKFWHCEIVSSMNRAKFTTQYSKWCQKHGYNRSDSKASALYELALNQVATLPPTTQTKALIVQAISQLNFVSVSLAELRRQMQQLAASLPEYPVVLAMSGVGETLGPQLIAEIGDVRRFSHKGALVAFAGVDAPPFQSGVFESASRSISKRGSPALRKALFQVMKSILKNSPSDDAVYQFLDRKRAEGKHYYVYMVAGCNKFLRIYYARVKEYLITLENIS

SEQ ID NO: 435316 - protein, 301 aa, unidentified
MRIIGVDLHTRQQTIAMLDTDTGELVEKTLEHDGNEVRDFYSTLPGQVLVGIEATGSMQWFLRLMEELGIECRVGHPQKIRKAETRKQKHDRRDARLLLTLLAENRFPTIWMPSTTQRDLRTLLRHRHQWVHMRSRVQHTLQSMALTNGLRRGGSLWSQAGQHELQCLPLTRYAQERRAALLGLCPRLQETIEDLDRQVREEAQQRPQAARLMTHPGVGPVTALATEVFLGDPQRFTDGKTLASYIGMIPSEHSSGRRQRLGAMSKQGNSLLRYLWCEATLHAVRVDPELKRFYRRKLIQK

SEQ ID NO: 435317 - protein, 463 aa, unidentified
MTAYRFYVGIDWATEAHRVVILDADRCPLHDRTVRHEGVALETFAGWLAEDVAAGIARDVAVALEVPRGAVVDTLLARGFHVFALNPKQLDRFRDRYTVAGATDDRRDAQVLASALASDPPAFRRLEPEHPLMLELRELSRLEDELRQEFGRLTNRLREQLHRYFPQLLQLVPAADEPWLWALLERAPTPSAAQHLPRATLRTLLTRHRIRRVNADAVRALLRAPALTVAPGTVQAAQRHLAVLLPRLRLVHQQQAECATLIESLLDRLAESQEHRDVPILRSVVGVGRVVAATMLAEASRLLAARDYHGLRAQTGVAPVTRQSGRRTLVIMRYACNPRLRYAVYHWGQSAARHDPVSRAHYERLRARGHSHARAVRGIVDRLLRVLIAMLTAGTIYDPTRRRVLTHLGGRGRRDPFPPSGDGRRASGWSPAAAEQRTRAAWSSRPLPAPSAPASPVAQPPRA

SEQ ID NO: 435318 - protein, 383 aa, unidentified
MNDLIRIGVDTSKSVFQLHGVNAAEQPVLRKKLRRRQVIEFFQKLPATRVGIEACGASHHWGRELSALGHEVVLLPPQRVKPYVERNKNDAADAEAICEAMSRPRMSFVPVKTAEQQAALMLVGVRDQLVGRRTQLSNAIRGYAAEFGLVAAKGTDKIEPLLIRIAGDENFPPLAKDLFATLGNEYVRLKPELRKIEARLMAWHRGNELSRRLAEIPSVGPIGATLSVMKVGNPHAFRSGRDFSAWLGMTPKDHSTAGKVRLGAITKAGDEALRSVLVAGATSVIQQVRKGRGRPSPWLVALVKRKPPKLAAVALANKTARIIWKLMVSGERYNPQRAPQRFVPPTDSLAPGRRRQGQAACGGDLRSALTAPALRAPSAPPSA

SEQ ID NO: 435319 - protein, 368 aa, unidentified
MEKTAYVGIDYHISKLTIAVMIEGEKDFNSTIHLENKTKVIANYLKKLSEQYQLKICYEASGSGYHFQRLLQSWSYHCDVIAPSLIPKKAGDRRKNDFRDARELARNYASGQLTVVHPPTQYEEAVRSVVRCRLDFKENEKRTKQHINSLLISQGQHWQKSKWTLQHRKWIQQQSFSEPLLQQVLQENLAHLEYLETCTARLDQQIEQIAATDTYAPSVKKLRALKGLGTLSAMLLIAEITDFRRFASPRALMSFLGLIPSEDSSGVKSRFGSITKAGNRRCRTQLIESVRHYIKQPRMSRQMKADCAQVDPVSSGIVQKCMQRLHKRYWALTMKGKIRNVALVAIAREFVGFIWALMTHDDTVAQAA

SEQ ID NO: 435320 - protein, 340 aa, unidentified
MLGIDIGKNICSLVGFDAAGTVVMRRRATRETLIGLAAKLPACVVAMEACCGAHHLGRVFAAHGHEVRLMSPEYVRPYVKAQKNDDRDAEGIAEAATRPTMRFVELKTQDQLDIQTLHRSRDRLVGERTALINQLRAILLERGIVVPKGKRHLADYLAVMLDEGGRHTLSDRMYRLVDDARTQWRELDKRIAAFDAEFTAFAKENEDARRLATIPGVGALIASALLAAIGKAETFEHGRDLAAWLGLVPRQATTGGKPKLLGISKRGNRYLRRQLIHGARAALPHVAKRDTSLGRWLTTLLARVHQNVAVVAFANKLARISWAVLRRGETFADKEAILAA

SEQ ID NO: 435321 - protein, 338 aa, unidentified
MRCYAGIDLHATNSVVVVLDEQDQVLSQKRLRNELPMVLAALEPFRTTLAGVAVESTYNWYWLVDGLMAAGYPVHLAHAPALPQYSGLKYADDPHDARWLAHLLRLGLLPTGYIYPKAERALRDLLRKRSQLVRHKTMVVLSLQSLLTRQTGARFSLPRLRQLTPDGVRALLPFPEQVQSGLSSVTVLRCLEEQIREIEHTVRDQAGQRRGYALLQTVTGIGPVLALTILLEAGDIRRFPTVGQFASYCRCVSSQHFSNGKCKGHGNSKNGNKYLSWAFVEAAHFAIRYEAAIRRFYQRKAARTHALVALKAVAHKLARACYHVLREEVPFELGRAFV

SEQ ID NO: 435322 - protein, 338 aa, unidentified
MNYVGIDHHRQYSHMTLMDQEGQTIRSGRVPNLRAEIEKFLEGSEAVEAAIETGRSSYTMVDVLEEMGVAVKIAHPNEVKAIARAKIKTDKRDSEVLAHLLRMNMIPEVYRRSVENRQAQRVLRQRAFYVSAMTALKNRVHAFLAQQKEEVRDEVARETNIFSAKGQKVLMGLEMGRGEKRLLEALLKTYRHLETRIEESTALVEKLYEESREAQLIRTIPGFGKYLSVLVAVEIADLARFADAAHLHAYAGVIPSTHSSGDRTHHGKIVRAGNRWLRWAAVEAVWPGIRADFDLRCFFERLARGKDANKAKVATARRLLTIIYKVLKEGRNYIAYRR

SEQ ID NO: 435323 - protein, 359 aa, unidentified
MEYGAIDLHKKQSQIRILTEGGDVIEDRRIVTARERFTAVFGLRRPMRILVEASTESEWVARHLETLGHEVIVADPNYLPMYGDRSRRVKTDRRDVAALADACRRAVYRAAYRRSDQQRAVQAQLRVRQGLVNTRTRAISLARSLMRASGHHIRSGESASFLQRLAACEVPNDLTAILAPLRGVIEVVNDELASADTRFAALVENDPVIKRLTTLPGIGPLTASAFVAALDDVNRFRGAKAASQVTSYLGLVPREFSSGERQHRGHLVRSAQPQVQTLLVQAAWRVRRSTRSETAALRDWADRVSRRRGKNIATVALARRLARILFAMWRDEVDYQPRRIHANRQSQAATTEQPVARAV

SEQ ID NO: 435324 - protein, 343 aa, unidentified
MQTVTTIGLDIAKSVFQVHGVDAAGQVVIRRQLKRRQVLTFFERLPPCLVGIEACASSHHWSRQLLALGHTVRLMPPAYVKPYVKRQKNDMADAEAICEAVTRANMRFVPTKTPEQQSCLMLHRTRHLFIRQQTAVINSIRAHLAEFGIVAPVGRKGVTELLHIVADPNDRRVSEVARACLAALGNQLLSLKEQILQFDRMILAWHRSDQTSRRLHHIPGVGPMLATALVASVADATTFRSARNFSAWIGLVPKQHSSGGKERLGSISKQGDRYLRSLFVAGALAVIRYAKIHGTGHRPWLTALLSRRPTKVAAIALANKIARMAWAMMAKGERYKQPAALAR

SEQ ID NO: 435325 - protein, 398 aa, unidentified
MTESSDYESVQVFIGVDVGKDTHHAVAINRSGKRLFDKALPNGENKLRSLISDLKQHGQILLVVDQPATIGALPVAVARSEGVLVGYLPGLAMRRIADLHAGEAKTDARDAAIIAEAARTLPHALRTLKLADEQIAELSMLCGFDDDLAAQTTQASNRIRCLLSQIHPALERVLGPRLDHPAVLDLLQRYPSPEKLASLGEKKLAAQLCKLAPRLGKRLAADIAQALAEQTVVVPGTNAAAVVLPRLALQLITLRKQRDEVALEVEQRVLAHPLYPVLTSMPGVGVRTAARLLTEVACRAFASAAHLAAYAGLAPVTRRSGSSIRGEHPSRRGNKALKRALFLSAFATLRDPISRAYYTRKMSQGKRHNQALIALARRRCDVLFAMMRDGTFYTPQAS

SEQ ID NO: 435326 - protein, 343 aa, unidentified
MLYAGVDAHRTATHVTIMDDAGKVLARKRIPSSGDELRKFFANYQEPIKAVVEATYNWGPVYDWLDELVDDVVLAHPARVRAIADARIKTDTIDSQTLAHLLRADLIPEAYAPSKETRAIKRVLRQRMFFVRVQTMVKNRIHALLAQHAIEIPDVTDLYGKAGLAWLQQLALPAPDGQLLRDDLSLLTTLRERIIATDHLIAQFAKGDEIVTRLASLPGVGPFFAVLLRYEVDDMTRFRNAKKFACYTGLIPSTYASNTRVYHGPLTKQGKKWLRWAFIEAVGPALRASSSVRRYYDQIKARRGAHDARVCTARKLAQLAWTVWTERRCYEDRPARPAEEAAS

SEQ ID NO: 435327 - protein, 312 aa, unidentified
MTDITIGADISKDHIDLHSLPDGQTLKVANDRKGFAAVIAWIGSKAVQRIVYEPTGFYHKAFERFMAVQGLPLSKVNPRLARRFCEATGRLAKTDRIDAGLLARYGALLEPRLLQATPQIHNDLRELHMARLALIKDRTAAKNRAKTLTSPLLKRHNADRLRQIERQIKAVDEAIMALIAEDACLKARFDILISIPGLSQITAFTLLIEMPELGELDNKTAAALSGLAPMSRQSGRWTGRAFIAGGRAIVRQALYMPALVACRFNPDLKAKYDQLQAAGKAPKVAITAIMRKLVVLANALLRKSRKWTPKHA

SEQ ID NO: 435328 - protein, 328 aa, unidentified
MYLCILDSAGTVLLHRNLPTDAQHLLEAIRPYREDIVIGVECIFTWYWIADLCSQHALSFVLGHALYMKAIHGGKTKNDKLDSQKIAGLLRAGMLPLAYAYPQAMRSTRDLLRRRMYLMHQQSELLAHIQNTNAQYNLAAFEKRINYQTNRAQLSQHFPEPMVSKNIQADIDVLEALHNVLLSVEREVLQQARAHDPLSLQLIRSVPGIGKILSLVILYEVHDISRFSSAGNFISYSRLVKCARESAGKKSGARNSKIGNVHLKWAFSEAAVTFLRNNEPAQRYHHKLVCKYGKAKALSIIAQKLGRTLYFMLKHKEAFDPIRFFQDG

SEQ ID NO: 435329 - protein, 393 aa, unidentified
MIGGIDSHKDTIHVAVITGLGVDVVDREFTTTQAGYHEAIDWLRTQDCLDVVGVEGTSSYGLGVTTALREAGARVIEVNRTRVAERRRKGKSDRLDAYRAARGVLSGEASTIAKSDTIEPLRAVHNARKSAVKAKRVAWQQISATLINAPAPLRDRYRGLAEDKAVQQLIAARPARGTEPAVAGIMVALKVLARRHRALSAEIDELGDHLAETTTAINPGLAALQGVGPVVAAQLLITAGDNSDRLRSEASFAALCGTAPVQVSSGRVTRHRLSRGGDRQANAALHHIVTNRLRHDPRTRDYRDARLAKGGTKAAAMRALKRAVAREVFRALCGRCPVPDYSDLRPARQARHLTLAAVAAELKVWPSALSQLELGQRVDNDLVARYRNWLTAA

SEQ ID NO: 435330 - protein, 343 aa, unidentified
MDHFAGLDVSVKDTSVCIVDDTGRIVREVKVASEPEALLLVLKNPAYHFKRIGLEAGPLSQWLYSALAEAELPVVCVETRHMQGLLKAQINKTDRNDARGIAQMMRVGLYRPVHVKTLRSQKLRMLLTHRKLLQSKAIAIDNDLRGTLRNFGLKVGMVGTVKFEARIKELVENLPDLAVLVEPLLVVRRALREQIVVLHRRLLAIVRDDEVCRRLMTTPGVGPVVALTYRATVDVPARFRKSKSVGAVFGLTCSKYQSGEIDRSGRISRCGDEMMRVMLYEAAQSMLHSKKWSWLKAWAMQIARRRGIKKAIVALARRLAVIMHRIWVDGTEFRWTREQAVAA

SEQ ID NO: 435331 - protein, 347 aa, unidentified
MEHYVGIDVSLALSSVCVLDGAGAVVREAKVASEPDALVGFLRDLGLPIANVGLEAGPLSAWLYDGLKGAGHEVALLETRQVKAALSAMAVKTDRRDARGIAQLLRMGWYRPVHRKSASSQEVRALLAARKQMQGRLIDLEQTTRGLLRGFGLKMGETTRGRFEQRVVDLVAGHDMLERIMRPLLRAREALRRELADLHKQTLAIARDDVVCHRLMTVPGVGAIVSLTYRAGVDDPTRFAKSKAIGAYFGLTPRRYQSGETDVVGSITKAGDASVRTALYEAANVLLTRVTRYSSLKRWAMEVAKRRGLKRARVALARKLGVVLHRIWVDGSEFRWGKEDAAAAAAA

SEQ ID NO: 435332 - protein, 356 aa, unidentified
MNPMVSEEYDFVIGVDTHAATHTFAVVTAATGAVLDHAVFPTSGAGLQRAQSWMNRRTGNEATLVVVEGTGSFGAILTEQLLTAGRTVVEAARMPAGDRRGKGKSDELDAVRIARAVLGLAITDLRAPRTLACDRPRVAMRVLVVAREQMAAERTRAVNALTALVRTIDLGVDARKSLTARQITAIAGWRSRGEDATTATCRQEAVRLARRIKDLEGDLTNNRAAVTELIRNDTPQLLELVGVGAVVAASVLVAWSHPGRIRSDAAMASLAGTCPIPASSGNTTRHRLNRGGDRRLNRALTTITIVRMRVDPATRAYVARRRAEGRTTKEIMRSLKRYITRQLFRALAAAHPMSAT

SEQ ID NO: 435333 - protein, 356 aa, unidentified
MLNDKKYIGMDVHKESISIAVRNGAGKVVMECVIETKASVILQFIDGLRGDLQVTFEEGTWAAWLYDLLKPHVTKLVVCDPRKNASMREGNQSDKIDARRLAELLRLNHLSPVYHGEHGLRRLKELVRGYLTITKDLVRVMSRVKAIYRSWGIPCTGTQVYAPRHRAEWLGKISEPGVRRRAEFYYQQLDALRALRQEVRRDLLAESKKHQAWKRLCQIPSIGPIRAAVLLGILQTPHRFRTKRQLWTYSGFGIETQSSADHRSVNGQLERAKKPSSIRGLNRNCNHDLKNLFKGAAIVASSKPGPFQEFYTALLSKGIRPEMARLTLARKIATIALIVWKRGASFDAQHLKPQTA

SEQ ID NO: 435334 - protein, 396 aa, unidentified
MTTIGIDIGGRTHAVARCRDGQARADREILRIGQDRAGFGMLDAWLERQGEPVTLVTMESSGHYWMPLASHLCRRDIPVAVVNPLAAKYFARSRLARTKSDPADARSLAEMAMRDTPPARDPLAGAELRQAARFAMTLVEEQAKVCQRLVRLVELGFPELGELFDDPTCRTAREVLRIAPTARAATRRRTSTLANANAGPGHRRLGPAKAERLQAAAADSIAVPELDAEVAFEVGLLLDQYDLLERQIEEADRRVATLLDGETARRLQTIPGVGPSIAATLLAEIGDIGRFTDFDQLLAYAGVHPAERSSGRKGSNPETAWHMSKAGNAHLRAAAYRMALVGLQHNPVIAAHYARKRAAGKSKMNALGHCMRKALGLVWGVWRNGADFDPDWGFGT

SEQ ID NO: 435335 - protein, 361 aa, unidentified
MSESMALVGLDVHRAQTVAAVLDPVTGELSVERLRGAPAQVVLAFLEELGRPVRAVYEAGPSGFGLARAAEEHGIDVRVVAPGSIPRAPGDRVKTDRRDAKRLVRLFAAGELSFAFVPSETDERFRDLVRCIDDARKDLMRSRHRLSKFLLRRDLRFTGRSWTVPHQRWLGNLVFDDALSRATFVDYRCAVEALAQRRRALIGVLEEAAPQSSHGETIARLRCFRGIDTLTAAGLCAEVGSFERFAKPALLSGFLGIVPCEYTSDTKRVQGQITKAGPPHARRLLVEAAHHYRHRPAVGETIAARQAGQDPRVAAIAWRAQKRVNARWTHLGARRGKHTGTVAVACARELAAFCWEAATLD

SEQ ID NO: 435336 - protein, 355 aa, unidentified
MDSRKYIGMDVHQASISIAVRDANGKLVMESVIETKAATILECIRGIRGNLWVAFEEGTSAAWLYDLLKPHVAQVIVCDPRKNALLKTGNKNDRVDARKLSDLLRAGLLTPVYHGESGVRTLRELSRSYLTVTKDLTRVMNRLKALYRSWAIPCAGEKVYSPRHRSAWLEKLSEVGVRRRAEQLYQQLDMLLQIRREARRELLRESRKHPAQELLRQIPRLGPIRVALVIALVQTPHRFRTKRQLWAYCGLALQTRSSGEYRFTGGQLQPSQKLPALRGLNINHNHDLKNLFKSLATHVSTSSGPLGDFYQSLLAKGMKPAMARLTLARKMAAIVLTIWKKGERFDPEQLKRQAA

SEQ ID NO: 435337 - protein, 343 aa, unidentified
MKLIRVGVDLAKSVFQVHGVDRSEKAVWRRKLSRGEWLKTLLERIEPGCQIGMESCAGAHHWARQLEAKGYTVKLIAPQFVKPYVKSNKNDANDAEAICEAMSRPHMRFVAVKSVEQQDIQATHRIRSGLIEQRTAKANQIRGLVAEYGLVAPQQLGHLRSALPEWLEDAENGLSSHFRRLLNGLWGDLRTLDARVAELDAEIKKIAQSYPAAERLQQLRGVGPITATALLAAVGHGEQFANGRQMAASLGLTPKQHSSGGKDRLLGISKRGDSYLRMLLVHGARSAMRCSKDKTDRLSQWVTSLSARSHPNVAAVALANKTARMAWAMLRNGTEYQPGLVAH

SEQ ID NO: 435338 - protein, 426 aa, unidentified
MKQKIIKYGLGIDIGKDHFHVCLMGILSDSSVSILGRRKFRQTSGGFSKLTSWLKKHGLSTSSPLQIVMEATGVYHESLLFTLHQQGFAPCLILAKQVKDYGKSLNSFSKNDQKDSEVLAHLASHRKLAPWKPFSEQIYQLRSLMRHRRVLVQERVVFRNRLHALKHAHVPSEPVLTSTEALIGTFSEQIAGTEKKAIALAKADQYFWEKIQKIVSSLPGVGLITMLEVISETNGFAQFTSINQLICYAGYDIIENQSGKHTGKTKISKRGNARLRAAMHMPALSVIRNKVQPFYNLFERVLKRSGFLHKKAQVAVQRKLLIYIYVLWKNDEEFDPKKVPQSNKPEELNTDPNDQKQKEESIISEKKDNEDKQNEPHVDELTQRETQQKEELSGQNLSHSKSHKKGSSSDTLPELHGIVRAEALTS

SEQ ID NO: 435339 - protein, 341 aa, unidentified
MKNLFIGVDFSKEKVDVAILFADGLAETAARVFNEFKTTVSGYRQLVKWVEQNSCGIDSSLWLFCGENTGDYSKGLCNFLYGKGYDMWLENAKSIKDASGLRRLKSDRADASMIAEYAMRNYDKAVMYEPLSESLTQLRELFLYRQMIVRHRCSFQVRRGEKRLTMEKSPVKTMISQSGRHIVSELNKEIEKIDKRIADLIKSDEELTKVFTIVTSVPGIGTQNAVCLMVYTDNFRRFNYDSRKIACYYGLAPFGKDSGTSVHSDPHVHYMANRQIKAMLTQAALAAVNFNPIMARYYMRLVERGKKKQVALNNVKNKLVHLVTAMVRNRQTFTPEYKISA

SEQ ID NO: 435340 - protein, 339 aa, unidentified
MTIQSKKIVPEINSLFAGIDVGAEELILTIRKNGTPHKAQKFTNTPADRTRLVKKLVGMPGIVVCLEATGVYHFDLSIALHDAGVALMVINPKASHHFAKVLMKNSKTDAVDADTLAQYAERMDFVAWTRPSDEKLALRSFARRIDALTRQKAVAKNNYHALTSSQETPKAVLSDVKLAISQLEKRIENLSKEAMTLIGKHAELERAFQLLTSVKGIAKTSAIALMGELLLLPPGLSHREWVKFAGLDPRAFDSGKSVHKQARVSKAGNRHIRSALYMPALSAKQHDPHVKAYFQHLVDNGKKPLQALCAVMRKLLHAIHGMLKSDMPFDNTRFYAIPA

SEQ ID NO: 435341 - protein, 386 aa, unidentified
MRPTDNQTLSTAALDYDSTMIGALELSSKKWVLAVQLPGVKKHSRHVVEPNGSALAELIERLKSRSAAASKPIARVIITHEAGRDGFWLARFLERRGVEIHVMQSSSLPVDRRARRAKTDAIDVEMLLRTLMAWLRGEPRVCSMVPIPSEADEEARRAHREREDLIGARRSLLNKIDGILATLGIEGYRALRRDRRVQLADLRQPDGAPLPLAALARIERLLDRLELVMTQIKGVEKTRDAVVAKPAAENDNERMIRDLAGVRGVGVESATLLVREAFCREFANRRSLGAYAGLAGTPFASGGMQREQGISKDGNHRLRALVVELAWFWLRFQPGSALAKWFRERVAGAKGRVAKIMIVALARKLLIALWRFAKDGVIPEGATMKA

SEQ ID NO: 435342 - protein, 445 aa, unidentified
MEIMFSHCAGLDVHKKRITACRVPPDLTGQQADGLLELQDFGTMTADLLVLSDWLAAAGVTHVAMESTGEYWKPVFNILEESFTVFLVNASHGKQVPGRQTAKADARWLAKLMRYGLLQASFIPPAGQRDLRDLTRYRTKLVQERGREVNRVQGVLERANIKLAAVATNIFGVSGRAILAALIEGRADPATMAEWAKGRLRSQVPLLEEALTGLVRDHHCRLLTIQLAPLDFLDEPIDALSAEITGVLTDLSGGEPPSTLANPSPPAEPVVAPAPPQPPLTFARAVSLLDTIPGVNQRGAELLVAEWGIDMTRFGTAERLSAWSGVAPGSDESAGKQRSGTTRKGNRALRAGLTPLAHAAARTKGPYLSAVYHRLAARRGKKRAILAVAHAIVVSAFHMLSRNEPYRELGANYFDEHRRHQRVDRLARRIERLGDQVSLQPVTAA

SEQ ID NO: 435343 - protein, 393 aa, unidentified
MFNPLKVRLMRAVCGLDVHKDSVYLCILTGEGELIEKVFGVLTFQLQQMRDLLLAHNVDEVSMESTSVYWIPIWRVLAPHFHMRLVNPYFIRQLPGRKSDVADAQWIAECTLKNLVSGSFVPPEDIQQLRQYDRRIFDLDEEIVRKLSKLDAVMQRCNFRLSNYVSNVDCKSYKDVVRKISEGVTDPESLIGEIHGRIIKHHGRETILASLAGVISQAEIDVLRQLREELALAEEHKRECLERMLEICQEKYPDELRRLQTIPGVKERTATSLIAEIGTDMSKFETANHLSAWSGLRPRNDESNKKFKSRRITHGNIYLRKNIIQCAWAASRTKGCFFSRFSYHQTQVRKKNKMKVIVAVARKLLVAAWHVIHDKTDYADFQKQDRQAPASNG

SEQ ID NO: 435344 - protein, 410 aa, unidentified
MVYPRCCGLDVHKKTVVACCMLSTKGRKPVKEIRTFRTMTTDLLALADWLQEKGCTHVAMESTGVYWRPVYNVLEGQCELLVVNAQHIKAVPGRKTDVRDAAWIAELLRHGLWRGSFIPSKPQRQLRELTRYRSTLVQEHARTLNRLQAVLEDAHLKLASVVSDISGVSARAMLEAILAGERDVEALADLARGRLRAKRDQLKEALEGRVTAHHSFLLTEHLSALEYLDEAVARVSAEIDQRLTADQEAIALLDTIPGVGPRAAEILIAEIGTDMSRFPSAKHLASWAGMCPGNHESGGKRLSGKTRKGNRWLRQILVEIAHGASKTKQTYLAAQYRRIAARRGKKRALMAVGHTVLTIVYTMLTRQQPYQELGAAYFDQRERQRVERRLVQRLERLGDEVALQPRALAS

SEQ ID NO: 435345 - protein, 347 aa, unidentified
MSITMIGLDTAKSVFQLHAVNESGKVEIRRKLQRSELIPFFEKQEARIVILEACGAAHHWARMLTGLGHDVKLIAPEAVRPFVKKGKKNDAADAAALCAAASRPDVKFVPAKTLEQQGVLALHSVRSLLVKQQTMLANAMRSLAAEFGLIVPKGIGKLRELMELVDADATFPKRALQAIRALLDHCGALAESIETFEAEIVAHARHDKTARRLATIPGIGPITASLIAATVADIGVFKSARQFAAWLGLVPRQHSTGGKTRLGRITKAGNREIRTMLVLGATSMINRAPHWNSAAGVWLRGVLERRPVRLATVALANKMARIAWALMTRKEVYHAAGRMIASAEAAA

SEQ ID NO: 435346 - protein, 341 aa, unidentified
MSEYIGLDVSLKETAISVRRGGKRIWRGKCPSDPSLVADVLRKRAPAAKRVVFETGPLSVWFYHALSAEGLPAICIDARHAKAALDMAPNKTDANDADGLAHLAEVGFYREVRVKGYDSMLSRTLVAARSRLVKITTELSNQIRGLMKTFGLIIPRSKGGKFEADVRRLLADQEELGRIVLPLLEAWLSMRARAAELGQQLVANARHNDACQLLMSIPGVGTITATSFIGAIEDPSNFKTSRAVGAWLGLTTRRYQSGEVDYDGHISRRGDPHLRGLLYEAAVVILTRSRADSSLRTWGLKLRDKIGFKRAAVAVARKLAVIMHAMLKSGELFNREEAAMA

SEQ ID NO: 435347 - protein, 367 aa, unidentified
MVQSDYTVGCDAHKHFSLFAALDRRGNLVQRTRVGHVSGAIRVFLSQFPKGTPVALETVGNWYWIVDEIEGAGCIPLLAHAAKAKVMMGNIHKTDKLDAHGLATLLYLGKLPSVWIPPARVRDERELPRTRMTFAQHRTRVKNRIRSTLAKYALSLDTASDIFAPKWRPELEITLQRLPEETGRCVLQQLQLLDALSEHIRRLEDRIMERIEATPTIQLVQTVPGPAKVLAIVIEREVGSINRFQAAKHFTSYCGLVPKLSASAGRAHYGRMVKQCNTYLKWAFIEAANVIVRHRHAPNWRHKYVVHLYERIRRRKGHSVAVGATARYLAESTYWVLKKSEPYREPPHWAPAGMNSPVSLSQGQARA

SEQ ID NO: 435348 - protein, 423 aa, unidentified
MRFIGLDIHRDFCEVAIAEGGELRLAGRVQTEPEALALFAQSLGGDDEVALEATGNALEIARIIEPHVGRVVLANPKAVKGITRAGPKTDKIDARTLAQLLAGGFLPAVWLPDEQTRILRRRISARAQLVRQRTRAKNQVHATLMRNLKGKPPVSDLFGARGRRWLAAQDLPADEQETVAACLRQIGFLDGEIGLVERTLAEQLLASAELRRLLTLPGVNFVTAAALLAAIGDIRRFPSARQLVSYLGLDPRVSQSGVEPARHGRISKQGPGETRHVLVEAAWHAARTAGPLRAFHQRVAARRGGNVATVAVARKLAVIAWHMLSRGQDYAFARPSLTREKIRKLELATGAERQKGKRIGVWVTKEQHRLDKELAAQAELAYRRLVQDWQPAIKGTGAAPGRASCGPSSGQAARQETAPTPAL

SEQ ID NO: 435349 - protein, 376 aa, unidentified
MGTPSAQTLDDVGVRKMFQELEEVPMTMVGGLDVHRQQITFDYVDDDGLVHWGQIRPATRKTLRGWLAEHCPDGNGEFALEGCTGWRYVSEELAAAGLGVHLGDPAEIAVLRGPKKRAKTDRADAKLLRTLLLEGRFPESWIPPAHVAEIRSLGRLYYTLMDERRAWQQRIHAQLFHQGCPPIKALLSASGRDALARAPLSAAGRQYVDTALRRIDELSAEIEPLRTQLANFARRQQGCQALQRHYGIGWLCAAIIWAEIGDTRRFTSSDQLVRFAGLDITVYSSDSKRSPGHLSRQGSPELRWAAFEAAKCAARRGSPDYAYYHRQAAKHDGHNGKNPTLAVERKILRRCYHTLRDLGDAALALPDTRPQQEVAA

SEQ ID NO: 435350 - protein, 363 aa, unidentified
MRMKKHPQFFISKSPHRSPRVGITIGIDLGDIWSHYCTLNEDGEVIDRGRFRTNTAGVDKRFRDIERALVAMETGTHSIWVSEQIKELGHEVIVGNVRELRAISHSDRKSDKVDAEKIARYARVDPEILRPIAHRTVAQQETLTLIRARDVLVRLRTGAVNSVRGLAKPCGYRLPASSTLCFAKRCLAVLPPGLAEALGPLLHQIADMTVKIKQYDRAIKELTKTAYPETQALIKVYGVGHLTALTFVLTLGKKERFQRSRDVGCYLGLRPRRSQSGDCDPQLGITKAGNGYLRQLLVECANHVVGPRGKDSALRQWGLNLGARGGGHARRRAVVAVARKLAVLLHRIWVTQEVYKPFYAAAA

SEQ ID NO: 435351 - protein, 315 aa, unidentified
MYIGIDIGKADFHCALLVEEKVATKSFPNNGKGFNQLASWLRNRRVENGHACMESTGGWSEELATFLHARGYVVSIVNPLAVKAFGRSELSRTKTDKADAALLARFCAAHRPTPWIPPSPQERRLRQLVRRRSDLVATRIAESNRLEAPGTDAVRTSIETSVAFLNEQIAEIDVQIKRDIDNDPKLRKNRQLLESIPGIGATSASSIIAEAQDMQQFQSARKLAAHAGLCPQVRQSGTSIHSSSLSPIGNRALKQIFYMPALSAMRHNPTIIAFAQRLRDRGKRPMQIVVAVMHKLLVIAYGVLKSQRPFDPKLA

SEQ ID NO: 435352 - protein, 351 aa, unidentified
MNNEVYYVGMDVHKKRISYCIKRKDGEIIESDSIAATRKDLAKWLITTMDHPWIGAMEATLFSGWIYDYLRPHFEKLKVGHPQMMKAISQGKKKSDKLDAEKIADMIRANLFPECYMMPKHLRELRQVLRYRNLLVRQGVRMHNKMATLLMEVGAEYSKRRLKGKRYFRELLEKLQDVPESVIGMLKMSRAAGELFDAAQKKLIKSLHENPDIRRRVDLLMTIDGVGKVTALTWVLEIGEVGRFSSIKDIVSYCGLCSAQKESAGKSFRQPLSKQRNKHLQTILVEAAKLAPIYNSQLAALREKELKKGNRNRATLAVARKLVAYMHAVDLRQTAFEPRAAVLGQPVGSKE

SEQ ID NO: 435353 - protein, 363 aa, unidentified
MGKYDYKGKMVYMGIDVHKKTYACVSICEGEVVKRDTMPAEFATLISYIQNTFPDAEVNTAYEAGFSGFHLHRELLKAGIKNIVIHPGSIEVASRDRVKTDKRDARKIATQLAAGRLRCIYIPSLEQEAKRSVIRLRDSIVKSRHRVGLKFKSLLFTQGLIKGGDDTAISKKWLEAKLTEAKSNLLSEFYYSLKHYAEQWLELTKDLNKIKKDLLAMQSEKDKALLSIYKSAPGIGDITALKLKDELGDMQQFTNEKQLFSYLGFTPIEYSSGEHKWQGHISRQGRSMLRHILVEAAWTAVCKDPGLMEIYQRIASTRGGKRSIVAIARRLAGRLRTCVSNGVLYEKNYKHVNVLSKIHQVAA

SEQ ID NO: 435354 - protein, 320 aa, unidentified
MQSPLFVGVDVAKDNVVVACSQASFTTRSVSNTTTALKAFLRTLPVQCRIGMEATGCYHQNLADLAHGLGLQVYVLNPRDLYHYAKGVGMRAKTDRVDAALIARFLAHEADRLRPYEPATAEQRKMDQLLRRRSKIVTLKTALRLACAQDAFIQTETAKVIKAFDVLLKKIDGQIAQLNRATPERACQIQRLQTIPGVGLLTASWLANLMDRVKFSNSDALVAFTGMDPRPCDSGQKRGKRRLSKRGPAEGRRLLFNAAMAAIRSPVWKDAYAYYRQRGWSTTAAILIIARKILRIALAMHKAQAAFDSRQLAERTTRAS

SEQ ID NO: 435355 - protein, 489 aa, unidentified
MSYYIGCDWASTAHQFCAIDAQGQIAWQDSVPHTTDGLTALRRQLQRFGAAADVSVAIERPSGLLVDVLLEGGYRVVPIHPNALKASRPRYRMSGAKTDASDALILADLLRTDGHRFRPMQGPADETRALRALVRTRDDLVATRVGLANQLRALLESFWPGAAQIFADVDSPIALAFLERYPTPESAAHLGEKRLAAFLGRNSYTGRRSAPELLDRLRRAPTVTTGEAAAEASGDAVRAVVGVLGPLVAHIQKLTNAIAQAMQVHPDGAIIMSFPRAGCTNAAQILAELGQERLRFQSAEHLAAEAGVVPVTLESGKHRGVTFRWACNKRLRQAITMFADNSRRASPWAAQIYQRALARGCDHPHAVRILAPVRGCASCGGAGSPRRLTSAASIGPHCTSTLPNQLGLDTGCLFGDECDRRPHEGLFGPVRNPQPRTANPVRLSPWVSSSVSNECTRDGRAAPRSQSCSEPIRRNVGSWESRSASFTSS

SEQ ID NO: 435356 - protein, 387 aa, unidentified
MPQPNDLGRSLVALDQDSTLVAVIEMGQASWLIAAIVPGLNRHPLKKIAADAEQLLQVLRRWKQEAETAGRTIKRVAVAYEAGRDGFWLARWLRAHGIEAYVIHPSSVPVSREHRRAKTDRLDTELLKRAFLGWLRGEPDHCSMAAIPTLTEEDAKRPGRERENLVGERTRIVNRIRGALARLGIRNFKPMLRNAPQYLETLRTPEGAVLPPNTLAELRRDMARLSFVKQQIKEVETARLERLQRASGEGGNAMVQLLTRVVGVGVETADMLVQEVFTRNLRDRKAVARYAGLTGAPDESGKRRRERGLAKSGNARVRRGMLQVAWGFLVHQKDSVLAAWYRARTADARGATRKTMIVALARKLLIALWRLATTGEVPSGLALRAAA

SEQ ID NO: 435357 - protein, 347 aa, unidentified
MRYLNCTAASYVGVDLHARTLFVCVLDQAGAIKLSRNLPAKPQPFLNAVEPFLPDLVVGCECMHSWYWLADTCRAHNIPFALGHAFGIKAVHASKTKSDAHDAEVLARLLRGGNFPLAYAYPSERRGLRDLLRTRLRLVRQRAELYGHIHTVRRQLNLEPVGSDVKYKSKRDGAAEDITDPHTRRGVEARLNLLAPLDTEIRRLERDIEAAAEEHYPTELAALQTIPGVGRIISMTILLEIDTVTRFESRQQFCSYARLISPKQESGGKIVGVGNKKAGNAWLKWAFSEAAVLGAQKDERMKKCLAKLQSKHGSGKGLSIFAHKLGRVVYHLLRTKKVFDVDRFVRG

SEQ ID NO: 435358 - protein, 522 aa, unidentified
MARSVAVRSRSAKRRRGIVHVHKPHGMIDPRVQLATPERFGVVAVDCAKLRSKWMLCDFYGRILVPPTTVEHSRPGLHQAIDSLRIAVLEHRLADTIVAVERTGNYHRPVQRAFRDAGYDVRIVHPFAARQFRQVDHPGDKTDDHDLGGIHRAAVVGFGLVDTPLEEPYRSLRLLVRHRRDLVQKTAALQCQIREHLEATLPGFATLFDDDTFWNASLAMPLARRVASPDAVRSLGADGLMRLLDDAGVRYQRRTMHKVVAWAERAAPAEPDAALHLRILADLDDNRLSKKRLISSLEIDIAALLARTPYLLLLAIPGINVVSAAEFAAEAGPITLYANPSAITGRAGLFPSRYQSDSVDVRGNMVRCANRRLRAALLMIADNLLLVNHYFHGLAALWKQRGVDPRLGHVRVAKRFSRLAFAIVAGRQIVPHPCCREPHYILDKLLAFHLEHRATPQQIREQLAAATEQLPPAARVREGNALQPRVSEFRRAHRPHVQKIGDILTEVLAKLLATTVQSASEV

SEQ ID NO: 435359 - protein, 333 aa, unidentified
MEHDSTVYVGLDVHKESITIAYAVGMGDVELLGRIGTAKGDIDRLCKRLHSKGRRVHVVYEAGPCGYGLYRQLVAEGFECMVCAPSLIPKKPGERVKTDRRDSIKLARALRAGDLSAVHVPGIEDEAFRDLARAWVSAKDDLKQARQRLKSFLLSHGVRYPGKADWGSSYRRWVSQHSFSNEWQQLAFEEHRRTLGDRMAQCERLEAALRDSVVNWRFYPAVLGLQAMRGVQFTTAVGMLAEVGDLSRFEHPRQLMAWLGVTPSEHSSGDKRRQGGITKTGNSNARKLLIEAAWSYRHQARVSENIGRRHPGLPKPIIDRKRLGWASAPFARA

SEQ ID NO: 435360 - protein, 313 aa, unidentified
MSDNLPQTIGIDISKASLDCHAHPAGAERQFANTAKGHKALIAWLRQWPVERIAYEATATYHRALEAALADWPCVKLNPERARRFAQATGTLAKTDRIDALLLARMAATLQPPIRPARSAQQTQMAELINARDGLVRDRTALKNREKNLTIAFLKRQCRQRLEQIDRHIEALDAEITNLIATDAALARRHRILTSIAGVGTLTANQLIATMPELGSLENKQAASLAGLAPVARQSGQWKGKSFIRGGRANVRQALYMPALVAARYNPDLQAKYQQLVKAGKPPKIAITAVMRKLVVTANALLKADRCWARSMA

SEQ ID NO: 435361 - protein, 417 aa, unidentified
MKKHSNSLKKSEAQPKRRKLGVAVERKPQEVMAELVAKLAEQLDVEIVPAVEGKESGRDQVRPNLDRLTVGVDLGDQWSNYCILGLSGETLAEGKFRTRKQEVEEFFQNLATSRVVFEVGTHSAWVRELIAGFGHEVLVANPRLMDGSKRRRRKNDRIDAEKLARLGRMDPKSLHPIQHRSTEVREDLLVLRAREALVESRTKLISTVRGLVKSMGARIPSCSSPSFSEKAATEIPDDVGETLQPLLRLIATLSEEIKTFDRRIDKLAAEKYMETQLLRQVAGVGPVTALGYVLTLETPLRFARSRDVGPYLGLVPRQEDSGEIQPQLGISKAGDRMLRKLLVGSAHYILGPFGPDTDLRRFGMRLCERGGKNAKKRAAVAVARKLAVLLHRLWVSGEVYVPLGYGAHTNTAHAVAA

SEQ ID NO: 435362 - protein, 336 aa, unidentified
MHYVGIDVSKRSLDVCLLAEGSKGSRKTKTLSNGQDSAQNLAKWLILQKCELSQTHVIMEATGIYHEYLACGLHQMGILTSVINPCRSREFAKAMGIFTKTDAVDAYVLAFYGCLKQPEAWTPPEEEVRKLRALLQHRDSLLNDKLRIDNRLNTLKSTEAVQEVMDSLSLVNQYLKSEVARIERLISSHIAQHPGLKRDLKLLMSVDGIGKQIGWNMLAVLRGNNFKSAEQLAAYLGVVPVERRSGTSVHGRARLSKIGSSNIRAKLYMGALTAISKNSHIKALYERLLAKGKMKMSALGAAMRKLVHLCYGVLHTQQPYDEKYKAKIICISRDLI

SEQ ID NO: 435363 - protein, 409 aa, unidentified
MDVVFDRVAGLDIGKKSVVVCVRTPGERGRRVSQIRTFRTMTRHVDVLGDWLVEEGVQVAAMESTATYWKPVFYGLEDRVECWLLNAAHMKAVPGRKTDVRDAEWIAQLVEHGLVRPSFVPPPSVRRLRNLTRYRVQLMGDRTRHAGRLEKLLEDASIKLSSVASNITGTSSREMLAALVAGERDPAVMADMAHSSLRRKIPDLTEALIGRFDDHHALLVGAMLRELDLVDGALVRLDAQIAAEMAPWKHELDLLRTIPGVGQVVSQVFIAETGGDMSRFGSPESLAAWAGVAPAVHESAGKRTPAGSRRGNKWLTAALVEGAHSAAQSKGTYLAAQYARLASRRGGKRAAVAVAHSMLVSAYWMLVRDEPYQDLGPDWLSKRNDQAHTRRLVAQLERLGHTVVLDPVA

SEQ ID NO: 435364 - protein, 399 aa, unidentified
MERQLERCCGLDVHKESIAACVRLGGRTGKAEQYVQTFGTTVAELLVLHDWLAAHGVTHVAMESTGVFWKPVFYALESDFTCLLVNAAHIKQVPGRKTDVQDCVWIAQLLEHGLLRGSFVPPAPIRDLRDLTRYRKALIHDRTRVANRLHKALEEAGIKLASVASDILGVSGRAMLAALVQGTTDPAVLADLARASLRRKLPALRQALANRFRPHHAFVLGQLLAHLDYLEEAITTISTEIERVMAPFAEPLRRLDTIPGINQRPDMSAFPSARHLASWAALCPGQHESAGKHKSGKTRKGNRWLRTALIEAAAGASRAKNSALQARFRRVLRHRGPKKAVVAVAHALLRMVYHVLADGTVYREAGADYYDRHHSQRITRRALQTLERQGYRVTLEPPA

SEQ ID NO: 435365 - protein, 417 aa, unidentified
MSMTPSASSQEKATIKYVCGIDIGSQSCAGCICQPDKNLVGKPLVFANSKDGWDVLLDKLNHLDALPQEILIGMEATARYSENLYHELERRGYQLCLLHPGQTHQFHQRQGLRAKTDRLDAMTIARVLLSGEARAGYIPNELVATYRELVRLHSQLSEQAARYQNQIHALVVVLFPEFTQVFADPCLSSALTILRAYPSAQAMARAGEKALYTLLRAYKHAHYGHPTAKKLVSLASTSVSSGRAEAGRSVSLRMLCEQLEQTHKHLERLQTELEHLIATDPAVKGLQQIPEFGTKTIAVLRAELGEVERFARTDQVIAYAGLDVEIKESGLWKGQAKLSKRGSGLLRQTLYLAALRSIHLQSSAFGAYYRRLVARGLKKGSALMAVMRKMLAVTVHLLKHEQQDYDPSKIGVGMLAV

SEQ ID NO: 435366 - protein, 411 aa, unidentified
MERIVERPGALDVHKASVTACVRIWEGRKLTEQIAEFQTTVAGLLALGDWLAALGVRQVVMEATGVYWKPVWAVLEDSFELMLVNARHVKQCPGRKTDVLDSQWLCQLLEAGLLRASFVPPKPIRTLRNLTRYRKTQINDRQRESSRLHKILEDTGIKLSCVASDILGKSGRDMLDALVTGTTDPVVLADLARGQLRKKLPALQEALVGRFEDEHTLVVGQILAHIDFLDEAIDRLSAEIEERIRPFAAQRDLLMSIPGVKQRAAEVLISEIGVDMSAFPTPKHLASWAKMCPGNDQSAGKRRSGKTGKGNKWLRATLTEASLAATRTKNSYLAAQYQRLRGRRGHSKAVTAVGHSILTAAWHMLQTGELYRDLGGEYFTQRNPDQTTKRLVRQLEALGHSVTLQPREVAV

SEQ ID NO: 435367 - protein, 343 aa, unidentified
MQTVTTIGFDIAKSVFQVHGVDAAGEVVIRRQLKRRHVLAFFEKLSPCLVGIEACASSHYWSRELQALGHTVRLIPPAYVKPYVKRQKNDAADAEAICEAVTRANMRFVPTKTPEQQSGMVLHRARHLCMRQQISVINAIRAHLAEFGIVAAVGRNGVEELLDIVADPSDNRVPDIARTCLAVLGAQLHSLKEQILEFDRMIRAWHRSSEMSMRLDDCPGVGPVLATALVATVADPNAFRSGRNFSAWIGLVPKQHSSGGKERLGSISKQGDRYLRGLFVIGALAVIRYAKIHGTGHRPWLAALLARKPAKVAAIALANKIARMVWAMMARGERYKEPVALAR

SEQ ID NO: 435368 - protein, 404 aa, unidentified
MEVLYKRCCGIDIHKNMMVACVFTSVRKKEIRQFSTMTEDILQLVSWLKETDCEMAAMESTGSYWKPVYNIFEEEQIPTMIVNAQHIKGVPGRKTDVKDAEWIADLVRHGLVKASYIPNREQRELREITRYRQKIIEERARELNRIQDVLEGCNIKLSSVITDISGKSGMAILKAIISGETDPIVLSELAEGRARNKIPEMQKSLQGRISEHQQKMLKHQLGHIESLTFLIMDLDADIKKTESINWAIEALDSMPGVGRQSAERILAETGVEMEHFQNESRFSSWAGLVPECKESAGKKMSTRIRKGNKYLKATLVECARAAIRNKQSYLYSRYQRIAARRGGKRALIAVAHTMLIAIYHILKEKVPCHDLGDDYYSVINQEKLIKRNLHALEKLGMDVIIQLK

SEQ ID NO: 435369 - protein, 318 aa, unidentified
MPFAAPAFVGIDVAKAELVIAIRPSGDRWTVANDEVGIRALLKYLHQHATALVVLEATGGYERAVVAALAAARLPVVVANPRQVRDFARATGQLAKTDPIDAETLALFAERVRPEPRALPDEAATALDALLTRRRQVLEMIVAERNRLEHALPAVRRGITQHIHWLERQLHDVDRDLDDAIKASPVWRAKEDLLRSVPGVGPVLSRTLIGALPELGALPRKQIAALVGVAPLARDSGVLRGKRLVWGGRAPVRAALFMAALVGTRCNPVIRAFYHRLRVAGKPKKVALTACMRKLLTILNAMVRTNTTWRYVPPSQTT

SEQ ID NO: 435370 - protein, 339 aa, unidentified
MRQYVGLDVSQRETAVCVVNETGQAIFEGKAKSHPGDLSKLLRKHAPLAERIGFETGAMASWLWHELRRVELPVVCIDARHAHAALSVRMNKSDQNDARGLAELVRVGWYREVKIKSEESQKVRAILVARFRLVSMRRDIENQVRSLIKECGLLFPRAIGQQFRNLVRELLSEGHQLLAVIEPLLSIHEHICQQQSKFDDEVRRLAKSDETTRRLMTVPGVGVITALTFRHTIDDPSRFRSASTVGAYLGLTPRRNQSGETTGKISRWGDRLLRTYLYEAATVLLYRTKKWSSLKAWGMKLAKRVGMKKAKVAIARKIAVILHCIWVDGTSFDWSHAPA

SEQ ID NO: 435371 - protein, 354 aa, unidentified
MLAELVDAVVGVDTHRDTHQVEIALPSGAPIAVTTISNDTSGYAELLAWIVNHAPGPRLAVSIEGTRSYGVGLARAAAEAGLVVLECEQPHRKARRGKGKSDPIDAHLAVLAALRLDADRLPTPRADGDREALRILLSARQELTTASTAQTNRLRALLLGGDDTDRELARGALTETRLASLARRRPPREAIREQAVRHAEIRRLALALREAARALKANRAQLQAIVNDLVPGLIERRGIGPVSAAQAIVSFSHPGRCRNDAAFAALGGASPLPASSGRTVRHRLNRGGDRALNRALHTIAATRMRSCPTTQAYVARRTAEGKNPREIRRCLKRYIARQLYRTLATAMTPAAETS

SEQ ID NO: 435372 - protein, 356 aa, unidentified
MNKIIRVGVDLAKHVIQVHAVDAAGKVVTNRALKRDKFLLWCADLPAGCLIAMEACSGAHHWCRKLTERGFDARMIPASSVVPYRIQGRTGKNDANDAAAVCEAASRPHINFVPPKTLAQQGMLCVHRLREGFKEERTSCINRIRGLLAEFGVVLPQSPDVLRHHLSDVIEDASNDIASIARLVLQRAQDHWRELDAHIKWCDQRIADHQKTDAQVQRAAELMGVGSITASAVVATVGDFRQFKNGAQFAAWLGLTPKQNSSGGKSSLGSITKRGSIYLRTLLIQGSKAIALTRQYDNPIFLWVQKLRERAGWQKAVVALANKNARILWAVMTREKRYDAHHISSYPAPVPIMTPA

SEQ ID NO: 435373 - protein, 352 aa, unidentified
MTMLSEIVDVVIGVDTHKHTHTAAVVAAGTGAAVEHTTQPTDPDGYAALVAMADRHSGLRAWAIEGANGYGAGLARFLAERGEWVIELDRPARPARRNGAKSDEIDAVRAGREALSREHLAQPRSDGERAGLSVRLTARRSAVEAAADAQRQLHALAVTAPETLRGRLRGNTTAEMIRTCTRLRIDSRWDVTTRETATVLRTLARRITDLTNEARDHERAILELVRSWRPDLLTQPGIGPIVAATVLCAWSHPGRISTEAAFAMLAGTAPIPASSGTTNRHRLNRSGDRQLNRAIHTIVLSRLRHDPTTRAYTQRRRAEGKTDREIKRCLKRYVTRQLFRLLEHAPNPLDTP

SEQ ID NO: 435374 - protein, 339 aa, unidentified
MQIHSVGIDLGKTIFHLVALGTAGKVLALKKFTQKQLLAYTANMQTSLIGLEACSGAHFLGRALRKQGHDVRLIPAQFVKPFVKSNKNDFIDAEAIAEAVERKNMRFVPIKTDDQLDLQAIHRVRDRLIARRTAVINQLRAFLLERGLVFAQTPAKLKAAMADILENAESDLTPRMRNLIDGLWSEWKLVEQQIEELNEELERISAADAGFTRIRKIPGIGPVVATAIVAAIGNGAAFSKGREFAAWLGIVPRQYSTGGKAKLFGISKRGNAYLRRILIHGARAAVLHIKRDRAPIGAWLDALDARAHKNVVVVAMANKLARIAWAVLSSGNEYRPVAT

SEQ ID NO: 435375 - protein, 343 aa, unidentified
MKITTIGLDLAKSVFQVHGVDAEGRTVSCKRLRRGQLLDFFKALEPCLVGMEACGGAHHWARKIMALGHEVKLMPPQYVRPYVKRNKTDAADAEAICEAVRRPNMHFVPVKTLEQQSILMLHRGRELLLRQRTMLINALRGHLAELGLVARQGRGGVDDLVQTMAEADEMPSLARRVLGHLAEELREIETRLKELEKELLAWHKASEASQRLATIPGIGPITATALAATAGDGRAFKSGRQFAAWLGLVPSQHSSGGKPRLGGISKKGDGYLRRLLVHGARTQTRWRDRASPWFQEILGRRPVNVAVTALANKNARIAWALLNRGETFWRTPSNRETAQPIAA

SEQ ID NO: 435376 - protein, 410 aa, unidentified
MDVIVERPAALDVHNASVMACVRGPGEKGRREQHVSEFSTTARGLLTLRDWLAAHGVTQVAMEATGTYWKPVWAVLEDDFRCLLVNARHVKQVPGRKTDVRDAEWLCQLLEAGLLKASLVPPKPIRTLRNLTRYRKSQIRDRQREANRLHKVMQDTGIKLDCVASDLLGKSGRAMLDALVSGTTDPQLLADLARGQLRKKIPALREALAGRFDSEHALVVGRILAHIDFLDEAIEQLSEAIEEQIAPFVAAVELLCTIPGVGRRTAEVIIAETGADMNAFPTAKHLVSWAGVCPGNDQSAGKRRSGNTTKGSKWLRGALIEAAKAASRTKDTYLAAQYARLRVRRGANRASVAVAHSILTATWHMLQNGELYNDLGGDYFARRDPERTTRRLVAQLERLGHTVTLEQAAA

SEQ ID NO: 435377 - protein, 321 aa, unidentified
MQTNPAVVYAGVDVAKATLQLHLQGQQSEFSNTPKGLHQWCAQLKKVPSVHVVCEATGGYERAQVKGLHQEQIPVSVTNPARVRAAAQAQGQRAKTDQIDARGLTDYGQRYQPEPTPPTSATQDQLVALTQWLKQLIRGRALAKTQAEHHQDPFVRRQHAKLMTHLQSQIEAAEEQIEALLEQDAALQQRVDCLDEIQGVGPRTAWLVLAHMPELGQLNRHEVAALAGLAPWTRESGTMKGMRCIGGGRPEVRLALYMAALSAARCNPVLRTLYKRLRAKGKLPKVALTAVMRRLLTYMNHRIKALLSETATAQTKGLQKA

SEQ ID NO: 435378 - protein, 316 aa, unidentified
MENPQTFVGIDVSSQRLDVDTVPVSQPFSEPNNEDGIASLTAHLKALNPQIVLLEATGGYEIAVAYALYEASLPVVITNPKNVRHFAKALGRLAKTDKLDAQLLALYAQRVHPPVLPLRDQEQLELANLMTRRRQLQGMIVMEENRRRTCTPKVRANIDLSLAHLRRLLKDLDREIHDSIRRTPLWHENSEILQSFTGVGPKVSASLIADMPELGLIPANKASALAGLAPMNQDSGKHRGKRMIKGGRPAVRRALYMAALVASRHNPVIKEFYQRLRLAGKPAKVALTACMRKLLVILNAMLKNRTYWNPQLHLAA

SEQ ID NO: 435379 - protein, 339 aa, unidentified
MQLYAAIDLHSNNSVPVVMDEDGKVVFTKRVPNRPASAIVDALAPYREDIVAVAVESTPNWYWMERTLREAHFKVALVNTAAVDQYGGNKYANDFSDAQNLADLMRMNRLPTAYICPEKDRALRDLARRRSHLVSQRTAELLIAHNLLARDLGDHITGNALKILRASAVDKMPLLPNQKASLKATVAVIHCLESQINCLERDILKQVRPLEEFRRLKSVSGVGDILALTIALEVGNISRFRSAGNFASYARLVKSERISNGKKKGQGNTKCGNRYLAWAFIEAAHHAIVHDPVIKAWYQRKCAKSHKVVAIKAVAHKLARATFHLMINGTEFDARRAFS

SEQ ID NO: 435380 - protein, 317 aa, unidentified
MSKYTTVCAGIDTGKHKLDVAIDGGAQRVQVDNNSEGHRSLSAWLRQREVERIGIEASGGYEQAVILSLRADGFVVIVFQPVQVRAYAKFVLQHAKNDNIDAVLIARCTAAAIEIHEPPDARLAPLAQHLTMIEQLTEDVGQLKTRREACREERIREFWKQEINRLKVLLNRELKQLVTVIREYRDLANRLDLIASVDGVGLRTAVAILVRMPEIGRVTREQAAAIAGLAPYDDDSGLRRGSRHIKGGRQRLRQSLYAAALPAVFYWNPQLKAFYRRLLVAGKPHTLALVACARKLLIFVNTVVARGTSWRSSPVTT

SEQ ID NO: 435381 - protein, 344 aa, unidentified
MDHFAGLDVSVNETSVCIVDDTGRIVREVKVASEPDALLPVLANPAYRFKRIGLEAGPLSQWLFSALAEAELPVVCVETRHMQAVLKAQINKTDRNDARGIAQMMRVGLYRPVHVKTLRSQKLRMLLTHRKLLQSKAIAIENDLRATLRNFGLKVGMVGKVRFEERIKELVENLPDLAALVEPLLVVRRVLREQIVILHRRLLAVVREDEVCQRLMTTPGVGPVVALTYRATIDVPARFRKSKAVGAVLGLTCAKYQSGEIDRSGRISRCGDEMMRTMLYEAAQSMLRSKKWSWLKAWAMQIARRRGMKKAIVALARRLAVIMHRIWVDGTEFRWTREQATAAA

SEQ ID NO: 435382 - protein, 340 aa, unidentified
MNHYAGIDVSLEYAHVCVVDATGKIVREGKVASEPQALLAWFGALGLSLTRIGLEAGPLSQWLYAGLREGALAVELLETRHVRNAFKIMPVKTDRKDAHGIAELMRLGWFRPVHCKSLEAQETRVILTARKLVQKMLHETEMSLRGLLRNFGLKVGKVSPLAFEARIRELVEGHPTLQAVAASLLGVRARLRGEFAGFEKRLREIAKSHPRARLLMSTPGVGPLVALSYVSAIDDPARFKSSKTAGAYFGLTPSRYQSGETDRCGRISRIGDAAVRAALYDAAHVMLTKPVKGATALKSWAMRLAKRAGMKKAKVALARKLAVILHRMLADGTTFANQRA

SEQ ID NO: 435383 - protein, 406 aa, unidentified
MKPCSAGLDWASRNHALCIIDSTGAVVEQFELAHDAAGLRELLTRLRRHAPTPAQLPIAIERPSGLLVDTLVEAGYPVVPIHPNIVKATRPRYRSHGAKSDASDAYLLADLLRTDGARFNALQPQSDAIRALRVLVRGRDDLVTTRVQLANQLRSLLESFWPGAAGIFAEIDSPIALAFVQRYPTPASAARCGEKRLATFLAQHRYCGRRSPAVLLERLRAAPDGHANELETDAKRTLVQALAATLTALVEHITQITSRIEHAVAELPDGQLIMSLPRAGQVCAAQILAELGDVRARFPSDAHLAAEAGVAPLTYQSGKSRTVTFRWACNQRLRRAITCFADNSRHASQWAARMYTAARVRGCDHPHAIRILARAWIRVLWRIWTDRRSYDPARHRAALILNAARG

SEQ ID NO: 435384 - protein, 312 aa, unidentified
MFAGIDVSKDWFDVAWEVAGQIRCQQFAYTDEGMEQLLEQVPPTAVLVMEATGTYHARLALRLYEAGRQVSVINPLVIKRYGQMKLLRVKSDRADAQLILEYAQQQNPALWEPASEQVQELQQAHGWLSDLLAERTRLLNRQHAMSYRAKPSAFVVAQMDAQLQQLQQRVDECERHLEMLVKKSFAELYERLLTIPSIGAKTALELIIVTDGFTRFEDVKQLCAYIGVSPTTMRSGSSVKGKGGIAKLGQGRMRQLLYLCTWTARSCNPACQQLHQRLKAQGKPAKVINIALAHKLLRQAHAVATKNVRFSA

SEQ ID NO: 435385 - protein, 343 aa, unidentified
MQHYVGLDVSQKTTAICVVDEQGRQLWRGVCVTDPGAISARVVKHAGVDAKVGVETGSMTPWLVHGLRSAGLEVDCLDARRVKAALQMRLNKTDENDAEGLAQIMRTGWYRAVHVKSLDAHRARALLGARAQLVGMTTRLSNMIRGVLKTFGLLPGAGRGLSFDRKVEALLEGVPEIALIVRPLLATWRQLREQIAVFDKAVQQQVRTDPICRLLMTVPGIGALSSLMYVSTIEDPGRFSRSRAVGAHLGLTPRRYQSGETDRSGHISRCGDGLARTLMYEAAIVILHRVKRSLYLKDWAEAIERRSGSGKARVALARKLSVILHSVWRSGEPFRWAPQAAAA

SEQ ID NO: 435386 - protein, 386 aa, unidentified
MTHSTNILPRSVDYDQTLVLAIELSNKSWVLAAQVPGLSQTKAKRTIDPNKNDLLAAIDGYRTRAAAAGRSVKRVIASYEAGWCGFWLARWLMAHGIEVHVVQPSSVPVDRRMRRGKSDGIDAELLLRTLLAWLRGEPRVCSMVPIPDEADEDARRCVRERSELVSERVGLVNRIGAILATLGADDYNPLLQSRRRRLTELRTGLGDPIPPNALAKIVRLLTRLELVLAQIAELELERDAVARTDAPDQAGKMIQQLISLRGIGVQSATVLVREAFVRRFANGKALGSYAGLTSTPYSSGGIDREQGIGKAGNRRLRTVMVELAWLWQRYQPGTAQVVWFRERVGSTGRRVRKVMVVALARKLLIALWRFVIDGVMPEGAVTKPSI

SEQ ID NO: 435387 - protein, 346 aa, unidentified
MNKDIILAVDYHDENLEIRRFNTATGEERCENRPTTRDGILKVVDEAAAEAAAAGGQVVWIMESTSGWARVKDLIGSRAHLVLSNVLQMPLPPKAHRKKTDKIDTGRMLREYLNGSLPQSFQPSAWLRRVRRLADTRESLVRRRTALRNWLTRYLAHETWEDRRGLWSQRGLYRLGRLADASVGPDRVVLTVKQAELEHLEPLLKTVEQEMIAVYQQWPEAQAVDAIRGIGVIAAVSILAHIGPVGRFRSPEALIAFAGLAPGVRQSDRTLRSGRIGGGGTDTFLRHYLIEASVWARQIPRYRQTYARVEAKRGKKIARLVVARLILRSLYKMLRDGVAFNQAPAA

SEQ ID NO: 435388 - protein, 475 aa, unidentified
MGILLYYRVVVIKAPLQGRCYTVRDAVDWCDSPTTRWFSKGSNHSPYTFVNQLNTARRFMWNKATKVRRTVDAASDFALEVFVMVVSIGIDVSKDKHDCFIVSSEGKVLADAFTIPNTMDGFNCLLQRIQDCTTPQDKMKVGLEATGHYSYNLLGFLLDNGLTTYVLNPLRTNLYRKRLSLRKIKTDRVDARTIASMLLSDAGLKPYTDTAYHNEELKSLTRYHFDKVKERAKLKSSIARLVCIMFPELEKLVPSLHIASVYALLEEFPGAKQIAAAHLTRLKALLETASKGRYKRDMALEIRDAARNSIGSWMPAKSLELQHTIRLIRELDNEIAEIEEQIQAIMDELNSPITTIPGIGFRMAAMIFAEVGDFTRFDSPDKLLAYAGMSPSTYQSGQLKNCYPHMEKRGSRYLRYALYNVTKYVCHWNPAFAAYLAKKRAEGKHYNVALSHAAKKLLRLIFAMERSRQPYCAAP

SEQ ID NO: 435389 - protein, 341 aa, unidentified
MESTKFVGMDVHKDAITIAVMNSAGKVIMESIIETKAVTILQFIQGLRADVFVTFEEGTWAAWLYDLLKPHVTKVVVCNPRKSALLKDGSKGDKIDARKLAELLRGGYVKPVYHGENGLRTLKELSRSYLTISKDLTRVMNRIKALYRGWAIPCGGTQVYALCHRSVWLSKIPEAGVRRRAEHFYEQLDALQGLRKQVRRDLLAESRKHNATKLLRQIPSIGPIRAAELVALIQTPHRFRTKRQLWNYSGLGLETHDSAQYRYVDGQLQRSRKPQQLRGLNQDHNHDLKKIFKGAATMASISAGPFHGFYEASFQRCKDWSRCAGVTRISTLRRTYSLGTT

SEQ ID NO: 435390 - protein, 274 aa, unidentified
MIVSAPSAHLFVGVDIAAASFAAAWSLNGSPAERARTFAQTPDGFAAFQAALTTSGVEPAQTLIVLEATGSYWITLAVTLHQAGYLVSIVNPAHAHAFARSLPRRAKTDLLDAQLLAQFAVERQPPRWTPPEQVYHELRQRLLVRDGLLTMRQQARNQRHALAQWPVTIQAALDALDTVVATCDTQLQHLEREIASVLRDGAWAPSAALLSSITGIGLVTTAWLLVATLNFEACLSAESAAAYAGLVPLAHESGTSVRHRARIGHAGHARLRTA

SEQ ID NO: 435391 - protein, 337 aa, unidentified
MEYLGIDVHSKYSEVCGLSDDGTVTVRRRVPTTETALRRFFGSRERSKVTLESGPVTPWVYRLLCELGHDVVVVNPRRVRLIAESTLKTDGIDAEVLARLSRLDLDLLRPVYQRTPEAQELRTRLRVRASLVKTRTSLINTVRGTVRAQGYRVPSCPTKSFVAHFASLDLRPTLAQAIEPLVTTIGELTDRINELERELVAESKASDLLMRLQSVPGVGPIVSLAYAGWMDTPDRFTRSRDVGPCLGLRPSLRSSGGHETRGRITREGDIEMRRLLVQAAHAALQCRKDSALTRWGRTLVERLGKGKAVVALARKIAVLLHRLWVTGESFRPFPRAA

SEQ ID NO: 435392 - protein, 335 aa, unidentified
MEFTYFIGTDVSKNELDFAVMHGKTLLFHKKIANTEQAINLFIKELIKLPAFNLASAVFCMELTGIYNNHLLVCVHKTKPNIWLDADIQTKRSSGNIRGKNDKVDAIRIADYAYTKRDKVRLWAPKREVIQQLASLAATRGRLIEAKKILKTPLQEQDSFSTKKVVKQSAAVCSHTLKAIDADLEKAEKAIDELIAKDPELKRLFNLVTSVSGIGKITATQILITTNEFKSIRNPKQYACYAGVAPFVEESGIFKGKGRVSHMANKKVKTLLHMSAIVAIQYNQDLKCYYYRKVNEQKKNKMSVINAVRNKLILRIFACVNQNSPYQNNYHKLLA

SEQ ID NO: 435393 - protein, 438 aa, unidentified
MRAKCNDDLSTVNFSTIGLDVHKNRLVACAVHVQHDAKGREVHEKEYFESTGTYSGRQRLTEWCSSQNADLILMESTGIFWKAPFRDLEKADLHPVLINPRIFNRGSDKRKTDKSDATWLANLARLGLYRASFIPAEPYRSLRLVQSQIKSLVAERQRLKNRLVKVLDDSGFRFTVAFTDIGGASSQSLIAGILEDAPREELALMIDPLCKKSIEEILDAVSGELSQINKDIVQSILRLIETHTKEIETLEQTVIRELKKCEKVKQNIRLMTTIPGVSEKSAQLLMSMIGPDFVENFSSPHAFARWLGVCQGNNESAGQIKSGRTPHGQRLIKKVLTECAQAACHTKGSHLAVLFGGWKHKGFCKAVMAVAHKLALLIHWVVVNQKPYIDKEFDYTGVFKQDGQRRPRWIRALRRYGLMTLADVEKEKAARGWIIAKA

SEQ ID NO: 435394 - protein, 418 aa, unidentified
MSEENNARPSCRYVALDIHKHYCVVAAVNREGQVVLQPVRVEHQDLEGWLKKSLCGSDHVVIESTTNAWHVYDLLEPLAEQVLVANPIKVKQIAFARVKTDIRDTLILARLLAANLVPVVWVPPQHIRQMRQLLSQRRQMVETHTQIINRMHSAAHRHHLKHERGKRFNEKTTAWQKDESLSQIEQFQLSLEMENRAYIEQQIGRISEKVAKMSHQKPWAESMTYLMQLPGFGVITTMTVLAAIGDIGRFETPKKLASYSGLTPGLEQSGTKNRGKGITKEGRRELRWALVEVAQMAVKSEPLLKRRFQELQHRMHRNQAIVAIAHHSLELVWYVLTRREPYRHFSEEKIAYKYLSWAWRMSEDARDGLTRQQFARYYLMRLGIGKDLTRIALDPRHPRRLASESELLALRPELKHIE

SEQ ID NO: 435395 - protein, 483 aa, unidentified
MKAKTSSASRRSKKNVVRRGQPLQPSAQMAVIHPHGAGIDVGATSHWVCVPEDAVAEGQSSVREFGAFTQDLDELVEWLLQCGVKTVAMESPSVYWIPLFQKLEAAGLEAVLVNARHVRHVPGRKTDCKDCQWLQRLHSYGLLNGSFRPSDDICALRSLMRHRDNLSKTCGQEVQHMQQALNYMNIHLPHAVSDLNGETGLRILDAILRGERDPKELVQLRDPQITRSTVEEMAAALCGDWREEHLFVLRQSLENYRHVLSQMEVCDGELEKALAKVGVNPATVVEAERPKNPPAAEPKSKKKKKFKKLKAGTGLKRDLSAELTRICGVDLTRIIGLNVLGVLILISEIGVDMSRWRNAKAFCAWLGLCPGNKISGGKVLSSHSVHVVNRVAVLLRTVAPAVGRSDTWLGIFHRRMRARIGPAAANTATARKLACMVYHLLKYKEEYIDVDCLIYQENIRKSRIAKLCKQAEELGFEMIKKAA

SEQ ID NO: 435396 - protein, 359 aa, unidentified
MTNSNIIAYCVGVDISSESFDACLQKVYDNRTLEMVATKQFKNTLTGSKAFAEWLSTKGALKELVHVGMEATGRYYEPLAYFLFEQGYTLSVILANKIKYFARSLNEFSKTDAIDAKIIASYVSRHVPIAWAPMSPLMRQLRELSREREALTKTCTMSKNRLKALRAGHKPLKVTIKRLEKQVRFLQKQIKEIELEMDLLREQDKTLGERYELLVSIPYIGKITAYVIMAETDCFHLFENRNQLIKYAGLDIIQNQSGTSVNGTSRISKRGNAHLRSAPYPGLGSISRGKSVFAKTYTKAIEKGMEKKQARTAVIRQLLRVAFGVVKSGQPYQAEIHRSRTTKKIGELEGSPTVTGLAS

SEQ ID NO: 435397 - protein, 341 aa, unidentified
MQEMYVGLDVHKNFIQGCILDKEGKVVLEHKFRNEPHSMDLFLSNIQQDSKIALESCSCWQYVYDYLSDAGYKELVLANPSRVRLIAESRKKTDKHDAKVLADLLRMNMLPESYAPPLDVRYERQITRHRLSLVRLRADVKRKINALLLRHGYQHEYSDLFGKAGMEQLYALDLPMCDRFELDNYLKTIDFLTQKINDTQERVKDFVSYNPQARLLMSIKGIDYYSALMISAEIGDIRRFNSAKKIISYAGLNPSISQSGDRCYVGHISKQGNNNLRWILVECANTAVMHDSNLALFYHRIKKRKNHKVAIVATARKLLAIIYAMLKNNTNYVPQRKCKAS

SEQ ID NO: 435398 - protein, 429 aa, unidentified
MEEVDELELLVERVTGLDVGKAELVACVRVPHPSKPGRRMQEVRAYATTTAELVAMAVWLRQHRVQRVVMESTGDYWKGIYYLLEAEGLDCWLVNARDVKNLPGRAKTDTLDSIWLAKVAERGMCSPSLVHPEPIRRLRDLTRYRRALVADRGREMQRAEKLLEDAQIKISSVLTEVHGVSGRAMMEALIAGKRDPHTLARLARGRAKVKIAQLEEALRGFFTDHHAVMLRMMLDNIDRMSAQITALDGRIEEAIAPFSDRVDRLVDLPGVDRVAAAELIGEIGVDTSRFPTAAHLVSWAKFCPQNHQSAGKTKRKGRGKGNPWLGGTLGRIVFGLSRTDTFLGTRYRRLAKRRGKQKAIVALGNSLLTVVYHLLADPQARFDDLGPGFYESRINTNRRARNLATQLQAITGQKIVIRDGKAVIAESAA

SEQ ID NO: 435399 - protein, 430 aa, unidentified
MHNKNYISVGIDVGSAFSFMTILAPDETVILKPFKITHNNKDSLERAVSEIKKAEELYSLESRTFLEFTGIYHFPLFCYLVDCGFNASIINPIITHSTKNGNIRKVKNDKIDSKGIAKLGLSKDVPVSQFPEKLVLELRSLTRKYYDLTDERSAHINKLKGDLHTVFPQYLDIFCDVTGKTSTMILRQYGTPDKILRGHKKTMIEKISKASRKGLAKASERYEKLCAAANAAKTFGCQIDSIYFNISLTLDLVEKLDSALDSILNRIRQLITFNKNEKFIQQIKLLNTIPGVGFLTAVTIMCEIGDFSAFRNPKQLFAYFGLDPEVNESGKFVGTQLHMSKRGSRIARRAIFAVALASIRTKRNGEGINPYLRKYYELKSVQKPKMVAIGAVMHKVCNIVFAVLRDEKAFELRSPEEHCKQYQRAALAAA

SEQ ID NO: 435400 - protein, 351 aa, unidentified
MKTTTLVKTETQARIAQLKLGVDWHADHFRVVRMCDGQSPQPAQRFTPASFLPFVQKQLTLAEGVFVVYEAGPGGFHLHRQLTALGVTAFVVHPQKLDPQHKGVVTDKTDARELTLNLDRYLRGNLRAMSVVRVPSPAEEQRRALARQREQLRRERQRLAAQGRSLCLTQGLRLRGEWWKAQLTLPDWLETRLAVWRQLIRAVETLLEDLTKQVEALAPKQRPKGLGPLTLGLLIAELCDWSRFKNRKQIGSYTGLCGGVSSSGQSHCDLSITKAGNARVRWSLIELAWRMVLYQPQSKAVQRWRHLLLNPKAATRQKKRALVALARQLAVDIWRWQTGKVTPEQLGWVMV

SEQ ID NO: 435401 - protein, 340 aa, unidentified
MHILGLDAHSATFTLEILNSRGRVCREVKRETSAENLIEAVREAPGPKVVVVEESHLAQWVKRTVERYADQVVICDPKRNKWISGDEFNDDASSAHKLAELYRGGYIKEIRHPDDEGAKLRGLFLHYYDLNQQLTRFKNKLKAVFRQEAIGTAGPGIYEEERHAAWLQKLRGQKHLQHAARQRFELIDVLESCKQETYEVMVQLAKKNPAYRLLDGMPGAGPVIATGYLALIDTPDRFSRKNKLWSYAGFGNRRHTSDDEVYEEHASKNGNRPLKWVVIEHFLHAVQQTQQGNRFKRCYEELRRKGLDETAARRAVCRKLLSTVRALWMKGEAYRDDPLS

SEQ ID NO: 435402 - protein, 408 aa, unidentified
MRVLHRSCAGLDVHKDTVVACVRVAERSRVRQEVRTFGTTTKGLLALADWLTENGCTHVAMESTGVYWKPVWHILESSFELVLANATHIRNLPGRKSDVNDATWIADLLAHGLIRASFVPDTPVQELRDLTRTRKQLVREIGQHTLRIQKTLEDANLKVTGLISDILGVSGRAVLEAIAGGESDPQRLLELTKGRLKASPEQLREALHGRIRDHHRFLIKLHLGQVDALSAAVRDLEMRLEEALRPFRADLQLLRTIPGVSDVVASVLLAEIGFDMARFPTAGHLVSWAGLCPRSDESAGKRRSTRIRMGAPWLKTVLVQAAWAATRKSDSYFRAQFFRLRSRRGPMKAIVAVAASILTSAYYILSRQEPYRDLGSAHFDRLDSTARAQRLVKRLTDLGFQVEIRPAA

SEQ ID NO: 435403 - protein, 368 aa, unidentified
MIVIGVDAHKRTHTLVALDGVTGADRGETTVASDEDGMLVALRFAAGVDQDRVWAVEDCRHVTSRLERALLGAGERVIRVPPALTGESRKATRTAGKSDAIDARAVALVAIREGVQTLPVAFLDEQAYEIRVLCDYRDQLMRERAKLINRLRWHLVRIAPEIEAQIGPEALKGPRIRARLARQLGQLPKSPELRIAKAQLRRINEITKEQKELFDELTVLLQAHAPQLLDQPSIGTVTAAVIIGRTAGAKRFRSEACFARHTGTAPIPASSGNTIRHRLDRGGDRQLNRAIHIIALGRMAWNPETRAYIERRVSEGKTKREAIRALKRHIARQIWHLLYNTQPVTQTLPALPKQRVRVSAPGLMPCTR

SEQ ID NO: 435404 - protein, 324 aa, unidentified
MDQLGIDISKKKFDASLLIAGKHRNKVFSNNKGGFGELKKWLKAHNLKSIHVCMEGTGRLWEPLAEFLQEAGMKVSVVNPLKIKGFAQSELRRSKTDVLDAETIARFCRANEPAEWIRPTAKQKAIRDLQRCVQAMKTMRAQEKNRSKSGVLNPRVEREIDEHIKYLSDRIDDLDAEILALLKEDKELKRQFELLNTIKGVGPTTAVTFLGEVCAANFSNARELEVFCGIAPRVRESGSSVRSKSRMSKVGNRRIRGVLYMPALAAMRTNPFLREFAQRLKAAGKPGKVVVGAVMRKLLRLMFAILKSGQPFDPAHISRMPKAA

SEQ ID NO: 435405 - protein, 354 aa, unidentified
MLYLGIDQHARQITVSLRDEDGDILLARQVSTQPAKIHAFFQQLTRRRLAHGESFAAVLEVCGFNEWLIRMLKDYRCHKVILIQPEERKKQKTDRRDAAALSELLWVNRVRLLQGKPVRGLRQVDISSTTDQENRRLTTLRKSAGQAQTRIILKIKHMLRRYNLQWEMPTKTFPTQRAIAWLKKLALPEIDRWEMDHLLADLEHAQRRVEELEKLIAQRSATSAAAALLATTPGVGAYTAIALACRVGRVERFPRSHSLANYWGLTPGCRDSGETRRPGSITKAGSATARWLLAQMTRQVLRKDARLREWFKRIKRRRGSSIARVAVMRKLATTIWHMLTKKKTYAECRALSAS

SEQ ID NO: 435406 - protein, 344 aa, unidentified
MKITRVGVDLAKNVFQVHGVNAHGKCVWKRRLKRATWLRVFTETVEPGCEVGMEACGGAHHWARELRARGYEVKLIPPQFVKPYVKSQKDDAADAAAICEAMSRPDMRFVPVKTLEQHDIQAVHRVRSSVMGQRTAASNQIRGLVAEYGLVAPKQVGPLRTAIPCWLEDAENGLTDRFRALLQGLWHELLMLDERIKVLDVEIEQLCNTHAVASRLKKQLRGVGPLVATGLIARIGDGRQFKRGRQASASIGVTPRHHGTGGKNRIYGISKVGDRYLRCILIHGARAVVAQAKHRDDPLSLWVTDIAERTHPNVAAVALANKTVRIAWAMIRNGTDYDPEFAVN

SEQ ID NO: 435407 - protein, 324 aa, unidentified
MAKRTTICAGIDTGKRKLDVAIDGSSLLLQVENTAEGHKVLLEWLRRHKVKRIGIEASGGYELPVVTELRRKRFVVVVFQPAQVRAYAKFHLQLAKNDKIDAALIAACTAAVRKIHAAPDPRLQPFAEHLTLIEQIGEDIKLYKNRIETCRDPRIQKLWKEEISRLNKRERAELKALVAAIRQHPDLAQRLDLIYSVSGAGMPTAVAILVRMPEIGTLSREQVAALAGLAPYDDDSGERSGARHIEGGRKRLRRALYTAALPASFFWNPHLIALYQRLRAAGKVHKSALIACARKLLIFVNTVVARGTPWQNEQPVRATNPTAA

SEQ ID NO: 435408 - protein, 341 aa, unidentified
MMIIGCDFHPRFQQIAFVDQETGEFGERRLSHPDEAQRFYRSLAGRQVRLGAEATGNFRWFRLLMQELGHEFVLGDATAIRAACARKQKTDKRDARHILKLLVEDRFPAVWQPPVENENLRQLLLHRCRMVRMRTRIKNQLDSMAKNEGLLSKRVWCPMRRDQIEALPLAGWNVARRRDLMALLEEMNRRIEPLDEAVIKAADENPEACLLMTHPGVGPVVSLAYVLTIGSWERFPRGKQVGSYLGLIPAEESSSGKRRLGHISKQGNTLLRWLLVEAASTAQRYDQSWHRQYVRLSMTKHHGVAKVAIAHKLAVRLYWMLRSGEDYSKVMERGSHVGQSV

SEQ ID NO: 435409 - protein, 379 aa, unidentified
MSDCSEVFVGIDTSKLRNAVAIADGGRDGEVRFLGEIENSEAATAKLVRKLASQYQRLTFCYEAGPTGYGLYRQITELGHECIVAAPSLIPKRPGDRVKTNRRDAVGLAKLLRAGELTAVWVPDRHHEAMRDLTRARETAMLDLRRKRQQITGLLLRQGRHYQEGNQERRKPWTKIHKAWLMRQKFEHPERRLVFEEMMLAMREAEERLARLEQAIRVAVADWSLAEVCTGLMAMRGIDLVSSAGFLAEMGDLNRFPTPSELMANLGMVPSEKSTGETIKRGPITKAGNRRARRLLVECAWAYRHPPRVGVTKQAKVAAAPRAVREIAWKAQHRLYGRYRTLIRRGKLKNVAIAAVARELAGFIWAVNREITVAGAAAR

SEQ ID NO: 435410 - protein, 359 aa, unidentified
MIIERTSVGLDVHARSVVATGLDVVTGEVFSQRLVPASEVVVEWLRGLPAPVAVTYEAGPTGFGLYRAITAAGFRCVVAAPSRLTRPAGDRVKTDAKDALLLAQLLRVGQITPVRVPTITQESARDLVRAREDARGDLMRARHRVSKLLLRHGHVYSGGTAWTGKHQAWLGSVRFDLPGTRAAYEADREAVDFALARRTRLDTAITAMADDSEFTALTRRLCCLRGISTLTGFALAVELGDWDRFTGSSIGAYLGLVPCEHSSGESRRQGGITKTGNAHARRLLIEAAWHHQRRYIVGKVLQARWDQATPAARARGHAGNIRLHHQWDRYAARRKKHTVANTAIARELAGWCWSLATLE

SEQ ID NO: 435411 - protein, 419 aa, unidentified
MSKDNVEIAAFVGLDWADEKHAITLQEAGSDKRHRSTLEHTPEALQSWIQSLRDRFGGRPVAIAVEQKRGALIYALMHVDFLHLYPVNPVTVAKMREAFYPSGAKDDPRDADLLLDILMSHRRHLRVWTPDDALTRSIQLLTEDRRHVVDERTALTNQLTAALKTYFPQALDWFADLHTARACAFLQRWPSLQQLKQATPSSIRKFYRAQGYRGDDKLQQLLANIKKAQPLTQDSAVLLSCSMKVDILVKQIPLLTDAIESYDRKIAALFDQHDDSTLFGSFPGAGPALAPRLLAAFGANRDRFQFASEMQELSGIAPVTEKSGDGIWIHWRLACSKFLRQTFHEFAGCSITQSDWARACYDELRKRGKSHHAALRALAFKWIRIMFRCWKDRKPYDETLYCKSLKTRRSPLADALPTT

SEQ ID NO: 435412 - protein, 455 aa, unidentified
MPITISGVGVMKQKKLSKASGMKLPKHLRHINQHAAGIDIGSRSHFVAVPEGTDEQPVREFSTFTGDLERLAEWLGSCGVTTIAMESTGVYWIPVFEMLENHGFEVKLVNARHVKNVPGRKSDVLDCQWLQQLHTYGLLRGAFRPVEQVCTLRAYVRQRATLVRSSSSYVQRMQKALAQMNLQLHNVVADVTGLTGMRIIKAILAGERNPDVLAAMRDKRCKNSESTIARSLKGHYRPEHLFSLRQAVEIYEFHQEKIADCDRQILEQLKCFDAQDAPNDTPPANVGEALQRMSGVDLTSIDGIDTNTALKILAEIGTDMSRWKTAKHFASWLGLSPGTKVSGGKVLSSATKPVANKAAAAFRMAAFTLFNSKSALGAYLRRQRARLGSPKAITATAHKLARLVYAMLSRGTSYVDAGQEYYEERYRSRVVQNLKRKAHEVGFELVSRQAVTTPV

SEQ ID NO: 435413 - protein, 314 aa, unidentified
MNEQQSVAVGIDVAKKHLDVAIGSEAPTRFANDEGGIAKLVAELRTRNVSRIVLEATGGYQRTLLAALLGAGLPAVAVNPKQARDFAKAIGRLEKTDEIDARVLALFAERIAPEVRPLPDEETQDFQALLARRRQLTEMLVMEKNRLHQAKGAVHRNIREHIEWLKKQLRDTDNDIETRLRNYPAWDARVEVLETLKGVGRVTSMTLLAELPELGRLDRKKIAKLAGVAPLNRDSGSRRGRRVIWGGRSSVRAALYMATLVATRHNPLIRDFYVRLVSRGKLKKVALVAAMRKLLTILNALLRDHARAALGPAN

SEQ ID NO: 435414 - protein, 334 aa, unidentified
MEKVTTLGIDLAKRVFALHGVEGAGRVGLRKTVKREQLMQTVAALSPCLIGMEACSGAHEWARRFQELGHTVRLMAPVFVAPYRKSGKNDGNDAEAICEAVARPNMRFVPIKSAEQQAVLALHRVRQGWIEERTATINRLRALLTEFGIVLPNRAQYVRRGAHAAAEALPELARRAVEDLRAHLGMLDERIASYDRELQAQARQSEAAQRLMQIRGIGALTAVAMVATVGCARDFRSGRQFAAWLGLTPRQHSSGGKHRLGHISRRGDAYLRCLLVQGARSVLLTAMRHSDRMSRWAVSLQARCGYHKALVAIAAKNARIAWALLSKNQTLRTA

SEQ ID NO: 435415 - protein, 352 aa, unidentified
MKTVVKQVVGIDVAQDELVVSIGKMYADFSLEIVSRATFGNKLKGFEKLILWLDPLANKAVQLRFVMEATGVYHQSFAYYLNDNGYAVSIVLPNKISNYFRTLSVKTITDKTMSDTITQFGLERNLDDWQPPKGIYRMLQQLTRERSQLTDEKVVIKNQIHAEQAEARPHKKSIERSKKRLVLIEKQIAEIESELKALIKEDEDAKKIMLLICTIPGVGLLTAATILGETNGFELIRNKRQLTSYAGLDVKEKQSGTSVKGKPCISKKGNKHLRKAMHLPALSAIRHDERSKAIFVRLVGKHGIKMKAAVAVQRKLLEMVYTIFKTQTAYDKNYFKTQENEVIIEQEVREVA

SEQ ID NO: 435416 - protein, 343 aa, unidentified
MQVIIGVDPHKASHTAVAIDAKECQLSAKKVRATRAQVSQLLEWAEPFPTRTWAIEGADGMGYLLAQQLVATGEHVLNVPATLASRIRLLGTGHSSKNDPNDAFSVAVAALRTSGLRQVRPVGHGEVLRLLAKRNSDIGRQRCRVVSRMHALLLELDAGGIAKEIKASDVDRFLAAVQPTTPAEQIRYDVALELLADIRRLDEQLKTSHKRIATAVAASGTTVTDIFGIGPVIAAMLIGYTGDITAFANRDRYAAYNGTAPVEFSSGGRTVHRLSTRGNRNLNHALHLAAICQIRHAHSDGRAYFDRRIAEGKTKKEAIRALKRQISNSVYRQLVADTACTRG

SEQ ID NO: 435417 - protein, 315 aa, unidentified
MERLSVGIDVSKRALAMAVVPTGERWTSDTTPAAISLVVDRLRALAPRIIVVEATGGYERAVVAALAAADLPVAVINPRQARAFAQAIGRTAKTDAIDAEVLAAFGDRLDVVARPVADAATHALAALVARRRQLLEMIGMERARLEHAPPIGPLTRELRRHIRWLERRVQDVDDDIGTSIAAHPVWRVNETLLRSVPGIGPTTARTLLAELPELGQLDRRRIAALVGVAPMNCDSGQYRGQRHIWGGRASVRATLSMAALVAARHNEPLRAFYRRLRDRGKTAKVALVAVMRKLLTIVNAIMKHQVPWHPAVATP

SEQ ID NO: 435418 - protein, 388 aa, unidentified
MDVLYQSCAGIDVHQATLVVCILHGPLTSTRPKREMAQFDTTTKGLKACHDFLSQFHVEAVGMESTGVYWRPVWHELCDDFELILAQPAHMKSIPGQKTDKKDAHWIAQLTRIGLLPRSFVPDETIQELRELTRQRKHYVESRNRETNRIHKILQSGGIKLTTYIEDIMGASGRNLLQLLIDETPLTPRMIHQSVYTSLKRKVPQLLEALDGYFSAHHRFMLGQSLEIYDFYQKQIDCLEERINGYLNLYERPVEILDSIPGIDLITASVIIAEIGVDMSQFPTAGHLASWAGLCPGNNESAGKKRSTKIRHGNSYLKRCLCQTVFAAKKQKGSPLAERYYQIQSRRGPQKATIALAHQLLKIAYILLKENLTYQEFVLQKRLLETSQ

SEQ ID NO: 435419 - protein, 346 aa, unidentified
MQNDTLVAVDVAKEVFEIGVSDRPGRVASRRRLRRDEFLEFFAQLPQATVVMEACGSAHYWARRIEELGHVVVLLPPQYVRPYVLRNKTDRTDVDGLLEAFRNEQIRPVPIKTVTQQVIATLHRLRSGWLADRVRGINALRGLLRELGLFIPEGRKHVLPDAWEIIQDPRRRLPDALKPSLTALCEEIASLSTRIEDVEAQLEALARQIPMVARLRSVPGIGLLSATALYAFVGDISRFPSGRHLASFVGLTPREYSSGLRRHLGRISKRGDAYLRMLLIHGARSVLWHSKRMKNRDRLRAWALRLERKLGHNKAAVALANKLARITWAVWKNDRYFEPAPEPQAA

SEQ ID NO: 435420 - protein, 343 aa, unidentified
MYSIGLDVHKRTISYCVKDAAGHVHQEGKIGSTRRELDAWIKTLPQPRTIAMEVTIFTGWIYDHLLPHAEKVKVAHPLMLRAIAAAKKKNDRIDAGKIADCLRCDFLPECYMVSTEIRDRRRTLRYRNLVLKQMVQMKNRISGLLMETGVSYNKQRLHKLGYFTELMSGNEEVDESIRPLLKLSRETIVRSQRLDYALVSSLERDPLLAERLKRLRTIPGVGPITALTWALEIGDVSRFQSVKQAISYCGLCSAERSSADKLVRMPISKQRNKHIQQTLVEAAKLAPRYSHELALVYERERQRGNRNRATLAVARKMVAYMLAVERRKQNFVLTGEFSGTAAA

SEQ ID NO: 435421 - protein, 426 aa, unidentified
MNTQTKFAATIGLDWADQKHDLWIRPTKGSKAEHLRLEQTPEALHEWVAHLRERFGNRPIALAVETSRGPVISALMAYDFIVLFPVNPKALKDYRSAFAVSGAKDDRTDAQLLEELIRLHPDKLRALHPDTELTRKLMGLVENRRRLVDERTRLVNQIHASLKTYHPTAEILLKGQMNTVMATAFLLRWPDLETLQKTSHQALRAFFYKHNSRSAKRTEERLAAVQNAKALTTDPAIIEPARHLVLALAAMLRPLHQAVARLDKEIEQAMDQHPDALIFRSFPAAGPALAPRLLVAFGTQRDRFETADDLTQFYGIAPVVAQSGNTRTVHFRYRCPKFGRQTFHENAGCAVKTEPWAKCYYKQQKQRNKGKHHQACRALAYKLMRIYFACWKQRTPYDPTRYLSALATHASPLHRKLQNLTPSPCE

SEQ ID NO: 435422 - protein, 310 aa, unidentified
MDATVVGIDVSKDRLDVYVYPSAEDFSVARNAEGLDALIARIGPLQAQAIAVEATGGFETVVVASLGGAGLPVIVVNPSQVRAFAQALGKRAKTDPIDAAVIARFVAATKPEIRALPDSETRLLADLVTRRRQIIQMMVAERQRERHLPGRHLKKSVARLLKALEKELSALDQGIDETVRGSPAWREKEDLLKTVPGVGNIVARTLLAELPELGQLDRRQIASLAGLAPFTRQSGRWRGKSLIGGGRSSVRAVLFLSAMVAKKHNPPLKTFHQRLIASGKPKMVALVAVARKLLTILNAILRDQRPWQPA

SEQ ID NO: 435423 - protein, 388 aa, unidentified
MLQPLDASKSLTAFEQDSTVIAVIEMSQSKWLVAAVVPGIERQPLKKIEANEETLLKVLHRWRAEAGQAGRVIKRVAIAYEAGRDGFWLARWLRAHEIEVHVIHSTSVAVSREHRRAKTDRLDTAMLLRVFMGWLRGERGHCGMVAVPTIEEEDAKRPHRERENLVGEKTRIVNRMKAALIRLGIRGFKPELRRAPLKLDGLRTPEGLPIPPNTLDEIRRDLARLAMVREQIDLIEQARLERITQGPKTGPNAMVRLVASIVGVGVETADMLVREVLSRDLRDRRAVARYAGLTGSPDESGSKRREKGLARAGNARVRRGLIQLAWRFLGFQKDSALTQWYRARTDGVKGASKTKMIVALARKLLIALWRMVTTGEVPEGVRLRPVEA

SEQ ID NO: 435424 - protein, 345 aa, unidentified
MEPMYYIGLDVHKRKISYCVKDSSGRIFTEGSLPATRIDLDLWMKTLPQPWSAAMEATMFTGWIYDYLKPHAAVLKVAHPLMLRAIAAAKKKNDRIDAGKICDCLRCDFLPECYMASTAIRERRRTLRYRNLLVRQMVQMKIKISALLMEAGVSYNKQRLHKAGYFRELLATNPDINEGLKPLLQLCRETVVRLQKMESAMVRSLERDSLLIDRVERLMTIPAVGPITALTWALEVGDVQRFSSIKKAISYCGLCGAEKSSGSTVQRTPLSKQRNKHLQTTLIEAAKMAPRNSPDLAMLYDKEKQKGNANRATLAVARKLVAYLVAVDRRQKEFLTVERENRTAA

SEQ ID NO: 435425 - protein, 450 aa, unidentified
MSRKPQVIDDEERERVHERVAAVDVAKDTGMVCTRLPHPSRPGARQSTVWTVRARMGAIRVLGRQLARDGIEIVTLESTSDYWRIWFFVLEACGLAVQLVNASQAKSLPGRPKTDKLDAMWLARLTEMGLLRASFVPPKAVRDLRDYTRMRTRLIQERTRCFQRMEKLLESALVKLSSVASKLTTLSAQDMIRAMIAGQRDPLVLAALARTAMRARHDDLVQALDGMFDDHHGELAGMLLDQIAFLDQRIAALAARAASLTAAMPAAWGVDAGGTTGPDAGTGPDAPVLPAVARLAEVPGISPDLARAIIAETGLDMSRFPTAAHLVSWAGLCPSARQSGPRTRTGKKGQGDTWLRGTLGQAANGAARTHTFLGERYHRILRRRGKAKAQVAVARSILVIIWHLLKDPAARYTELGHGYYQGRLDTDRRLKNHIRQIQALGFDVTITKTA

SEQ ID NO: 435426 - protein, 257 aa, unidentified
MTILTSPTVIGVDVAKAEIVVYREDLKIIQVINNDRTSVGRWLKTLPAQSSIALEATNLYHLDTAELAHGMGHRVYVVDPYRVSHYRESIGQRAKTDPCDARLLARYLTSEQHRLRVWSPPPRHYTVLKSLLNKRAQLMKARVSIMLSWSNEPLLEDLLAHGLEHFKQLDQAIQELLRKVSQEAGISENIRRCKAIEGIGELTATGLATTYMRGEFASADAFIAFLGMDLKAKDSGKKHSPRHLSKKGDGELRRLPQ

SEQ ID NO: 435427 - protein, 496 aa, unidentified
MSAFLRRSGQNPHRWATKGMKSKKELLAKKKHIKRKSAKAKHNRVLGIHNPHAAGADIGATEIYIAVPPDRLEMNVRCFGTFTQDLRAIVQWLREYKVTSVAMESTGVYWIPLYELLEQEGFEIYLVNARHVKNVPGRKSDVQDCQWLQYLHSVGLLRGSYRPAQDICAMRAISRYRDNLLHFGAQHLQHMQAALDQMNLRLHHVIADLSGLTGMAIIEAILAGERDPRQLAKLRDPRIKASQETIAKALEGNWRVEHLFVLGQALQSWKQVQQQLGQCDQKLGELSSQLEGKIDLANSPLPPSAKYCGREPRSKNQPNGPWREELYRHFGVDLTEVPGLSLGVVLTLFVELGADFSAFPTPRHFAAWMGLCPDNAITGGKVIRRGTRRNRQRIRLALRLAATSLHHNKTQLGECFRRLRARLGAPKAITAMAHKLARIIWHLVTHRVGYDESIFAEREEQLLRRKQRQLRNLAHSLGFTLVPNPRPAATSNAEVS

SEQ ID NO: 435428 - protein, 457 aa, unidentified
MQSFYLGSDVSKGYADFVILDSTKQQVMTNFQLDDTFEGYCHLYDILNQFLSAHPEASLFAAVESTGGYENNWYNALVKFQSTLNIQTARLNPLGVMHNSKADLKRNNTDKISAQNIAEYLIAHPEKVIYQQQDQMATLRKQWGFIKMLTKQSTQLLNQLESLLYTANTELLAYCKGGMPDWVLKVLLKYPTAAKLAGARVPALARIPYVTSERAQELVISAKRSVASASDRITEKLVAATTKQILNLKKTINEQAELMVKECSMPEVDILKTFTGISDSSAIGLILEIQAIERFKTVKKLASFFGIHPVYKISGDGSGSFRMSKTGRKEPRKILFMVTLTAIRSNPIIRNIYLERTEKGMEKMAAIGLCMHKILRIIYGMLKHGKPFDPQIDLDNRKRSVNKKPAGQMDKSRRFQDYDSNAPISRRQNKKRLERKQSHSVNDTKFGINAPVPESAS

SEQ ID NO: 435429 - protein, 356 aa, unidentified
MGLYAGCDLHAKSNFWGIINGEGKRVFKRKLGNDPEGILEALRPFQGDLEGVVVESTFNWYWLVDLLVGQGYRVHLANPGAMQKYSGLKYMDDEDDAFWLAEMLRLGVLPEGYIYPKGERPVRDLLRKRAHLVRLRTSVLLSLKNIVSRNCGMQVRAYILKGRKGVGELLGGNDDLALAGQVSKEVMDYVSRKIEEVEEAILQRVEMQESYRGLLSIPGVGKILALTIMLETGPIGRFAEVGHYVSYCRKVPSRWVSDGKAKGGGNKKNGNKYLAWAFSEAAELARRFHAEPRAYYQRKMAKTNAMVAHSALAHKLARAAYYIMRDGVSFQSEKLFGLQRAGAESLKGGLVKNHET

SEQ ID NO: 435430 - protein, 348 aa, unidentified
MAEQRFYTGEHIYVGVDVHKATYTVTCVCQRQIVKTATVPAEPARLAESLSRWFPGAILSSAYEAGFSGFVLHRALTTAGITNLVVNPASVAVAANDRVKTDRRDAKRLAIDLADGRLRGIAVPTAAEELARLLPRTRAQIVEHRATITRQLKAKLHQFGLTPPASRRLMSSRYLREITTWPLPPELCASLTLLADQWRFATRQLLELRRLLRAQAQAQEGLEKVYRSAPGIGEVVARTLATELGDMTRFANERALFSYTGLTPSEYSSGASIRRGHISRQGASRLRHVLVETAWRALPRDPALQEIFDRIAATRGKQRAIVAIARRLIGRIRACFRHETLYAVGTAG

SEQ ID NO: 435431 - protein, 408 aa, unidentified
MRRVVGMDIHRTFAEVVFWEDGRLRHFGRVDMTRSGLEAFGRGLEKTDEIVVEATGNAMAVVRVLGPYVAQAIVANPMQVKAIAHARIKTDKIDAGVLAQLQASGFLPEVWVPDAATERLRRLVARRNQVVRHRTLVKNDVHAILQAHLVPQCPHADLFNQRGRDWLTRQVLPDDERLAIARHIREIDRLGDDLAELDADIAKDTTDNPDVARLLTITGVNVTVASGIVAAIGDIGRFSEPQKLVSYVGLNPRVRQSGLGLAQYGRISKSGRSHARAMLVEAACAAAKAPGPLRAFFLRIRSKRGHQIAAVAVARKLAVLVWHMLTNKQDYHWLRPALAAAKKRQIALKSGAPSERGVGRRGPAYAYNVKELRDREMAAAQIAERTYDQMTRRWQPRGHTDAANGERP

SEQ ID NO: 435432 - protein, 389 aa, unidentified
MIFVGIDVAKNKHDCYIFDSSKEMIETKFSFLNSLEGFTTFKNILNSYSDDFSNIKVGIESTGHYSNNIINFIRKNSLELKIFNPLAVNLYRKAMTLRKTKTDKIDAQIIAQMLFSDDSNSYLPIDYHINELKSLARHRYRLVGHRGKLKISVTRILDIAFPELSSVVWSIHQKSSYALLLEFPTVEDVSKAHLTKLTNILSKNSRGHYGKEKAKEIKVLAANSIGTSEWSIGFELQQTIRLIQHTQYEIDLLDKKIKEAVMATNTPLLTIPGISYVLASIILSEIGNIKNFSNSGKLLAFAGLEPSTHQSGNYTATMARMVKRGSKYLRWALLQAARTVSMRVPVFKEYLSLKRSQGKHHLVAMSHTAKKLLRVIFHLLNTEETFISS

SEQ ID NO: 435433 - protein, 339 aa, unidentified
MTITMIGIDIAKSVFHLHAINHLGRQVKRKKLRRDQLLQFLAQIPVCKIAMEACGSSHHWAREIQRLGHEVLLISPQYVTPFRLGNKNDYNDAQAIAEAASRPQMRFVAVKSIEQQSILMLHRMRERLVKQRTALVNQVRGVLAEFGFVFPRGVHKFRTAIPYLLEDAENNLTVTARESFASLYEEFLFLEQQINQIENRIKSISEQSSICKKLDEIQGIGELAATALYASIGDATLFKNGRHLSAFLGLVPRHDGSGDKNVLKGISKRGNGYVRTLLIHGARSVLRHSINKSDPFSLWANSLRERRGFNKACIAIANKLARYAWVVMSRDENYIKLSA

SEQ ID NO: 435434 - protein, 356 aa, unidentified
MYGLKHQKEKRSMEHFAGLDVSVNETSVCIVDETGKIVREVKVASEPGALLTVLNSGAHHFKRIGLEAGPLSQWLYSALGEANLPVICVETRHMRAVLQAQINKTDRNDARGIAQMMRAGLYRPVHVKTLRSQKLRMLLTHRKLLQSKAIAVENDLRGTLRNFGLKVGIVGKLRFETRIRELVENLPDLAILVEPLLLVRRVLREQSAVLHRRLLVIVRDDDVCRRLMTVPGVGPVVALTFRATLDVPARFRNSRAVGAALGLTPCKYQSGESDRTSGISRCGDEMMRVMLYEAAQVMLVRSTRWSWLKAWAMQIARRRGMKKAIVALARRLAVVLHRIWVDGTEFRWSRQEAAAA

SEQ ID NO: 435435 - protein, 348 aa, unidentified
MLIIGCDFHAGFEVLAIFDNRRGVTTEKRLEHPGEAVAFYRLLQEQGEQARVGIEAGAPCQWFRRLLGECGHELWVGDAARIRAAAVGKKKTDREDAKLILQMMLEERFPRIWVPTEEERDVRQLLLDRHHRVRARTAAKNQLQALAMNQGVQKGRRLWTEAGRELLAGLTMSEHTARRRDYLLQRVAELDQEIAQMDVRVWAEVQRRPAALRLKTHPGVGQQTALATVLTLGEVSRFRSARAVSAYLGLVPTEHSSGGKQRLGHISKQGSSLMRFLLVEAGQSAVKRDEELKRAYKRLWVRKGNRAVAKVMVARRLAVRLYWMLRNEWTYAELVRHAGKPGSSCGKR

SEQ ID NO: 435436 - protein, 346 aa, unidentified
MDYCGLDIAGVSSYLYVKNEKGRKLTCGAVDTTKEAIERRLKPFVRGGLSVAIEAGNQTAWIYEVLVGMGAKVTVVNPAKVKAIAESRRKTDKIDARILCELLRLDALPHPVHMPGRETRALRGLPVARRQLVSMRTKLCNVVRGMLRQEGTRLPAKALSSFAGWRRLLAQGYEQAHLPVVLATFFDSFVSLTDSIRDLEKHLAESERKDGRVARLKTMPKVGRIAALTFVAAVDDVHRFPSSRKLVGYSGLGPTVRSSGERTEYGSISREGRRELRAVWVQIAHLVAIDRTRATQPLRRWFEEVANRRGKKTALVALARRLLVIAYRLLKDETVYDAARLRRKAA

SEQ ID NO: 435437 - protein, 392 aa, unidentified
MIYVGIDVAKDKHDCCIVDSNGTILKDSLRIPNTRQGFEMLYTSILSFLPNKTISNVKIGLESTGHYSANIQNYLYAKGFHLSVLNPLATSLFRKAQTLRKTKTDKTDALVIAKMLFSDDTKSYSPVSYQIQELKSLTRHHYRLVGYRSKLKVSVTRLLDIIFPELATYVWSIHQPSVYALLSEFPNPKEISNCHLTKLTNLLYKATKGRYGIEKADEIRKAASSSIGTSTKSLSLELQQTIRLIKSVQNEIVILDEQIKELMIEIDSPIMSIPGISYNLASIILSEIGDVHRFTNPAKLLAFAGLDPSTYQSGKYNATYKPMVKRGSAYLRWAILMASRTVSMQDLTFSNYLAKKQGEGKHYYIAMSHVAKKLVRVIFYLLTTNTTFIPQI

SEQ ID NO: 435438 - protein, 407 aa, unidentified
MSPEKQAPTRFIGLDVHKRYLIASGVDAQRKQVLGPQRVQLVHLERWMRKTLTRQDAVVLEMTTNAFQLYDDLLPYAHSVTLVHPPHVKLITNAQVMTDKIAALILARLHAVDMLPPVWVPPLEVRDQRALVSQRAKMVRLATQAKNRLHAVIHRHHLFPPEGDLFASEQREWWLNLNLSPIKLVRIQSDLETLTFAQSQVEQLEEALVQVAAQDERVPLLIQLPGIGLITALTLLAAIGDISRFPEDKCLVGYAGLGSRVHDSGLRRRTGRITKEGRRDIRAVMVEASHTASRIHPHWKAELARLAPRIGHNKAIVAIARKLLVAVWHVLSKECADRYAQPEQVARKLLQYTYRLGRANRAAGQSAAEYVRLQLDRLGLGAELTEIRQGSQRAIPLPPSRLAVAGR

SEQ ID NO: 435439 - protein, 409 aa, unidentified
MDSVVERCAGLDVHQASITACVRFPKEGGGRGQEIQTFRTTTAGLITLRDWLASYKVTLVGMESTGVYWRAPFYMLEDAFEVWLLNAQHLHNVPGRKTDVADSAWICQLVEHGLVRPSFVPPKPIRELRDLTRYRKALIEERGREVQRLHKVLEDAGIKLASVASEVLGVSGRLMMEALVAGTRDPEVLAELAKGRLRAKLPALREALEGRFQGYHRVLIGELLAHVDYLDEAIERLNGEVDRVIYPFVKEVELLSTIPGIKKRTAEVLLAEIGPDMTRFATAAHLSSWAGLCPGNNESAGKHFSARTRKGSKWLRKGLVEAARAATRSKDNYLAAQYARLKGRRGDGKAVVAVAHSMLVIAYHVLLRQEPYRDLGANYFLDRNSDAHKSRLVRQLEHLGYQVTLTGAA

SEQ ID NO: 435440 - protein, 350 aa, unidentified
MTTMPLRITAGVDTHLDVHVAAALDHLGGLLGVESFETTPAGYGRLLGWLRNLGEVELVGIEGTGSYGAGLTRHLHAEGVLVVEVDRPNRQRRRRRGKSDPQDAITAARAAQSGDALGEAKTRDGNVEAMRVLRLARVSARKARTQALNQMRSLISTGPEAIRAELRDLNVYRLLERASSYRPAGRRDLLSINKLTLRTLARRALALEAEIVELDAVLGPLVAMTAPALIARVGIGTESAAALLIAAGDNPERLRSEATFAHLCGTAPIDASSGKHNRHRLNRGGDRQANAALWRIVVTRMVYDPRTRDYIERRTKDGLTKKEAFRCLKRYIAREVYNCLPRHQLALDSP

SEQ ID NO: 435441 - protein, 393 aa, unidentified
MRVVIGVDPHKGSHTAVAIDEREQQLARVRVRSGPRQREQLLAWATEFEDRVWAVESAGGLGYLLAQQLVGAGERVLDVPATLASRVRVLATSKSQKTDPHDAVSIAVAALRARDLRPVERADHAVVLRLLAKRHRDLGRARNRTACRLHALLTELVPGGISKEITVNAAQQLLDGVAPADPVAQIRHDLACEHLNDLRHLDTQMRASKRRLEAAVRASNTTVTGIFGVGPVVAAMVIGHARNIDRFADRDHFAAYAGTAPITFESGGRSIHRLSLRGNRQLNHAIHIAAVTQIRHRHSPGRAFYDRKLAAGKTKKEALRALKRRITDAIYRQLRTDAARTCAGPGGQAGTTHQSSVAGFEPRTPTLRKNHSRTRPNARTRPTQTPSPAATAT

SEQ ID NO: 435442 - protein, 425 aa, unidentified
MEGLVANQIYDRSVERMNAAGIDVSKGKSMVSVLRPLGEVVAKPFAVRHTGSELKELADYLKSLDGETRVIMEHTGRYYEPVAQFLHDAGLYVSAVNPKLIKDYGNNSLRKVKTDKADSKKIAKYGLDNWVELRQYASMDVIRYQLKTLNRQHALYSKMKTAMKNNLIALLDQTYPGVNTLFDSPVREDGTQKWVDFVVPFWHVDCVRGMSQASFTERYHKWCRRNGYNFSSDKAAEVYAGAKDQIAVMPKDDLTKRLIRQAIDSLNAVSKTVEQLKAEMLQLAAQLPEYPVVMEMHGVGDSLGPQLMAEIGDVTRFARRGSITSFAGVDPGANQSGTHEAQSVRTSKSGPPELRKALFLVMDSLLKTMPQDDPVYRFMDKKRAEGKPYLVYMTAGANKFLRIYYGKVKEYLAKPEDPSEPTADK

SEQ ID NO: 435443 - protein, 419 aa, unidentified
MSQSTLSKKLASVKPGTLFIGVDLALDRNVAVVMDERAKRLDRFRFDSDLGGYEYFHGRLHKVKEKHQAPAVLVGMEPTNYFWKLLAADLEARQVDYRLVNPYTVKKHREGDQLDRSKDDPRDAFVIADLLRTGKYTETRLLHGQYAELRQYVTLRERLLRDIRRQKTLVNNIAGQLFPELSREFKDMAGQTVLAMLCRHAAATEIQQLPLDVFIDAVRSVFQGKRLMVSKLCRAYARADTSVGLKDGVQALQLAISQHVDTLEHLRRQLRQAEEALTEVFLALPEAEYMLSMHGLGIITAAIILSEIGDPSHYSQAKQLIKLACTQPVPNASGRKSRSKTPMSHKGRPRLRTALFFAALRLVQVDDAFARQYLHLQTRDKNPLCKMQALGALMNKLLRILWTLMRKRTFYVPDFQHAA

SEQ ID NO: 435444 - protein, 326 aa, unidentified
MTQSRNVVGIDVSKPKLDCYALAPGQARGVTNAAAGHRELIEWMTALGVRLVVLEATGGYERAVVQALRRAGLEVRVVDPKRVRQFARAMGRLAKNDRIDARMIAEFGAVSVAVAPSGVVIEDDPAREHLSGLLGSRQDLIEHQTSLQQQAVAAPPGPARRALQVPLKSIARAIDQLDKQIAAAIATHPPFAALARRLDTVPGIGPVAIAGLIAWLPELGRLERGQLAALVGIAPFDDDSAQRSGQRHIQGGRCKLRNVLYMAAMGGATRHNPVLHAYYLRLLQKGKEPKVAIIACLRKLLTILNTMIARQQDWQPKLATPAEAAA

SEQ ID NO: 435445 - protein, 458 aa, unidentified
MAKHKRKKSPAEQQLPAQLDAVNLHAAGMDVGAEAHWVAVPVDADLHPVRAFEAHTASLHALAAWLTVCGITTVALESTGVYWIPLFELLETQGFEVILVDPGTMPKNGRPKTDVHDCQWLQRLHTLGLLSAAFRPDDPVVVLRSYLRQRLTLLADAARYIQHMQKALTQMNIKLQHVVSDITGVTGLRIIKAMLAGERDPLRLATLRDWRCKENEATIAQALHGTWREEHLFALHQAVAAYEFCHQQIAACDAKIATQLQTFEDRSTGESLPPKPRKRHRNRLSFETRPLLYRMTGVDLTKIEGIDETTALIVLGEIGLDMSRWPSEKHFTSWLGVCPRVRVSGGRVLSSRTRPTANRAAAALRLAAASLHHSKSALGAFFRRMKARLGTPKAITATAHKLARLIYAMLKHGTAYVAGSMAEYEQKYRQRVVSNLSRRARELGYNLVAKEEVVTPGL

SEQ ID NO: 435446 - protein, 408 aa, unidentified
MDPLFVGIDVSSRSNVAYLMKPDGSKHSSFSVQNNLGGAKLLSEKIVSALRFMQLSDVVIGLEATSIYGDSLVYALREDGGLGRFHRKIHVLNPKQVKKFKEAYPDLPKNDWVDAFVIADHLRFGRINREVYMDDYRYKALQTLTRARFDVIQNLTREKQRFANYLFLKCSGMAQDKDIKNTSATTIALMERFETVDDLANADPEELTAFITEAGRGRFADPDATAKAVQAAARGSYRLPKTVNDTVNQAMAVSIASMRALKEQVKVLDKAIEQEFEIIPNTLISIPGIGKVYSAGIIAEIGDIHRFSSQASVAKFAGLVWTQHQSGEFEAEHSRMIKSGNRYLRYYLLEAANSVRRCDSEFRRYYDLKYHEVNKFQHKRALALTARKLVRLVFRLLKDNRLYIPPEG

SEQ ID NO: 435447 - protein, 342 aa, unidentified
MREKRSIGIDLHRRRFTCCIRLENGRNYLSEWSLEQLPQFIRKLRSSDEIAVEVTGNTRLFYEAVAPYVARVVVVDPNQFRVISHSVKKTDPHDARNLALYLAKELLPEVRMKEKEQAEVASLTQTRDRLVKLRTALKNKVNNLLSARGLELDKESLSSERGLTWVLEQKLEPLAQFELDVIVEQIRSLNRSIARLERAIEEAGRKLEGHTNLISIKGIGSLGASILLSVIGNVNDFAHEGKLAAYFGIVPRVQDSNETEHRGRITKRGSKLGRTALVQCALIAKRYSPYLGRYYDHIRARRGTGKAIIALARKFLGIIYHTLKNNWIFEDFPNFVLAEAKT

SEQ ID NO: 435448 - protein, 337 aa, unidentified
MGNYYFLGIDVSKRNLDCCLFCNGVVVRQDVILNYQKSIEKYLFDICVDQDTEPDCLVICAEYTGMYIYPLIVACQSKDYKLWIEDPTQIKYSSGLQRGKNDKIDAQRIALYAYRYVDRIKVYSRPSVSIEALKLLSTELSMLCNDRQKYQAQLSDQKEYMADNIYKSKLKRLSLLMKQLDKAIKSIEDEIEIIITKDELLFHQMKLLMSVEGIGRKTSLKMILETHAFTRFPDSRKFCCHAGVVPFSYLSGSSQHSRNRVSQRANKSIKSLLHLAALSAIQNKKSELRIYYDRKVAEGKNKMSVLNAIRAKLIARMFTVIKNDKLYDFNYINQYSK

SEQ ID NO: 435449 - protein, 457 aa, unidentified
MEQYFLGCDVSKGYSDFVILDNRKRRVEENFQLDDTFDGHSLLHDRLSTFFEKHPDAELCAAVESTGGYENNWYNSLRKFQSSLNIKTARLNPAGVCNNTKADLKRVITDKISAQGVAEYMIAHPEKVMYQQQDYWASLRKQWSFIKMLTKQSTQLLNQLESLLYSANPEILKYCQQGVPAWILTLLKQYPTAAKLSKARTSTVARIPYISTSRAKELVVSAGTSVASATDSITEQLISATVSHIQHIKKSIKAQIKILAKECTLPEVELLKTFTGIGDYSAIGLMLEIQAVARFSTAKKLASFFGLHPVYKISGDGIGVVRMSKQGRKEPRAILYMVVMSAITSNSLIRDLYQKHVASGMEKMAAIGLCMHKTLRIIYGMLKNNTPFNPEIDLGNRKRSSDKPQKGKKDKSRRYQDFDTGAPISRRQRKKREERKLSQNAVSVKCGISASVPESSS

SEQ ID NO: 435450 - protein, 420 aa, unidentified
MSGDTVSWSERTVFVGFDWAKDHHDVVLVHRQGQIVDDFRFDETAEGWRTLFEKLAPYPSPAVAIETSSGAMVERLLDAGYAVYPVNPKAAKRYRERKAPSGTKTDRIDAWSLADALRVDGHTWRRLQADDPLTVELRLLCREEIALIEQRTALIVQLQAALHEYYPIALRAFDDWTFRSAWAFVEAFPTPQALVAAGKRKWEKFLHAHQLYRPETYQRRLGLFAEAETFGGSPAITNAKSMLAVALAAQLRVLQNHLDKFRTQIATLFAKHPDHDLFGSLPGAGKKLAPRLLAELGDHRDRFDSPEALQCYAGTAPISYESGQIKKARFRRACQKVLRHTVHLWANLSRAECPWAEAYYQKKREEGQSHACALRCLGQRWLKILWKMWQTGTRYDAELHHRNQIRHGSWVIGLRTGPTA

SEQ ID NO: 435451 - protein, 349 aa, unidentified
MGEVSTIGIDIAKSVFQVHGVDTDGTVVIRKRIGRTKILKFFADLPPCLVGMEACATSHQWARELTRLGHDVRLMPPTYVKAYVKRSKNDAADAAAICEAVTRPSMRFVPIKSAEQQSALMLHRTRDLLIRQRTQLINALRAHLAELGLVAAKGREGLHQLVTIVMESCDEELLSDARFACQAIVMQLHAAQTQINGLDKRIIQAHRVNADSKRLNAIPGFGVILSTAVVATMTDPKAFKTGREFAAWIGLVPRQNSTGGKERLGSISKQGDRYLRRLFVVGAIAIVRTARMRPEKYPWVIKLLTRRPAKVVAVALANKMARVAWAVLAKGESYRAPTRSSNAAIAAAA

SEQ ID NO: 435452 - protein, 342 aa, unidentified
MNTPYLIVVGIDPHRDFYALCAKDEDKRILARAQYPRSNIGHTHCLRWLQDLGVLPEQVLIVLESAGVYWLALYRQLHQAGFPVHVGTPSAIKWHARSRLLRSKTDAIDAAVMADYGWMAHPTPTIISDGLRFHTLHELVGARDALVRDRARVKNRLQRCPFAESPPEVRQVHTRLLRTLTTHIRKLERQIQQLLQALGGHVLQTIPGVGLTTAAAFTALIQDPRRFPSDKQSLAYIGLAPKIEQSGVALPKVTLSKMGNRRMRKYLHMATVVALYCNPDVRAAHEHALARGKSKKLAFCYALFKLTRILFGTWKKYFPQVYSPPTPPSSSHLHHQPSGGAA

SEQ ID NO: 435453 - protein, 422 aa, unidentified
MNKHRYQAKELQRVDWTRLAEDVIGQRLVFSVDVAKEDFYGAFMVSPSEALVTIKWQHPGETPSLGGYLGALPATRIEVVLEPSGTYGDSLRGFLRGLGCEIYLVSPKRVHDAAEVYDGVPSLHDAKAAYLIGRLHLEGASKPWREAPERRREQRALIAELDLYQGEHRRNLNRLEALLSRHWPELDRIAELNSFGGLHLIADYGAPQAVCDHRTQAEACLHHARRGVANPTLVTAILDSAAATLGLPCTAGERHLLQVLAEELLRTRKALRALERRIAERVNQDPQLQLLGKSFGKTTALVLETTLGSPLDYPDPHAYIKAMGLNLKERSSGQHKGRLKITKRGSGRARHYLFLSAMRFVQRDPVVRAWYRKKVARDGRLPRYNALVAVMRKLGMAIWHVARGSPFDSRKLFDLKALGMAS

SEQ ID NO: 435454 - protein, 355 aa, unidentified
MKGELQNKKVLVRGEGVFIGVDVHKESWHVTARTEGEEVFHGGIPSQYHAFRKLLDRFKDCRIKVAYEAGPCGFWLYDRLTEDGIETIVVPPSLIPIESGNKVKTDKRDSRKLARLLENNMLKRVYVLNEEDRVDRELLRTRRQIVEHRNDVARQIKSKLLFYGIRSPFAPRYGWGQNYLQWLKGIELPRESLRACFESLIELYEYLSNQLIRMNQRVKELSQGSKYKQRLKLLCSVPGIGTLIGMEILVELQEMERFKRADELASYIGLTPSEFSTGQYVRQGRITRCGNKRVRTCLVESSWILITKDPLMRLKYNRLKAMKGAKRAIIAIARKLIIRIRRILLNNEPYVVGGC

SEQ ID NO: 435455 - protein, 338 aa, unidentified
MQLYCGIDLHSNNSVVSLINDNDQLICEKRLDNNLETIEHYLQPYQDAISGVVVESTYNWYWLVDGLIEHGYPVHLANTLAIQQYNGLKYTDDETDARFLAHLLRLNILPTGYIYPKAMRQVRDLLRRRLLLVKQRTAQLLSLQSMIGRHTGLRLSSHQVKRLTQDELALYFESAATLFAAQQTRQLMQQLNTQIEAMEAFVLARCQESEQYALITTTPGIGKILGMTILLETGPIERFAQVGNYSSYARCVPTNKISNGKSKGKGNAKNGNRYLAMAFVEAAHYAAIWEPTIKRYYQRKCKRKPVMVAKKTVANKLTRACYHMLKDGTAFDVARAFG

SEQ ID NO: 435456 - protein, 409 aa, unidentified
MDVVISRCAGLDVHQATVVATVRVPSPTGGRDVVTATFGTMTPDLIALREWLQAYGVTHVALESTGVYWKPVYYVLEDGFTLLLINMQELKRVPGRKTDVKDSEWLAQLLECGLLRASFVPPPPIRELRDLTRYRVQQVRDRAQEVNRLCKVLEDAGVKLSTVATNVIGVSGRAMLQALVEGTTDPAVLADLARGKLRKKLPDLRRALTGRFRPHHAFLLEQVLAKIDFLDEALDRLMAEIESRLGPFASMLTALDTIPGINRVGAISLLAETGGDMTRFATAGHLCSWGAMCPGQNESAGKRHSGKTRKGNRYVRAALIQAALAASRAKGTALQAQYLRIRRHRGHKKAVVAVGHQILEIAYYLMRDGGSYHELGPSYFDQRNKQRTIRRHLKQLEALGVHVTIQEAA

SEQ ID NO: 435457 - protein, 369 aa, unidentified
MEKACGLDVQKDSIFACILDEQGKKILEKRYGTLTPDLMTLRDTLIEQGCGKVAMESTSIYWIPIWQVLSSDFSLKLANPYFIKQLPGRKSDVKDAHWIAECLQKDLIKGSFVPEGILQQMRQLSRQFRRLTKSRVRLEQQMDNELQRCNIRFSNYVSNQGNNVSLRKVIEAIIAGERNASKLIKLVHGRTKNKHGHQVIAASLEGVVNSTDIEILKECMEQINLFEKQQAACLNHLEELADRYFAREISLLCTIPGIQKYSAMSILSEIGNDMSAFGKASHLVGWAGLRPRIDESAGKIQSRKTLHGNKYLRQMLIEVSWSAARSKKTFLGKKYYHLSKRMKSQKALPVYNPQNAGYYFQRIANRKAF

SEQ ID NO: 435458 - protein, 323 aa, unidentified
MMGLPNSLCVGIDVSKNSLDIASNQTISPFSVSNDVDGFDAIIAELKQHSIALVLMEATGGLEAAVACSLQAQGFDVAVINPRQARDFARSMGYLAKTDRIDAAMLAQMAEVINRHPGRVRFIRNLPDAEREVLTAMVVRRRQLITMLTAERNRLHPSHPQSRKSISTIIDALKDELKRINKSMEAHISTHFKTLAEILGGVKGIGAATIATLLAEAPELGHLSRKEISALIGLDPFNRDSGNMRGRRTIFGGRANVRSALYMATVVATAHNPVIKQFYGRLVDSGKVKKVALVACMRKLLTILNAMLRKEEEWDPKYHSVNS

SEQ ID NO: 435459 - protein, 480 aa, unidentified
MAKRAAQRSEIKAVPQFLNESLYVGIDIGKGKHLAGFLSKTLLERHERFEACPALVFENSREGFRLLIERIRGLAPLEHVFVLMERTGHYHRALAQYLQELDLPVYVMHVQSRPGGMLKTDKRDALTLANQLYSQLELGVQVANKLQLIRRVMPPTEAAAQLKGLIRHRYELIQESTQRKNKLTAICDEVFPELTRVVKDPNSLFALALREQFPTPQALAAISLTTLVEIRGGARSISEAKLLELQRLAAQSIGVKEVARQRGLVLEQTQLIKELRLLREHVEQLEDEIVSIVEHAREGQILLSFPGIGPVMAATTIAAIGSIHNFPSASALKSYFGWAPVVVQSGSTLDHSRLTHGGTRTMKQMLFLAVFQAIRLPDNEWAKLYERLVKARCPFDEKTQSYVGKKRVIGRVAGQMTEAIYALLKRDAELLSKVLPGQDPPPPMLYDPEVHQRHRQGHYRPLKSTPLPNTITVLHPLPSE

SEQ ID NO: 435460 - protein, 476 aa, unidentified
MNSKTKRANNQVNSVINVQEQRKLVEKANRILSEMKSFTWRELETQGKFSKNDKLSFISDDMLILGCDIGSETHYVRAIDTRGRELSRKALAFENNAEGFRKAHDWAVQLAAANDKKQIVLGLEPTGHYWFCLAAWMVSNGISVVQVNPYAVKQTKELEDNSQQKDDRKDPKLIANLVKDGNYGMPYLPEKVYAELRRLSMFREQLTEDRNRSMNRLHREMKIYFPEYKDAFGKIDGAFCMAVLKEAPFPEDILKLGAEGIREIWRQAKLRGRGYSRATEIVKYAETSVGLKDGREAGKEAARWFAEKIMELDEELAETENSLNEKCREIPHAENVLEIPGIGGKILSGILAEMGDVSRFDDAKELQKLSGLGLVSCSSGKHKGETRISHRGRKRLRYWLFQAARSAVAHGEEYKWIHAHYTTRAGNPLQKMQSLIVIACKILRVIYTMLKTGKPYDSEKLLKDIRYPENVQTAAA

SEQ ID NO: 435461 - protein, 346 aa, unidentified
MQHYVGLDVSLKQTAVCVVDQAGKIRREGMVASEPKAIADFIATNAPQVIRIGFESGATSTWLWTELTKFGLPAICIDARHAKAALKMQINKSDRNDAVGIARIMQCGWYKEVRVKDLDSHAIRALLGSRALLVELKRDLENQIRGLLKNLGIVIGRCKLNTFTARATELIDGKPALAAAVEPLLKAREAIGQQIADLDRKVLRLARSTPQVRRFMTVPGVGPITALCYLATIDDPTRFKKSRSVGAYVGLTTRRYASGETDRTGRISKCGDGMLRSYLYEAANVLLTRVAKWSALKAWGMRIARRRSLSKARVAVARKLAVILHRMWIDGTEFSWSSEETAMQPA

SEQ ID NO: 435462 - protein, 345 aa, unidentified
MTLYCGVDFHARQQTIAYCNLQDGEIRFTQIKHDDRDALQRFYTQFQTPVIVGLEAGGYSEWFERFLSELGIETWFGNPTEVRRRARSRQKNDWRDAELLLDLMIKNEFPRVFRQTAESRAVLAQLRYRHKLVQARTRATNSLHALAIREGLSLRATILTKAGRAKLNALSLTALQARQREEWLALIDQLSENIKRVEEELIQLAAQDEQVIRLRTHPGIGLLTGLALVHTLAPISRFSNSRKVTAYVGLEPREFSSDTRQRWGGISKAGSPLLRFLLVEAAQQAARADTELKNTYQHLSARRGRPKAKVAVARRLLVRAYILLRDEIDYSTYLRRTVAVRSARD

SEQ ID NO: 435463 - protein, 312 aa, unidentified
MEQLHFVGIDVSKDRFDIHVRPDNIERSLSNDEQGFKALLDVVQPIPPTLIILEATGGFERRLVAFLLTHRLPVVVINPKRVRHFAKANGQLAKTDRIDAATLAHFAEVMQPPVRSIPDAFLEELRDLLARRHQLLDMIVAEKNRLTTASKSIRRQLLEHIHWMEKRLASLDQDLDHHIQSSPTWKAKDDLLQSVPSIGPASSRSLLIQLPELGELNRHQIASLVGVAPFNQDSGRFRGHRAIQGGRTSVRCALYMPTLVAIRHNPSIRAFYQRLVLSGKPKMVALIASMRKLLTILNSIIKNNRPLVVSYV

SEQ ID NO: 435464 - protein, 422 aa, unidentified
MLEDTQDREEIIERVAALDIGKAEVVVCVRVPSPTQPGRRAQEIATFSTMTRSLLRLADRLRELGVTRVVMEATSDYWKPVFYLLEAQLLDPWLVNAKDVKHLPGRPKTDKLDAVWLCKVAERQMLRPSFVPPVQIRRLRDLTRYRLDLVNTRTAEKQRVEKLLEDAQIKLTTVVSDVFGVSGRQMLAALLAGERDPQVLAQLARARMRSKISVLEEAFVGHFTDHHAFLLRTMLARIDETSADIAAVETRIEELITPFAQAVDKLDQIPGVGTTAAHVILAEIGSEMTRFATAAHLCSWARFAPGVKESAGKSKGRGSTGHGNPYLARVLGEAAVTAGKTDTFLGERYRRIARRRGKKKAIVAVGRSILVIVWHLLSDDRTRFHDLGSEFYDTRIGPERKKRNHVRQLEALGYKVTLEPAA

SEQ ID NO: 435465 - protein, 345 aa, unidentified
MEIESIGIDLGKTTFHLVALGDRSQVVIRKKFSRSQLLIYTANLPSSLIGMEAGVGSHFLGRALREQGHEVRLIPAQFVRPFVKSNKNDYRDAEAIAEAVERENMRFVPIKTEDQLDLQALHRVRDRLVARRTSVINQIRAFLLERGISFRKGPASLRRQMPEILENEDEKLSTGMRRLLDFLWQEWKVLQSQIERLNADLEQIASSDPSCVRLQQIPGVGPLVSTAIVSAIGNGAAFKKGREFAAWLGLVPRQWSTGGKAKLLGISKRGNPYLRKMFIHGARAAVLRVKRESSTLGKWMSGLETRAARNVVIVATANKLARISWAVLASGNDYQPTHKAAVFSN

SEQ ID NO: 435466 - protein, 428 aa, unidentified
MSNQELIRRKQYCQIVKEITGSDQYLVVGIDVGKDKHHAFMGTPTGKSLLRKLIFENNIDGFSRLLKTADAIKVQNGLSKIIYGLEPTGNYHKPLARHLIRCDSNVVLVSGEAVKKNRSLLDGRWDKYDTKCAANIADLVSRGRCLYYDSPSPGIIELRSLLSLRRRLKREEHSLRMRIRNNLVAQYFPELDKFYSACESESLAIVKWCLKPDQIAGMAFEPFFQMVTRTRRGTAQLLRLRKIHQQAIESVGCSMGSAAAFEARLLVDKLEQVRQQLKDTEAAIKDVALEFAEYSYLLTIPGFGPYISARVLASIADPFRFENRKQVLKMVGYDLCAKRSGKTSDKAVPVISKKGNGELRYALYQAANVAITRVDQFKVYFTRLIRGRERERGIKTKMRVKLAAKMLIIAWTLMKRKEPFDPAYLTID

SEQ ID NO: 435467 - protein, 408 aa, unidentified
MGAGGETAKLVASINRAIDRSSLMQKHHDDSKACLTAFVQDNTVIVVIEMSLASWVVAGLIPGVNREPLKKIAADPEELLRLLYRWRDQAIKAGKDITRIAVAYETGRDSFWLARWLRDRGIDAHVIHATSVAISREHRRAKTDRIDTAMLRRGFLGWLRGERGHCSMAVVPTIAEEDAKRPHRERESLLKERTSTINRMKAILAQFGVRNFKPSLRKAAEKIDAVRTPEGVPLPPNAAAALRRQIERFRLINEQIKTVEKTRMQRLRHNPAGKYNTMVFLLVRIIGLGIETAEQLVHEMLSRNLRDRKAVARYAGVTGSPDESGASRREKGLSRSGNGRVRKILIQLSWRMLQFQPDSRLVRWFKNRTANSQRSRKPMIVALARKLIIALWRYVNTGVVPDGFKLAK

SEQ ID NO: 435468 - protein, 391 aa, unidentified
MVCVGIDVAKDKHDCCILDSDGTIRADCITIPNNMDGFKQLLQTIRDCTKRSDKIKVGLEATGHYSYNILGFLLDNDLAVYVMNPLHTNLYRKSLSLRKTKTDRVDARTIATMLLSDVDLKSYTDTAYHNEELKSLTRYRFDKVRERAKLKQSVSRLVTILFPELEKLVPSLHIASVYALLSEYPGAKQISEIHLTKLTNLLVTASKGRYGKDKAIQIRDAASTSIGSVMPAKSLELKHTIKLIRELTSEIDEIEVSIQKIMDELNPPILSIPGVGIQSAAMILAEIGDFSNFESPDKILAYAGCSPSTYQSGKLTNCYAHMEKRGSRYLRYALYNATKYVCYWNPVFAEYLAKKRAEGKHYNVALSHATKKLVRLIYALQKSGKAYLTAA

SEQ ID NO: 435469 - protein, 358 aa, unidentified
MSEITRVGVDLAKNLIQVHAVDAAGKVVTNRQLQRNKFIEWCVQLPAGCLVAMEASAGSHQWARKLVGLGLDARIMSAHLVSPYRIQGKSGKNDANDAAAICEAASRPNMRFVTIKTASQQGILCVHRLREGLKEERTACINRIRGLLAEFGLVVAQSTRILEERLSELLEDASNDLPGLARLTLERAQMQWREIDQHLQWCDQRIAAHIKEDRQAQAAMQIMGIGPVTASAVVATVGDFKQFKSGAQFGAWLGLTPRQSSSGGKNKLGAITKKGDQYLRTLLVQGAKSVVFRGVANNPITRWAQELRDRSGWQKAAVALANKNARTLWALLTKGVEFNAHHISVKPTGLASSSVCVG

SEQ ID NO: 435470 - protein, 375 aa, unidentified
MKEKLRFLGLDIHAETIAVAIAEPDGEVRSLGTIPNRAESIRKLVKKLGSVEKLRACYEAGPTGYVLYWQLAELGVKCEVVAPTLVPVKAGDRVKTDRRDAEKLARSYRSDDLTAVWIPDEGSEALRDLVRAREAAKQDQLRARHRLSKFLLRSGQRPAPGVKAWTQIYMAWIRQIHFAQKAHESTRLDYLHEVEHMGERVMRLEQAIAEAATLASPELREVIQGLQALRGIAHISAITIAAELGQISRFEGARQLMGYSGIVPSEDSSGTRKQRGSITKTGNSHLRRIAVEAAWSYRLPPGVGPALRKRQEGVPQEIKEIAWKAQYRLYKRYCRLAASRKDQRKIITALGRELLGFIWAIGIKAETAVRQRIAA

SEQ ID NO: 435471 - protein, 350 aa, unidentified
MSEHLEGVVGGVDTHKDEHVAAVLSASGRLLGTATFKTTQAGYAGLHAWMAGFGEVLAVGVEGCGSYGLGLCRELVAAGLTVHEVCRPNRQLRRRRGKSDAVDAESAARAALAGVGLCVPKSADGPVEVMRALRLTRRSAIKARDTATNQIHALIVTAPEGIRQQLTGRPIAKVVHAILEGDFVDLAPGYSVAMLSLARRWEQLDHEAGELAAELERVVAATAPDGLLDQQGVGPDVAAALMITVGDNPQRLRSEASFAALCGVSPLDASSGKQQRHRLNRGGNRDANMALWRIVLVRLRWDQTTRDYVDRRVTEGKTRREAMRCLKRYVARDIYRILVSSVARHPEIGV

SEQ ID NO: 435472 - protein, 461 aa, unidentified
MQKKIRRKREPRARVSVLERVNPSAGGLDCGSAEHYVAVPVGRDPHPVRSFKTFTADLHRLADWLVACGVTSVAMEATGVYWIPVFEILQARAIEVVLVNARHVKNVPGRKSDVTDCEWLRDLHSVGLLRGSFRPEAKIVALRTYVRQRETLVQTATSITQRMQKAMVQMNLQLRLVVSDIAGVTGQRILRDIVAGNTDPQGLARHRDHRCRATEAEIAAALTGHYRPEQVFVLKQNLDAFDSCQAQIASCDVEIHRHLTELTAKLDPPSTPLPKPRSRVKPRGNVPRFEVREVLHHLTNADISQIDGITPYGGLRLISEIGTDMTRWPSEHHFTAWLTLAPRNRVSGGRLLSSKTQPAANRAALTLRLAAMSVGRTQTALGAFYRRLAARVGKPKAITATARKLAILVYRTLKGEITYVDPGAAAYDAGRRRHALRSLRKRAQFLGFSLVNQQTGELLEG

SEQ ID NO: 435473 - protein, 387 aa, unidentified
MPTEAATRAAVIGLDVGKFSHWACRVNGRGEVLESGPVANTERDLDELFGRVDAGTLVVVDQVRNIGSLAISRARLAGLPVAYLPGIAAHGAAKLFAGDAKTDERDAAVIAKTALGIPDSLLPVPRRDGRLEAARSMAAQRSHMVACSTRDKNRLRSLLLESCPAFEALTDLADPHWLKMMEALGGPWGIADAGKASVGAVTRGADRSRIDAAIAAAASSTRPSEYQVMAENPQVRMLAGRIRESAGEAARLDAEIAALLAEDGTYACLLTVPGIGPRTASELVIGIDIDDFPDHDHLASYCGIAPRNRQSGKSISSVSSSRQGNKRLKNLLIFSCNSLTRSKGRFGDYYRSCRDRGMCHGEALKAVARKRLKVIYAIMRDKVPYSA

SEQ ID NO: 435474 - protein, 318 aa, unidentified
MTTQPQFVGIDVSQDTLDLAVFGGPSWQEPNTEDGIAAVANRLRTLPVRLAVLEATGGIQIPVAAALAIAGIPVAVVNPRQIRDFARATGLLAKTDRLDAQAIARFAEAIKPVPRPLPDAQTRELDALLTRRRQVIEMLVMESNRLRQALPSLRPVLEDHITYLRGQRDHLDAQLNQVVRQSPLWQAKERLFRTMKGVGPILARTLLAELPELGCLDHKPIAALVGVAPFNRDSGTLRGKRTTWGGRASVRSALYMAALAAIRFNPVIKAFFEHLLARGKSRKVALVACMRKMLVVLNAMARRGTPWQPIPPVPAPVS

SEQ ID NO: 435475 - protein, 342 aa, unidentified
MDHFAGLDVSVKETSVCIVDDTGRIVREVKVASEPEALLQVLSNPSYQFKRIGLEAGPLSQWLFSALAEAGLPVICVETRHMRAVLKAQINKTDRNDARGIAQMMRVGLYRPVHVKTLRSQKLRMLLTHRKLLQSKAIAIENDLRGTLRNFGLKVGMVGKMKFEARIKELVENIPDLAVLVEPLLIVRRVLREQFVIQHRRLLAIVRDDEVCRRLMTVPGVGPVVSLTYRATVDVPARFRKSKSVGAVFGLTCAKYQSGEVEWSGRISRCGDEMMRVMLYEAAQSMLRSEKWSWLKAWAMQIARRRGMKKAIVALARRLAVILHRIWVDGTEFRWTREAAAA

SEQ ID NO: 435476 - protein, 403 aa, unidentified
MNAVGIDVSKGKSMVAIMRPFGEIVSTPFEIKHTTSDINSLVELINSVEGESRIVMEHTGRYYEVLAHQLSEANLFVSAINPKLIKDFDSDSLRKVKSDKADAVKIARYALDKWQNLKQYNVMDELRNQLKTMNRQFGFYMKHKTAMKNNLIGILDQTYPGVNTYFDSPARSDGSQKWVDFASTYWHVDCVRKMSLNAFIDHYQKWCKRKKYNFSQSKAEEIYGKAKELVPVLPKDEITKLIIKQAIDQLNSASVTVEELRSLMDKTASKLPEYPIVMQMKGVGSSLGPQLMAEIGDVSRFTHKGAITAFAGVDPGVNESGSYEQKSVPTSKRGSSGLRKTLFQIMDVLIKTHPQDDPVYQFLDKKRAQGKPYYVYMTAGANKFLRIYYGRVKEYLSSLPESE

SEQ ID NO: 435477 - protein, 330 aa, unidentified
MYLGIDTHKRYSQVAVVDSDGNLHDEIRLPNDHLDELAKQYAGSEAAIEASGIYRPVYEMLDEHLDVTLVNPSKNRIIADATIKTDRVDAKRLAHMLRADMLAESYVPPDEIRTLRDLVRTRKSLVEARTAEKNRVRAVLTRTDNTYDSELFGPSGREFLAELSLSNVDRTIIEAHLSVIDAYDEQIEALQEIIEQRVLESPAAQRLLTIPGVGQYTAAVIVAEVGEIDRFDSDKQLVSYAGLDPTVHQSGDKEFRGGISKEGSAPLRWALVQCASIAVRCDEYLGNFYTRLKERKNHQIAIVATARKMLVSIFYMLTRKEMYDPPGVSA

SEQ ID NO: 435478 - protein, 351 aa, unidentified
MSHKSAPPTVSTIGIDLGKNSFHLVGLDQRGAIVLQQKVSRAQLERRLVNVPNCLIGMEACSGAHHIGRQLAALGHDVRLIPAQYVKPFLKGHKNDYRDAEAIAEAVQRPTMHFVAIKTPEQMDLLALHRVRSRLVGQRTGVINQIRGFLIERGITVRQGVVPLRKALPDILSSNNDALSPRMVNLIAELAQDWRRLDERIAAVSDEIESLAEQDEACQRVMTVPGVGPIISSAVVAAIGNGAGFTQGRDFGAWLGLVPKQESTGDRTILGKISKRGNKYLRTLFVQAAHVVLTRRPNAAMRDLWPWIEQLSRRLHRNMLAIALANKLARIVWAVLARGRSYQPRIAADVA

SEQ ID NO: 435479 - protein, 322 aa, unidentified
MTKHTTICAGIDTGKRKLDVAIEGRRELLQVDNTAEGHKVLLAWLRQRRVKRVGIEASGGYEQPVVAELRRKRFVVVVFQPAQVRAYAKFHLQRAKNDKIDAALIAACTAAVRKIHAAPDPRLLPFAEQLTMIDQINEDIARLKNRIESCRNARIKKLWQEDIARLEMREKAELKALVASIRKRPDLAKRLELINSVDGIGLPTAVAILVRLPEIGRITREQAVALAGLAPYDDDSGEQVGVRHIEGGRKRLRRALYTASLAASFRWNRQLIQLYQRLTAAGKEHKRALVACARKMLIFANTVVARGTPWCDEPPVGSLSVS

SEQ ID NO: 435480 - protein, 324 aa, unidentified
MIDKVLGIDVSKRKFDVALRWKEGKTRSHKFSNSQKGFRELAEWLKKMGAERVHACLEATGSYGVGLAKFLHGQAHVVSVVNPARIKAFGRSEGIRAKTDRVDAKLIARFCEAMEPRRWEPPAEELEELQGLVRRMESVQRMLSQERNRREAPGISPSVRESLGRTVRMLEGELERLREQLRGHLERHPELKQQQELLSTIPGIGEASANLMLSELCGRDFHSARELAAYAGLVPEIRESGSSVRGKGRLSKRGNHRLRRALWWPAIVAMRHNPLLEHFAQRLREAGKPSKLIIAAVMRKLLHIAFGVLKHQRPFDPNYSPSPS

SEQ ID NO: 435481 - protein, 363 aa, unidentified
MGEGICFAGLDVHARKTAAAAVQLGSGEVWKAQLSGSSTAAIEWLQSLPGPVRAVYEAGPTGFALARAARAAGVEVMVCAPGAIPRQPGDRIKTDTRDALKLARLHAAGQLRPVLVPAAELEALRDLVRAREDLRGDLMRARHRIGKLLLRHGLVWTGPGEAWAQRHLQWLSKVRFSQPLLEVVFGEYLAHHEVLLARRERLDALILEQSTQGPWAPTVARLRCLRGIDTLTAVGLVAEIGEIKAFSHPKHLASYLGLVPSEHSSGTKRRQGSITKAGSSHARRLLVEAAWHYRRAPSVSLTLKRRQKGQPPAAIEAAWRAQLRLYRRWAHLDTARAKKRTTVAVAVARELACFVWEIAQQAD

SEQ ID NO: 435482 - protein, 346 aa, unidentified
MNYIGLDIHKENIQACVKNEKGEVLANVRFLSNPKEINEFLDGVEESGPASIVMEATGFCTYIYDIIEARGHDVKVAHPLKVKALTAGRAKTDKVDAETLAQLLRANLIPRSWVPSRDIRDLRQLVRQRVYLSRQSTSFKNRISAELLRRGVRRPPELKKPFTKKDIERMRSLDIPTITSNLDCLERIQAQIEEMNRQLQDEFNRRPDAQPIATIPGIGYYGALLIHAEIDDINRFPDPESLAAYAGLVPTVSQSASTVHYGGISKEGSAYLRWILTETVHIHKHLHPESKLSRFHSKLEKRRGKNKATIATARKLVHIIYWMLKTKEPYHSQGFNPVTKPARTSA

SEQ ID NO: 435483 - protein, 347 aa, unidentified
MKILALDVGKSKSVAYRLDTETGEVGLKTILTRAESLVRLVVRWRPDRVVFEVGPLAGWMHDMMVGCGVREIQVANPMGEAWRWRNLKRKTDRDDAVKLAELSAAGQLPTVHLPSPAVRQWRQLIAYRVTLSDRQTAAKNRVRAILGMAGETLAAGRKGWTAESVERLRSLARPLAECGPEDLWRGMLAVELDVLSVLEAEEAVVVAALGRRAAADVRVRQLETIPGLGPRTAEMLVALLDDASRFGSGKQVSSYLGLVPRQFQSGSMDRRGRITKRGSPLARRLLVQAAWASLRWNPQMRFVFERVSRGHRGRRKVAIVAVARRLAVIAWAMLRDGTTWRFGRAAA

SEQ ID NO: 435484 - protein, 346 aa, unidentified
MLYAGLDLSRQRIDVHVLDASGRTVEMIAVRPDADALRMLVERLAGHGHAVRAAIESMNGARFIHDQLEQAGWDVLIADAQRVKGLAPLACKTDRIDARVLAELGRRDLVPAIWLPDPRVRAERERARFRLHLVRHRTALKNRIHATLITFGRPNPMADLFGVGGRRLLARLELPEPWAGTLTAGLRLIDELETEIEACEAELRRLGADHQYVPLLRTVPGIGWVLAFTIASEIGDIGRFPSPTKLAGYTGLCPRVYQSGERDRRGALAKNGPAYLRWALIEAATHAGHHPVYRARYERTKRRLGRQRGTKVARVAIARELTTAIWHMLSRNQVFCPAGPTQRLVA

SEQ ID NO: 435485 - protein, 344 aa, unidentified
MGEVITIGLDIAKSVFQVHGVDGLGAVVIRKRVSRARMLEFFAGLPRCLIGIEACPAAHHWARELQAIGHTVRLMPPSYVKAYLKRSKNDANDAAAICEAVTRPSMRFVAVKTKEQQAALMLHRARQLLVRQRTMLSNAIRGHLSELGIVSAKGRNGTDELLEIIGKDADSRIPLAARSVLKVLAAQYSAIGAEIASISKSILVWHRSCEPSRRLEEIPGIGPIVATALVAEISDWKAFSSGRGLAAWIGLVPKQHTTGGKDKLGSITKQGNRYLRWLLVNGAMAVIRYAQKHGTKKHPWLGRLMARRPTKVAAVALANKIARMAWAIMTRGERYREPVLLLAA

SEQ ID NO: 435486 - protein, 343 aa, unidentified
MECYVGLDVSLKQTSICVVSGTGSVVREGVVASDPDAIAAFVRSKAPGAIRIGLETGPTSTWLWTELKRLGLPVICIDARHAKAVLKMQINKSDRNDAAGIARIMQTGWFKEVRVKDLDSHTLKALLVSRALLVKIKRDLENQIRGLLKNVGLVIGRAKFNVFAMRAAELIEDRPELIAVVGPLLKARKAIEQQTDDLDRKVLKLARYDAQVRRFMSVPGVGPITALCFKATIDDPTRFKRSRSVGAYVGLTTRRHASGEIDWTGRISKCGDAMLRSYLFEAAGVLLTRVPKWSALKAWGMRLAKRNGLRKATVAVARKLAVILHRMWIDRTEFNWSKQEVAA

SEQ ID NO: 435487 - protein, 449 aa, unidentified
MKKSSSERHGLPVIHDRAAGIDIGSRFHVVAVPADITEEPVQTFKAFTADLERMADWLVGLGITTVAMESTGVYWIPVYEILEVHGLHVVLANARDARAVPGRKTDVNDAQWIQRLHACGLLRASFHPDREIAALRSYLRLRERHLDYAAAHIQHMQKALIHMNLQLHHVVADVTGATGMRIIRAIVAGERNAATLATMRDTRCKSSVETIQSALVGNYQPEHVFALAQALAMYDAYQTQLEICDQQIAQSLIQLSQQQPSPSEPLPKPRHRTRQPNALNFNVRALLYQLVGVDLTQIHGIGPYLALRLVAECGTDLSRWRTAHHFTSWLTLAPGCRISGGKVLSAHTRKTKNRVTALLRLAAVTIGKTSTALGAFYRRLSARIGKAKAVTATARKIAILFYNAMRFGMAYQDPGADHYEQKYRERVVKGLHRRAAEFGFTLQAAEGVS

SEQ ID NO: 435488 - protein, 414 aa, unidentified
MSLALREAKFFTGIDWAAEIHAVCVMDATGKIVAQFTIAHSADGIATLIRRLARFGDPAEMQVAIERPNGRLVDLLPEAGHPVVPVKPNAIKAWREGEVLPGAKSDAGDAAVIAEYLRLRQHKLTVAVPYSGRTRALRTVVRTRGDLVQTRVATANQLTALLEDSWPGAAVIFADIDSPIALGFLARYPTPASAAHLGEKRMAAFCSGHGYTGRRTAAELLERLRSAPAGTTDQAVTIGLADAVLALVTVLTALGAAIKNLDRPAAARLGEHPDGEIFTSLPRSGQISAAQMLAEWGDCRQACEHPDSVAALAGVTPVTKESGKHRSVQFRWACNKRFRQAVTAFADNSRHASPWAAQIYHDAIAGGKDHSHATRILARAWIRVIYRCWLDGVPYDPAKHGAAATLANQTAARG

SEQ ID NO: 435489 - protein, 402 aa, unidentified
MNPVVGLDISKEESHGQAFLARGKPFRGTFHFEHTRDGLANLHQVLKDVETASKLRPLLILEATGHYQSPVVQFLEEYHYIYIVINPLISNRLRKSQLRKVKTDAADAYLLGELYYKEEFEPFKKRGMQLLNLRYLTRQYESLSKMCVQTKLQFQAVLDQVFPAYKGVFGAMYFRISLRFLSEFPTSYSVLQTDEITLKAKMKELLSSKRGRSEGWINQRVQRLLDAAKQNPFQQTMYASHLINLKVLITLILQYQEHLAELEQNIDALAEEIEEYELIQSIPGIGHRIAATILSEIGEVDRFDHPKKLVAFAGIDPSVFASGKFTATRNRITKRGSRQLRYALVMAVQCGLIRSRNIRIKAFYDRKRAEGKPHKVALIACANKLVHWLYAILKNKKEFRRI

SEQ ID NO: 435490 - protein, 419 aa, unidentified
MSFKILKFNCCGLDVHKTWIYACIGITDSNNRTEYKQARFSSFTKGLNELCDWLAKYNCTDVCMESTGKYWIPVFNILEQHNLWVTLSHPKYTKPMKGNKTDRKDAKWICDLYMCGMVKPSFIPPADIRELRDLVRYRYKLTCMITGEKNRAQNCLTVSNLKLDDVFSDVFGKSSRSITEQILQHPGEKFDVAPFVHGLCKTPIEEIQAAVDGAISKEQAIKLRQCLDHIDELNKHISEVEQEILCLSDKYEAALNLIRTVPGFNKNPMTAIQVLSEIGCDMSVFPTDKHLVSWAGCCPRNDKSDRKIKSTRISRAGSYFKPVLVQVANALIKSKKYPEFITRYKRIKVRRGHKKAIIAICRMILTAIWHILSDLKPYTPEGFLESRPVKKEKILTTSQALNLLKLRGYVIKDDPLPTS

SEQ ID NO: 435491 - protein, 402 aa, unidentified
MNAVGIDVSKSKSVVAIMRPFGEIVSTPFEIKHTASDIHSLIELINSVEGESRIVMEHTGRYYEVLAHQLLEANLFVSAINPKLIKDFDNDSLRKVKSDKADAVKIARYALDKWQNLKQYNVMDELRNQLKTMNRQFGFYMKHKTAMKNNLIGIIDQTYPSVNTYFDSPARSDGSQKWVDFASTYWHVDCVRKMSLNAFIDHYQNWCKRKKYNFSQSKAEEIYGKAKELVPVLPKDAITKLIIKQAVDQLNSASTTVESLRTLMNETASKLPEYPVVMAMKGVGTSLGPQLMAEIGNVSRFTHKSAITAFAGVDPGVNESGSYEQKSVPTSKRGSSDLRKTLFQVMDVLIKTHPQDDPVYQFLDKKRAQGKPYYVYMTAGANKFLRIYYGRVKEYLASLPES

SEQ ID NO: 435492 - protein, 342 aa, unidentified
MLHAGMDMHKHFSVVTVVDDSGNEVVKGKKLENRDLEIVEFFKSLQDKLRVVIEAGSNWMWMTDLLDDYGIENVLCHPLKTKAIASARIKTDKLDSLTLSQLLRANFIPEAYKPDQKARSLRELLRYRASLVGKRTGIRNAIHALLARGNISIPSSDIFGKAGMEYLLKLELPPQRRFALDGYLEVLKALTHEIKKAEEKIKEEYKSSPEAQLLSTVPGVGLILSLTILSEIGEISRFKRARQLSSYCGLCPSTAQSGNTVKHGRITRQGSKWLRWAFVEAAIQASGKPGPLRDFFLKLKKRKGGKIARVAVARKISTYVFHMLKEGKNFEELISLNLDAPG

SEQ ID NO: 435493 - protein, 411 aa, unidentified
MQVVHPRCCGLDVHKKIIVACLMILGADGRLIKEIRSFGTMTGDILALSEWLLAAGCTHVAMESTGSYWKPIWNILEGKFDLLLVNAQHIKAVPGRKSDVRDCEWIAELLRHGLLRGSFVPDREQRELRELTRYRTSLIDERSAEVNRVQKTLEGGNIKLAAVAKDIMGKSGREILEALVAGSREAEAMAELARGKLRSKLPELTQALAGQMGSHQRFMLTEQLAHIDDLDQTIARLDAEIEERMGPFEEVITRLDAIPGVGRRTAEVIIAEVGTDMGRFPTAEHLASWAGMCPGNNESAGKRKTGKTRKGDSALRRALIEAAHAAGRKRNSYLRAQYQRLVARRGKKKAAVAVGHSILVIAYHLIANKESFYQDLGAHYFDERDRQRLERRLVHRLEALGYAVSLQPVAA

SEQ ID NO: 435494 - protein, 340 aa, unidentified
MGDITTIGLDLAKSVFQVHAIDEEGGIVLRKRLRRGQVLAFFAGIPPCLVGLEACATAHYWARELIALGHETRLMPPNYVKAYVKRNKHDVADAEAICEAVRRPSMRFVPVKAVQQQSALMMHRARDLLIRQRTMLVNALRGHLAEFGLIEAQGLHKVARLIAIVMDEEDGRVPDIARQVLKVIVNQIEDTQTRIAGLETQVLAWHKNNPVSQRLATIPGIGPIIATAIAATVADPNIFRSGREFAAWLGLVPRQSSTGGKARLGGISKRGDSYLRRLLVNSAHTVLLCSKQAKTDPWLTSLLSRKPRLVAAVALANKTARVAWAIMSRQDTYRHAAVAA

SEQ ID NO: 435495 - protein, 320 aa, unidentified
MSSELFIGIDVSKDHLDIAVRPTAQCLTFENTDTGVDELIRTLLEFSPTLIVMEATGRYHQLALGRLVAANLPAIAINPRQSRDFARALGRLAKTDRIDAALLAEFADKVRPVLRSIPNSDTQELEALSTRRRQLMTMLIAEQNRHHSAPRSLRPGIKKHIHWLEKELEHSDKELKNRIRSSPAWREKEDLLSSCKGIGPVTTHSMLAYLPELGTFNRRQIAAIVGIAPFNNDSGKYRGRRSISGGRRQLRSVLYMAALVATRHNPTIRVFYQRLIAAGKLPKVAIVACMRKLLTMLNSMVRHNTPWRADYLLDRQDSLS

SEQ ID NO: 435496 - protein, 399 aa, unidentified
MNQVDRIRLEEFRQFRKEIRGSTEYLIVGMDVAKDQHVALFGTATGKTLFRRLVFDNNIEGFEKLLVQVEALKVQHVLGKVVFGLEPTANYHKPLGEHLIRCGHKVVLVSGVAVKENRKSLDGRWDKNDDKDAANVADLVSQGKCLFYEYAAMAVRDLRDLLSLKRRLKRQEQGMRVRIRNGLLAKYFPELDRYYERSESGSLGIVRWGLDPSVIAGLEYGQFVQRVAPGKRRLCQESRLQAIWKLAVDSIGCEVGSVVEFEAQVMVEGLKQIREVIQATEEKIEEICSPFPEYSCLRSIPGFGPDVSSKVLGAIGDPFRFQNGQQVLKLAGLDLNAERSGKTSGAAVPVISKKGKRIFGMPCTRRLSLLRPRIKALWFITPTSSEVEKGSLGSRRRCA

SEQ ID NO: 435497 - protein, 249 aa, unidentified
MNADGSIAEESEYDNKLTEAEIFAYSLVKKYGKCIAVCESTSNLWLKTYQAFEKYGIGVKLANPLKTKAIAEARIKTDTLDARTLAHLLRSDLVAECYIAPKGIREDRSLLRLRTNFVQDRTRVMNRVHSLLDKYDVKCDYDNIFGVKGTRWLSSLKLSVNDQILLHEYIMQIEFLNTEIKNTESKISYQASKNESAKILMSMTGIDYFSAMLIALEIGDITRFNTPEKLVSWSGLCPSIHQSGNSLYM

SEQ ID NO: 435498 - protein, 370 aa, unidentified
MKNTITYVGIDAHKKDLFVAMLAGTQSPVAWIVPNEPNAVRRLLRKLEREAPGPVRACYEAGPCGYALQRQMTTARVSCQVIAPALVPRKPGERVKTNRRDARKLVELLRAGLLTEVRPPTLEEEAVRDLCRARDDAREDLQRCRHRLGKLLLRRGLHYSGRNWTQAHRQWIDSLTWAQPAERVVVEDYLLGLDQIEARLIELDARLTEIAQSDPYREPVAWLRCFRGIDTLTAILILAELHDFRRFQSPRALMAYLGLVPGEDSSGEKHRRGRITRTGNTLVRRLLVETAWHYQHRPAVGVALARRRKGQPGRVIAIADKAQQRLCRRFRKLAAEHKPAPKIVVAIARELAGFLWAALQPAPATVAQRH

SEQ ID NO: 435499 - protein, 424 aa, unidentified
MKVTYQTCCGVDVHKSFLVATIVKTTGGIEPSYQKKRFSTFNNSILEFKQWLRDNDCHDVCMESTGKYWVPVFNLLEDDINVVIANPKWVKAVKGNKDDTKDSKWIGDLFRLGLVKGSYIPCKKVRILREYTRYRYKLVSCRSSEKNRYQNALTVCNAALDSVVSDIFGKSSTSIIDYLLEQSGSSINHEEIASKLLRSLKSKEDAVIESVEGYQMTDAQKYRMRLVRAHMDYITAEINDVDKMIENMISSNTDFENAVQFLCTIPGVKRDSAITIISEIGTDMSQFSSSRRLCCWAGLTPGSNESAGKRKSVRFTRAGVYLKPALVQCAHAAVKSDKSPYYKKKYESLVKRRGKKRAIIAIARMILTAIYQMLSTGEQWNPSDLYKIDMPVALVEKQKAKAIKQAKKLLQREGLLPPDEPLAS

SEQ ID NO: 435500 - protein, 334 aa, unidentified
MNDSTVFVGMDYHKDSIQVCVMDEAGRVLGNRSCGNDPRAVAAFVSGHGRVRGAALESCEGTADFADHLIALTGWSVDLAHPGYVHRLRQSPDKTDYSDARLLADLERVGYVPRVWLAPQRIRELRRLVRYRRQLVNERRNTKLRIRALLREHRRTCVAPRWGLAWDRWMRCVDLPEQSRWILDRHLDGLARLNDEVQTVERRLADVTKHDAVVERLLLLPGVGPVTAWVLLAEVGCFDRFRSGKQLARFCGLTPRNASSGQREADAGLIRCCNNDLRSVLIEAGHRLKRYDPRWSALSQRLRASGKPGSVIVVAVANRWMRWLYHEMKTCQAA

SEQ ID NO: 435501 - protein, 341 aa, unidentified
MFHLNTFAMKHYKYFVGIDVSKTSLDVFIHSLNLHRQLSNNRSGYDTLIRWLSRSLETDDLSRVLVCFEHTGFYSLALSVYLEEKDITFAMVAALELKRSMGICRGKNDRVDAQRIANYTYLHRQTLQPTRLPAKAVLQLQPLLALRDRLVRDRVGYYVTQKEQRRFLLPCQLDGLQDAYANVISCMDAQIKRVEQAIRQVVEDDQELKQMLELISGIKGVGFLVGVYLITYTHNFTRFATWRKFACYAGIAPFEWQSGTSVRGKTKVSPLANKQVKKMLHMAALGASRGDPELSAYYQKRLAEGKNKMCVLNMVRNKLVARVFAVAARKTAYVELMRYAA

SEQ ID NO: 435502 - protein, 347 aa, unidentified
MTLKVRVYGKISNDLGQIDNVMRKLISQNAELHCVYEAGPCGYPIYRHLTSKGIDCVVVAPALIPKKTGDRVKNDRRDATHLATLHRSGELTPVYVPDQADEALRDLVRARKDIQISLRKVKQQINAFLLRQGISYPGKSKWGKAHLNWLAELKMQHPAQHIALTEYLDAMEDHEARVKRIEKAIEQCCQTSRLLPVIEALQALRGISLLSAVTVVAELGDLSRFDTPAQLMAYLGLIPSEHSSGGTIKKGPITKTGNTHARRTLIESAQAYRMPARKSKAIRKRQEGLPDDVLDIAWNAQLRLCHRYRRLIAKGKNHNVVITAIARELAGFIWAIARAVPIVAAER

SEQ ID NO: 435503 - protein, 343 aa, unidentified
MKLIRIGVDLAKDVFQVHGVDRHEKAVWRRKLRRNEWLKVLVATAEPGCQIAMEACGGAHHWARKLQGLGFRVKLIAPQFVKPYVKGDKNDANDAEAICEAMSRPSMRFVTVKSAEQQDIQAVHRIRVGLVEQRTAKANQIRGLAAEYGLVAPKELGQLRIALPCWLEDAQNGLSDRFRQLLSGVWEDLRALDERVGELDREITVIAKSDPLAKRLQQLRGVGPVIATALVGALGNGEQFARGRQMAAALGLTPRQHSSGGKERLLGISKRGDAYLRTLLIHGARSVIRTAKGKEDRLSRWVIALAARSHPNVAAAALANKTARMAWAMMRKGTDYQPDLVTD

SEQ ID NO: 435504 - protein, 427 aa, unidentified
MGVCTMEDKRNWFVGVDWASETHHVQVSDARGRKLGARAFAHSGEGLAAMAAWILEVTGAAPEAVFVAIEVPYGPVVESLMERGFRVHAINPKQLDRFRDRFSPAGAKDDSRDAEVLGDALRTDPRCFRAVQPLDPVVVELREASRMAEDLKQERNRLGNRVRDLLWRFYPQMLGLTDDVAAPWFLDLWRLIPIPEKATRVREATVDRLLKRHRIRRLSAADVLEALRRPAILLAPGTVSAAVSHLEAIAKRLDLVNRQMLAVDAQLDRLTQSLAGAQERAGGPRPEPCDVTILRSLPGVGRIVLATLLAEAFEALQRRDDRALRCLAGVAPVTKRSGKSRIVLMRQAAHVRLRNAVYHWARVAVQHDPRSQAKYAALRARGHGHGRALRSVADRLIGVACAMLEAKTIFDPNLASQRAPNLGKPTC

SEQ ID NO: 435505 - protein, 365 aa, unidentified
MWEAPVKIQRTSVGLDVHARSVVACALDGDTGEVFQRRMTPDHGEIVGWLNDLPGPVAASYEAGPTGFGLARALMAAGIACEVAAPSKLIRPAGDRVKTDARDAAHLARLLHLGQITAVTVPTAAQEAARDLVRARDDCRGDLMTARHRVSKLLLRQGIVYSGGKAWTGKHELWLRAQRFDNPALQLSYEAAFDAMLACVDRRNRLDKAITTMAADSDFTPVVHRLGCIRGVATLTAFGLAVEIGDWHRLTGRSIGAYVGLVPSEYSSGESRSQGGVTKTGNQHVRRLLVEAAWHHRSQYRPGAELRRRWELASPAVRARGQSANRRLHTRWVGFDARKKLPVIANVAIARELAGWCWSLAVMPD

SEQ ID NO: 435506 - protein, 402 aa, unidentified
MKQLLYAGIDWASRTHAVGVVDDHGGIRARFEVPNTGKGFGGLIRRLTKLQVAGVAIERPDGPLVEAMLDAGLRVVVITPRQVKALRSRYRATGAKSDTADALLLADVLRTDGHRLQPLIPDSDATIVLRALGRTRKDLQKARVALCNQLTAQLERCFPGAVGLFADLHSATAIVFLRRYPTSQAAATLTQATLTAFLRRIHYSGHTPVAVLLARLKTAPLAAISPDQATGRAVCVQALLDAIQACHSRERELEAEIIERLEVHADQQIFTSLPKAGHGVRAAALLSEIGDVRTRFPDEEALAALAGVAPVTRASGKLRSVGFRWACDKKLRNAIIDFADDSRHASPWAASIYAQALQRTRRHPQAVRILARAWIRVIWRIWQDHTSYDPTKHGGAVRLLTA

SEQ ID NO: 435507 - protein, 316 aa, unidentified
MSEITSFVGIDVSKNTLDVHVLPTGERWQVANDQTGCVELIERLKPLGETALVVMEATNVFWRMAAAALAGAGLACAVVNPRQVRDFAKAMGKLAKTDALDAEVLALFAQRIKPPVRALPDAQCQVAAEMLARRAQLMGMRVAEKNRLATASAKKVRKDIEATIAFLEKRLSALDQEIDSWLQSTPIDQSRANLLQSFTGIGHHTACSLLITLPELGSLNSKQIGALAGLAPFAKDSGNKRGERHIRGGRAAVRAALYMPAITAIQHNPVIRALYQRLVRAGKHHYVAITACMRKMLVILNAMLRSNQPWKHSQNA

SEQ ID NO: 435508 - protein, 390 aa, unidentified
MTSLKHSGNVWLGLDVHKDSIAAGVLGTQESSPRIELIGPGPDAVRRLIKKVSGSPERVRACYEAGPTGYELHRLLTGLGVRCEVIAPSLIPKAAGERVKTDRRDAGRLARLLRAGELTAIRVPTPTEEAVRDLCRARADVVEDQRRARQRLGKFLLRHGVVYPGGRAWTVSYYQWLDQVRFAERALIETFRHYRAILAERDAALTAIDADLRPWCARDPFAAQVRRLACYRGVAELAGLTFATEVCDWRRFPSAPSFMAFTGLIPSEYSSGGSQHRGHITHAGNEHLRTQLVESAWTYRYCAQIGRGLARRQAGNPPQTLARSWAAQRRLCARYRRLAAQTRPHRRGHRDRPRAGRVPLGRNDRGRLTMTTHPAGTPAGSGHHPRHPNT

SEQ ID NO: 435509 - protein, 409 aa, unidentified
MLWGGRREMATSSLYLIDGVPAMPQPNDLSRSLVALDQNSTIIAVIELSQSSWLVAGMLPGIERQPRKKLEPSPERLLGLLHRWRDEAVRAGRTITRIALAFEAGRDGFWLARWLAARGIEAYVIHASSVAVSREHRRAKTDRLDTELLKRGFLGWLRGERGHCSMARVPTIAEEDAKRPNRERDCLVGERTRIVNRIKSTLTRLGIRNFKPTLRKAAERLATVHTPEGMPLPPNTLAELQRDMARLGFVVSQIRQIEDARQQRLEQQPETRPHAMVRLLARIVGVGVETADMLVHEVLSRPMRDRRAVARYAGLTGSPDESGAQRREQGLARAGNARVRRGMIQLAWRFLMFQKESALALWYRARTADSRSGTRKTMIVALARKLVIALWRFVTTGETLEGVVLRPAS

SEQ ID NO: 435510 - protein, 403 aa, unidentified
MSPEHSIDIFLGLDVGKSEHHACALDRDGNKVFDKPLPQLESELAGVFHQLQELGTVLVIVDQPNTIGALPIAVARDCGCEVGYLPGLAMRKAADLYPGRAKTDKRDAFIIADTARTMPHTLRAVDRNDEVLSALKMLSGFDDDIARDCTRTVNRLRSILTQIYPSLERVFAGSTLTRTPILDLLIHYKGPQGLKRAGYQRVLNWMIKHTRKDPTPLVDDIFAALKAQSVTVPGSDAAELVIPQLAANIKALKEQRNTIAEQVEEMLADFPLCEVLMSMPGVGIKTAAQILLAIGDGSDFDSAGHLAAYAGIAPVTRRSGSSIRGEFPARSGNKRLKNALFYSAFAVIRSHEPSRRYYERKRAEGKRHNAAVICLARRRCNVIYAMLKNKEFFREIPPRPVAA

SEQ ID NO: 435511 - protein, 402 aa, unidentified
MATPAQVDVWVGLDVGKGEHFADVLDNDGERLFARAVANGQADLEALLDRARQHGAPGLVIDQPGSIAQLALAVAARRGTPVAYVPGLVMRRAADLYPGEAKTDRRDAYVLADTGRTRRKQVHWLDTSSDELLAQLRVLNGYDIGLATDATRLASRLRDALTSIAPVLERAVGDRLHQAGVRDLLAAYPTLTALRAASQSRIERTVKARSPRIAAKVTIAIAAALAAQDVTVPAEAATGRVIAELAAELDRVCARRGAEIEEAFLAHPFGELLATMPGIGPRTGARILAEIGDGSAFANGSKLAAYAGLAPVTRQPGTSLAAESRSLRGNHRLKNAMFLAAFASLRDPASKAFYDRKKTEGKRHNAALICLARRRCDVILAMLRTRQPYQPARPAPSLAKAA

SEQ ID NO: 435512 - protein, 352 aa, unidentified
MMIIGCDFHPRFQQVACLDTETGECSERRLMHTAEAEKFYRSLADCQVRVGVEATGNFAWFRRLLGELGHELMLGDATAIRASNPRSQKTDKRDARHILRLLVEERFPLVWQPGVENERQRQLLLHRSSLVRMRTRIENQLDSVGKNEGLVGSRRWTGRRRREVEALKLEGWYGERRQDLLVLLDGLEERIKPLDQAVRTAAEADLQARLLMTHPGVGPVVSLAYVLTIGDWQRFPRGKQVGSYLGLIPCEDSSGDKRRLGHISKQGNPMLRWLLVQAATVAQKYDADWHRQYVRLSMAKHHGVAKLAIAHKLAVRLYWMLRSGQDYQQVMERGSHAGQSVCPNGCGKKPRT

SEQ ID NO: 435513 - protein, 388 aa, unidentified
MAVTGGTRRIVGGVDTHKDLHVAAVVDEQDRVIGTRSFATTRQGYRQMLAWMRSFGELQRIGIESTGSYGAGLLRFMQQAKVAVLEVTTPDKQDRRRRGKNDDLDAQNAAHAAFAGQRTVTPRSRDGMIESLRILVACRKTAVSARRVALQMIHNTIVCAPDGLRDQLRSLTRMQLVRTLASWRPDLTAYRDLDSAYRIGLKSLARRYLELHDEIADLDVMIAAIVDELAANLVARNSIGHIGAAQLLLTAGDNPERLRSEASFASLCGVSPVPASSGKTVRHRLNRGGDRAANSALHIIAIGRLRTDQRTKDYVARRIAEGHSKLDAIRALKRYLRERSSRSSHSVARKSTPRELPLDKQKGVQGNHKWPPLHMFEKSSASPRPCEE

SEQ ID NO: 435514 - protein, 345 aa, unidentified
MKIVGCDLHTRYQQIAMLDDETGELVERRLEHANGEAKEFYTKLTGPVRVGIEATGHTRWFERLLAGLGHELWIGDAARIRAADVRKQKTDARDAALLLELLLIGKFPKLWRPSSEERDLRQLLWHRQQLVWMRTSVSNQLHALAMGEGLCKKKQLFTKKGRAELEGLALDPWASRRRQELLRMLDQLDASLKQFDEAVNEQATQRPEAVRLMTHPGIGPVTSLAFVLMVGPVHRFERSKQLVSYLGLNPSEHSSGGKQRLGAISKQGNPMLRGLLVEAGHTAARLDPELRQDYQRLRLRRGGSVAKVAIARKLAVRMYWMLRRPVNYTQLVRMQGSSRATVVQK

SEQ ID NO: 435515 - protein, 325 aa, unidentified
MAYIGIDVSKSKLDLCWLRENGKVKTKVFTNHPKHFPALIDWLTRQTGEQARDLRVYLEATGIYHEPVAEWLHEVGAQVHVVNPAQVRHYGHALGHSGKTDKKDSQLLARYGLDRQPPRWQPEPAAIRRLRRLAGRLETVQQDIQREENRREKAMFSRDTETVSSIDQVLLALQGEAKRLREEIKEHIDGDGDLKRDQALLESIPGIGEVTSVHLMVLLRGKTFRSARQAAAFVGLVPCEWTSGSSVRGRPRLTKKGSPAMRRRLYMAALTASRHNPVIQGFYTRLRQAGKTPMSALTAAMRKLMHIAFGVLHRQTPFQTQPVGG

SEQ ID NO: 435516 - protein, 409 aa, unidentified
MDLIHDRVAGLDVHRDSVTACFRVLGPKGGVVREKDRFATTTTGLEVLAGWLTERHVELVAMEATGVYWKPVYYALEDRFVLWLCNARHVKKVPGRKTDLSDAEWLADVAAHGMVRPSFVPPPPIRQLRELTRYRKTQIDARVAEIQRMEKVLQDAGIKLTSVASKVLTQSGRAMIEALIAGEHDGERLAELAKGKMRTKIPALTEALTGQFGAHHAVAAQRILGHLDFLDVTISALTSEIDARTAPFQPVYNLLLPVPGLDRLTIDVIVAETGADMSRFPSAADLASWAGVCPGNHESAGKRRRVATTPGNQWLRRALIEAARAAVRTRGSYFGAQYRQIARRRGPNKAAVAVAHSLIDVIFHLLSSGELFEDLGDDYFQRRRDPERQARSLVTQLEALGFSVTITAA

SEQ ID NO: 435517 - protein, 327 aa, unidentified
MSQDNAHAAGTPQGELGAIFASIELSKKTWLLTTMSPGAGDKMSRHIISGGDIGTLLAQFTALKRKVYDRTGRPYPFVIIQEAGLDGFWVHRALTAEGYESHVVDAASIATSRRKRRVKTDRLDGESLIRALLAFKRGEPRVCSMLRVPNPDEEDRRRIVRERKVLMEERIRHSNRIKGLLFSQGVTGYDPLRRDRREQLEMLRTGDGRPLPPNMKRQVLREFARMELLIDQIKEVEAERDDMLIEERQSAREVALLSKVVGIGPEFAAELWGEGLFRHFDNRRQVAAYAGLAPTPWQSGSIDREQGIGKSGILGSDQPCWRWPGFG

SEQ ID NO: 435518 - protein, 355 aa, unidentified
MTQTTRTSTTTPAPAWTVGLDVGDRVTHVCVLDAAGAVVEQARLATTPTAMAQRFAGRPRQRVVLETGTHAPWLARQLRAAGHEVLVANARRVRLISENVAKRDAVDAETLARLGRLDPQLLAPVASRTEATQVQLAQVRARDALVRTRTLLINHVRGAVKSLGGRCPRASAESFARHAAPALPAALVAVLTPLLTEIQALTTAIRTAEAALAPLAEAQPATARLRQVPGVGLLTALTYVLVLEDPMRFRSGRHVGAYLGLTPGRAQSGARDPQQRITKQGDRLLRRLLVGSAQYVLGPFGPDTALRRWGLTLAVRGGRSAKKRAVVAVARKLAALLHTLWTTGAPYVPLPATAA

SEQ ID NO: 435519 - protein, 368 aa, unidentified
MENSVRYVGLDVHKRFITVAIAQAGAGAEVRSYGQIGGDLESVDRLVRRLQSQGGDLYFAYEAGPCGYQIYRHLTARGFSCLVAAPSRIPRRPGDRMKNDRRDAATLARLFRAGELTPVQVPDADDEAMRDLTRAREDAVAVERRAKQRAAAFLLRHGRVYEGRTTWGPGHWRWLLEQAMKHPAQQIVLQEYLDAVREAGARVARLTGQIRELTAAWRRAPQVAAYQALRGVSLITAATVAAEVGDLDRFDSPTELTAYLGLVPSEHSSGGVVRRGPITKTGNGHARRVLVEAAWAYRLQARVSRHLRKRQEGLPEPVRGIAWQAQVRLCARFRRLRARGKHQNTTVTAIARELAAFLWAIHGALARP

SEQ ID NO: 435520 - protein, 354 aa, unidentified
MMIIGCDYHPAFQQIAFVDTDTGELREGRLQHREEAEKFYRDLAAQGMKVRVGMEASGQARWFERLLAELKFELWIGDAAEIRTKRVRKQKTDRQDAQLILKLMLKDDFPRIWVPSWENRDLRQLLWHRHRMVQARTRIMNQLQAVALNEGLRCKKRLWREAGREQLESFRLAPWASRRRHDLLELLDRLSPTIADLTQTIEQEAEKCPEAQRLMTHPGVGPLTALAFVLIIGRAERFQCGKQIASYLGLVPLEDSSGNRRRLGHITKQGNALLRFLLVEAAQVSVRSIPEWRHKYFHLAMRRGRKIAKVAMARRLAVQLFWMWRKGWNYEQVRKFASHAGQPGNRDGVQQNTE

SEQ ID NO: 435521 - protein, 391 aa, unidentified
MPQPNDLSRSLTALDQDSTLIAVVEMSQSSWLVGAIIPGVERRPAKKLEASEGMLLALLYRWRDEAAKAGCTIDRITVAFEAGRDGFWLARWLRQRGIEAHVIHATSIAVSREHRRAKTDRLDAALLQRAFLGWLRGERGHCTMVAVASLAEEDAKQPSREREALVGERTRIGNRMKSTLARLGIRGIRPGLRKTAERLEQLRTPEGAPLPPNTLAELRRDLARLRLINDQIGEIEAARLERLRQQPDEARHPMILLLARVVGIGIETADMLVQEVLSRKLRDRRAVARYGGLTGSPEESGARRREKGLARAGNARVRRGMLQLAWRFLMFQKDSALAQWYRARTADARGATRKTMIVALARKLLVALWKLVTTGELPNGVVLRPAIQAAL

SEQ ID NO: 435522 - protein, 364 aa, unidentified
MSNCITWVGIDDSAKKLDVAFVFNQEENPREQFEVMNDPDGLGRFVKKLKAQRGEVRCVYEAGVCGYTLQRLLKKKGIPCDVVAPSLTPRRPGDRVKTNKRDARKLAKLYRAGELTSILVPNEQQEALRDFLRAREDSLEDLTRQRHRLSKFLLRNGMRYRTGKAWTKGHWGWLRTCHFDDPLKQEVLMQCRTTVEETQERLKTFDEKIEEIVKRPEYARLASCLMALRGVKALTALTIIAEAVDLKRYVSAPAMMSAIGIVPSEYSTGDSQRQGGITKTGNGHWRRVLIESAWHYRHSPVTSGALKQRRKNLPEEVVAIAEKADRRLHKKYVKIVNRGKRATVAAVAVARELAGFVWAIGQLA

SEQ ID NO: 435523 - protein, 349 aa, unidentified
MRWRISLVLMSVKETSVCVVDDAGKVILEQKVPTEPSDIIALLTSLGVTYGRIGIEAGPLSQWLFNALTAAELPVICVETRHMKALLMAQQVNKTDRNDARGIAQMMRVGLFKPVHVKTLVAQEQRMLLTSRKLLQRKLLDLESDLRGTLRNFGLKVGVVSGGRYEARVRELVAGFARLAAIAEPLLNVRRVMRQQLAVLHKMLLDTVRDDPVCRRLMTAPGVGAVVALTYRATVDQPQRFVHSRAVGAHVGLTPKRYQSGETDYDGGVSKCGDALLRTMLYEAAQVLLTHGSKWSWLKAWGMRVAQRRGMRRAIVAVARRLAVVLHRMWVDGSEFRWSKDSAAVPPVA

SEQ ID NO: 435524 - protein, 390 aa, unidentified
MAQDRAQAPSIPVRTLFVSLELASRSWKLAAADSQARKPSQAVVSPFDPESLAHGLERARRKFGLPADSPVMLCMEAGRDGFSVHRWLAWLGMESIVIDPASVAVNRQKRRAKNDRLDALMLLGCLLRHGAGEEGVWRVCRVPSEEAEDLRQVHRSRKTLVEERTRHSNRIRSLLATQGVRVRVTSKLKDDLPSLRDPREKALGKHLQATLRRMLELLELLEEQIRGLDAEMRAWLAEQPGEDAGPSEAKVWRMAQLLGIGHVTAHTLVAELFGWREFSNRKEVGAVAGLTPTPYDTGESTREQGISKAGNDRVRALSIEAAWCWLRHQPESELSRWYRDKFLCGGKRQVRKGIVALARKLLIALWHWVEHDILPPGAVLMSTSPLRQNG

SEQ ID NO: 435525 - protein, 378 aa, unidentified
MKQDNKAKQNKGKVSVEAPQDTCDLGHRRWKVQREGLTVGLDVGDKISHYCVLNEEAEVVERGKLKTTPAALQPWIEALPAGTRVVLETGTHSSWISRLMEQARQEVLVAQPRKMPQIYACKRKNDRRDAEKLARTGRLDPNSMGPIRHRSAEQQADLAVIQARDALVQVRTQLINTVRGLVKGTGERLMGCSARSFAQQVEIPHRWRAALLPLVSQIRSLSEQIERYDVEVEKLAQKKYPETELLRQVSGVGPVTSLAFVLTVADRWRFRHSRDVGPFLGLVPAQDDSGESSPQLRISKAGNTYLRRLLVGSANYILGPFGPDCELRRWGKKLSERGDKNARKRAKVAVARRLAVLLHKLWVSGEVYEPLPEKRAAA

SEQ ID NO: 435526 - protein, 327 aa, unidentified
MRKLHPVGIDVSAKELVVASDCHREARFDNDPAGHKKLIRVLTKGGRGARVVLEATGVYSLDLAFSLHRSPRIEVMVANPRAVANFAKAYLQRSKTDPLDATVLLEFARRMPFTRWVPPAPEHLDLRALSRRIAALVKILQQEKNRLHAASRSLEMTALVREDVEANIGHLAKRIERLRDQALAAIGNHAPLRAAFEHLTSIKGIADASAISILGELVVLPADMTVRQWVAHAGLDPRHAESGSSLHKPARISKAGNKYLRAALYMPALVAIQHEPNVAAFYDKLVASGKTKMQAIIAVMRKLLHAIFGMLKHGADFDGEKFYEINA

SEQ ID NO: 435527 - protein, 449 aa, unidentified
MSKKKSHEAPTPVEPEPEWAAFVAIDWADQKHYWRLAVAGSQIQERGELDNTPEALAAWLANLNERFGSRPIAVCLEQSRGSLVYMLLKFPNLVLFPVHPTTAARFREAFQPSGSKGDDSDTGLLLSILLQHRDRLRRLEPDTAETRLLQRLVEQRRQMVNDKTRYSNRLTACLKLYFPQVLQWFDDVTSPLVAALLERWPSLEELQHAHDGTLRKFFHQHNCRSAERIQERINAIRQAVPATTDPGVLGAEAVVAGCLSALIATLRVKIGELDTRIAEAFAAHPERALFESLPGAGPVMAPRLLVAFGTNRQRFANADEIQCYSGIAPVTVASGKSEWVHFRWACPKFLRQTFHEFAGHSLFKCVWARAYYDLQIHNGKSHHAAVRALAFKWIRVLFRCWKDRKPYDEQVYLQSLQKRNSPLKGLLPSATGLGWKNVAGFQQFSDNPS

SEQ ID NO: 435528 - protein, 333 aa, unidentified
MYKLFIGSDISKEVIDVAYYDQGKSHYLGAQFSNDIEGFEQVVQQLKKITDIPLSSWFVCFENTGVYSKPLLEWLFSQGIPCREENALKIFKSLGLRRGKDDKTDAMDICTYAFEKRDSIKPSILPKPLIVKLKKLLSRRDLLVKQKKALDVSLKEQRQILDTDLLESLEKGNEILIKEYKKQIKEVEALMEQLIGEDSEAKENHVLAQSVVGVGPITSATFIAYTHNYKCFTDGRKFACYSGVAPFPNRSGKRIGKTKVSHMANKRIKSLLSNVVNAAVMHDQEISIYYHRKIGEGKEKGIVLNAIKNKIIHRTFAVINRKTPYVRLMNYAS

SEQ ID NO: 435529 - protein, 343 aa, unidentified
MQYIGIDLHKQYFVATVMEENGRVKRKDRVSTDRRAIREYFQAVNGSASKATIEAGYNWGYFYDELREQVAEVKMAHPLKTRAIAEARIKTDSIDSEVLAHLLRADLIAEAYAPDFVTRDKKNLFRYRSSLVKTRGMLKNRVHVVLARNHIEVPEFQKLTDKFGKRGRQYMRTFELRGNDTEILNHYLDLIEDIEEKIKGAEKKIGQEFKEDEICRLLESVPGIGKILSVMIRYEIDDIERFLSSSKLCSYAGLVPSTYSTGGKTYQGKITKQGNRWLRWALVEAAQQAVNKDIYLRRQYHRIAAKRGSKRARIAIARRLLEIIYRIWTERTPYYEKPVAVAL

SEQ ID NO: 435530 - protein, 423 aa, unidentified
MISFPKRERAQRAAACVGVDAGKFAHTLVVRPTGQPDSRPLSFPTTRAGFEQAVAFIRQQVPGARTGAVLVGIEFAGNYGFTFAHYLRELGFAVVSVLPAHTKRWKDVAHNQPLKTDAKDAGTITDLLAQGHFVGFPFLEPAYAELRYLVTARERLAVLRRGAITQLRALLQVVFPEYETIFPLVSQRTAVLLLRAFPGPQQLLAAPKAKVLRVLRAGSRGHLGAEIYERLVGAARATLGLPGAQVCLRQDIVLTLDRLALFEHQIRALEVELVAALEAVPETPYLLSIPQVAAVTAAVFLGSIGDPRAYDAGAQILRVAGLSLVERSSGVLHGTKRISKRGRPLLRAAAYLFAVRSITKGGLFRADYEGLCARNGGQKLKAIVAVMRSGLQLLYSIARDRRRFTVEPPPRRRARPTLEVTPA

SEQ ID NO: 435531 - protein, 340 aa, unidentified
MPLYGGIDLHANNSVVVLLNEQDQVVYQKRLPNDLPTILEVLAPHHAEIKGLVVESTYNWYWLVDGLMEAGYRVHLANPAAMQQYSGLKYSDDHSDARWLAHMLRLGVLPEGYIYPKAARAVRDLLRKRAHWVRQHTANVLSVQNIMVRNTGARLSVKWIRELPKQELKRLLPEADQVLAITSSLAILDCLSQQIKALEKIVHQRLHHTPSYEQLLTVKGIGTILAQTIALETGDMNRFPTVGNYASYCRCVDSTKLSNGKRKGQGNVKNGNPYLGWAYMEAAQYAIRFNPSAQRFYQRKLAKSNNNTTLARKAVAHKLSRACYYVMRDLVPFETTKAFG

SEQ ID NO: 435532 - protein, 345 aa, unidentified
MTIVGGLDLHRSQITFDLLDVESGEVTTGKVHRPDRVRWRRWLNELDGDDVELVVEGCTGWRFVVEEIQRAGFTARVAEPAETQAARGNKRRAKTDRTDARLLRQLAVEDRLPDSWIPPQVILEWRERIRNYRTLLDQRTAWTQRLHAELYHHGVAVPEAHVAGDQTRAWLGCESVELSPAARERIELAYRMIDVTNAELVPLAARIRGFGRRHPATRALAEAHYGIGPLVAVAVWAELGDCRRFAKADAAVRHAGLDITVHASAGHRHSGRLARQGPSVLRWALYEAAHHASRATSPDHDYYCGVRARIDAKRATLSVARKLARRSYHTLRSLNDEELFADIDI

SEQ ID NO: 435533 - protein, 348 aa, unidentified
MTVYIGVDFHARQQTISYLTTEDGEVTRRRLEHAEVTLVRSFYEQFAGQQVIVGFEASGYAAWFEELLEELGYEIWIGHATAIRTFAKRRQKNDRRDADLILDLLVHGDFPRIHRHSEESRTILQQLRYRQRLVKMRTMISNSLVFMAASRGVLLRHQFTSRRSVERIQQLRLPAELAAQRDEQCRRWLELKASIDQVERGLALKAEADPQVQRLRTQYGIGLLTGLCLVHTLGRVDRFPNSRKVTAYAGFDPVEDSSGERRRIGSISKEGSRLLRFFLIEAGQIAVRRDAELARVYRRVLVRRGHAKAKVAIGRRLLVRAFIMLRDEIDHAEFQRRGVAARSSRSSH

SEQ ID NO: 435534 - protein, 407 aa, unidentified
MEGLSERVPVDRVIVAIDPGKVLNRVWITTADGLVGRPLWLPTSRSGLERLDELVGVNGPPVFALEATGSLHRAWAAELERRWPGSLRMFAPSQTKAARSQLGTRKFKTDDRDCAALVWLARQGAGEPASDSVVEALRAAVSHRRQLVLALKPLRQRLHDQLNALAPGLSAPKGHGRALALETSTGRAVLACAVAFAGRPPSVRSLKARADGRLSDATAAFWSTRWQDCLPPPTDAELRAERMDRDLARFDALREDIAFVDEQIEQLLADSAGEILTSLPGVSTTRAAAFAAHTLPIERFETPERLYSATGLAPTSYESSTVRRRGGISRTGVPEHRDALIGIARGLGQFAPAFKQRLAELRARGKSPLEARVALARHACRLCWRMLRTQEPYDDRRYDRARRDRGR

SEQ ID NO: 435535 - protein, 343 aa, unidentified
MGEVSTIGLDIAKSVFQVHGVDVDGAVVMRKRISRAKLLEFFATLPACLVGVEACPTAHYWSRRLGALGHTVRLLPPSYVKAYLKRSKNDANDAAAICEAVTRPSMRFVATKSEQQQSGLMLHRSRQLLVCQRTMLSNAIRGHMAELGIICAKGRNGTAELLKIIADEQDDRIPAAARFSLNVLARQYAVVRTEIAAIERRIHAWHRSSEESRRLEEIPGVGPIVATALVAEVGDWKVFSSGRSLAAWIGLVPRQHSTGGKERLGRISKQGNRHLRWLLVAGAMAVIRYARQHGTKRPWLARLMDRRPIKVAAVALANKIARMAWAMMVRGERFKEPKLLPAA

SEQ ID NO: 435536 - protein, 325 aa, unidentified
MDVLGIDVAKATLVLVLLKAERQQRAEFANTPTGHAKLLGWLAKRCPAPVHACLEATGTYGDDLAQMLFDAGHTVSVVNPARIAAYAKVQAARHKTDQADAALIARYCQREQPAAWQPPAPELRELRALVRHLDTLQQQRQAEHNRLEAGGHPAAVRQAIQAHLTFLTEQIATVEQQIEDHFEQHPELKRQRELLDSIKGIAVRTATRLLAELGDWQRFATARAVVAYVGLNPREYRSGSSVHRRTRLSKSGNAAVRAALYFPAIVAKQHNPLVQALCARLTARGLCPKAVIGAAMRKLLQLAYGVLKSGRPFDPNYAQAVTGQA

SEQ ID NO: 435537 - protein, 436 aa, unidentified
MNTSESKRTSLTEGIAAWVGLDWADQQHVICVYEVESGKSEMLRLEQKPEAFESWLTPLRQRFGGAKVAIVLEQARGAVIYALLGVDFVVLYPVNPQALANYRKVYTSSGAKSDPADAVLLIEMVRQRPECFRPWKPDDADTRSLQLLTENRRQLVNQKTAFTNQLTSVLKSYYPQALELAGDLDSDQACDFLTRWPRLGALQQARPSQIRKLYQDYGRPRPERLEQRLEQIRQARPLTQDPAAVLSGSMMVEALVPQVRSLLRAIEQFDRQISVLFQRHPDRFLFESFPGAGAALAPRLLAAFGTDRDRFQSAQEIQQLSGIAPVTEQSGRQHWVHWRWACSKFLRQSFHEFADHSRKWCRWAKAVYQQLRRRGQGHHAAVRRLAFKWIRILFHCWKTRSCYDESIYLKSLQQRNPVLWAEIEALPPRVRRQPAA

SEQ ID NO: 435538 - protein, 412 aa, unidentified
MTAIDKFAAHVGLDWADKKHDICVQFKNGERIFHVVEHTPEALDIWLNELHQKVKGRIAIALELKKGPVVYALQKYPFVTVFPVHSLSLARYRQTFWPSGAKDDPQDAELALELMLRYPQKIKAIEPDNADIRLLQQLVEQRRQLVEDKRRFVNRLINTLKQYYPQPLEWFSHRGSLLLCELIIRWPSLQQLKRARRDTIRNFLNAKGGRARSLTEQRVASIESSIPLTTDPVVIDANALMATALAAQIKVVSEIIKTYDERIETLFDTLPDAELFKSLPGMGPCMGPRMLAALGDNRNRFNSAEEIQNYAGIAPVTERSGQKSWVHWRWQCAKFVRQTFVEWTAKTVNSSYWARRYYQGQREKGKSHQSAIRALAFKWIRVIYRCWKSRTRYDEAKYLLALEVRKSPLLVP

SEQ ID NO: 435539 - protein, 481 aa, unidentified
MQATEEGTMQTTIPGVIACGMDVHKDKIDACVRIGDGGAEGTVIIKTFSTMRKALFELRDWLLSLKCFKVLMESTGVYWMPIYWILEEVNGMNVGVGNARDLKNAPGRPKTDKEDAKWLSRLCMFGLVLKSFIAGRPFRALREYTRYHKKLVQEQARHKNRLEKLLQMNGFKLSTVLSDITGASGRRILAKIAEKGELTVSEIRAELDKRCNSTPEEIEYAINGVMKQTSRLLLKLQLKKLWSCDAEIDEVYSHMVGLSAEYAWAIRIIASIPGLSTLSAIYIIAEIGTDMSSFKTANHLAGWAGLAPKDNKSADKARPSRTKKASQYVKSLMIQCAWAAIKSRDSRVSLWYWHNVKRLGEKKAITAVARKLLCYVYAMLKSETLYDKSLDVAYAQNIRAIKLGAAQKIVGSRKRNAPSFEQSGNNNDARLASGQDDSHEKPVLSNKKVESRIQPKSGIESQNEAPPIKKRGRPKKIVEPG

SEQ ID NO: 435540 - protein, 413 aa, unidentified
MERIVERCAGLDVHKSSVTACVRIPDENEALHQEIREFATTTRGLLLLRDWLASFGVGLVGMEATGVYWKPIYYMLEDDFELWLLNARHLKNVPGRKTDVKDAAWICQLVEHGLVRPSFVPPKEIRELRDLTRYRKAQIEERTREVQRLEKVLQDAGIKLSSVATRVLGASGRAMLDALVGGTTDPEVLAELARGRLRSKLDALREALEGSFSSHHALMVGKILAHVDYLDESIGELSLEIERVIAPFSEQVELLDTIPGVNRRTAETLIAEIGADMSRFPTHRHLASWAGMCPGNEESAGKRRSGKTRKGSKWLRSALTESARAAARSKGTYLASHYARLRGRRGSKKAAVAVGHSILVIAYHVLERQVPYEELGEDYFDRRRSSEAYAKRLVRQLERLGHKVALEPLPQSV

SEQ ID NO: 435541 - protein, 318 aa, unidentified
MQTITTIGFDIAKSVFQVHGIDAAGEVVIRRQLKRRFVLAFFQKLSPCLVGIEACASSHYWSRELQILGHTVRLMPPAYVKPYVKRQKNDMADAEAICEAVTRANMRFVPTKTPEQQSCLMLHRTRHLFIRQQTAVINSIRAHLAEFGIVAPVGRKGVTELLHVVADPSDKRVPEVARACLAALGTQLLSLKQQILEFDRLIMAWHRSNQTSKRLHYIPGVGPMLATALVASVADPRTFRSGRNFSAWVGLVPKQHSSGGKDRLGSISKQGDRYLRSLFVAGALAVIRYAKIHGTGHRPWLTALLARRPTKVAAIALD

SEQ ID NO: 435542 - protein, 361 aa, unidentified
MEVIIERACGMDIHKDSITACIMTPEGKMIQSFSTKTVFLLQLIDWIKEHGCTHVAMESTGVFWKPIVNILEAENIEFLVVNAQHIKAVPGRKTDVKDAEWIAKLLRHGLLKASFIPNRTQRELRELVRYRRSMIEERARQHNRIQKVLEGANIKLGSVVSDVMGVSSLDMLRAIAEGENDPEKLAGFARRSMKKKKAELELALRGYIQPHQRLMIKTILTHIDFLTVQIELLNQEVACRLSTHQEDIERLDSIPGIATRMAEQILAEIGTDVKQQFPSAAHLCSWAGLVPGHNESAGKRKSSTMKKGNKYLKSALIEAAHSVRGSKTYLGALYRRTATRKGKKRAGISVAHAILRIAYFL

SEQ ID NO: 435543 - protein, 442 aa, unidentified
MLSSLCERRTFMDSHQFEVIHPKCAGLDVHKKSVVAAVCTSDPVTLTASYKTKVFKTTNSDIVSLRGWLPAQDCHDVCMESTGKYWIPIFNILETHMQAVLTHPKYVKAIKGKKTDKRDAKWIASLFRFDIVKASFIPPPDIRALRELSRYRLKLSYMRTAEKNRYQNSMTISRIRIDCVLTDPFGLSATRIMDYLLSDEPFNEEKCRSLIDRRVKASKDEVMDAVHGYHILEEQKFKMTHAKAHMDFINKSIDEIEAELFLRSRQYDVQIKRIATIPGITELSALFILSEIGADMSVFESDRHLCSWAGLTPANNESANKKKSTRCSKAGQYLKPLLIQCALAAVKSKKEPYFAIKYERIAKRRGKKKAVIAIARMMLSSIYHMLSENKDFHPCDYEAIVNPPKQKRVVLTLANTLQFLREQGADPETLKLIQQQCAAQTG

SEQ ID NO: 435544 - protein, 409 aa, unidentified
MRYYLGVDWADQTHAVWVVEERGTKVAMRTVPHTAEGLSEWGRELDEWRAQGIELWAAIERPEGRVVDFLLDHGVVVYPVNPKALDRARDRFRQSEAKSDPFDARVLADFLRTDHLHLHALQPSSEAAQELKLLTDDYQRQIRQQTRLVNQLTTTLKAYYPRGLEVAELTTALARAFLQAYPTPAALTALTERQWQRWARAHRLSEARTRELWAVLQRPQLPVPAHVVRAKARLMQSLVAQLALVVEVVGAYREAIEDFFARIPAAQWIRTLPIGDHGITAPTLWARLGDAPGRWESFRHLQAQAGTVPVTIRSGKQRVVRFRFACDKSLRYVIDHVAFLSLRWSEWARAYYDAQRARGHSYRQALRALSAKWLKIIFVMWERHVPYDEQYHLATMTRQQFRLRQGKLA

SEQ ID NO: 435545 - protein, 342 aa, unidentified
MDRLSPVTRICKVGFTMENELHFIGIDVAKAKLDVDILRPDGRHRCKKFDNTLSGHEALVRWLRGHDVNRAHVCMESTSTYMEDAAAHLSDAGYTVSIINPALSKAFAQSEGLRSKTDKVDARMLAHFCREKRPSAWEAPHPTERALKALVLRHQALTEMQTQEKNRRETAPEVQLASIDILLGCLSAELARIEKQIKDLTDNDPDMKRRRKLLNSIPGIGEKTAAVLLAYTGLRLKFGTARQFAAYAGLTPVQHESGSSVMRASRMSKAGPVQLRKALYMPALSALYHTAWGKAFRKRLEESGKRAKVIIGAMIRKLAQVAYGVLKSGKAFDASQHELLIA

SEQ ID NO: 435546 - protein, 343 aa, unidentified
MKYVGVDLHKQVISLCVVVQKGSQRAVVQRQRLACENSAAIGEFFRSLGPFQVVVEATASYEWFVQLVEPLAERVLLAHPRKLRVIAESTRKTDKLDAQVLAEFLALDMIPQAHRPTPRVRQHRALVRQRQFIQRRITSAKAKVRHILARYNADVKHLFTEEGQAHLAAQQLLPQDRFVVDQLLVDLTHYGQQRRAADRQLAEFAEAAPIAEQEARAVLASIPCVGTVTSDIVLAELGDLRRFRSQKQVAAYAGLAPKVRESADRRKDGGITKEGSGLLRWVLIQTAWRMVTKTRRWGLAYEKLKARKGARRAVVAIARRLLGLMFSLLRRGERYSQGTEILI

SEQ ID NO: 435547 - protein, 348 aa, unidentified
MMQFYTQQRQFYCGIDLHATCMFVCVLDDRGNILLHKNFLCKDANLFLQAIEPYKQGLVVGCESTFNWYWLADLLEEKNIEFILGHALYMKSIYIAKVKSDSIDSEKIARLIRGGTFPQAHAYPKEYRASRDLLRRRAYLVRRRAEALTHIQQIHHQHNQGVTTNIRYKSNRQGLGESLPSEHAKLMVSIDLEMIDAYTIQIKRIEDELVRSVKLTHFQSYYRLTTIPGVGAMISLTMIHEIETIQRFAAVGKFLSYCRLVKGSHSSAGKKLGAPGGKIGNPYLRWAFGEAIQLLKRESKEVLEYARRLEKKHGKARATNILAVKLGRSVYYMLRDDRAFDLNKFLQH

SEQ ID NO: 435548 - protein, 348 aa, unidentified
MKIVGCDLHARQQSIAMLDTETGELTEKIIRHEGNAVRDFYAALEDAVVVGIEATGSMQWFLELLEELGIESRVGDPAKIRAAETRKQKHDRRDARLILDLLERDRFPAIWMPTSEQRDLRSLLRDRHQWVKMRARLQHTLQAIALNHALRRGSGLWSQTGQAALQALRLLPFTRQRRNELLGLYAQLQRRIQELDKEVEKQAQQRPQARRLLTHPGVGPVTALATEVFLGDPSRFTTANQVASYIGMIPAEHTSGKRQRLGKMSKQGNSLLRYLWTEAAMHAAEKDPELKRFYRRKLIPKGMGKARIAVARKLGIRLWVMMRDQIEYEEFCRRGKLRAERGSPCGDA

SEQ ID NO: 435549 - protein, 346 aa, unidentified
MMIIGCDFHPSWQQVSWLDTETGETGEQKLVQALGDAERFYRQLLAPALIGMESTGNCHWLVDLLAELGHELWVGDAAQIRASCVRQQKTDRRDAEHIRMLLQEGRFPRIWMPSSEVRDLRQLLLHRYKLVTIRARVKNELQHLCLNQGVQRKHKLWSQAGQKVLRELPLKPWASRRREDLLGLMVMLDQQIEPLDRAVKEEAQRDKMALLLQTQPGVGAVTALAYVLTMGDVSRFARGKQVASYLGLIPREHSSGGRQKLGAITKQGNRMLRMLLVEAAQIAVRFDPGLRKQYLHRCHQKPKAVAKVAAARKLAVRLYWMLRTEKPYPEVVRIESSPRVPLVGAS

SEQ ID NO: 435550 - protein, 344 aa, unidentified
MGEVSTIGLDIALAVFQVHGVDGAGAVVIRKRISRLKMLEFFAGLPPCLIGIEACPSAHHWGRELQALGHTVKLMPPSYVKAYLKRSKNDANDAAAICEAVTRPSMRFVPIKTKEQQAALMLHRTRQLLVRQRTMLSNAIRGHLAELGIVSAKGRKGTSELLGIIADGADNRVPPVARGMLGVLARQYSVIGAEIGSIEKSILAWHRSCEASRRLEEIPGIGPIVATALVAEIGDWKAFGSGRNLAAWIGLVPKQHSSGGKDKLGSITKQGNRYLRWLLVSGAMAVIRYAQKHGTQKRPWLGRLMERRPTKVAAVALANKIARMAWAIMVRGERYKEPKLLVAA

SEQ ID NO: 435551 - protein, 350 aa, unidentified
MDHIGIDVHKKESQIYILAEDGEIIERRIRTEGERFAAVLGARPRARILIEASTDSEWVARCLEALGHEVIVADPNFAPMYATRSRKVKTDRRDARALAEACLLGACRPAHRLSDAQRHVRGRLGVRDALVRTRTRYIALIRALLRQHGYRVASGSAEGFTQRVRDLPLPGRLLSVVAPLLAVMRPLNQQLAYSDATIEHLAAQDPRVPRLRSVPCIGPVTAAAFLAAVDDAQRFRHAHQLEAYLGLVPREYSSGETQRRGPITKAGHSRTRWLLIQAAVSILRRHPPVAEELRTWALRIAARRGKQVAVVALARRLAGILYALLRDGSVFAPHHVRAPRPTTAAALVNM

SEQ ID NO: 435552 - protein, 358 aa, unidentified
MNNVKSSRLDFTGQPIYIGLDVHKKSWSVSINTKYGEYKVFSQPPEVDKLVHYLQHHFPGGDYRLAYEAGYCGFWIHDQLREKGIQCLVVNPADIPTKNKERRTKRDRIDCRKLGRSLRNGEIEGIYVPCRPKLEDRTLTRTRQSMVRKQTRCKNQIKGMLLFYGVVIPEEREMGHWSRRFIQWIEGIRMERASGDVALKAHLEELSHLRQLIASLNRAILRLARTEEYRPLVYLLKTVPGISTLTAMILLTELGEITRFPSLDELSCYVGLIPDTRESGDKEYIGSLTQRRHSQLRWLLIEASWVAIRKDPALLMAFEEYCKRMRKTKAIVKIARKLLNRIRYVLRNQAEYVPCVIQ

SEQ ID NO: 435553 - protein, 347 aa, unidentified
MSEVTTIGLDLAKSVFQVHGVNASGKPVIRRQLSRRQVLAFFKKLPPCLVGMEACATSHYWAREIAAHGHEVRMMPARYVKPYVKRNKNDAADAEAICEAVARPTMRFVPIKAPEQQAVLMLHRTRALFVRQRTALINALRAHLAEFGIVAGVGRNGLEKLLEVIADEQDERVPPVARDSLLALRDQLVMARQQILEADRRILAWHRASEVSRRLAEIPGVGPLIATALVAAVPDPYAFRSGRDFSAWIGLVPREDSTGGKHRPGHISKAGDRYLRRLLVIGALSVIKRAKQTSSTRRAWLVALMGRRPTKIAAIALANKIARIAWAIMVRGTRYKEPQVEPTAQAA

SEQ ID NO: 435554 - protein, 491 aa, unidentified
MNSIFQRANPAIEKLFADAGSPKKVMCIPIDYAKRQHTALVCNGEGMQLRGVFNIHNTAEGVDFLEDIIRGLCKKHSIRKPHVFFGGEDCTAFCYNFIHALLERKYLGIGINAYEGAEARQNQLASTDKLDLLGIASVLINKKHGRTLSTEYGQARLMRELTHQRDSLVKAHTASAYRVHHWVDQLMPGFLDSKQSGLEAFSDASLWLMSQNFSPRQLLARKNDVLAERLRLFMLQGTETKVLTLKHLARTTLPPPAGLTETLQDNLAREVRLYQHLQTTLHEINQQIARRLAVTPGAMLTTVPGIGIILGSGLYAEIGEPARQRNMAALAAYAGIVSRLKQTGGPDNPARSLGRSRRACIPLKRRILDIALSIGQYGADELKADYHRREEAHQDVRFTMGRRMLRICAHLVQHEDFFLPPSLLANHDPEARKAYYAKAWDPILIKWRNAGAIQQAFADGSPLEKWRTMLNELYHLNLSKLSPQYERLRDR

SEQ ID NO: 435555 - protein, 356 aa, unidentified
MENSIEKSSLKEQIYYIGMDVHVKNWSITILSKNLFIKRFTQEPKAEVLIKHLQKHYPGASYKCAYEAGYSGFCIADDLNRNGIECIVVNPADIPVTNKQKEQKTDRSDSKKLAEILRAGLLHGIYIPDTENLEDRLLLRMRSQLVRQQSAVKNRIKACLSFYGIRISEEQSQRYWSKNYLNYLHSVKFSRSSGQYSFEVLLQELEYFRKELLAITRKIRELACTDKYAVQVNRLRTIPGIGILNAMTILTEISDIRRFRSANKFRGYIGLIPREHSSGGSINKSEMSRRGNNQLKNMLIESAWVAVRTDPAMTIAFEELTKRLRKSKAIVRIARKLANRILHVLVTKEEYVFNVA

SEQ ID NO: 435556 - protein, 345 aa, unidentified
MKNSNVIGIDLAKHVIQICKIDKHGELISNKAISPSKLKELLAKTVPSIVAMEGCGACHYWARLAQKHGHDVRVISPKKVKGFLQGHKTDANDALAIAVASIQLGMKFSQIKTEEQQSLQTLETSRKFLDKELVALNNHIRAYLYEYGITLRRGRKSLRETMAIVLDDLDTRLPACLKNTLGLLWERYKLTVKQLTEAEKYKAHLVNQLEPCQRLMDLEGIGKVCASMLYANIGDGKEFKNGRQASVYIGLTPKQHSSGGKTYFTGIDKQGGNKELRAALYQGALSVIYKLPSEPRTLKEAWLIELVKRAGVKRTCIALANKTVRTAWALLATGKSYEPVPLGRS

SEQ ID NO: 435557 - protein, 418 aa, unidentified
MDLDEVVYQIACGLDVHFTFVTACLVTTGPKGKPKVEERRFPTNQKGLSSLREWLVKASCEAVGMEATGVYWMPVYAALEGACTLVVGNPQHMKNARGHKTDRLDARWIAGQVRHGRIRSSFVPPPEFREARRLARCRRQLVEARTSIRNEIQRLLAEVGITLAGVVSDVFGTSGTSILNALAEGRCVRDELSIHLYSSLRKKDKMASIAAALEAPLPEVSRQLLAIHLRRIEALEGNIGEVETLLFRQLAPHAAKLDLLQKIPGISKLSAHIILAEIGVDMDVWPTDKKFSAWAGVAPGCNQTGGRSKRAAVRKGNPYLCTILMECAGGAVKKQDSHLRIKHRKLCAQLGSKKKARMAIAHKLALIIYKVLGENVEYVDPKPEQPSEKTKRRMVHTRIKDLERLGYRVVLEPLEDVP

SEQ ID NO: 435558 - protein, 345 aa, unidentified
MPIVGGLDIHRKQLTFDYLDTVTGEVRRGQIAPADREHLRAWLARFAGRDDAAFAIEGCTGWRYVAGELAAAGIAAHVGEPADTAAARGRKRHAKTDKTDARHLRTLLAEGRLPECWIPPTQILDYRALLETYHDLRREHTAWVQRIHAVFFHQGAPRLGEGALRTEQGLAALRAAAVAHLSPAGQLQVATALDMLAAVGARMEVLRKQLLDAARHLTGAKVLAARLYGAGPVTALALTCWLAGAGRFSSSRKAVRFTGLDITVWSSDRKGPPGRLSRQGPPVLRWAVYEAGKTHARSSAPDHRYYTAVKDRKNSKRAALSEARKLVRQACHILTELGDDALTAA

SEQ ID NO: 435559 - protein, 400 aa, unidentified
MNAVGIDVSKGKSMVAILRPYGELVEAPFEVKHTSSEVQSLIQTIQSIDGESRIVMEHTGRYYEPLFCQLTQAGLFVTAVNPKLIKDFGTNSLRKVKSDKADAIKIAKYALDSWSDLKQYSVMDKIRKQLKTMNRQLDFYMKHKTSMKNNFIGLLDQTFPGVNNYFSSPAREDGSQKWVDFATTYWHVDCVRNMSRNAFISHYQNWCKRKEYNFRQSKAEEIYETAKELVPVLPKDNVTKFIVKQAASQLADASETVAQLKAKMDEAASRLPEYPVVMAMYGVGSSLGPQLMAEIGDVSRFTHKGALTAFAGVDPGVNESGSYEQKSVHVSKRGSAQLRKALFQVMDCLIKNMPQDDPVYRFMDKKRKEGKPYYVYMTAGANKFLRIYYGRVKEYLLSLQ

SEQ ID NO: 435560 - protein, 450 aa, unidentified
MSPLALDVVTKTDKTPVLGRMLSKYVGRKTSSIENDITKARNHSRQRGNIMRVVFGIDVSKANSEVAILVNGEKVHGYTIPNDAIGFNRLLGDLKTVYQPEIVFEATGVYSRRLQAFFEDNSYAYTRLNPLESQKQLDSLRVRKTDRIDAEKLAASQFILNRKPSYVQEALYQELRDLSRFYQNLTEDIVCTKNRLHKVLQVTFPELENILSAPTGEQYWNLVMTFPCNSFVLESDDATLTAIIRQSTAKRISEKRVTYLVDKLTKLANQSYCAVKKTSPVIEEVKYYAGELLRLSEHRQGVLEEMVALAQSLPEYEILLSIPGIAETTATSIIGELGDIRRFHSANQINAFIGIDLRHYESGNFLAKEHITKRGNPYARKILFKCIHNIASASHTNPCHIADFYEKRKRQSQVTSTKPHTIASIHRLIRTMYYLITHNKLYDYTSTQNR

SEQ ID NO: 435561 - protein, 338 aa, unidentified
MTVYAGLDLHATNTYVAMIDQENNVLYKQRHKNELPAILAALDPFKKDLQGVVVESTFNWYWLVDGLMDHGYPVHLANPSAIKQYEGLKQIDDKRSSLWLANLLRLGILPSGYIYPKEERPTRDLLRKRLQLVRHRTSHILSVKNILARNLGLRIPSVDIKKLLDSEVKRLFTDQEMRTSVLSSLGLIRHLGEAISAIESLIAKKLKVRTEFVKLITLPGVGTILALTIMLEVGDIRRFPTVGDYSSYCRCVQSTRISAGKVTGHGNRKNGNKYLSWAYIEAAHAARRFHETVRSYYEKKMARTNKIVAIKALSHKLTRASYYVMRDQVDYDPARLFG

SEQ ID NO: 435562 - protein, 361 aa, unidentified
MKTVERKAAGSKLELAADEVVAVGVDVDKRRFHVAVWSLTRGLIADWVQSASPTTLLAKLAPIAGQIVVLAYEAGPTGFGLARAARAAGMAVIVAAPARIPAERGRQAKTDRLDCIKLAQLAALGLLKHKGSCIPSEQEEADRAIGRLREQLTRKARRVKQQIKSYLLFHGWEEPQGLKNWTRKSVQALRELPVGVELRFCLDQLLDELEFLGAKLAALTARLKELAQGDRHREPVERMMARPGVGLITAMTMRLELIQPERLKHSGQAARLAGLAPGVSQSGNTRRGGPILKSGNGRIRAVMVEAAWRAIRYDPDLRKRYLHLCMNTGSAKKAIVAIARHLTEQLWRLMVQPAAPAAQAA

SEQ ID NO: 435563 - protein, 347 aa, unidentified
MNKNWFIGIDVSKKTLDASIFVAGEVINKFPHVQVRNDKQGFKDLFRWAKEQGVKTKDTLFGLEFTGYYSDALEQFLAKKQISYTMLPTTVVKHYQRGPHDKNDKIDSAKIADYLFRFNGTECIKLRVLPSKAMQQLKDLKSERKFLVQQRVACENRQKVAKSKSEEKHLQKLIDLYKTEIELVEQQIVDVIVQDEEIYATYRLLNSIPGIGFVNAVNTIANTQNFTAFETARQYAKYVGVAPSEHSSGTSVQWRRRPSPHADLQAKADLSMAALHAIDLSAEMKQLYERKLGNRPKDKDMQKKALNAVKFKLIREMFSVAKQARNFELRGLDKAQAEAHNAEERVN

SEQ ID NO: 435564 - protein, 333 aa, unidentified
MDVKVIASKIFLNTENGLKELLKWLIKNGPAEHTKLHVVIEASGVYHERFALGLQQAGYRVSVVLPNKAKKYMESLGLKSKNDRIDAKALARMGCEQKLEEWSPLSPFYQKLRTYTRLHEDIQQKKTETINQLHALKHSAVQMTDAIEVLYRLVEVFDKELAKTKKLIEDQIAGNAEVKKRVDNICQIKGVGALTVATVVAEANGFDLIKNIPQLISYAGYDVVEDQSGKRIGKTKISKKGNTHIRRILHMPALNMMTYQVGAMPALFQRTLNKHGIKMKSYVALQRKLLTLIYTLWKKNEAFDKNYHKDKSARVEEVETSSRLSLEEAGKAA

SEQ ID NO: 435565 - protein, 339 aa, unidentified
MNCIPVGLDIAKHVIQLHMVDFHTGERVDKQIKRDALLTFFANREPCLIGMEACGGAHYWARELRKLGHEVRLLKARFVRAFRMGNKNDVQDARAIWLAVQQPGKSVAIKNEEQQAILSLHRMRYQLVKFRTAQINSLHGLLLKFGETVHKGRTSLDKAMPEVLERLKEKLAPFLLNLLEEQYHRLNEIDEQIEQVEKQLTAWAKQNADCQRIMKIPGVGVLIATAAIATMGDPSAFRSGREFSAYLGLVPKQTGTGGRVKLLGISKRGDTYLRTLFIHGARVATLLTKTPLPWVTELKKRRPVCVVIVGMANKLARTVWALVAHQQEYQKDYVSVRPY

SEQ ID NO: 435566 - protein, 350 aa, unidentified
MVVVGADVHKRTHTFVAVDEVGRKVGEKVVAATGSGHAEAVMWARERFGAEVVWAIEDCRHLSARLERDLLTAGQQVVRVPPKLMAQTRASARTRGKSDPIDALAVARAFLREPDLPIAAHDEISRELKLLVDRREVLVAQRTATINRLLWRVHELDPERAPSPRSLDLAKHRSTLKAWLDTVGGLVAELARDELADITRLTETINALAKRIGDRVHRAAPTLLALPGCGELTAAKLIGEAAGVTRFKSEAAFARHAGVAPIPVWSGNTAGRVRMTRSGNRQLNAALHRIAVTQIRLDGLGKTYYGKRLDTGASKPEALRSLKRRLARVVFHHLHNDHQNHQKPCQPAAA

SEQ ID NO: 435567 - protein, 501 aa, unidentified
MKKPRSPRTAPSSTSTSTPRRKARPRRSGGVPVEAQVLEGLQQINLLAAGIDIGSAENYIAVPAHTVKAGEPTVRCFGVSSPEQDAAVEWLRACRITTVAMEATGIYWITLYDKLEAAGMKVVLVDPHSVRAMPGRKSDVLDCQWLQQLHTYGLLRGAFRPDEPIRRLRTLTRQRAELVAASASHQQQMQKALIQMNVQLHRVVSDIDGDTGLRIIEAIVAGERDPQVLVRLRDPRLRKSTVAEMEAALQGHYREELVFVLTQNLESWRFYRRQLEACDQHILRTLETFPLARPKPVSPTPPKPVPAAAPAQPGRTYVLKGKALGRGKNAPTVDLVGVLQRICGVNLMAVTGLNVLSVLMLLGEIGLDMSCWRSAKAFCSWLGLCPGTKISGGKVLSRRSRRVVNRAAVLFRVVAVAVGRSDSWLGRFHRRKKAHLGAPKAVTATARKLACIVYHLLKYQDEFVPINEAAYEAKAQAQRLERLRREAKKLGLELVQLQKAA

SEQ ID NO: 435568 - protein, 412 aa, unidentified
MIVGIDVGSETHYARAFNWRNYEYSKKPLAFSNDEAGFSSFKDWMDDIAEKHGMKVVIPGMEPTGHYWLNLGAYLQEQGMKPVHVNPHHVKKSKELDDNNPSKNDRKDPKTIAGLVNEGRFSYPYIPTGIYAEIRNLSNLRIQTQEEITRIKNRIARWFSIYFPEIKDVYRNPDAVSGLMVIKQAPLPCDIKELGVDGVNKIWRDARLKGAGIKRATTLVTAAEHSIGNTEAPRSARKEIRNLLNDYEIYKNRMDELMEEIRETLSEIPYIDKLMEINGIGIKTVSCFIAEVGDIGRFDNPKQVQKLAGYAIVADSSGKHNGESRISHRGRKRLRYALYEATISVIGKNKEFKEIHSYYRTREKNPLKKMQSVIAVACKLIRIFYTILTKGVDYDGQKMLTDIVRPEMQLAA

SEQ ID NO: 435569 - protein, 396 aa, unidentified
MKEKLRFLGLDVHAETIAVAIAEPEGEVRSLGTIPNRVESIRKLIRKLGPAEKLRACYEAGPTGYVVYWQLAGLGVQCEVVAPTLVPVKAGDRVKTDRRDAEKLARCYRSGDLTAVWVPDEGSEALRDLVRAREAAKQDQMRARHRLSKFLLRSGQRPPTGVRPWTRPYLIWVAQLGFTRIAQEATRQDYLHEVEHMRERVARLEQAITEAVKLASPALQQVINDLQALRGIADISAVTIAAELGQVSRFGSARQLMGYCGAVPSEDSSGKRTRRGGITKTGNAHLRRIVVEAAWSYRRPPCIWYGLRRRQESISEEAKEIAWKAQHRLHKRYMKLGAAGKDQRKIVTAVARELLGFIWAIGTRAETFPSSKLQPDNNQSKDQNFLRRKKLRTPNR

SEQ ID NO: 435570 - protein, 356 aa, unidentified
MYGLKHQKEKRSMEHFAGLDVSVKETSVCIVDDTGKIVREVRVASEPEALLAVLKNPAYHFKRIGLEAGPLSQWLFSALAEAGFPVICVETRHMRAVLKAQINKTDRNDARGMAQMMRVGLYRPVHVKTLHSQKLRMLLTHRKLLQSKAIAIDNDLRGTLRNFGLKVGMVGTVRFEARIRKLVENLPDLAALVEPLLVVRRTLREQFCILHRRLLTIVRDDEVCRRLMTTPGVGPVVSLTYRATVDIPARFRKSKSVGAVFGLTCAKYQSGEVDWSGRISRCGDEMMRVMLYEAAQSMMRSKKWSWLKAWAMQIARRRGMKKAIVALARRLAVIMHRMWVDGTEFRWTREQAAAPA

SEQ ID NO: 435571 - protein, 354 aa, unidentified
MKRTTKYVALDVHQATTVASVREDSGRVIARSVLPTDGGAIREFVRGMRGAVHVTFEEGTQAQWLHDLLAPLVDRVVVCDRRGVPRHGNKGDHVDADQLAELLRRGGLRAVYHGSAHRAGLKELTRTYQNLVEDSTRVMLRLKALFRARGIPTAGTAVYRRHQRARWLAQLPDGGARFRAEALYAELDVLRQLRPKAKVAMVTEARQDPAWPVLRTIPFLGPVRVALLLATMQTPWRFRTKRNLWAYAGLAVVTRSSADYALVAGQPVRRRRAPMTRGLNRNHNRVLKDVFKGAATAATARPGPLQDVYHNVIARGTREELARLTLTRKLAALTLRLWKKGERYDPTKLTTPAR

SEQ ID NO: 435572 - protein, 344 aa, unidentified
MDHFAGLDVSVKATSVCIVDDAGKVVREVKVTSEPEALLAVLKNPAYHFKRVGLEAGPLSQWLFSGLAEAELPVVCVETRHMQAVLKAQINKTDRNDARGIAQMMRVGLYRPVHVKTLRSQKLRMLLTHRKLLQSKAIAIENDLRGTLRNFGLKVGMVGKVKFEARIKELVENFPDLAELVEPLLIVRRVLREQIVILHRRLLAIVRDDEVCRRLMTTPGVGPVVALTYRATVDVPARFRKSKSAGAVFGLTCAKYQSGEVDWDGRISRCGDEMMRTMLYEAAQSMLRSKKWSWLKAWAMQIARRRGMKKAIVALARRLAVIMHRIWVDGTEFRWTREQAAAAA

SEQ ID NO: 435573 - protein, 364 aa, unidentified
MVNANRMIAADVHAAGSWLAGIELATGEVWSRRVTGPPSRVAEVVAAMGPGSRLVYEAGPTGFGLARVGAERGIDVVVCAPGSVPRAAGDRVKTDRRDAQWLLGQWRAGAVSPVRVPSLAEESFRDLVRAREDARGDVMRHRHRLSKFLLRRELRPRARVTTGAWSIPWMNWVRSLRFDELGAQATFTDYLAAVEGALQRRTVLDQALEDGWPASPWAQTIARLRCFRGIDTLSACGIAAEIGDFTRFSRPDRLSGFLGIVPSEHSSGQRQRRGQITKAGPGHARRLLVEAAHQYRHRPRIGEPLERRQRGQDPRVVAVAWRCQQRLHRRWRQLLVDRGKPAGVVTVAMARELAAFCWEAAIIQ

SEQ ID NO: 435574 - protein, 428 aa, unidentified
METSALNPEVVAWVGLDWADRRHEIRLQAVGSEVSESFTVEQKPEALHAWIAQMRARFPQGKIALALEQSRGAVIYALMSYDFLLLYPVPPKTLARYREAFATSGAKSDPADAGLLLELVRTHRDHLRAWQPDDALTRQLRLLVEHRRRTVADRTRLTNRLTALLKTYFPQALDWTGDLRGRAACEFLCAWPSLEAVQQARRSQLRRFYHDHRRLSAEDLKQLFQQIDQAQPLTRDRALVEASALMTQTLAEQLEAVIAALEKLDQALEELFAQHPDQELFNSLPGAGEALAPRLAAAFGSDRHRFQSAEELQRFSGLAPVTEASGKMHGVHWRLACPKFLRQTFHEFAAASVRKSLWARAYYERQRQRGASHHAAVRALAYKWIRILYRCWQIRAPYDEKLYLEALRRRRSPLWLAIAIRSTQEARS

SEQ ID NO: 435575 - protein, 309 aa, unidentified
MIETICGVDVCKAWLDGWVEAGGYRRFANDQAGIAALADWAGRHGAGLVVMEASGGVEQDAFLALWQAGMPCALTNPRAVRRFAEAMGRLEKTDRIDAEVIARYAAARRIQPTPPPCEEQQRLTALAARLRQVTSDITVQKQRLHSTRDPLALASLKEAIAFFNAQAKALAREIAALIEHDPVWTALDRTLRSVKGVADRTVATLLAELPEIGTLSNKAIAKLAGLAPIANDSGKRSGARSIRGGRSSVRTILFLVADIVRKFDPTMAEFRQRLLDQGKPKMVVRIALARKLLVRLNAKARETRAAIAS

SEQ ID NO: 435576 - protein, 338 aa, unidentified
MTILYVGIDLAKTIFAVHAINEAGKPELVRPNVARAKLLELIVSLPPCVIGMEACSGAHHWARQFMAHGHTVRLMAPKFVGPYRLSGKRGKNDAADAAAICEAAQRPNMRFVPIKSLEQQSQLSVHRVRQGFIEQRTATINRIRGLLSEFGIVLPLKASTVRSQAMACLEDLPGWSNTVIGDLLSELTRLDERIALYDQHIAQMAREDSRARQLMRLHGVGQTTATALLAMIGNGHEFKCGRQFAAWLGLVPSQYSSGGKARLGHITKAGDPYMRSLLVLGARSVLNSAKNKTDAISRWAAALAERRGYWRAIVAIAAKNARMAWAMLARGEQFIISA

SEQ ID NO: 435577 - protein, 328 aa, unidentified
MENTLYVGIDIARHKFDAAFFTSTGKAKHDTFHNNAEGFAAFLHWCGTHSARLHLAMEATNVYHEELAQYLYEQGHTVSIVNPRCIHAYAKSQNLRSKTDKIDATLIARYAAKEVPPAWQPPREPLRVLLLTLRQLERLKTVEQQQRDLLGTVKEPGCVESIKRLHAFLQGEIKRMGKEVKAIIAADERMQHNAKLLHTIPGIGERTVPWLLAYLHDGKRFANGKAAATYAGLTPMLHQSGTSDGKAHISKIGPSEIRKVLYMPAVVYSFGICRDGPYKSFADSMLANGKAKKSVITALMRKLLTIAQAVLQYRCPFDLQRYEKATKK

SEQ ID NO: 435578 - protein, 367 aa, unidentified
MSEDITAFVGLDVHKESIAIAVAEPGRAAPRFIGTTGPTLREVQKALTHWGTPAQLLVVYEAGPCGYGLARQLASKGYRCEVVAPSKIPRKPGDRIKTDRRDALQLAHFARAGELTPILIPEEPDEAIRDLSRAREDALRARMSARHQLKALLLRRGVRYTGKCSWTKAHERFLAQLSLPHPAQNIAFVEYRTAVKEADERLERITAALRDQVDQWRLRPVVGALMTLRGIEMVAAVTLIAELGDLKRFEHPKRLMSFLGLVPSEYSSGQSRSLGGITKAGNTHARRILIEAAWSYRHPPRIAREKQTRQEDQPRAVREIAWRAQLRLCQRYRRLSARGMHQNKTCVSIARELAGFMWDIARQVAIS

SEQ ID NO: 435579 - protein, 330 aa, unidentified
MKEYKYFFGVDISKKTIDVALSKGGHFTHRQFDNDTPGMEKLMEWLRELNLKFDDALFCMEATGLYCFPLTSFLANNSIDIWIEHAAQIKRANALNRGKNDKIDSQRIAVYAEKNLDRLRLWRPMSSTLEKIKHLTSLRERLVETKKRLINPIKEFEEVDDLAMAKMLAKTIKSSLTAIDKDLNSIEQKIIEIVNDDDNLKQLYKLITSVVGIGFVTAINLLVHTNGFTVMKDVRKLACYCGVAPFEYSSGSSIRGRTKVHFMANRKLKCNLHMASLSAVKLDADLKHYYERKVAEGKSKLSVLNAVKNKLLARVIAVVNKQELYVKKAV

SEQ ID NO: 435580 - protein, 392 aa, unidentified
MTLINFVAANQKYYTFNLLSVFIMVFWSVQYLLQHLLVQTQLSDQLLQRLILILQLPQTPQFRHARPGKFFLPVNGMDYLLPLRLTVRNVLTRRITMNIVFLGIDLAKNVFQLCGLNQAGKPVYTKRTGRKELLQTLANIPACLIGIEASTGAFYWQREFEKLGHKVKVISPQYVKPFVRGQKNDGNDAQAIAVALMQPTMQFVPPKSPEQQDIQALHRARQRIVNHRTATVCQIRGLLLDRGIPIGSAVSRARRAIPLILEDAENGLSSRMRRTIAELYDLFNDLERRIHFFDKEIETVFRQSEACQRIAKVKGIGPKTATAVAAAIGKGTEFKNGRHFAAWLGLVPRQHSSGDRQVLMNMTKKGDKHLRTLLFMVPALSSGLPRITMMVI

SEQ ID NO: 435581 - protein, 387 aa, unidentified
MPQPNDLSRSLVALDQNSTIIAVVEMSQASWLVGGVLPGIERQPRKKLEPSPERLLALLHRWRDESVRAGRTITRIAVAFEAGRDGFWLARWLEARGVEAHVIHPSSVAVSREHRRAKTDRLDTELLKRGFLGWLRGERGHCSMARVPTLAEEDAKRPNRERECLVKERTRLVNRMKGTLARLGIRNFRPTLRNAAEHLAALSTPEGSPLPPNVAAELERDIARLRLVIGQIKQIEEARRQRLEEQPERGPHAMVRLLARVVGIGIETADMLVNEVLSRPLRDRRAVARYAGLTGAPDESGAKRREQGLAKAGNARVRRGMIQLAWRFLRFQKNSALTQWYQARTADRRGATRKTMIVALARKLLIALWRFVTIGEPLDGVTLRPAS

SEQ ID NO: 435582 - protein, 352 aa, unidentified
MDRYVGLDAHAESCTLGVMGPSGKRLKSLVVETNGQALLEAVRSIPGRIHLCLEEGTQSAWLHELLSPHVAELVVVMPPESKGAKDDLRDAWTRADELRTGRIQTRVYKAPQHLAALRNAVRAYGFAVRDVVRAKNRLKSVFRSRGIPTEADIYDAKRRGKGLEKLTPPHRQLADWLGRQLDSLEPLREEAEEWLLKEAKTHPIIRKLATAPGMGPIRTAQLVAIAANPERFRTHRQFRSYCGLGIVTRSSADWVRGKDRKWERSQVQQTRGLTRRRHPLLKAVFKGAATTLIAQLTQDPLHKDYERMLEAGVKPNLAKLTLARRIAATVLSMWRHQEVYDPERHKGVSNKA

SEQ ID NO: 435583 - protein, 412 aa, unidentified
MELMVERCAGMDIGKDEIMACVRTPGPDGKGRHKQTRAFPTFTSDLEAMADWLAAEGVTEVVMEATGPYWKAPWYLLEERGFELKLVNARHVKILPGRKSDVLDAEWLAELLEHGLLRGSFVPPEAIRQLRDLTRYRKRLIQTHTSECQRIQKTLEDAGIKLDSVASDVLGVSGRAMLGALVAGERDPEVLAELAKGRLRKKIPELREALRGRFKDHHALLIRLILDHTAYLEAAIEQLDNQVDEVMIPFAEARDHLDSITGVGKRAAECVIAEIGVDMTQFPTAGHLASWAGKAPGNNITGGKRRSGKTTKGDVWLADVLTECAWAAARSRNTYLSAQFWRLAKRLGKKRAAIAVGHSILVIAWHLLTNDCDYDDLGGDYFARRGDTARHQDHLVQQLQDLGYQVTLRKVA

SEQ ID NO: 435584 - protein, 324 aa, unidentified
MYAALDLHEKSIQCVLKDDAGKIVRESKVPKDEERILEFLDGTHASVVMESGYNHQHISDVLKEKGYDVKVAHPLMVKAIAYAKVKTDKVDARTLADLLRADMIPESYVPDEKTREVRDLVRRRHHLVETRTAFKSKVQAEVAKRWVKHEGDVFTKEGRDFLRSLHIDAVDDYLDAIEFLDGKIGELDRKVKEVAQQDRYAKLLVTVPGISYYSGLLISSEIADVSRFSDHEHLCSYAGLVPGLRQSAERSHPTPSKTRSAMLNWIMVQCTRVHVRSCDSSITRFYTELAMRRGEKVAIVAAARKLMRATYIMLKEEKTFRLDG

SEQ ID NO: 435585 - protein, 347 aa, unidentified
MKKAIRFVIGMDLGDRWTSVSVLDRRTGEETESTRVRTTREAMDAFFAGRGRCRVVMESGTHSPWTSRAASRRGHDVIVADARRVRAIWDSPKKNDRRDALLLAQMGAAPGGLLKPVRHRGERAQSELAVLRARECVVDARTALINAARGAVKAFGHRLPACSSASFHRKAKEALPEALRPALEPLLDAAAALTATIESYDAQVERLCALHPETARLRQVGGVGPVTSLAFALVIDDPARFARIRDVGAYLGVAPRQDQSGDSDKQLGITKCGDRLMRRLLVQCAHRILGPFGADCDLRRWGLELARRGGANAKKRAVVAVARKLAVLLLALWKNDSDYEPLRKQAA

SEQ ID NO: 435586 - protein, 350 aa, unidentified
MSVRNKPREAAVFGVDIGKNVFHVVGLDPAGHPIQKATFRRDTVLQFFERATPTIVGMEACPGSQWLARKLQGFGHTVRIVAAKFVKPFVKSNKSDIIDAEAIAEAVTRPTMRFVEVRTSDQIDVQALHRVRDRLVAQRTRVICQMRAFCLEYGIAMHQGAGKFKADMPRVLEDEDNDLSAPMRQLLMSLFEDIRYLEQRIAEVSRQIEAAADADDTARRLMTVPGIGALTATGLLAAAGTGRQFKRARDMAAWLGLVPREHSTGGKTTLLGISKRGSSYLRRLLIHGARTCLLHLDRTRDRLGVWLDGLQARMHNNKAAVALAAKIARVAWVIMTRPGAIYNRQDPAKT

SEQ ID NO: 435587 - protein, 337 aa, unidentified
MDRQYVGIDFHRRRSVIVRLSATGEKRSSVRVANDPLAIAAAVAEAGPDPEVVIEATYGWYWVVDLLQANGARVHLANPQGLNWGQRRVKNDERDAVDLADMLRLGRLPEAWIAPPEVRELRELVRYRAKLVGLRSGLKAQVHAVMAKEGVLPAQGRMFGPAGNAQLDGMAMADSFTTRVASLRDLIERYDQQVTMLEGQIHHQLRHHHGYQAIQAIDGVGRTIAAVLVAEIGDVGRFRSAQALCSWAGLTPKHRESDTKTTRGSITKQGSRLVRWALIEAVSRYHGGPRLAGDFRRIAERRGTNKARVAVARKVLTLVYYGLRDGQIRCLAQAPAA

SEQ ID NO: 435588 - protein, 359 aa, unidentified
MITLGVDAHKTVHAAVALDDAGREIATWRGPNSPDGWAELAAWAAAHAASSGTERRWGIEGAGNYGRGLAQHLTAAGETVYDINPRWTAQGRRQARRPGKSDRLDARAVALVVWREAASLPPLQPEEQDETAVLDLLVSEREGALGEATRLRNQLHALLLQLDPQYKVHLPALTTPAGVAAAEAYTGPGRTPLQRAPAASVRRLAQRLRLATEQAADLARQIAARAQAGFSPLTRLKGINLLTAGALAGLLGPGCRFTGEAQLAAYAGVAPLEASSAGRVRHRLNRGGNRRLNAILYRIALTQARCWPPAQAYLARRLREGKTKREAIRALTRYLIRAIWRLWQECVSSHPVTSYGQAA

SEQ ID NO: 435589 - protein, 346 aa, unidentified
MEHYAGIDVSLESASICVVDASGRIVREAKVASEPEVLIRWFGGLGIALARIGLEAGPLSQWLYAGMRDVGLAVELLETRHVRAAFKAMPVKTDRKDARGIAQLMRLGWFRPVHCKSLPAQEMRALLAARKLVQTKNHDVEMSLRGMLRGFGLKVGPTTPRTFPSRIRELVVGHATLSTIAEALLAARGALFEQWQKLEKRLRSLARQDRRVKLLMTAPGVGPIVGLTYASAIDDPGRFRSSKAVGAHFGLTPKKYQSGETDVTGRISKIGDSGVRTALYEAANVILTQPVKGSTLKSWGMRLAARAGMRKAKVALARKLAVVLHRMLASGTTFLADKAAPAAAHQ

SEQ ID NO: 435590 - protein, 361 aa, unidentified
MNATTAAIDLAKNVFQVALADSTSRVLEQHRLTRSQFERFFDNRSVARVIMEACGSAHHWARVFAARGIEVILLPARYVRAYVRRSKTDAADTLALLEAARCADIVAVRVKSLEQQSLQALHRTRSLWMGTRTSRINALRGFCRELGMHVPMGARTGLEAMARAVADDQSPIPALLRPLMQQLLDEIRVLEARIAQLERQLAQVARESPACKLLMSIPGVGLLTATAIVAATAGSVAHFKSARHFASWFGLTPKESSSGGSRRLGHISKMGDTYLRMLLTHGARSVIRAATVAKLRGQELIGVRHWVLQLQARSNHNKAACALANKMARFCYAVLRDQTPFGQPVTRLGKKMRRQSFELAH

SEQ ID NO: 435591 - protein, 385 aa, unidentified
MAQSEDMSKPPTALAQNDTLICVVEMGLKSWLVAGLVPGIERQPLKKLEADESALHRLVLRWKAEAEKAGRPISRITLAFEAGRDGFWLARWLGSRGIEAWVIHPTSIAVSRDHRRPKTDRLDTQMLMRAFLGWLRGEPGHCRMAAIPTLEQEDAKRPTREHETLVGERTRIINRTKSALIRLGIRGFKPGLRKASERLASLRTPEGVPIPPNTLAEMHRDMARLAVIQSQIAEIAVARLERLEHATDAPHAMIRLLARVIGVGVETAEMLVTEVLSRNLRDRRAVARYAGLTGAPYESGSKRHEKGLAKTGNARVRHGMIQFAWRFLLFQKESALARWYRARTENAKGSRKRMIVALARKLLIVLWRFVTTGEPPEGVALRVAA

SEQ ID NO: 435592 - protein, 350 aa, unidentified
MLGVSDPNQEEGWPLMYEYEPGMQFVGVDLHRRRSVIVRHNSEGEQLSVARIANDPDTLKRELDDAGPHPEVVLEATYGWYWAVDALQATGATVHLAHPLGVKGFRYRRVKNDVRDGSDLADLLRMNRLPEAWIAPPEVRELRELVRYRAKLVAIRSNLKAQVHSVLGKAGVQIAVSDLFGVTGRARLARVPLGKAYAQRVLSLLQLIDTLDTQETRFTALIARRLDGDPGYRAIQEIPGVGPVLAAIFLAEIGDVHRFSGPDRLCSWAGLTPRHRESDTTVHRGHITKQGSRLVRWAAVEAIQLHPSTAKIVADRPRIQPRRGKNIAKVAAARKLLTLVYYRVAVHLKP

SEQ ID NO: 435593 - protein, 349 aa, unidentified
MDRTTYGLDIAKNVMQLHWVDAETGEIGRKKLARAKLAAHFAELRPVRIVMEACGSAHHWARVFTGLGHQVELLPAVQVRPFVRSNKDDAADARAIWLAAQQGDIRRVPQKSVQQQGVLALHRTRSHWISVRTASVNSLRGLLYEFGVVLRGGRKAGLKALAEQRAAIDEQIPMPMRSLVDGQLQTLAQIAERIDALECEIAALQKQIKGAPELDQVPGIGVLGATALAATLGDAKAWRSGREFSASLGLVPAHAGTGGKVRVGHLSKRGDPYLRTLLIHGARSVIEHAKHKPKWLEQLLARRPKNVAAVALANKMARTAWAIVAHGRAYQRDWKSTGPGSGAAQAAAA

SEQ ID NO: 435594 - protein, 360 aa, unidentified
MVVQRTNVGLDVHARSVVACGLDRQTGEVFEQRLTPSHEEIAAWIRSLPGPAAAVYEAGPTGFGLARSLRAVGIDCEVAAPSKLMRPSGDRVKTDTRDARHLARLLMLGNVTAVAIPSREQEAARDLVRAREDCRGDLMSTRHRLSKLLLRQGIVYRGGKAWTGKHELWLRCQRFDDPALQLAYDTSFEAMLATIARRDRLDRAIEQMAADSEFTPVVSRLCCVRGVATLTAFGLAVEIGHWHRLTGRSIGAYLGLVPTEYSSGASRVQGGVTRTGNGHARRLLIEAAWHHRARYRPGATLRRRWDAASAPARARGQLANQRLHARWQTFDARKKRAVVANTAIARELAGWCWSLAVLDG

SEQ ID NO: 435595 - protein, 343 aa, unidentified
MEYYAGIDVSLESSSICVVDATGRIVREAKVASEPEALTAWCRDLGFDIARIGLEAGPLSQWLFAGMKQAGLAIELLETRHVRNAFKLMPVKTDRKDARGIAQLIRMGWFRPVHCKSVAAQETRSLLGARKLLQSKLHDIELGLRGTLRGFGLKLGKTTPKTFENRVRILVADHPTLLAVADALLRARAMLAEQFIKLDKQLHSVARGDNRARLLTTIPGVGSIVALTFASAIDDPGRFKSSKTVGALFGLTPKKYQSGETDVTGRISKIGDAGVRTALYEAANVLLTRTRKASSLKKWAMGVAKRAGMRKAKVALARKLAVVMHRMLLDGTPFAAQKTAATA

SEQ ID NO: 435596 - protein, 409 aa, unidentified
MDVLYRCCCGMDVHKDTVAACVLIWEAGGARKQKRIFGTTIKELLELSDWLHSYEVTHVAMESTGVYWKPIWNILEGQFDITLVNAQHFKSVPGRKTDLKDGEWIGDLLQHGLLRKSFVPDKPIRELRDLTRSRAMLAREKVRLACRIQKVLEDANIKLSSVASDVLGSSGRSMLNAIVKGECDPHVLADMAQKRLRAKIPQLEIALQGRLTDHHRFLLKQWLEMLETVEGKIAAFDKKIEETGVPFAEAVTTWVTIPGIDRVAAWCLVAEIGTNMDQFGSPERLSSWAGICPGNNESAGKKKSGKTRRGSVWLRRVVCEAAWAASHCKRSYFRSQFHRLAGKKGKKRALIAVAHSLLVVAYMLRKRGCVYQDLGSDYFEKINQDQLTRYHIKKLQRLGYNVTLAPQPA

SEQ ID NO: 435597 - protein, 344 aa, unidentified
MSEVITVGLDIAKYVFHAHGADGRGHTIFSKRISRGKLLDFFAAQPSCMVALEACGGAHHWARQLIQLGHQVRLIPPAYVKPFVKRQKNDAIDAEAICEAALRPNMRFVAVKSEQQQAAGLVFRTRDLLVRQRTQLINAIRGHLTEYGWIAPKGPSHVAMLADLIEQEAMASSLPEAARAMFRFMLDQLAGLNGKIADLDKEIARRAREDEISRRLMTIPGIGPITATAIAALAPPAETFAKGRDFAAWLGLTPLQRSTGGKQKLGATSKMGERTLRRLLIIGSSAVVQQASRRGAPKGSWLEQMLARKPRMLVTVALANKMARIVWALLVKQENYKAPVEARA

SEQ ID NO: 435598 - protein, 416 aa, unidentified
MICAAIERCAGIDVGKTFLAVCLMTGPLEGEPRVERRRFGTVTAELEKLRDWLQQEVITHVVMESTGSYWKPVFNVLETAVKVYLANPQEVKNRKGHKTDDNDGWWLAHLLRHAMIHPSCIPPRAIRQLRDLTRRRKRMIGNATAEKNRIQKVLEDANVKLGNVLSDVFGVSGQLMLEALLEGKAKPEEIAEFAQRRARQKIPQIIESLNDHRMSAHHRRMIRYSLEHMRFLEEQIGKLDEDIVAEIREAGLVEQWQLVQTVPGMQEASAANVVAETGGDMKQFPSSKHLSSWAGVCPGNNRSADKNKGSHTTGGNPWLRSTLTECAWAAAAKKNCFLKDRFWRIATKSGGKKAPAVIATAHTILSLIYQVLATGKPYTERNEPILDEPRRQRLIRHHVRRLGKLGVPVRSCNRRS

SEQ ID NO: 435599 - protein, 427 aa, unidentified
MSYRIAAIDVHKKMLAVVVADVAGEGEYQFERRKFGATPDQLHLLAQWLCQQEVEEVVMESTAQYWKPVWGALEQYWQPARQKREGARKMSGKLHLCQAKSNRGRRGRKNDFADGERLIKRLVAQELVLSFVPDAEQRLWRTVTRRKYQLTRDKVRFQNQLESLLEQAHIKLSSLVSDLLGVSARRMLKAIAEGETDPAALAALADYRLRATPEQLRDALGACGQLHGVYRRLLKMALEELKLMEEQIEQLEQEASKLLQQHQNAVQRVAAVPGFGVDSAIQAIAEVGPEAAAFETYKNLSSWVGACPGEEESAGESKSTHSPKGNRTMRRLLNQAAHAAIKVKGSIFEMTFRRLLPRLKYQQAIWAIAHRLCRLLWKILHEGVRYEERGPAVSAKSKRTRTARMIKELKALGYRVEGGPLPAGTPA

SEQ ID NO: 435600 - protein, 428 aa, unidentified
MNRTSKSAELAALIGIDWASQRHALCLYDCATGKRESSLLEHTPEAIAQWARGLQERFRGKKIALCLEQTRGPLIYALREYPFFVLYPINPATAARYRQAFKTSRAKDDPSDAQICLELLLHHREKLTPFRPQDASTCELSCLLQHRRGTVDLRTLLTNMLRDALKAYYPQALELAGQDLFAPLGCQFLLKRPSLQELQKARKESVRKFYYAHNCRRMDVIEKRLDAIAQMTPLCRDRALVEPAIVQVKMLARQLLQLDGALKEYDSKIEQLFAQHSDALIWQSFPGAGLTLAPRLACAFGTERSRYQSAAAIQQYSGTAPVTEKSGKNQHWVHRRWARPHFTHQSFFEYASQSVLHCGWAKVFIKDQLARGKTYPTAIRALAFKWQRIMFVCWRDRVPYDETIYLQSLQRRGSHLAAKLIQQLPKAA

SEQ ID NO: 435601 - protein, 391 aa, unidentified
MPRYIGLDLHARYIHGCEWKPEAADGHKEQHFRFPNTPDGWAQLLPQLDRTCWVALEVTGSAFEVHDVLSPHVARLLLANPVDLKRLGSGRHTDRVDAARLAKMLAVGTIPTVWVPPQPMREVRRLVYYRSRLASSRRRAINQAKVVVRRAGQVLPRDADVRRWLTPERMATLPAADRVILLSTCRQITALEAEIDGIEGEIARCVVDVPAVQVLLTITGVGLISAAATWAILGDPHRFPQAKQVARYAGLDPSIVQSGEQHRQGRISKAGSPLLRTLLVEAAHSLARWDTGPLGQFYARKARQVGPRKAIIALARKLLIVAWRMLLTGEVYRAAKATVVARKQRELQKAIRIQLPTTVPAQYPVHVTRRPAAGARGKEGVMSRRRTLVSS

SEQ ID NO: 435602 - protein, 347 aa, unidentified
MSTPIKTFYAAAVVDVGGALLATASFGADREGYRALIEWAAQFGTVLRFGIEGTGSYGRGLASAVRRHGHEVIEVARPNRQDRHRRGKSDLFDAENAARAVLAGHAEAIPKTADGAVEMIRHLKVAKDAAVKARTAAMQSLKAVLITAPAELRETLQPLPDTALLRRCAALRPGQLTSVTAAAKYSLRAIAQRWHNLHAEITAHEQLLGRLVDQLAPRLTATIGIGPDNASQLLLALGDNPARLHSEAAFAKLCGVCPIPASSGKTVRYRLNRAGHRQANAALHRIVIVRMKYHHPTRAYVARRTTEGKTKPEIMRCLKRHIAREVWTHTKHLRQQPHAHPPTTCHL

SEQ ID NO: 435603 - protein, 368 aa, unidentified
MIGRRDMSVLTDKQADRGIDVVGGVDTHKDMHTAAVIATCGTVLGTQAFSTTRAGYRAMLHWMRSHGEVLRVGVEQTGSFGAGLSRHLALAGVPVLEVTGPEPAERRSKGKDDELDAVAAARAALTGQRVQVAKDRSGAVEALRVLRTTRSSAVKCRRAALQQLRNTVLAAPDEVREPLRYLTRMQLIRTCAGCRPDMMAWRDAAVASRIALKALARRILCLSDEIAGLDAMIKPLVAELGPGLIDLEGIGVENAGAFIVAAGDNPERLKSEASFAMMCGASPIPASSGKTQRHRLNRGGNRQLNSALHMVVVCRMRTDQRTKSYVARRTREGLSTREIMRCLKRYVAREVYNTLAGKPPHRPGQAGP

SEQ ID NO: 435604 - protein, 460 aa, unidentified
MLPRAVGATAPHIDVLPCVHPNAAGLDIGADEIYACVPSDRDSRPVRAFATFTADLHALADWLEVCGIDTVAMESTGIYWLTIYEILEARGIRVFLVNARQIKIPPGRKSDWKDCQWIQRLHMLGLLPASFRPDAEMALLRAYLRHRAALIAHRAPHILHVQKALHQMNIQLDRVLADITGTTGMAILRATVAGERDPLVLAQLRNPGCTSSEEKLAKAMQGTWQAPYLFVMRQGLELYDFYTQQLAACAVELERYYGAMQPRFESDIDSTTLPAAKPGSKSKNKPNFNARAELARVVGVDLVAVTGLSAASVQTIISEIGTDMSKFATVKHFGSWLGLAPHNDISGGKVLRSRTRKVVNRAAQALRQAAQCVGRSETALGAYYRRMRARLGPQQATVATAYKIARIVYTMLKERKPFEAASAAAYDQQYREREIKYLERKAAKLGFDLALKALTEPVPS

SEQ ID NO: 435605 - protein, 400 aa, unidentified
MKFVGWDWASTSHDVTVLDEQGRVVERWALRHTEQALAETLARLARHGQPAELPVIIERSAGLVVDRLLAAGHPVVPVHPTAFHAARPRWGAAGAKSDPGDSYKLADYLRTDGHRLRRLQPLDPGLRELQALVRLREDHVRARTAASNQLGALLDASWPGPKAMFCKLASDIALAFLTDYPTPQAAARLGQARLAAFCRRHAYRGGKPPAELLARLRAAPIPSSGLAPAVLAQLIGAQVQLLRSLQATIGELETAITQRVAQHPRAKLLRGLPGVGTINLAQLLAEVGPILDRVSTAEQAAADCGAAPVTRASGKTSGVYFRWAANSRARTALTAFAHNARMQSPWAGRLYADARARGKPNPHATRIVARAWLRVIWACWHTNTPYDPCAHRAEQRLTAA

SEQ ID NO: 435606 - protein, 342 aa, unidentified
MEELYYIGLDLHKKIIAYCIKTVSGVTVSQGTVAATRSALLKWIESLPKPWVAAMEATLFTGWVYDFLKPHAKDLVVAHPAMLKAITAAKKKNDRADAEKICDLLRVDLLPQCYMAPAEMRELRRVLRYRNFIVRMATTVKNKMSGLLMEVGAEYSKKRLHGRSYFGNLLETVEDVPSSVKELLKLSRAGLEMFAAVQKKLLAALRENELIRERVRRLMTIPGIGEVTALTWVLEIGDPQRFSARQATSYCGLCSAQRESAGKETRGPISKKRNKHLQSVLIEAAKLAPNWNPQLALVHERELKKGDRNRATLAVARKLVTYMLAVDKTGIDFVLAHEADAA

SEQ ID NO: 435607 - protein, 392 aa, unidentified
MRKPKKQKPLNDLTRSLTPFDPNQTLTVVIELSKESWLVAGIIPGVERQPIKKLRADENDLLKLLERWRGEAEKAGHKINRIAVAFEAGRDGFWLARWLRARGIEAHVIHAASVAVSREHRRAKTDRLDTEQLKRAFLGWLRGERNHCKMCAIPTIAEEDAKRPHRERETLVGQQTTIVNRVKATLARLGIRSFNPKLKKAPERLEHLRTPEGEPIPPNTLAELQRDLARKQLIVEQIREIEKERLEQLKRAPKTGPNLMVLVLMRVIGIGIETADMLVREILSRNLRDRRAVARYGGLTGSPDESGKSRREKGLARSGNARVRKGMIQLAWRYLDYQKESALAKWFRARTENARGSRKKMIVALARKLLIALWHLVRDGVVPEGVILRPAH

SEQ ID NO: 435608 - protein, 388 aa, unidentified
MVQTPVPQPSYSVADFERTLIFALEVSDKSWVVAAHVPGLPGSKPRRTLLPSTDALLEMVDHYRARAAKADKSVDRVVLVYEAGYSGFWLARWLARRGVEPFVVQPSSVPVDRRVRRAKSDGIDAELLLRTLLAWLRGEPRVCSMVPIPTEADEDARRCVRERQELMGERVAIANGITSILATLGIRGYDALRRDRRQRLEGLHTALGEPLPPQARAKIGRMLDRLELVLTQISVLDHQRDAVVEKVATGKAEQMIQQLVRLRGIGVQSATLLVREAFVRPFANGKALGAYAGLSPTPYSSGGTEREQGIGRAGNARLRTVLVELAWIWQRYQPHSVVVGWFHDRLGGAARRMRKIMVVALARKLLIALWRFATQGVVPEGAVLKPAS

SEQ ID NO: 435609 - protein, 389 aa, unidentified
MKRTQNEKILQIKFETLVVGIDIGKDTHYARAFDCRGIELSKLLRFSNTNQGYKALEDWMQEIMKEKGKSEAIVGFEPTGHYWFTLGDHLQRKGHRLAIVNPFHVKCTRELDDNSQTKNDKKDPKTIAMLVKDGRFRDVYIPEDVYQELREAVSERERLVEQMISLSNQVIRWLDIRFPEFNQVFKNWRGEAAWLTLRHFPTPAKVAATGASSIVSTWRKKMKKPSLKKAEKLVNLAIRSIGRTAGNEAAEAALQNLLTQYEMVMRQKQDIEQLMQELLIKVPSASKLVDIKGMGMVAAAVIVSEIGDISRFNDPRQIQKMAGLSLRENSSGKHKGKTRISKRGRRRLREGLFRAMITMLATNSEFRQLHQRNLSREQNPLNKMESCNL

SEQ ID NO: 435610 - protein, 352 aa, unidentified
MDRYIGLDVHASSCTLAVVGPSGKRLGTHVVETNARALIEVLRGIPKRRHLCMEEGTLSGWLHEVLEPHVEELVVTGVGKKSRGPKSDKQDAFGLAEQLRIGSIETRVYKGRGQFGRLGNLAKAYGFLVGDTVRVKNRLRSVLRSRGVGYGAGQSVYAKRDREQWLGKLPEATKAQAHLLYEEHDALVALRQKAEKTMLAEAKKHREWHVLKTCPGLGPIRIAELLPVVVTPYRFRSRSAFWAYCGLGIVMRSSSDWVRAPTGEWMKMPVQQTRGLNRNFNHTLKRVFKGAATTVIGRAEEGPLYRHYLSLLDGGTKPNLAKLTIARQIASIMLALWRTGESYDPTRLEATK

SEQ ID NO: 435611 - protein, 376 aa, unidentified
MTKIIRIGIDTSKSVFVLHGVDAAEQPVLRRKLRRSQVLEFFRKLEPTKIGMEACGGAHYWARELRALGHKVVLLPPQYVKPYVKRNKNDAADAEAICEAMSRPTMRFVPVKTTEQQAALMLAGARDGLIARRTQLSNTIRGYAAEFGLTTAKGLDKIEPLLARIAASAELPKLAKELFAVYGRDYAQLQRQIMKIEARLMAWHKDNELSRRLVEVPTIGPIGATLLAMKVTNPHIFRCGRDFSAWIGLTPKDHSTAGKTRLGVITRAGDEALRSALVAGAMAVIQQAQKGRGYSPPWLVELLKRKPPKLAAVALANKMARVVWKLMVSGERYNPARIEAQLAAREGRGAALCGGSAPRPSLASRTSREVVAMTEA

SEQ ID NO: 435612 - protein, 377 aa, unidentified
MNRIKFVGLDVHAETITVAVAEQDGEVRPLGVIPNRVESIRKLVKKLGPVGQLRFCYEAGPTGYAVYWQLTALGAKCEVVAPTLVPVKSGDRVKTDRRDALKLARNYRAGELTPVWVPDAAHEALRDLVRAREAAKKDQLRARHRLIKFLLRHGRRPPPGVRPWTLNYLCWVKHEVHFESSAQEATLLDYVNEVDHAELRIARLDRAIEEAVKLTPPKMRAVIEALQALRGVAQVTAVTIAAEVGELSRFGKARQLMGYAGIVASEHSSGESIRRGGITKTGNAHLRRVIVEAAWAYQHRPSVGKSLRKRQEVVSPEIREIAWKAQHRLHGRYRKLMAHGKQKGKVVTAIGRELLGFIWAIGVKAEAAQEKMEQRAA

SEQ ID NO: 435613 - protein, 369 aa, unidentified
MDQHSEVFVGLDAAKLRHAVAVAEAGRQGEVRYLGEIDAEPASVRKMVGRLEKRHQTLHFCYEAGPTGYGLYRQLTALGHACTVVAPSLIPRKAGDRVKTNRRDAVQLARLLRAGELTAVWVPDEAHEAVRELIRSREAAVDDLRRKRQAIASMMLRYGRVYPGKTSWTKPHKLWLQGQKFEHPAQHLVLQDMILAAQHAQERLVQVETVIAEFLPSWSLAPMVQALQALRGIRLVTAATIMAELGDVRRFATAGQLMSYLGLVPGEHSTGERVRRLGITKAGNRRVRRALVESAWTYRHLPRTSQLKSCIHEKVQPAIRDIALQAERRLCARYRALANRGKKLTVAVTAIARELAGFIWAIGHAMPTA

SEQ ID NO: 435614 - protein, 416 aa, unidentified
MKKNSKSAMKKEQRANRAKAQRPVQREPKEILAELMEKLRGKLELKSTSASQAEAGPRGELSPNLNRLTVGVDLGDQWSHFCILGFEGETLSEGQLQTRQAEVAGFFQALPPARVVMEVGTHSPWMQEIIAGEGHEVLVANPRLMEGAKRRKRKNDRIDAKKLARLGRVDPQSLHPIRHRSREVRQDLVVLRAREALVAARTELINATRGLVKSMGTRLPKCSSPSFEQKVKDAIPERVREALLPLVQLAGALSDCIRSYDQKIEELGSEKYGHTKLLRQVKGVGPITALAYVLTLENPEHFAQSRDVGPYLGLVPKQEDSGESQPQLGISKTGDTMVRKLLVGSAHYILGPFGPDTDLRRYGLRLCERGGKNAKKRAAVAVARKLAVLLHRLWVSGEVYEPLGYAASRAIVQPAA

SEQ ID NO: 435615 - protein, 350 aa, unidentified
MVLTVGVDVHKDTHTAVLVDELGREHASRTVRATDAGHRALVAWAGGRGDELRWAVEDCRHVSTRLERALLGAGQRVVRVPPKLMAGARHGARTRGKSDPIDALAIARAALREPDLPVAEHDQASRELKLLVDHREDLVAERTRMQNRLRWHLHELDPEIDPPARRLGEIGLLDTLTARVAEHSGMVARLAGELLADIRERTLRIRALEREITSVTRQVAPQLLELPGCGALTAAKIVGETARPGRFRSEACFAMHAGAAPIPASSGRTERHRLARGGNRQLNAALHRIAVTQTRLPDSLGQAYYQRRRAAGDTTMEALRALKRRLARVVFNTLLQPPTASPAAPQPAAA

SEQ ID NO: 435616 - protein, 412 aa, unidentified
MNQKVYVGIDLAKDSSRVAVIDEDGSRLLNPFNIKNTKEGMEKLLSKLSSYKNKQIFCGMEASSNYWENVYFYLKEKKVSCLLLNPYQVRKYRQALGLKIKTDSVDAEAVAQLVRAKKYDDLYISDEVAAELKELVRMKVSFARRVKDLKNSVQSLLCLVFPEYTSIISHPFSKASMEILSKYPTSHHMAKTSVARLAKIFKKYQGCSSCKDKAEELIATARQSFYSGKASRSRGMSISMQIEEISLLSKKREEIEEEIKSILDPDGPEGGLSSFKILNSIKGVGIGTIAAFLGAVGDMSRFKNSDKLVSYIGFYPRIFESGKYKKRNPGIQKAGPRELRYMLYMSSVAAIKHNIYLKKYYHDLVSDGMPAKKALIKVAVKIIRMMYSMLKYKTCYDQSRVFMQHRSEKIAA

SEQ ID NO: 435617 - protein, 338 aa, unidentified
MAAYAGIDLHSNNIYLGIIDHNNKRLFKKRLPNKLGVIKRALSPFKEKITDIVVESTYNWYWLVDGLKDEGYNMHLANPAATKQYEGLKYADDQSDAFWLAQMLMLGILPEGYIYPREQRYTRDLFRRRLLYVKQRTTHILSLKSMVSRSLGTNITANAVKRLQPEDAKRIFEQEHLIIAGRHAIATINFLSDQIQSIEKEVMKNAKLKPEFKPLLTMPGIGNVLATTIMFEVGSIRRFPKAGNYASYCRCVKSEKISNKKKKGSGNRKNGNKYLSWAYLEAANAAIRHYPLFQRFYNQKLSRTNIFVARKAVANKLARASFYIMRDQVAYDENIMFS

SEQ ID NO: 435618 - protein, 360 aa, unidentified
MSHRTWKLGNVKSASASEGDRMTVGLDVHKATAYAAVRKNGQEIATWVMPMDNQTIVASLKRFGPALKKVVYEAGPTGYGLARALKKAGLPVEVIAPGKVPQAPNADSKTDRLDARKLAEEAEKGSLQKAVIAIPTEQEEADRQLARLRDQLIGKQRRVKQQIKSLLLQHGLPEPAGLAHWSAEGLAALKAMRLRHQLQLSLEVLVGELEHLVVLRKRVERHEVWLMKQRRHRRGARLLQTHPGVGVVTATAFRLEVYQPERFATPEQLAKYVGLAPRVRQTGPKRRGGPLIPAGRGSLRSLLIEASWRWIRDDAAAAKTYRRLVRNTGSGQKAVVAMARRMAVHLWCMLCRGQEYRPAA

SEQ ID NO: 435619 - protein, 361 aa, unidentified
MKRWHFIGFDTHSKSCDAAVVNWVGDVVNRNRCETTIPALLQIMEAVPRPRAVVIEEGPLAGWISRGLRGAADRMVVSQPRRNRLISAEGDKDDPIDAEKLAQLLRGGYVKEVHQVDSLERAVFKQQVALYHFRVRQRVRESLRLSSLFKQHGVMIREKHYVASDDRPALLARLPENATLREAVKLLWQSYDELVAQEESWRKRLTQLAQEVEMVRRFEALPGFGWIRAATFYAYLDTPWRFRNKSALWKYLGIGLERERSGNGPERLHVPLLVHRLLKTTILGAALSAVLQGDNPFADLHRRWIKNGLSAKLARRNVARAQSATLWGMWKNGSAYRPEWVGVAAAAQRGDSGVLARPIAD

SEQ ID NO: 435620 - protein, 307 aa, unidentified
MFVGIDVAKDRLDVHVRPAGESFVISRDDEGIEELAKRLSAMVPTLVVLEATGGFETVVAAGLAAADLPVAVVNPRQIRDFARATARLAKTDALDAAVIAHFAEAVNPPVRRLADPQQRLLGELMARRRQLIEMMVAEGNRRRLLTARRTLKTVDRVLATLKAQLEEIDHDIDIAVRGTPAWREAEDLLSSVPGIGHKIARTLLAEMPELGRLDRRQIAALTGVAPFNRDSGTRRGRRAISGGRIVVRSALYMSVLVAIRRKLPLAQTYHRLRASGKPAKVAIVACMRKLVTILNAILRDKKPWATA

SEQ ID NO: 435621 - protein, 467 aa, unidentified
MKHHPKRERMSKKERPSISLLERIQPDAAGIDCGQSSHFVAVPPDRDPQPVREFPTFTTELERLADWLARCGIKTVAMESTGVYWIPLYEILEQRGFEVMLVNARDVHNVRGRKSDVMDCEWLRELRSVGLLRASFRPAAAMVPLRSFMRQRETLVEEASTRIHRMQKALIQMNVMLHVVVTDITGQTGLKIVRSILAGERDPQRLAAYRDRRCHASYAEIVAALTGNYRTEHLFALKQNFAAYEFLLHQIAECDSEIEALLSKLAEQKPLPTAPLPQARSKRSPKRAPAFDIRSPLHRLTGGADLSQIDSIGPHAALQIIAEVGTDMRRWPTEKHFASWLTLAPNNKISGGRLLSSRTPPSANRAAAILRRCAMSLTRTSTALGAFYRRLAARAGKAKAITATARKLAVLVYRVMSGNLVYNDPGATAYQRLHHTRELKSLRRRARLLGFQLVDQTTGEVLNAAVS

SEQ ID NO: 435622 - protein, 349 aa, unidentified
MEQNEVILGVDTHLDTHVGAVISDTGRLLGTLSVSTDTAGYLDLLSWANSFGPLRRAGVEGTGTYGAGLARLLRYHEIEVLEVNRPDRAMRRSRGKSDPTDAENAARAVLSGRATAIPKEQSGAAEAMRAVSVARRSAVKAKTQAINQLRALLVSAPQEIRERLLKAKTAECVEGCARLRSLGKTPMLQTLTTTLRLLAKRWLTLAEELKALDSMLESLTSQHARRLRERFGVGPETAAVLVAVAGDNPERLKSEAALAALCGTSPLQASSGKTVRHRLNRGGDRSANNALWTIAMVRMRSDPRTRAYVERRTKEGMSNKEIHRCLKRYIVRELHPLILADLADSTLAT

SEQ ID NO: 435623 - protein, 403 aa, unidentified
MVTQIANYDQVDVFVGLDVGKGEHHAVALDRTGKKLYDRALPNDERRLRAVLTDLQKHGIVLLIVDQPATIGALPIAVAQAAGALVGYLPGLAMRRIADLHPGEAKTDARDAAIIAETARTMPHTLRSIQATDEQVAELAMLCGFDDDLAAQITQVGNRVRGLLTQIHPALERAIGPRLDHPAILDLLQRWPSPAQLRAAGEKRIATRMLKLAPRKGRDWAYEITTALDQQSVVVTGTNAAALVIPRLAAQLATLRKQRDDVAAEVERLVDAHPLQPVLTSMPGVGVRTAARLLTEVAGKHFPTAGHLAAYAGLAPVTRRSGSSIRGEYSSRRGNKVLKNAMFLSAFAALRDPDSRAYYDRKITQGKRHNQALLALARRRSDVLYAMLRDGTLYLAPAARLAA

SEQ ID NO: 435624 - protein, 354 aa, unidentified
MPATAQTAIAAIGIDIGKNSFHVVGQDTRGQIVLRQKWSRHQVEARFANMPPCLIGMEACVGAHHLSRRLKTLGHDARLMPAKYVRPYSKGQKNDFRDAEAIAEAVQRPTMKFVATKTADQLDLQALHRVRERLVSQRTGIVNQIRAFLLERGIAVRQGQRFLRAELPHILATPPDVLSPRMLRIIEDLAGDWRRLDERVEGLSNEIEAIARQDAGCERLMSVPGIGPMISSAMVAAIGAGDVFTKGRDFAAWLGLVPKQISTGDRTILGKISRRGNRYLRVLFVQAAWVVLIKPKIWERHGLKPWIEAARKRLHHNVLAIALANKLARIAWSVLARGRAFEARKMDQAVNQSA

SEQ ID NO: 435625 - protein, 372 aa, unidentified
MSNATTFVGLDVHARSVKACAFVPETGETIRKSFGYEPGEIASWVSSLPQPARCVYESGVTGFHLCRELNAMGVACVIGAVSKMHKPAADRGRKTDRRDAQFLAVQLALGVVTEVHVPDAECEGARDLARALADARDDAVRAKQRLSKFLLRHGLVYDERNAAGQRRNRWTGDFWAWVGRIDLGDAAAMATLDHYCERVREADAAKAALEAKVKSLAQQPRWKPTCDALKCLKGIDAVTAASIACEADGFARFATASGFAAWVGLVPSEHSSGESRFRGGITKAGNKHLRKLLVEAAWHYKGASRSPKDLAKGQIVDEATRRHANAGVRRLVDRRRSMDDAGKQSSVANVAVARELACWCWAVGRMAVLPLP

SEQ ID NO: 435626 - protein, 353 aa, unidentified
MTDFGGSVVAGVDAHTDEHHVAVVDAQGRLLGAAAFPTTAEGYAGLISWVRGYGEVDRVGVESTGAYAAGLVRALQTGGIRVVEVNQPHPHARQRRGKSDPLDAELAARAALSGTATAVPKQTSGIVEAIRQLRVVRGGALKARTAALQQLDDLVITAPEQLRRQLRHGRTLKARAALCLKLRPDIERIDEPAQAAKLALRSLARRIRELDTEILELDRQLEQLVNAAAPRTLQLFGVGTQGASQLLVTAGQNIQRLRNEAAFAKICGAAPIQASSGRTKRHRLDFGGDRQANRALHMIAVCRLRHCKRTRAYATKRTADGLNRREILRCLKRYIARETYHTLRADLEALNST

SEQ ID NO: 435627 - protein, 399 aa, unidentified
MVSRSDRIPGGVVIGMDPHKRSATIEVMTADEAIHGGGRFATDRDGYASMLRYGRRWRDRVWAIEGCAGIGKHIANRLLADGEQVVDVPPKLSARTRVFATGQGRKTDATDAHSVALVGTRMTGLRPVVNDEQLAILRILVDRRRSLGDDHTRMVSQLHQLLLELIPGGAKKDLSARQARALLAKVRPRDAAGKTRRRVAAELIGDLERIYQRKKAANKELTELVAATGTGLLDLPGIGPSGAARLLVEVGDITRFPTKAHFASWNGTAPIDASSGDQVRHRLSRAGNRQINRVLHIMARVQIRNPSEGRDYYDRKKSDGKAPMEATRCVKRRLSDIVYQQMLNDAMRQPGTGPGGQQGNDSDSSVTDSHPDAGSSDKPLPGPATPTLEPRFRLRLDER

SEQ ID NO: 435628 - protein, 341 aa, unidentified
MDHYAGIDVSLECSSVCIVDVNGKIVREGKVASEPEALIGWLRSAGLGLTRIGLEAGPLSQWLYAAMREAGLPVELLETRHVRHALDTMPVKTDRKDARGIAQLMRLGWFRAVHCKSMGAQETRAMLTARKLLQQKLRDVEASLRGTLRGFGLKVGRTTPKRFAGRVKELVVGHASLEAIAEALLAVHAVLLRELNGFERRVRTMARHDAKAQLLMSAPGVGAIVSLTFASAIDDPARFKSSKQVGAHFGITPKKYQSGETDYTGRISKNGDKGVRTALFEAAHVILTKPVKGSALKSWAMRLAKRAGMKKAKVALARKLAVIMHRMLVDGTTFNFAAAAA

SEQ ID NO: 435629 - protein, 318 aa, unidentified
MTQTTHTSALYVGIDVSQETLVVATYPTNAVWVIPNDADHCAALADELAQQPVQLVLLEGSGGFERPIVHALQQAGVPVVIVPPQRARYFAKSMRGNLKTDRVDAQLLARFASCYPVPEMPETPAMQAQLKELWARREPLVQALESEKKRLQVAMHPLIRASLERTIAHLQAECAEIEAAIEALIASDEALPPKAALLQTAVGVGRVVAYGLLAELPELGCVSHKTIAALAGLAPVRRESGRWRGSARIGGGRRRVRRLLYVASVVAVTHDARWRAVYEGLLAKGKAKKVALCAVARRLLVVLNAMVRDGRAYARVQE

SEQ ID NO: 435630 - protein, 386 aa, unidentified
MQKLNDLSRSLAPLEPDGTLIAVIEMSQSSWLVAGIVPGVERQPLKKLAADEIALLKLLHRWREEAEKAGRRIERTAVAFEAGRDGFWLARWLRTRSIEAHVIHASSVAVSREHRRAKTDRLDTELLKRAFLGWLRGERDHCKMVAIPTTKDEDAKRPNRERESLVGEQTRIVNRMKAALIRLGIRGFNPKLKKAAGRLEDLRTPEDEPIPPNTMAELRRDMDRRRLVSDQIRQIEEARLDRLKQAPDDGPHAMLRLLARVIGVGIETADMLVQEVLARNMRDRRAIARYAGLTGSPDESGTKHREKGLARSGNARVRRGMIQLAWRFLIFQKNSTLAQWFRARTENARGTRKLMIVALARKLLIALWRLVREGVVPDGVVLRPAQ

SEQ ID NO: 435631 - protein, 386 aa, unidentified
MPQLNDLSRSLVTLDQDATLIAVIEMGQASWLVAGVVPGVERQPLKKLGVDESTLLKLLHRWHEEAEKAGHKIKRIAVAFEAGRDGFWLARWLRACGIEVHVIHASSVAVSREHRRAKTDRLDTELLKRAFLGWLRGERDHCKMVAIPTTQDEDAKRPNRERENLVGEQSRIVNRMKATLTRLGIRGFNPKLKTAAARLDGLRTPEGGPIPPNTLAELRRDMVRRRLVSDQIRQIEDARLERLKHAPGDGPHAMVRLLARVIGVGIETADMLVQEVLSRNMRDRRAVARYGGLTGSPDESGKKRREKGLARAGNARVRRGMIQLAWRFLIFQKDSALAQWFRARTENAPGTRKTMIVALARKLLIVLWRLVREGVVPDGVILRPAQ

SEQ ID NO: 435632 - protein, 331 aa, unidentified
MKIREIIGIDISKLDFHAFIHTTQVFTRFENSTKGFKALLKWVAKNSPHKQSQTLFVLEHTGRYSHNISYHFSANEIEFALVPGLEIKRSLGITRGKDDKIDAAKIALYGYRLRDEIKPTKLPGKQLDKLKRLLTLRDRMVRQRAGYKASLKEDEHVFCEEEAREIIEHQEDIIKALSSKISQIEKQMDDIIKANKKLNKLFKLLTSIKGVGKVTARYTIVYTAAFTKFATWRKFASYCGVAPFPHRSGTSVKGRNKVSNLANKKIKSLLTMCVCSAIQSNSEIKAYYERRLNEGKSTMSTQNNIRNKLLARMFAVVKRGTPYVNTMKYAA

SEQ ID NO: 435633 - protein, 414 aa, unidentified
MLKIVYRVCCGMDVHKSFVVACIASTNEYGVTTYKSKRFSTFTGDLRRCAAWLAENNCKDVCMESTGKYWIPIYNILESTCNIVLAHPKYVKAIRGKKTDKRDAKWIADIFKHDLVAGSFIPPADIRQLRDLVRYRWKLTNFTTGEKNRAQNCLTVSNFKLDDVFSDVFGKAASAITTRILENPKEKITDVSGFRTKSMKATNEQVLAAVDGEMCEEQAEKLRIIRSHMDSLQLCKLNLESLILTTAEKYLPQLGLVVTAPGIQSFAAIGIISEIGVDMSVFPTSKHLCSWAGLTPQNNESAGKKKTTRISRAGAYIKPLLVQCALNAIRAKKFPEVRNRYLALKKRRGHKKAIIAIARMLLTAIYNMLKKNEPYNPELYRKGDRPPAHREVSLEEAIFILQRQGYLVTAPPST

SEQ ID NO: 435634 - protein, 325 aa, unidentified
MIISNQAKKFKSDTIIGVDISQDKFDIAITSKEGPVHTFANDPKGHKNFIKLIKPHKPKLILMEATGKCETKLALALQKAKLPFRIENPAKMRSFSRSMGMLEKTDKIDARMIALAGERLDLSAKSSKLNHLIIKLKEHVRTRFTLIEEVVRLENIMDRMLDADLKMELLRLHARISESKEIVEKKIKKMIDNNDEFSIRYKLLTSVPGIGFVTAVTLIAECEELGETGRSQLAKLAGLAPLANDSGKMQGRRHIRGGRKNLRNALYMAMLATVKHNPKIKAFYERLKSNGKPPKVAMVACAHKMLGLLNAMIKHKKEWNEFAGC

SEQ ID NO: 435635 - protein, 350 aa, unidentified
MASVAVFVGLDYHSDSIQVCVMTEDGQTLRNRRVPNEVGHVVECVRGSGGDDELVLVKGVAIEACCGAADCATALVQATDWTVKLAHAGAVRRLKANRDKTDRGDAWHLANLLRTNYLPEVWLADDATRQLRRLVRHRQSVMAQAKSIKLQIRGLLREERVVEGCPATAWTKRWRAWLAAVPLSEQGRWVLERQLALLARWEEELRATDQRLEELTRTDPVVEQLLRQPGVGLVTACLLRAVIGRFDRFRTGKQLAKYCGLSPCNASSGRRQADAGLITAGHDDLRAVLIQLAKRLPRHEPRWRDLHAKLRRSKSANVASAAVANRWVRRLHYELTRPGEHRLPGRTTAS

SEQ ID NO: 435636 - protein, 391 aa, unidentified
MVCVGIDVAKDKHDCCILDSDGMVRADCITIPNNMDGFKQLLQTIRDCTKKSDKIKVGLEATGHYSYNILGFLLDNDLAVHVMNPLHTNLYRKSLSLRKTKTDRVDARTIATMLLSDVDLKSYTDTAYHNEELKSLTRYRFDKVRERAKLKQSVSRLVTILFPELEKLVPSLHIASVYSLLSEYPGAKQVSEVHLTKLTNLLTTASKGRYGKEKAIQIREAARASIGSVMPAKSLELKHTIKLIKELTSEIDEIEDSIQQIMDELHPPILSIPGVGIQSAAMILAEIGDFSNFESPDKILAYAGCSPSTYQSGKLTNCYAHMEKRGSRYLRCALYNATKYVCHWNPVFAEYLAKKRAEGKHYNVALSHAMKKLVRLIYALQKSGKAYLTAA

SEQ ID NO: 435637 - protein, 338 aa, unidentified
MQTYAGIDLHSSNNFIGVINDKDKILYGKRHANRLDDVLRALDPFKDSLKGVVVESTFNWYWLVDGLQEHGYRLHLANPSAIQQYEGLKHTDDPWDSFWLAHMYRLGILPEGYIYPKEHRAVRDLLRRRLLFVRHSTAHILSLQSMISRNLGFKMSNNEIKKLKPADIESLFDCSNLVFMANNSLAAIEFLKKITKGIEKKVKSQVKLRKEFEMLLTIPGIGNILGLTINLEVGDIGRFPKVGDYSSYCRCVGSKRLSNGKKKGENNKKNGNKYLAWAYVEAAQFARRYCVKAQSFYQSKEAKTKPVVAIKALSNKLSKASYYIMRDQVAFDEEKLFG

SEQ ID NO: 435638 - protein, 417 aa, unidentified
MQMIPWEERKYFGALDWACDHHDLVVVDHKGGVVCQLRFAHTAEGWQQLRDKFAAFTPLAIAVETNQGLAVEQLLAARCTVFPVNPQSAKRYRERKAPTGVKDDRRDAWSLADALRVDGHGWKPLLPDDPLVAELRLLTRDESALIEQRTGLINQLQSALRDYYPAALEAFADWSCPGTWSFVASFPTPALLVKAGRRRWVKFLHAHHLWRAATAPRRLEIFARAELLQGQPSSVAAKSLLALSLVRILQTLEVQLLAYRRAITERFARHRDHDLFGSLPGAGKKLAPRLLAEIGEQRSRFERAEGLQAYAGTAPITFQSGQIEKHLVRRACARPLRCTVHLWANLSRRTCPWAQAYYQAHRAKGQSHACALRCLGQRWLKILWRMWQDGTRYDEALHTRNQRKHGSWVVAPKPTTT

SEQ ID NO: 435639 - protein, 398 aa, unidentified
MTESSDYESVQVFIGVDVGKDTHHAVAVNRSGKRLFDKALPNDENKLRSLISDLKQHGQILLVVDQPATIGALPVAVARSEGVLVGYLPGLAMRRIADLHAGEAKTDARDAAIIAEAARTLPHALRTLKLADEQIAELSMLCGFDDDLAAQTTQVSNRIRGLLTQIHPALERVLGPRLEHPAVLDLLQRYPSPDKLASLGEKKLATQLCKLAPRLGKRLAADITRALTEQTVVVPGTNAAVVVLPRLAHQLITLRKQRDEVALEVEQRVLAHPLYPVLTSMPGVGVRTAARLLTEVACRAFASAAHLAAYAGLAPVTRRSGSSIRGEHPSRRGNKTLKRALFLSAFAALRDPISRAYYTRKMSQGKRHNQALIALARRRCDVLFAMMRDGTFYTPAAS

SEQ ID NO: 435640 - protein, 325 aa, unidentified
MDIIGIDISKAKFDAALLLGERVKHAVFSNTEAGFGQLLAWLAKHRPDPAAPLHACMEATGNWGLELADFLHAQGIRVSIVNPARIKAYGESELARNKTDKLDAGLTARFCRAHVPPAWIPPLPCLRELRELVRRCDALKATRVQELNRQKSGFASPAVARSIADHLAWLNEQIEAVTATARQLIAADPALARNLALLRSIAGFGEISATVLLAELPNIAEFTPKALAAFTGLSPQEHSSGTSVRRPSKTSRMGSERLRSTLYMCALSAKRSNKALAAFVGRMTAAGKPPKVILVAVARKLLVYAHAVLRTQKAFESSPDAPFSA

SEQ ID NO: 435641 - protein, 483 aa, unidentified
MRKRRMSTFERLNSGRITRKQRRELARRVAAADPGLSIVHPHAAGIDVGNASHFAAVPPDRDPTPVREFGFWTADLHKMAAWLVACRIDTVAMQSTGVYWIPLYDILEQHGLRVVLVNAQHTKNVPGRKTDVQECQWLMKLHTYGLLRDSFRLAQHLEGVRTVWRVRGRHVEEAARSVQHMQKALTKMNVQLANVISDVSGLTGQAIVGAILQGQRDPYKLAELSDPHIRASKEEIARSLEGTWREDVLFELQQAVDSYHFAHRQIRQCDDKLKAYLASLESRVLEKPAVPAGTKPLQPKTRKARKQGANAPPMDLTGELVRICGADLTSIDGINIISAMTIVSEVGTDLRQFPDEDHFASWLGLTANENISGGKRVKGAKRKVKNRVADVLRMGATSLLNSASYLGARYRQLRRNAKIPAVAVKAMARHLAVLVYRLLTKGQAWVDRGAELYEQQRRERDLIVLQEKAKRHGLQLVPVAAAN

SEQ ID NO: 435642 - protein, 318 aa, unidentified
MAKIAYQFNIGIDVSKQKLDVSYNDKKIAVFDNTPQGFKQLLKSITNKQNTRIVMEATGGYERPLAHFLQDQNIAVSIVNAKRVRDFAKALGRLAKTDEIDSHVIRLFAETINPHCIERKSRSQQSLDSLVHRRDQLVKQRAMEKQHLETVVNKDAERSIRRNIKFLDKEIERIENKIKELINSNKPLKSKVERLETIKGVGAIVALTLMADLPELGTLSNKEISALVGVAPFCRDSGTMKGKRTIWGGRAQVRTILYMAALSARNHNAPIKAFYERLIGNGKSKKTALVACMRKLLIMANSMIKNNQDWNPDHGKLA

SEQ ID NO: 435643 - protein, 310 aa, unidentified
MEITVGIDVSKAQLDVHVHPAGESFAVGNDEVGVAELVERLGKLVDLLGIGIEASGRYERLAVMELAAAGLPVVVLNPAQVRHYGQAIGQRAKTDPIDARLIALFVAAVRPQPRPMADAQTQELAALMQRRRQLVGMLATEKMRRQQAAPGAARVSIARSVSFLEDHLKDLDRHIDKTVRGTPVWREREDLLASVPGIGKTIARTLLAELPELGSLTPKQAAALVGLAPYTRQSGKWRGKTFIGGGRTAVRSALFMGAMVAARYNPTLKAFRDTLVAKGKPKLVALIATARKLLIILNAILRDAKPWRTA

SEQ ID NO: 435644 - protein, 460 aa, unidentified
MFNETRKMMELFGSVGHKKTLIAGIDVSKNKFTITAVNGMYEIKMKPKDIDLNKNSLIKLYKEIDEIIEKEDIKQIIFGCEPSGIYYRPIFKEIIQKYPNALFRLVNPSATKANRDQRMEREKTDPIDAYAITDLLIRGESYDLEAEDNTFNIIKEYVKELDHLVKELVRSKNKIHALTDEFYPGLEGKSTSFLDSIYGKRFLNVLPEPQIISNLTIDDWQRILSTEDYKLPKHLATRLMNGSNEIVTSAHSNFKTTRDYIIFLVEGYEHLEKRREIIRKKLDSLIDSLDFGENLKEINGIETLTVARIVAYTGNPYNFKSGKEVASFAGLIPKSNQSGKLDKAKILSKKGHKKLRSTLVQAAQQVINSTGYFTAYYNRLVLENRKEPMVAIMATANKLIRVIMKMIHTGEKFNPPTAKDKELAKSKLKRITSKELSDLNKIKRLDSLTQDIKELYLARV

SEQ ID NO: 435645 - protein, 332 aa, unidentified
MGNCTDHVVLKKQLKRAQLAAFFANLEPCLVGMEACAGAHYWARKLRAMGHDARLIAPQFVKPYVKSQKNDAADAQAICEALTRPSMRFVAPKSVDQQSVLALHTSRSGFVKARTALVNQVRGLLAEFGVVLPKRLAAFHAGVPQAVQDLGNELTVLMRQLLSSLHEQVRHLDELVGKIELQIRQWASRDDSAKRLQQIPGIGPITASALVASLGDVQQFDNGRQVSAWLGLVPRQHSSGGKNVLLGITKRGDSYLRTLLIHGARSAMQAAQRKKDGPPAWLQALLGRKHPNIVAVALASRNARIAWALLAHKRDYKVGYESPNPLSLSASA

SEQ ID NO: 435646 - protein, 412 aa, unidentified
MEGETVIAGVDTHKDVHVLCLLDGLGRKIWSGSFGADPEGYDRLAEAIGDPGSCAVVGVEGTASYGAGLTRRLAELGYNVVEVLRPKRDKARPGEGKSDPLDAERAARKAASGRGCSVPKSQDGWVEAVRQLYVARRLAVATSTSCVACAKSMLTTAPGALRERFRGRERPKDLMPLLARGRKAGDALEESVLASLRSVAAVWKEARSQVESLDARIRALLEANAPALLGIEGCGTTTAAALVVAAGDNPGRLKGEAAFSMLCGASPIPASSGKTERHRLNRGGNRQANWALYEIAIKRMAYDERTRRYVARRTSEGKSRREAVRCLKRYIAREVYRVLMDPNPDGAAPEGPELAKMRKAMRVTQKQAAAGLGMSAASLGHLEHGRRRSTKLERRYYELLCELKGALPQTAY

SEQ ID NO: 435647 - protein, 345 aa, unidentified
MDHFAGLDVSVKETSICIVDDTGRIVREVKAASEPEALLQVLGNPIYRFKRIGLEAGPLSQWLFSALAEGGLPVICVETRHMRAVLQAQINKTDRNDARGMAQMMRAGLYRPVHVKTLRSQKLRMLLTHRKLLQSKAISIDNDLRGTLRNFGLKVGMVGTVKFEARIKELVENLPDLAVLVEPLLMVRRVLREQFAILHRRLLAIVRDDEVCRRLITIPGVGPVVALTYRATIDVPARFRNSKAVGAVFGLTPSRYQSGEINRAGAISKCGDEMMRVMLYEAAHIMLVRLAKWSWLKAWAMKIARHRGMKKAIVALARRLAVIMHRIWVDGTEFRWTREPAAAAA

SEQ ID NO: 435648 - protein, 337 aa, unidentified
MIIVGCDFHPSFQQVAMLDTETGVTEEHKLMHASGEAEGFYRKLASPAMVGIETVGNDLWFVQLLQKLGHQVCVGDAAQIRASYVRKQKTDRRDANHILQLLVEGRFPRIWIPDAEMRDHRQLLIHRHKLVQIRTRVKNELQHLMLNQGMQKKQKLWSTEGRAALASLPLEPWTDRRRKDLLNLLAMLDAQLESLNDAVTRVAKEYPGVPLLMSQPGVGAVTALAFVLTLGDVHRFPRGKQVASYLGLIPREHSSGGKQRMGGISKQGNRLLRFLLVEAANIAVRFDPELRKEYQHRCHQKHFTVAKVAAARKLAIRMYWMLRTQTPYPQVLSSRVA

SEQ ID NO: 435649 - protein, 342 aa, unidentified
MYYIGLDVRKKTISYCIKDVGGQVQREGTIPATRTELDSWTKTLPKPWTVAMEASIFTGWVYDHLLPQAAQVKVAHPVMLRAIAAAKKKNDRIDAGKIADCLRCDFLPECHMVSTEIRDRRRTLRYRHLLVRQMVQMKNRVSGLLLETGVSHNKQRLHKVKYFRELLATNKEVDDSIRPLLKLSRESIERLQKTDYALVSSLERDPLLAQRLKNLRTVPGVGPITALTWALEIGDVSRFHSVKQAISYCGLCGDEKSSADKVLRTPLSKQRNKHIQRVLVEAAKLAPKQSHELALVYEKAKQKGNTNRATIAVARKMVTYLLAVDRGQRSFVPVEDFSPAVA

SEQ ID NO: 435650 - protein, 419 aa, unidentified
MVQGKDTAFVTVCHPVCCGLDIHKDLIAACLLGDKEDGTEYWELREFGAFRDDLIRLRDWLQEHNCPIVAMESTGIYWRPVYNILEASVQVILVNARHVKNVPGRKTDLSDSKWLAGLLRHGLLRGSFIPPAHVRDWRDLMRMRRGLMEHLGNYKRRVHKVLESANIKLGSVLGDIFCGTGRRLLRLLLERTSEITVTEVEPCLRGRLKHAPEEICMALQGHLRDQHLYMLKKYVQLLESLEAEIAEIDSRVQGLMVPYDPVRQRLKAIPGISDIAVNLILAEIGPTLEQFPSSAALASWAGLCPGNNQSAGKRRSGRSPVRRHHLKTIMVEVAWAAIKKKGSYFRDKFYRLRVRLGHKKALIAVAHRLLTAIYYVIKEEQDFRDLGENYLLLRHQARRLAALKRQAKVLGYELSPVAG

SEQ ID NO: 435651 - protein, 398 aa, unidentified
MKVTYQTCCGVDVHKSFLVATIVKTTGGIEPSYQKKRFSTFNNSILEFKQWLLDNNCRDICMESTGKYWVPVFNLLEDEINVVIANPKWVKAVKGNKDDTKDSKWIGDLFRLGLVKGSYIPCKIVRILREYTRYRYQLVSCRSSEKNRYQNALTVCNVALDSVVSDIFGKSSTSIIDYLLEQSGTSINHEEIASKLFRSLKSKEDAVIESVEGYQMTDAQKYRMRLVRAHMDYITAEINDVDKMIENMISSNPDFENAVQFSSSKRLCCWAGLTPGSNESAGKKKSARITRAGVYLKPALVQCAHAAVKSDKSPYYKKKYESLVKRRGKKRSIIAIARMILTAIYQMLSTGEQWNPSDLYKIDMPVALVEKQKAKAIKQAKKLLQREGLLPPDEPLAS

SEQ ID NO: 435652 - protein, 419 aa, unidentified
MAYRIAGIDVHKRMLAVVVADVAVEGEYHFERRVVGTSPDQLRTLAEWLVALDVEEVVMESTAQYWRPVWEALERYWTPRRQARPGVDPIAGRLHLAQAQSNRGVAGRKKDFPDAERLVKRLVAQELTLSFVPDAEQRLWRTVMRRKYQLTCNRVQFQNRLEALLEEAHIKLSSLVSDLLGPSARRMLHAIGEGATDPAAVAGLANQRLRATPEALCDALGACTDLHPVYRRLLQLALTELRGIEEQIDALNQEMARLLRAHQDAVQRLAAVPGLGVDSAQQIIAEVGPTAATFPSPKHLSSWVGACPGDNESAGVSYGHRSPHGNRQMRRILTAAANAAVKAKGSIFELVYRRLVPRLGHYQAIGAIAHRLCRLIWKILRERVVYDERGPAVTKERLRARTAKMIRELRSLGYRVEPV

SEQ ID NO: 435653 - protein, 358 aa, unidentified
MNYIGCDCHISSMDCAVVNERGQETKKQRVNTGVKGLMEFVRSIPKPRSIIIEEGSLASWLLEMCTAYGEKLVITDPKTNRWIGRAGQKNDEIDATKLAQLARGGYIKEIHHPIGHRRRFRELVMSYHDTVKSQTRIKNKLKAKFRQNGIKCSGETVYSNKYRKKWQKRLPQDKVVQVMAEVLWRQLDQVHEVQKELLGHIRKQSRQYLEMKRFKNIPGIGTVHAATISAIVENPHRFANKKKLWMYAGLALAEKASGGKVYSRSLTRNYNRLLKNALKQATEAAITSRDNQFRRQYLRLTIEKGILSHRAKLTVARSILATIYGIWKSGENYDDNIDKRRIESDKTQVRAYHLVRNG

SEQ ID NO: 435654 - protein, 393 aa, unidentified
MNKSTEGINRIIGLDMHPDVFAAAALEKTTADLSKVLWVQDRQPTAGIERWAKKYLRQGDVLVLEASGNSFEVASRFHRMGYTCLVLESAQAAKIKDNFCNDDRHSAIKLARVYLSGLSKLVWQPDEETRQMREIFFSHRASVKDCTRLRNRIRTFLNEYCVRLPKGTALTQPSGLSHALKAREWTLLQTQLISERFEQLWQTEARRKRLEKVMVELLLERPEWAKLWRLMGVRHIVAFALMAMIGDVKRFPNAKKLVGYFGLSPRKVQSGNDAKGREKGMGNTGRGDVRALLIQAAQNAMTQRSSPLHKWGWKLTMTKNKNVAVAAVARKLTTAIWHLLQGNFTTILEIGKHLQTKLLKLATVLGKGRLKELGFERRQAFVEHHFNLIQLST

SEQ ID NO: 435655 - protein, 464 aa, unidentified
MSILLIKISNFMDQKVESLSMEIVNPYAAGIDIGSRSHWVSIGQKEKDIREFGVFNEDLKAIAHWLAENKISTVAMESTGTYWQALYAVLVAHGFQVILCNGKFTKNIKGRKTDIQDCAWIQKLHSIGLLSGSFLPDEATEQLRTYCRHRANLLDMAASTQKKMQKYLRLLNLRLDVVVNDICGLTGLAIIEAICKGETKPEKLAELRHGNCRKSEAEIAKALETNGRMDYLFALQQELDMYKIIQTKITACDRNRKMLSKIIDQDDNKRQHYIDKKSHKRINKNTPKNIDLNIVGYQYFEGVDLMEIEGFSHGTILHLISEVGLEGIKKFQTAKQFASWLRLAPNNKKTGGKIISSKVPKGSNRLKIALRNAANAIGNLKDSTPLRDFFQRINFKKGRVSAISATARKLAVIVWNMVTKGTRYINPEGYLFLDQKRKLGLVKRIQKQIDKFGLTNEEIQLATN

SEQ ID NO: 435656 - protein, 436 aa, unidentified
MCDDSVNVFLLNTKGGRTMKVVYPICCGVDVHKTFLVATIITSQGLTPHYSKKRFSTFNNSILQFKQWLIDNNCFDVCMESTGKYWIPVYNLLEDTIRVTIANPKWVKAIKGNKDDTKDSKWIGDLFRLGMVPGSYIPKKPIRILREYTRYRSKLTSCQNSEKNRFQNAFTVCNVALDAVVSDMFGKSASSITDYLVSSDSFNPEHCASLLQKSLKKKANTVIESIEGYQMTQEQKERIVMVRSHLDFIHKSIKELDEKLDKMVAPYESAITLLCTIPGVNRTSAITIISEIGTDMSQFVNSKRLCYWAGLTPGNNETAGKKKSVRISRAGVYLKPALVQVAHAAVKSNCSPYYRIKYERISKRRGKKRAIIAIARMILTAVYHMLVTGEVFNPSDLYKIDMPQKMLEKQKEKAIKQAIKLLISNGIIKDTNISVA

SEQ ID NO: 435657 - protein, 318 aa, unidentified
MNTKINQSINVGVDTGKTQLDIHIRPLDLFFSVENNDKGIKKALKTIKSHSPERIVIEATGRLEMPFVLACAEAQLPIVRANPVHIKRFAGAIGRRAKNDRLDAELIAHYGEAIKPALTVIKPKNIRLMSDLVIRRNQLLSMQTMEKNRIQILPASLHPTIKPMLTTIKNQITKLEEKLVKLIEDSPEYQAKNTILQSVPGIGNIAAASIISNVPELGYITNKQAASLIGVAPITRESGRYKGKRVIQGGRAQVRTVLYMAMMSAMQCNPVFKATYARLLATGKPKKVAIIACVRKMVVTLNSMLRDGAMWNESTAKN

SEQ ID NO: 435658 - protein, 373 aa, unidentified
MPTNLRYVGLDVHAETIAVAVAEPDGEVPFLGMIPNRPEAVAKLIRKLGPREHLRACYEAGPCGYVLYWQLTRLGVPCDVVAPTLVPTKPGDRIKTDRRDAVKLARCYRSGDLTPVWVPDAAHEALRDLVRAREAAKQDQLRARHRLGKFLLRHGIRPPAGVKPWMQRHRRWLDSVGFELGAQQATVADYLHEVDHAVARLERLERALDEAVAAAPAAQRAVIAALQCLRGIRQVTAATIVSELGPLSRFPHPRQLMGYSGTVPSEHSSGDRVHRGAITKTGNAHLRRVLVEAAWAYRFMPKCAKGLRQRQRGQPEAITDIAWKAQQRLCTRYRRLLARGKPTPHVITAVARELVGFIWAIGVAVERGQPTAA

SEQ ID NO: 435659 - protein, 456 aa, unidentified
MFEDTEVTAVGKAEPQVIEDEEHRRVHERVAAVDVAKASGMVCTRLPGNGRRVSRVWEVTATTGAVAELGRQLLKDRIEMVTLEATGDYWRIWYYVLEAAGLAVQLVSPSQAKQVKGRPKTDRLDAVWLARLTEWGLLLPCFVPPAPIRALRDYTRARADLVRDRTRCYQRLEKLLEDALIKLSSVASKLTLKGPRQMIEAMIGGERDPHVLAGMAKTRMKAKHGQLVEALTGMFDAHHGELAQLELDQLTWLDARISQLEDRIQDTLAAIPAAWGTDADGTTGPGAGTGPDAPVLPAVARLAEIPGISPGLAAAIIAETGLDMTRFPTAAHLVSWAGLCPAARQSGARTRNGKKHGNAYLRGTLGQAAIAAARTGTFLGERYRRVARRRGKAKAQVAVARSLLVIIWHLLADPAARFTDLGPDYVAGRVSRDKKIRGHVRQLQALGLEVTLTPAA

SEQ ID NO: 435660 - protein, 367 aa, unidentified
MRRKGSAEVMSIAESASPRRVAIGIDTHKYVHVAVALDELGAFLGDIAIPVDQGGYERLLQWATSKGRVTAFGIEGTGSYGAALTSFLRRHGHNIVEVARADRRDRRLRGKSDILDAENAARAVLAGRATAIPKSADGVVEMLRQIKVAKDTAVKARTSAIITLKALIVTAPPELGDELRELSKMALIERCLALRPGKIDTPLAAAKHVLRSLARRWRDLSAEIKEHELLLTQLTRSIAPQLVEAFGIGADTAAEVLIVAGDNPWRIRTEAAWARLCGVAPIPASSGIITRHRLNRGGHRQANAALYRTVIVRMRHHEPTRAYVARRTEEGRTKKEIIRCLKRFLAREIWALMRPLREGPGLSAQAS

SEQ ID NO: 435661 - protein, 403 aa, unidentified
MIFVGIDWAEAHHDVCVLDEQGEVLAKGRIPDGVEGLARLHAMVADHAEEPAEVVVGIEIERGLLVGALVAAGYRVYAINPFAVSRYRDRHATSGAKSDPGDAKVLADLVRTDRHNHREVAGDSELAEAVKVLARTHQSMVWSRQRQVNQLRNMLRDYYPGALAALKDLGSIESCSILAMAPTPERGRRLTFAKIRRSLAASGRKRNLDRRAMEIYEALHAPQLEALPVVAEAYGEAIGSIVVLIDSLAHQVTRLEEAPAERFDGHPDAEILRSLPGLGLVLGARVLAEFGDDPTRYADARARRCYAGTAPITRASGTRLVVLARVARNRRLADACYLWAFSSLGNSPGARRYYDARRSRGATHHQALRALANRLVGILHGCLAHRQAYWEEIAWSTDFSVAA

SEQ ID NO: 435662 - protein, 341 aa, unidentified
MDEYIGLDVSMKETAVSIRRAGERIWRGKCASDPSIVAELIRKRAPSVKRVVFETGPLSVWFYHSLRVEGLPAICIDARHAKAALNMATNKTDANDADGLAQLAEVGFFREVRVKGFDSMLTRTLIAARTRLVRITTELSNQIRGVMKTFGLLVPAGKGSTFEKNVRSLLADQDRLASIVLPMLEAWRGIRGRAAELGRQLVRDARQSRACRILMSIPGIGAITATSFTTAIEDPDNFRKSRSVGAWIGLTTRRYQSGEVDYDGHISRRGDRPLRGLLYEAATVILTRSSTHSTLRTWGLQLRERIGFKRAAVAVARKLAVIMHTMLKTGELFNPNAGAIA

SEQ ID NO: 435663 - protein, 362 aa, unidentified
MKKGIKRASQMEAKHNINAAMTVGLDLGDRFSRYCLVNALGEVVEEGRIQSSLEAMRRHFEGELRLRVALECGTHSPWVSRLLSELGHQVVVANARKIAMITASTSKNDRNDAAQLARLAAYDPRLLSPLRHRSQQRQQDLNLIQVRATLVRARTMLINALRGLVKSAGSRLPSCSTESLAVRAPAHIPSALAAAGRPLLEQIVALNGQIAGLDREIEKLREKYPEIGVLRTVPGVGPVVAAAYVLTLDRCDQASNRAAGAWLGLRPRQKQSGDSDPQMRISKEGDRYLRSLLVQSAQYILGRFGPDSALRRWGMKLAQNGGKRGKKRALVAVARKLAVLLHSMWRSGKRFEPFPQPAAAAA

SEQ ID NO: 435664 - protein, 294 aa, unidentified
MKQYAGIDVSLEYSSVCVVDADGCIVREARVLSEPDALIPWFGAHGVAMERIGLEAGPLSQWLYAGMTKADLAVELIETRHVRAAIKTTDKKDARGIAQLMRLGWFRPVHCKSLPAQEVRALLTARKLIQGKLHDIEMSMRGILRGFGLKVGPTTRRTYVARIRELIEGHPTLEAFAASLLKVRDALADEFAGLDRTLRAMARQDDNARRLMTTPGVGVVVALTFVSAVDAPERFRSSRAVGPHFGLTPKKYQSGETDYSGRISKIGDVGVRTALYEATNVVLTRPVKGSDLKT

SEQ ID NO: 435665 - protein, 319 aa, unidentified
MVIGIDVAKAELVVATRPDGERWTVANDERGVRTLVERLRAAPPELIVLEATGGYELLCVAALAAAALPVVVVNPRQVRDFARATGQLAKTDRIDADILALFAERVRPAVRALPDADAQELDALLARRRQLLEMLQAERNRLGQVFGRGKQLVKKSLKGHIAFLERELKIADTDLGAMVRQSPAWRERDDLLQSVPGVGRVLSLTLLADLPELGQLSRRQIAKLVGVAPLSCDSGTFRGRRFVQGGRASVRAVLYMGALVATKRNPAIRTFYQRLLSAGKPKKLALVACMRKLLTILNTMVRTGEYWTIDHTTAALISA

SEQ ID NO: 435666 - protein, 321 aa, unidentified
MQKDLLYCAIDVSKDKLDLDAAALALPAQLGNDHASFRQLIKAAKKYPGAVQFVFEATGPYHLGLALALWEAQIPLSILNPARVRHFAKAQGKAKTDPLDTQVIGDFARSFRPQPTPAPDPVRRELTELLQRRDGLISTRAAEQNRLGQCRHKMIKGQIRRLMAQLAEQIGQIDGLMKKLVNSSQELKAKVKALCQVKGVGHLTAVTLLITLPELGTLGRNRIVRLVGLAPLNDDSGTQKNKRYIQGGRARPRCALYMPALSASRHNPVLKEVYERLLKAGKLKKVALTALMRKLLICLNALLRKLADQHPSPQGLCLAKP

SEQ ID NO: 435667 - protein, 477 aa, unidentified
MWAAFQSREPPANGLPPVSHRKSPDSPLSAGRQYGATGSVVAGSVLLVKEACDNGGWSTVDRGLTPCGVRAACEKEPVMNNTTFVGMDVHKNEHVVAVYTPGTEEPEVFSVSHRPAEIRKLAQRLLGLAPGPIVACYEAGVLGFSLKRQLEGWKIPCRVIAPSLIPVQPGQRVQTDYRDARKLGWYLRAGMLTEVQAPDEAQEGVRDLCRWRHSAQRDLIRVRHQVTKFLLRLGLVYRDGSHWTGKHHQWLRVQKVADPVGQEVYEAMLVELDHRQERVKGLDVRMEEVARQAPYREPVGWLCCLRGFKTVTALSIVSELYGIERFGTAGGLMSYLGLTPSVMSSGLSTVHGGITKAGNVRVRRLLVEASWHQMHSPVTSRVLAQRREGQPAWAVTVAKKAQMRLHRRYWSLVHKGKSPGKAVTAVARELVGFVWAMLRLKDPAAPGENAAAPRARKGRTSRGAAAVGTKKETAVVQ

SEQ ID NO: 435668 - protein, 408 aa, unidentified
MEVVHERCAGLDVHQHTVVACVRVASDGKVVQEVRTFDTTTQGLLALCDWIAEHGCTHAAMESTGVYWKPVWHVLESSFELVLANATHIRNVPGRKTDVNDAMWIADLLAHGLIRASFVPPTPVQELRDLTRTRKQLVREIAQHTQRIQKTLEDANIKITGVISNVLGTSGRALLEALVGGETNPERLVDLTSSRLKASRPQLVEALRGRVREHHRFLLKLHLGQIDGLNAAVRDVEARVGESLKPFHERAQLLTTMPGISETAAHVIVSEIGFDMSRFPTAGHLVSWAGLCPRSDQSAGKRRSTRVRKGAPWLKTTLIQAAWAASRKKDSYLRAQFLRLKSRRGPMKAIVAVAASMLTAAYHILRDGVPYRELTATYFDSRDRTKLARRLIRRLSDLGVQVQILNAA

SEQ ID NO: 435669 - protein, 342 aa, unidentified
MEHFAGLDVSVNETSICIVDDAGRIVREVKGASEPEALLPVLKSGSYRFKRIGLEAGPLSQWLYSALAEAGLPVICVETRHMRAVLKAQINKTDRNDARGIAQMMRAGLYRPVHVKTLRSQKLRMLLSHRKLLQSKAIAIENDLRATLRNFGLKVGVAGAVKFEARIKELVKDLPDIAVLVGPLLVVRRVLREQIAVLHRRLLAIVKDDAVCRRLMTIPGVGPVVALTYRATVDVPARFRNSRAVAAVMGLTPCKYQSGESDRTGAISKCGDEMMRVMLYEAAQSMLRSAKWSWLKAWAMQIARRRGMKKAIVALARRLAVIMHRIWTDGTEFRWTRVAAAT

SEQ ID NO: 435670 - protein, 345 aa, unidentified
MNATTVAVDLAKNAFELAGADGNWKVIEKARLTRSQFARWFDNRAVQLVVMEACGSAHHWARTLRARGIEVRLLPAQYVRAYVKRNKTDAADAVALLEAARATDIKPVAVKSIEQQALQALHRMRSAWMATRTGRINMLRGFCREFGLDVPVGAVRGIAQIARFIADDRSAIPAILRTPMRLALEEIRLMEARIEQVERELAEIARRSPACAALTSVPGIGLLTSTAMLAAVGDPKSFNAGRRYSSFLGLTPREYSSGGTRYLGRISKRGDRYIRMLLTHGARSVLRAATVARRAGRNVDRLRGWALAVQDRTNHNKATCALANKLARIAWAVWVKHERYQAAPA

SEQ ID NO: 435671 - protein, 413 aa, unidentified
MYFAGIDWGNATHSVCLIDESGQEVEAFDVAHDSAGLDELVGRLKKREPLAGVAIETSRGPLVSALVDAGITVFPVNPKVSKAWRNGWSANGVKTDPGDARAIAHGLRQHHQNLRPLLLDSPLARELAILCADQKHLIQQRTALVNSLIAALKAYYPQALEWFDDWTSPTSHDFIITFPTPASLRAASKKRLTGFLKTHRIGLSALWLRRIDAARAAAAPPENSATTPVCAAKALLAVSTAKQLRTLDAALAEYKKRIRELFENHPDSGIFTSLPGAGEKLAPRLLSSFGDNRAKFRNAASVQALSGVVPYKFKSGKIDFDRFRYACDKEFRDAMTSFAYQSTRFCPWAGAFYAKARAAGQSHFQALRNLAAKWAKIIFRMWTEYATYDESIITRSLALHGVIIPQCKGCEKS

SEQ ID NO: 435672 - protein, 346 aa, unidentified
MMLIGCDYHPSWQQICWLDTTTGETAEKRLEHASGEAERFYRQLPAPALIGMESTGNCQWFVEMATTAGHDVWIGDAAKIRACEVRAQKHDRRDAELILKLLMEGRFPRIWTPSAQEKDLRQLLMHRYKLVRIRAQVKNELQHLAMNQGVTRKKKLWSKAGEKMLRELPLKPWASRRRADLYKVREMLSGQIDLLDQAAVEAAEKNEKARLLMTQPGVGPITSMAFVLTMGDVNRFQRGKQVASYLGLIPREYSSGGHQRFGPISKQGNRFMRMLLVEAAQGAVRYDPGFRNEYLHRCHRKAKGVAKVAAARKLAIRLYWMLRTNTGYPEVVRVESSSRVPLVSAS

SEQ ID NO: 435673 - protein, 337 aa, unidentified
MTKIIRIGMDISKNTFELHGVDEAERPVLRKKLRRYDVERFFGRLEPTVIGMEACGGAHHWARVLRGLGHEVRLLPPQYVKPYVKRGKNDAADAAAICEAMSRPSMRFVPVKTAEDQAALVLLGTRELLNKQRTMLINSLRGHAAEFGIVAAKGDSGVDSLLERIAVSPAVPELARDGLAELAHQIEALDARIAGLEVRLRAWHRANACSRRLATIPGIGLITACALAMKVADPSVFRSGRHFAAWLGLTPKDHSTAGRQRLGVITRAGDQTLRHLLVSGATTVIQHAKPGRASPWLLALLARKPKKLAAVALANKMARVAWVVMTRGETYQRPATT

SEQ ID NO: 435674 - protein, 309 aa, unidentified
MKQSVVYIGVDVAKEYLDVAWQKQSRRFGNNKSDHAALVGWIKQSPTVVQLICEASGGYERGLLESLEQNAVKVTLVQANRVRQYARAAGILAKTDKVDARVLAAFGAAMQPKPTVPASAKQKRLREYDAQRRHLSRILLAEQNRLAQLGCAQLRSLSRSLISKIKKQIATLDTSISDLIAQDQELRLKAQKLTSVIGVGARTAALVLAQVPELGQLNRRQTAALGGLAPFNRDSGTLRGKRAIFGGRRALRSGLYMAALSAARRNHILSPFYQRLRAKGKPHKLALTAVMRKLLIVLNQILKPIPSPA

SEQ ID NO: 435675 - protein, 353 aa, unidentified
MTKSSANKLEKTYAGLDVSLKETAICVVDDSGKIVCERTIPTDPHVIATYLSKHAPGLERFGLESGSTSAWLWREFRQLGLPVICLDSRHAHRVLSMKRNKNDRNDARGLADLVRMGWYREARVRSLDAQFARSMLLSRQQLLQSRRSIENQIRGALKTLGVMTGPSKGRRFMSRVIELRTDNEWLGPVLDPLLAAHASIATQLKAVSASVVDTAREDADVRRMMTVPGIGAMTALAFKSAIDDPKRFTSSAKVGPYLGLTPRQHQSGESEWIGGIGKTNDPLLRSYLYEAAGVLMTRVRRSCPLKAWALRLAKRIGWKRAAIAVARKLAVILHAIWRDGTVFEWQAAEATAA

SEQ ID NO: 435676 - protein, 418 aa, unidentified
MKDIKTEKGKKINRKTLIVAFDIAQEKHMVYIRCPDGREEKPFVVLNRREEYDQMWERISQTKEAYGLEEVVVGFESTGPYAEPLVHYLMKKEVKVVQVNPMHTKRVKELRGNSPNKTDEKDSQVIADIIELGNYLTVVIPEGASAELRRLTQARERAVERRTMQVNQVHGLVSVVFPEFLWVMKDIKTKTAQYLLKQYPRPQDIVGLGCEGLEETLKKISRGRLGKDRAEVLYEAAANSVGVREGQGSIVFEIKQLVSGIEEIERSIEEIEERMREYLKEVPYSRYMLSIEGIGEVTVAGLIGEVGDFTKYKTAAEITKLAGMDLFEVSSGKHKGERHISKRGRPLMRKLLFYAAINAVQKGRIMHERYERYIQRGMPRMKALIAIARKLLGVLFALVREQSEYVRNYEEIPLKKVA

SEQ ID NO: 435677 - protein, 383 aa, unidentified
MTTAIDTRDVCCVALELSKTSWVCAFAVPGESKVAIHKIKAGDTDRLLALLTGSKAKAEQQLGRPLQIVLCYEVGYDGFWLARYLIARAIHTIVFDPASFLMPRRSRVAKTDRLDAEGMTRILRRWLSGDREMARAVQIPSVEQEDAKRIERERKYLVEERISIIGRIKGLLALHGIWLDKKNIGKGLRQRLDAMKTGDGRPLAPFLRSEIERMLTRHDLISRQIADVEADRKAALNNEKGVFPHADKVRLLTTLGAVGETTATVLVAEIYHRTFLTRRQVAAFVGLAPSPYKSGEVDRDRGINKAGSKLARHMLVELAWFWLRYQSNSQLSQWWHSRFGNQGMRGRKVGIVALARKLAIALWRFVEDGIVPDGATLKVRHAS

SEQ ID NO: 435678 - protein, 347 aa, unidentified
MVTFGGDSHKRTHTLVAVDENGRQVGERTVAATPAGHMEALGWARQWPERRWALENCRHLSRVLERDLLSAGEAVLQVSPKLMGTARRSGREQGKSDPIDALAVARAALREPHLPVAQLEGRSRELKLLVDHREDLVGERTRIQNRLLWHLHELEPGYQVVASGLLRTVVLTEVGRRLENHSGVVAEIARELVARLVELTRSVKRLQRRIETLTRVLAPDLLSLPGCAALSAAKLVAETADVSRFRSSAAFAMHNGTAPIPVWSGNQERHRLNRGGNRQLNVALHRIAITQMRLGGAASAYIARRLTMGNTKPEAIRALRRQISDEVYRRLRQDCSERPTALITAAA

SEQ ID NO: 435679 - protein, 360 aa, unidentified
MDGSKVQPLMTAGLDLGEKYSYLCLIDTGSGEVVEEGRLRTTPEAFRRRFASEQPPMRIAIETGTHSPWVSRLLEECGHEVLVANARKLRLIYANKRKTDEVDAENLARLARVDPKLLYPLKHRGEDSQAHMAIIRSRQALVGSRTQLVNHVRGAVKSFGARLPKCPARSFHKRAAEHIPEALGPALEPILEQIGSLTERICQYDRKLETVCEEHYPETQLLRQVEGIGPLTALTFVLTLEDPYRFKKSHSVGAYLGLVPARDQSGERDPQKRISKEGDQMLRKLLVGSAHYVLGPFGSDSDLRRHGQKIAARGGKNAKKRAAVAVARKLCVLLHHLWVTGELYDPLHDMHRRQEQKEAA

SEQ ID NO: 435680 - protein, 351 aa, unidentified
MTTITTVGVDLAKKVFQIHGVDAAGKVVVARQLRRKEVLAFFAKLAPCLVGMEACGSAHYWGREIGKLGHTVKLLPPKYVKAYVKRGKTDAGDAAAICEAVARPSMSFVPVKGLEQQGLSMLHSARSQLIGQRTQLVNAVRGHLSELGIIAERGLLGLADLAAIVRDESDQRLPATARAALMVLVRQIETVSTQIVALDTALRKENKSSELGPRLETIPSVGAVIASALRARVTDARLFDNGRHLSAWIGIVPENDSTGGKVKQKGLSKKGDRYLRSLLVNGAMAVVRQAQIRPDKHPWVTKLLGRMSAKQAAIAIANKTARIAWAIMVHGGVYEAGHRAAHYRAEACAAA

SEQ ID NO: 435681 - protein, 346 aa, unidentified
MNETTTIGLDIAKQVFQVHGVAVDGTVTVKRQLRRSEVIRFFDRLPRCRVGLEACGGAHFWARELTVLGHDVRLIPASYVKPYVKRGKTDAIDAEAICEAVSRPTMRFVPIKTVDCQAGVMLLKTRYLLVKQRTQSINSLRGHLSELGIIAARGTGKVETLIAIIRDKTDERIPAVARRALEMLAEQVEALVRRIATLENEIVSEVRRDDTMRRLATIPGVGPITAATIVALVPDPGAFTSGRHFAAWIGLTPKMHSTGGKERLGRISKMGNPVLRSLLVVGATAVSRHARRGATVSPWLTGLLARRPAKVAAIALANKMARVIWALLTKGGVFTRRPATAAQHAA

SEQ ID NO: 435682 - protein, 409 aa, unidentified
MQVVHEVCCGLDVHKKSVTACVLWAAGRRRQIREFGTFTRELLELADWLRACGVTHVALESTGVYWKPVWNLLEGQFEVLLVNAQHIKAVPGRKTDQKDSEWIADLLQHGLLRASFVPPTPTRELRDLTRYRASLAQEINRIANRIQKVLEDANIKLASVATDALGASGRAMLEAIVNGEQDSRRLAEMSRGLLRNKIPQLQQALEGRITGHHRFLLRELLDHLYFVESKMRRIEQEVEERLRPFQSEVVRLCTIPGVDRVTAWGLLAEIGLDMKQFPDAPHLASWAGLCPGSHESAGKRKSGKIRKGNLWLRRCLCQAAWAVSTKKNNYLSALYRRLAARRGVKRATIAVAHNLLVIAYYILRDQTCYQDLGPDYFDRLNPEGLRRRLTRRLEGLGFKVTLEPSAQVA

SEQ ID NO: 435683 - protein, 318 aa, unidentified
MSHGYDKFVGIDVSKDALDVHGLPDGSPSRFDNTAAGRAKLLSLLPQAGACLSVVEATGGYERDLVAEAVTAGHHIAVVNPRQVRDFAKALGLLAKTDRIDASVIARFAETTRPVPKGYDERQEQLRELIVRRRQLLDHRTAEKNRSEMAHSSLVRKSVLKLIETLNKDIQRIEKAILQLVESNDDWRERFEKLKGVPGVGGQTAATLMAELPELGHLNRQQVAALVGVAPFNRDSGQFRGRRAIWGGRQSVRNALSMAALSAKKHNPVIREFAARLMAKGKPPKLVLTACMRKLLIILNAMLQSGDSWSPRLATLTP

SEQ ID NO: 435684 - protein, 419 aa, unidentified
MKDIEAKKVRVINKETLIVTVDISKVTNVGYCRCPNGIDIKPFSFMNNFHGFNTFWDRIMKTRNTHDLKEIVVGFEPTGPYGEPLTNFMKKKKVKLIQINPMHTKRVKELEGNSPNKTDQKDPKVIADIIELGHALTVVQPEGPAAELRRLTHARERAMQRRTAIFNQLQDLVFVIFPEFSQVFKDVKTRSAIFLLENCPTPEDIIKYKLKNLTTTLRKVSRGKLGEERARELYAAAKMSIGAKEGRQSILFEIKEILSIIGATEHFVTGIEKEMSHHLGKIPYSRFILSIKGIGEITVAGLIGEVGDFRKYDTISEILKFSGLDLFEISSGRHKGQRRISKRGRSLMRKLLFFAAINIVRKGGIMHEYYQGCLTRGMLKMKALIAVSRKLLGVIFALVRDHSEYKENYTVEQELKKAA

SEQ ID NO: 435685 - protein, 355 aa, unidentified
MADHFAVARRRREDVEASGGDVAEVLERFARLREKARARTGKVFPFVVIQEAGLDGFWIDRALQNEGIESHVVDPASIATSRRRRRAKTDGIDGEALVRALLAYKRGEPRVCAMVKAPTPEEEDRRRLCRERKVLIGERVQHVNRVKGLLFSQGISGYEPLRRDRREQLDTLQTGDGRRLPDHLKAQVRRELDRLELLLEQIKAVEAERDVLLAAQQVAAPAPTAMLLDIKGIGPEFAAILWSEGLFRHFDNRRQVASYAGLAPTPWQSGSVDREQGVSKTGNPRLRTALIQLAWLWLRHQPQSALTLWFEERVRRNGGRLKKTTIVALARKLLVALWKYVTAGVVIEGAVMKRT

SEQ ID NO: 435686 - protein, 410 aa, unidentified
MEVVYQRCAGIDIGKREVVACLFTPGDGRERRKKEIRSFATTTAQLLDMATWLQEQGCEVVAMESTGVFWKPLYNVLEPTMRCILVNPQQIKGLPGRKTDVKDSEWIADLLQHGLVKPSFVPQRPQRELRELVRYRSSLVGERAREINRLQKVLEGANVKLASVVSDILGVSGRAMLKALAGGDLSTEDMAHLAKGRLKHKIPQLQDALHGLMASHQRFMLSTILDHIENLDALIEAVGKEITERLDPHKEVLERLETIPGVGRRIAQVIAAEVGLDVAMFPTAQHLASWAGLCPGNKSSGGKRLSGHIRNGNPSLRGAMVEAAWAVARTDTYLGAQFRRLSRLKGAKRAIVAVAHSILVIVWHVLNKGEAYADLGPDYFAHLDDDRALKAMVRRLEGMGYDVTPKTTAA

SEQ ID NO: 435687 - protein, 350 aa, unidentified
MERYIGLDVHAASTTFAVIGESGRRLGTHVVETNGHALVEQLKTIPGKRHVCLEEGAQSAWIYEILTPHAEEVVVAMVPETRGQKSDEKDAFGLAEQLRTGALTKRVFKEVGEFGTLRELGRMHTMIVQDVVRVQNRIKALLRSRGVAASGKSVYSEEGRKDPIAKLPDASRGAATTLYAQYDAVEAIRRRAEKDLVTEAHRHAMSRVLESCPGLGPIRVAQLMPIVVSPARFRTKRQFWSYCGLGIVMRSSSDWIRKKDGGWARAEVQQTRGLNMNHNHTLKYIFKGAATTVISQLETEPLHQDYQRLITAGTKPNLAKLTIARKLAAIALSMWKSKEKYDSTKYRKQK

SEQ ID NO: 435688 - protein, 408 aa, unidentified
MERYHLGVDWADKFHQIWVSDGQGQKITEKKVGETVEELAEFGRWLDDSRAKGSELWAAIEKPQGRIVDFLLDHGVVVYPVNPKAVDRARDRFRMSSSKSDSFDAYVLAEFLRTDHGHLRPLEPSSQQAQELKMLSRDKHRLVRQKTRLLNQIRVTLKEYYPRPLEVFSDLESKTALDFLKQYPTPQALSELSRRKWNRFAKREHYLGEDRCQEFWEKLCQPQLTVPQHVIRVKAQLLLVLLVQLEALSEAIGTYKEKIKSFFASMPAAELVKTLPGAKTGTIVATLWAEIGDTKSRWESFRHLQAEAGMVPVTKASGKSRVVHFRFSCNKLMRHAAYWLAFVSLNRCEWANHYYRDQRARGHNHHQALRALGAKWLKIIFVMWRDHKPYDENYHLANITRQKMRQAA

SEQ ID NO: 435689 - protein, 386 aa, unidentified
MSQSSNILLRAINYDHTLVLAIELSNKSWVLAAQVPGLPRTKAQRTIEPNKTALLAAIDGYRARAAALGYSVERVITTYEAGWSGFWLARWLVAQGIEVHVVQPSSVPVDRRMRRAKSDGIDAELLLRTLLAWLRGEPRVCSMVPIPDEADEDARRCVRERTELLSDRVGLTNRIGAVLATLGVGDYNPLRQSRRRRLTELRTGLGEPIPPNALTKIERLLARLELVLAQIAELERKRDEVAAADAPDRAGKMIQQLTSLRGIGVQSATVLVREAFVRNFSNGKALGSYAGLTSTPYSSGGIDREQGIGKAGNRRLRTVMVELAWLWQRYQPGAAQVAWFRDRVGSTGRRIRKVMVVALARKLLIALWRFVIDGVMPEGAVMKPSI

SEQ ID NO: 435690 - protein, 267 aa, unidentified
MMATANETRRCSGLVAGIDVAKARLDATAGGAGVCSFANDAEGIAALLEWLAVRNVGLVVDEPTGGYEEPLVQSLRRAGVPVHLAHPNRVRAFAQASGQWAKTDRLDAQALSRYGEVFLSAQTPQTAPDGEEQDRERVQALLRRRRQLVDQRVQERNRLVRARNPAVRASAQRHIDWLDQEIAALDREYRESLESSGELARRAELYRSVPGIGELTAATLVADLPELGRGEGKGLCSLVGLAPWSKDSGRQRRSLGVYEVAAVGGAG

SEQ ID NO: 435691 - protein, 341 aa, unidentified
MKIIGCDFHPSYQQIAMVDTETGELWEGRLEHEQGEARRFYQALQGQAVRVGIEAVGNSQWFEQMLAEMGHELWIGDAAEIRRLVGRKQKTDRRDAQHILDLMVDGRFPRLWVPSQQIRDVRQLLRHRQKLVEIRTQVKNQLQHLALNQGVRRKRRLWSVQGRAVLEQLPLQGWTARRRSDLLAILDRLQEQVGELDGAVRAEAEQRPQVRLLMTHPGVGPVVGLAYVLTLGPITRFPRGKQVASYLGLIPSEHSSGGHQSFGPISKQGNTLMRTLLVEAAQTAARFDEELRRAYGRLKAKNHSAPAKVMVARKLAVRMYWMLRENKSYTELYTRRPVARM

SEQ ID NO: 435692 - protein, 353 aa, unidentified
MNQELRRVIGGVDSHADNHQAAALDERGRLLGSKSFAVSAAGYRELQAWLASFGLIDRVGVESTGSYAAGLTRHLLAEGVRVLEVNQPHAHSRRRRGKTDAIDAELAARHALSLASAVTPKQSSGIVESIRQLRVARGSAVKSRSAAIVQLGDLVRTAPSELREQLAIRSTVKGKAALCRRLRPDSDRLSEPANAAKLALRSLAGRIAGLDEEIAELDRQLAPLVATAAPRTTALLGISTGHAGQLLITAGQNIDRLHSEAAFAALCGASPIPIASGKRGRYRLNPGGDRQANRALHMIAVCRLRHCPKTRAYAHRRSSEGKTKKEIIRCLKRYIARQTYATLREDLRSLAIA

SEQ ID NO: 435693 - protein, 371 aa, unidentified
MKQQTKSSNITVGLDLGDRRHRFCALDERGEVVEQDSICNDRVSLRKLAGRYHGALGVMEAGTHSPWISRFLEALGWRVVVSNPRKVRAIYQHERKSDQRDALMLARIGRMDLALLYPVRHGTAEAQQDLLRIKLRDSLVRARVAVINSVRFTLKSLGYTVRNPSSERFHKVVMEEVPESVREMITPSVQALAELTARIKMLELEINTLAQLKYPQSAQLQQIPGVGPITALYFVLKIEDPNRFAHVRDVGAYAGLCPRRDQSGQSDPQLRISKRGDAYLRRLLVSAAHYILGPFGPQSALRAYGLMLAADGTARAKKRATVAVARKLAVLLLSLWKSQQPYQPFPGACLNGKQEDRRSGTIALHRMEATD

SEQ ID NO: 435694 - protein, 381 aa, unidentified
MSRRRGPGPSSVLLTPDHAGNVVGVDPHKRSLSATVVDPRGGLLAGEHFRVSGDGHRALEAWARQFGPIARWGVEGASSWGRHTAVFLARRGYDVRDVCANRTPRSDRARQRGKSDTLDSERIARETLAHPLLPRAFKRAGQDSGLDESHELLALRHNQRRSILASRQHLVNEAENMLCELPLELREQLPDSKAVRPRLAALADRNRRRRYDRPTALRLRLLDEYRARIAKLDADEKAVCHELSALVRASGSTLDRLCGLSTRSVAELLIEVGDPRRFTEGGFARFNASAPLAASTAEGPGEPVRHRYNPGGNRRINRILHVMAITQLRCEPRAQAIYSNARANGHTKKEARRILKRHLSDVIYRRMIRDLAAHAQPLLAA

SEQ ID NO: 435695 - protein, 430 aa, unidentified
MGLIVPTAMHPERDNQPMPYEWFVGIDWGSQRHQVCVLDRDRRRVGERAIDHDGASLAQLAAWLWTVSAGQPQRVAVAIEVPRGAMVEGLLERGFHVFALHPKQLDRFRDRHSVAGAKDDRRDAFVLADAVRTDQPSFRRLQLDAPQLLRLRELSRAEETLLEDFRRSANRLQDQLHRFYPQMLQLCSAADASWLWDLIDLAPTPAHAALLSEEHVQRVLKAHRIRRVTAQEVLACLQAPALPVAPGAAEAAQAHCGFLLPCLRVLAEQLQACSQQVSALLHTLAEEPGDGEGPSDVAIVLSLPGVGRKMTAWLFAEAAQPLAERDYQVLRTHGGVAPVTKQSGKRRVVVMRRGCNPRLRHALYHMARVAMQRDAHFRRVYAALRAKGQRHGQALRNVGDRLLRILMAMLHNRTCYDASRIRREPVVQRG

SEQ ID NO: 435696 - protein, 415 aa, unidentified
MSYMIAGIDVHKRVLMVAVADASLSSDDMEFHCRQFGTTQKELQHLAAWLQQCGAREAVMESTAQYWRPVWLALEGLFTLYLAQAWSNRAPKGRKTDFKDAQRLVRRHAVRELTLSFVPEAQQRQVRTLTRRRVQLVHDRVRLQNQLEALLEEMRIKLSSLVTDLLGVSARRILTALSQGVSDPEALAELGDARLQCTREQLRDALPGPIPELSRQLLVLLLEQLTLLDRQIERLFQLAASAMQEWQAAIGRLMEIPGIQMLVAQQIVAEAGPDAAAFPSAAQFTSWIGLCPGTNESAGENHSSRCPKGNRYLRRSLCQAAQAAARTKNSRFQALFRRLLPRLGFAKAIWAVARHIAIVVWLVLHNAVRYQERGGLSTPQAIKRRIQYLLKSLREAGYTVEIRSPLTAPSVQSGA

SEQ ID NO: 435697 - protein, 349 aa, unidentified
MTIVEDRPVITGGVDTHADLHVAAALDPLGGLLGVQEFPASANGYARLLDWLGGFGAVALVGIEGTGSYGAGLARHLADAGVRVVEVDRADRQDRHRQGKSDPLDAVSAARAAQSGRASGAPRGRDGAVEAIRALMVAKRSARAERTQAINQARALIVTGPDELRARFAGHRPAQLVEAIAALRPRPGDVPGYATRLALRELGRRARFLDAQLERLDELIVPLVTTRAPGLLSLHGVGPDTAALLLIAAGDHPERLRSESSWAHLCGVAPVPASSGKVSRHRLNRGGDRQANHALWRIVITRLGSRPGHPATRAYAERRTKEGLSKKEIIRCLKRYVAREVYHQLRGGA

SEQ ID NO: 435698 - protein, 355 aa, unidentified
MNSVRYVGLDVHRDTISAAVLDQSGRLIQQSILATRAAAILDFIGGIRGTLHVTFEEGTHSAWLYDLLSRRVARLVVCNPRKNALMKSGNKSDAIDARKLADLLRSNMLSSVYHGEKSGLEVQHLARSYALLTEDTTRVMARIKAVFRGRAIACAGKKLYGKKHRDEYLVELGTGALRRRAELLYQELEAVQQLRRQAKRDMIVECRKYPETKLLTSVPFLGPVRAAVLIGRVQTPHRFRTKRQFWAYCGLALEMRDSGEYRMVDGQVERRKRPAQIRGLNWNHNHELKNLFKAAATTASFSSGVFREFYLGLLKKNMQPEMARLTLARKIAAIALKIWKKGEAFDAEQVKLQAA

SEQ ID NO: 435699 - protein, 338 aa, unidentified
MKDIKVIGIDLAKNVFQVHGADSEGKCVLRKRLTREKLIEFMSNLTPCLVGIEACTGAHHWARLFEKMGHTVKMMAPQFVKPYVKSNKNDRNDAGGITEAVTRPDMKFVPIKKVEQQDVLLLHRARELVVKQRTAQANQIRGYLAEYGVVMPQGIAHLRKLPSTLETNVDKLTVKAIALFTELYQQFVMFDEQVKKYQKQIELEAQQDVMCREIMKIEGIGPLTASAVVATIGDAKVFKNGRELSAWLGLVPKQHSSGNKIRLSGISKRGDRYVRKLLIHGARSEVKVCEKKTDRKSSWVADKKQRCGYNKAAVALANKNARIIWAIMATGECYRQAA

SEQ ID NO: 435700 - protein, 386 aa, unidentified
MQKLNDLSRCLTPLEADGTLIAVIEMSLSSWLVAGIVPGVERQPLKKLEVDESALLKLLNRWREEAKKAGHRIERIAVAFEAGRDGFWLARWLRARDIEAHIIHASSVAVSREHRRAKTDRLDTELLRRAFLGWLRGERDHCKMVAIPTIKDEDAKRPNRERESLVGEQSRIVNRMKAALVRLGIRGFNPKLKKAVDRLDSLRTPEGEPIPPNTLAELRRDMARRRLVSDQIRQIEDTRLERLKQAPSDGPHAMVRLLARVIGVGIETADMLVQEVLSRNMRDRRAIARYAGLTGSPDESGRKRREKGLTRSGNARVRRGMIELAWRFLRFQKDSVLAHWFRTRTENARGTRKTMIVAVARKLLIALWRLVREGVVPDGVVLRPVS

SEQ ID NO: 435701 - protein, 482 aa, unidentified
MARTKKSTYERLMSGPLNRQQRRELARRLKTEDPGLEIVNRNVAGIDVGNESHFVAVAPSRDTQPVREFGSWTADLERMAAWLKACEVETVVMQSTGVYWIALYDVLETRGFKVCLVNARDTKNLPGRKTDVQESQWLLKLHTYGLLRDSFRPPDEIRALRSLWRLRDRHVKEAARAVQHMQKSMISMNLQLSNALSDISGVSGQAIIRAILKGECDARKLAKLCDRRVKASEEEVARSLEGNWREDMLFERKQAVAAYDFIQVQIAECDQRLLKLLAGLPAREAQTAAIPAAAAVIAKPRKKKKSPAKNAPRLDLETELARICGVDLTSIDGIDIMTAQTIVAELGTDYSRWKDEAHFAAWLGLTPSRDISGGKVVRQQSRKVKNRVATALRTAAQTLLRSDSYLGARYRFLRTRLGAPKAIKAMARYLACLVYRLFTHGQAWVDRGATQFEGRRQQRELAALQNKAAANGFKLVSLNNPT

SEQ ID NO: 435702 - protein, 450 aa, unidentified
MSNKKNISKGLPVINNNAAGIDIGSTFHVVAIPPERCDSPIQTFQAFTTDLHRMAKWLLEMDINTVAMESTGVYWVAVYEILESHGLDVILANARETHSVPGRKTDVNDAQWIQRLHACGLLRASFRPSRDIAALRCYLRTRERMLDYAAAHIQHMQKALTYMNIQLHHVVSDVTGVTGMRIVRAIVSGEHNPGTLSKLRDNRCHSSVKTIKAALNGNYQPEHLFALKQALILYDTYQRQVHECDIEIEQMLIDLSQDKIMPSLPLPKPSHRTKQPNQLDFDVRALLYKLTGTDLTQIHGIGPYLGLRMVSECGTDLSRWPTVKHFTSWLTLSPGSKISGGKTLSSHSRKSNNRIVAHLRLAATTVGRTQTALGAFYRRLSARIGKAKAVTATARKIAILFYNAMRYGINYQDPGADHYEQQYRQRVLKNIQRTAAGLGFEVIKTNKCVS

SEQ ID NO: 435703 - protein, 383 aa, unidentified
MKSVCGLDVHKDSVYLCILSEFGELIEKVFGVLTYQLEEMRDLMLHHHVIEVSMESTSVYWIPIWRVLSPHFKLNLANPYFIKQLPGRKSDVKDAQWIAECTMKELIRGSFVPPETIQQLRQCDRRIFDLNEEIVRKLSKLDAVLQRCNIRLSNYVSNVDSKSYKAVVRAISQGITAPEELVRLIHGRIINHHGIDVITASLKGVVSLAEIDMISQLRDELDMAEAHKEKCQARMLEICKREFPEELKRLQTIPGIKESAATSLIAEIGTDMNKFETANHLASWSGLKPRNDESNKKIKSRSITHRNVYLRKAIIECAWAASRTKDSFFSWFLYHQTQVRKKNKMKVLVAVARKMLIAVWHVLHDNTNYIDFTTDRKTSPTRG

SEQ ID NO: 435704 - protein, 342 aa, unidentified
MEYYVGLDVSLKQTSICVVDQTGSVVRESVVDSDPEAISVYVRSKAPDAVRIGLETGPTSTWLWTELKQLGLPVICIDARHAKAVLRMQINKSDRNDAIGIARIMQTGWFKEVHVKDLDSHSVRALLASRALLVKIKRDLENHVRGLLKNLGLVIGRAKFNVFAVRAEELIEGRPELIAVIRPLLEARNAVGQQVSELDRKVMKLARHDAQVRRFMTVPGIGPITALAFKATIDDPARFARSRSVGAYVGLTSRRYASGEVDWSGRISKCGDAMLRSYLFEAAGVLLTRVPKWSAVKAWGVRLAKRNGLRKAKVAVARKLAVILHRMWIDGTEFNWSKEIAA

SEQ ID NO: 435705 - protein, 427 aa, unidentified
MAYRVAAIDVHKKMLAIVVADVAGEGEYQFERRKFGATPDQLHLLAQWLVQQEVEEVVMESTAQYWKPVWGALERFWKPERQKREGAPKMSGTLHLCQAKSNRGPRGRKNDFGDGERMIKRLVAQELVLSFVPDPEQRLWRTVTRRKCQLTRDKVRFQNQLESLLEQAHIKLSSWVSDLLGLSARRMLKALAEGETDPAALAALADSRLRATPEQLRDALGACTQLHGVYRRLLKMALEELKMMEEQIEQLDREALGLLQQHQDTVKRVAEVPGFGVDSAVQMIAEVGAEAAKFDSEKALSSWVGVCPGDEESAGESQSTRSPKGNRNMRRLLNQAAHAAIKVKGSIFDVTFRRLLPRLGYKQAIWAIAHRLCRLLWMILHKGVRYEERGPAVSAKSKRTRTARMIRELQKLGYHVEGAPLPAGNPA

SEQ ID NO: 435706 - protein, 344 aa, unidentified
MNKLRKYVGVDIASETFCAAIGQSNEGSWEIKVKATSFKNHYDSFSQFLNWLKDHGVEKRSSILCMEATGVYGEALAYTLVGNGYQVVVEAPLKVKKAFYPTGHKNDRVDSQQIAEYAYRFSDRIQLWQPKTVVIEQLKVLLTLREQLVTQKTSHHNANRALKRKVVRTPLAEQVHEAAIEQLEKHIQEVDQEIKRLIDEDPSSKELYRLFNSIPGIGPTLTPFLIVMVETAPEPYNPKTLAAYIGICPYEDSSGSSRHKQDTSRHFGPSAIRRLLHLAAMSVRQHCPLFERYFQRKVAEGKPKQLVLNNIANKLLRIVCAIARTRTPYIPGFRSVHPSLLSMN

SEQ ID NO: 435707 - protein, 346 aa, unidentified
MSYSTTVGVDLAKNVIQISVVSSRGKELSNRSLTRKKFAEFLGKQKPSRVAFESCASAHYWARAAQRHGHEARIIPAKAVAPFRQGHKTDSNDALAVAEAARRPNIKEAPMKTVEQQGLQAIHRSRELLIQECTALSNHLRGLLMEFGIVIPKGFASLLKAVPEILEDGDNELPDLYRPTLHRMHSRLLELREDIEAMTKEVDRLAKAHPICSKLMALEGIGPIGALLLYATMGSGAAFSGSREFAAYLGLAPKQYSSGGKTNIVGLSKKIGNSRLRSVLILGARAYTYRLKEPKSSKDKWLKAHIERNGECRAAIALANKNVRTAWAMVTQGTEYQRRVQLEMAA

SEQ ID NO: 435708 - protein, 345 aa, unidentified
MIIGCDFHPSWQQVSWLDSETGESGERKLVHASGDAQRFYQQRTAPMLIGMEATGNSQWFIELAQDLGHEIWIGDAAQIRASYVRKQKTDKRDAAHMLKLLLEGRFPCLWTPDREQRDLRQLVLHRHKLVLIRSRVKNELQHLAMNKGVQRKHRLWSQAGQKLLRELPLKPWAACRREDLLGLLAMLDQQIGKLDGAVQQAAEQHPQARLLMTQPGVGPNTALAYVLTIGEVSRFPRGKQVASYLGLIPREESSGGRQKLGAITKQGNRLLRSLLVEAAQVTVRYDPGFRREYLHRCHSKPKAVAKVAAARKLAVRLYWMLRTQKPYPEVVRIESSSRVALVGAS

SEQ ID NO: 435709 - protein, 285 aa, unidentified
MHQATIIGIDLAKRTFQAHGTTSDGKVAFRKKLSRSQLLAFLTQQPRCVVAMEACATAHEWGRAARELGHEVRLIPPAYVKPFVKRQKNDAADAEAIAEAASRPTMRFVAVKSEAQQARAMVFRTRDLLIRQRTQLINALRGHLAEHGIVAPQGPANLKLLADAISDMKISLVPIVRDLGLLYLEQIKGLGEKIAALDRTLRRESKSATTACLQTMPGVGPITAVAIEAFAPAMTTFKRGRDFAAWVGLVPIQHSTGGKQRLGRTSKMGQRDIRRLLITGAMTIA

SEQ ID NO: 435710 - protein, 318 aa, unidentified
MTTFVGVDVASKKFDVAVLDKENKIKNKVFTNSLQGFNDFFDWLNTYGTVHVCMEATGAYSTPLATFLFESSIAVSVENPARIHAFAQTELTRNKTDKSDARMIARYCRLYQPPLWQPEPLHIRQLLALVNRLDALKEMLRMEQNRMLVANEIIMSSLQKNTESLLSQIHEIQQNIKEHINANKELKKSKALLTSIPGVGDILSCTFLAYVGDISKFSNNKKLVAWVGLNPMQQESGLWKGHSKISKRGNIELRKALYMPAVAALTHNPILIALKNRLAGRGKAGKSIVCAGMKKLLQLMYGVLKSGEYFNAKIQLVK

SEQ ID NO: 435711 - protein, 357 aa, unidentified
MTTATTTATTCAILALDLGKYKSVACAYDPDDGEARFQTLTTGRAELARLIDRERPAVVVIEACTLAGWVHDLCVERGVVCKVANTASEAWKFKHAKRKTDKDDALRLAQLEALGQLPTVTIPPKPTREWRALIAYRQGLVGRRVAAQNRIRAILLSQGLPAPCGHRAWTATGLEGIELFARPLSDCGADELWRGLLLLALTELRQARDLIDQAEVRLDKMARASEAVRILETVPGVGPRTAEAVAAHLHDPRRFRSGKQVSAYAGLVPRQYQSGECDRRGRITKRGPGLLRKLLVECAWAMLRYNAWARAVYLRLSRGKARKKQAIVALARRLLVRLWAMLRDRAPWRAGPEATPA

SEQ ID NO: 435712 - protein, 357 aa, unidentified
MLNSTPVCSITVGLDVGDKRTHFCVVDGERKVIARGSFPTTRAQLEAALVPYAGAKVILEAGAQSPWMSRALASLGYAVQVADPRRVQLISKDPRKTDRRDAEMLAKMGAAMPDLLGSVRHRGEQAQAHLSIVRTRDLLVRMRGMAVQQARGICKAFGVRLPTTSTGAFAHRVQELVPELLRPAIAPVLETITELTRRIRAFEKGLAQIAKEHYPEVRHLQQVDGVGPTISVAFVLSLEDPQRFRSSRRVGSWLGLCPRIQASGDSNPQLRISKAGDPRLRRLLVQGANRLLGRFGADCDLRRYGLQLASRGGKTAKKRATVAVARKLAVLLHHLWMTGADYEPLRNANRRAVPVTA

SEQ ID NO: 435713 - protein, 359 aa, unidentified
MVVLGIDTHKRTHTVVAIDDRGRKIGERTVGTTSTDHLELVAWADRFNPEGAGEQLWAVEDCRHLSRRLERDLLAAGRRLVRVHPKLMAHARDAARSYGKSDPIDALAVARAALREPDLPTARLDGPCRDVRLLVDHRDDLVAERTRIINRLRWHLHELDPTLLLPSRTLHRSKNLQAIAGRLRELEGRANAVVIRLARDLLRRCANLSDDITALEKELTALIEPLAPTLLAIVGCAHLTAAKILGETAGVDRFRSKDTYARYTGTAPLPVWTGNRERHRLSRVGNRQLNVSLHRIAITQAHHHQPARNLLDRRRATGDTKAESIRALKRRLSDVVYQALRADLHHLHAAGLPALPKAI

SEQ ID NO: 435714 - protein, 357 aa, unidentified
MVERNVAGVDTHRDNHSIVILDPVGRVLKQFTIAATVDGYQHAIDEAAPFGEVIWGIEGTGSYGRGLADALLKAGTVVYEVPGTLTKRHRKHASRRGKSDVQDAQAIAEVVLRDADRLPKCEQFDEHEAIRLLYDRRDRCVRARTEAINRLRAGALRLTLRDLPIDLTTGTALDRYEVMLLALSSVSYTTDVLVEEMKETIADVRRLNATISKLERQLGPFVKRLVPGLLSLRGISTVVAAGILGHAGNLRNCRDANAFAMRAGVAPVPCSSGRSQTVRLNMGGDRQLNRCLHVVATTQMRTEGHAGHAYYERKRSEGKAHRSALRALKRQLATIVFLRLRDATPAASQKISRPLAA

SEQ ID NO: 435715 - protein, 367 aa, unidentified
MKKVSTAAAKQSKNISQQKLTIGLDLGDRNSWYCVVDEAGQIQLEQRVRTTAKALQEVFGTMPRSRIALEIGTHSPWISRMLSDLGHEVIVANARKVRLIGESRKKDDRLDAQTLARLARIDPELLYPVKHRSVQAQGDLMMIRARAGLVRARTGLVNSARGLAKSYGERLRGCNVRNMNPEKAEGLSPELQAALQPLLTALESLSERIAEYNERIEQLAQQSYPQIVLLKQVKGVGTLIALTYMLTLEDPHRFQKSRDVGCYLGLQPGRRNSGQREPQMHISKEGDPYLRTLLVQGAQHILGPFGIDCDLRRWGLRLAERGGKSGKKRAIVATARKLAVLLHHLWVSGEAYEPLHNRSRTTVAAAA

SEQ ID NO: 435716 - protein, 430 aa, unidentified
MVCRRGRFIVEETPEDAVPVERVAALDIGKAEVVCCVRVPSPSGSGRRVQEVRTFTTMTRSLQAMSDWLAGLGVTRIVMEATSDYWKPPFYLLEPAGFEEWLVNPRQVKHLPGRPKTDKIDSVWLCKLAERGMLRPSFVPPAPIRLLRDVTRYRVDLVGERNREKNRVEKLLEDAQIKLSVVASDIFGISGREMMAALIAGQRDPKILAQMARSRMRAKLRDLEEAFVGRFSAHHAFLLTRMLAHIDALNADIAAVEDRIEELVAPFAQAVAVLDDIPGIGITTAHAIIAEIGVDMSRFPTAGHLASWAKFAPSVKESAGKNKGNGSTGHGNRYLARALGEAAAGAARTNTFLGERYRRIARRRGKKKAIVAAGRSILVCAWHLLNTDDAVFVDLGPDYYDNRGGTQRAVRNHIRGLQALGYQVTLQAAA

SEQ ID NO: 435717 - protein, 409 aa, unidentified
MNTWTSLLWKQQCKKTDRGGNQLYFVGIDISKFKHDCAIVDELGDVITPSWSFQNDREGFSLLKELLDALDGEKKIGLEATGHYGQNLKLFLENNDFSFMEFNPLLINRFVHSKSLRKTKTDSIDALMIAQYLMTVEYKPYPPSFYTLEKLKSLTRFRDSLIRQRSKQLVELTNILDKVFPEFKSFFKGRFSATALYILSHYASPEKISNMNSKSYEPLRRLSRGRFSMVDFVELKTLARNTVGSTSDYLLQEMEITIDIYNQLQSKVEEIELQIHNCVLGLTPPMLTIPGIGVASAAVILSEFGDLSKFNSPSKLLSFAGMEPGYFQSGTSESTGKMVKHGSSHLRYAMMNCAQTVINNEPTFAAYYAKKRAEGKEHRVALTHVAKKLLRVIYTLQTKELSYNPDLVR

SEQ ID NO: 435718 - protein, 348 aa, unidentified
MDHIIRIGMDTSKHVFQLHGVNAAEEPVLRRKLRRNDMVVFFERLAPTIIAIEAAGASHHWARLLRSFGHEVKLIAPQLVKPYVKRGKNDAADAEALCEAMSRPTMRFVPVKTAERQAALMLLGLRDRLVRNRTQLANAIRGYAAEFGLAAAKGIAHLAPLLARIQSDESLPGLARELFAAHAKEYAQLQAQIDEVEGKLMAWHKTNPGSQRLAQIPGIGPIGAAMLIMKTPAPETFRSGRQFAAWIGLTPKDHSTAGKVRLGVITRAGDEGLRSALVVGATAVIRHLRNGKGRSMLSAWVEQLLKRKPPKLAAVALANKLARIAWKLMVTGETYAAKPRPVALAGIA

SEQ ID NO: 435719 - protein, 425 aa, unidentified
MEKYTKQVAQVQVQSALSELAREAGPRAKRKERQKQAKEQEQQRRQKRLKELRELETFGCDLGDKTSQVFAIRPDGSQWKPPEPIATTREGFAKFFEGRERAHVVIEVGAHSRWVKKVLESLGHEVTVANARQLPLLTKSDKKSDQRDAELLAKMGRSELDLIEPVTHREDQAQADLAVPKARDLLVRQRTAVINQVRGMIKATGCRVPGCAAEAFHRKASKHVPRELQSAVQPLLVVLEVLDEEIRDYDKQIEKLAKTRYPDVERVSQICGVGVLTGLVFILTLADKRRFPSSRDVGAYIGLVPQKSQSGEKDPQLPITKAGDELLRRLLVQDANYILGPLCRQDSDLQRWGRKLCARGGKSAYKRAKVALARKLGVVMHRLWTTGEDYEPLGYHQKTQKARKEARAAQAAAQPTEKPVEQKLQ

SEQ ID NO: 435720 - protein, 337 aa, unidentified
MSSIIAFDIAKAELVGARMRKNGTVAERYTIENTPEAINQFLDTLPTKNITIGSEATAEYHLHLARACVARNIPFKLINPLITKQFTRATIRKRKTDRDDAEIIGKCLLQGAGRELTAHDLMPVTRILRTACDLSQMARTMHLKHKRFVEHFPETTAVQVALAEAEDALRRAARLLHSHGAGLVSHTERTLAQSIVGIGDELAPVIVSEIGDPTRFKGGKQLVAYAGLDPKVKQSGKSLARNTKITKRGSPYLRRALFIAASVAQRYDPELKAYYEKKRAEGKHYSPATIANARHLAHRVLAVLKRGTPYVKREPACAGRLSTAQTLFLIRGLKYTK

SEQ ID NO: 435721 - protein, 354 aa, unidentified
MPRHRSDLEAVATIGVDIGKNTFHLVGLGRNGAIVLHQKLSRRQVEARLANMPPCLIGMEACVGAHHLSRQLKALGHDARLMPARYVRPYSKGQKNDFRDAEAIAEAVLRPTMKFVAIKTIEQLDLQALHRVRERLVCQRTSVINQIRAFLLERGIAVRPGLRALRTEIPIILAMTDKLSPRMIHVIEALCADWRHLDARIETVSEEIKTLSEQDDGAKRLMTVPGIGPIISTATVAAIGKGDMFSKGRDFGAWLGLVPRQMSTGGRTILGPISKRGNRHLRMLFVQAARAVLLRPQSWVKHGLKSWIEAAARRLNRFKLAIALANKIARIVWGVLHGGRNFEVRTLRPALQAA

SEQ ID NO: 435722 - protein, 382 aa, unidentified
MITMTRPNESTAPACGLLLAFELGQRSWKLGFTVGMGQRPRIRQIPAGAVGALATEIDRAKTRLGLSSDAPVMSCYEAGRDGFWLHRYLVAHGVTNYVVDSSSIEVNRRARRAKTDRLDLAGLLNLLARYVLGDRRAWRVVRVPTVAEEDARHLSRTLEALTQDRTRLMSRLKSLLATQGMSLSIDAQFLHRLEAAHLWDGTPLPPGLQERLTRTWTQLQEVDGQIRNIKALRLTRPEHLTPATSRALAQLMTMRAIGPIGASVLATEIFGWRRIRNRRELGALVGLVPAPYQSGETDYDQGITRAGNAHVRRVIVQLAWGWIRHQPDSALTHWYQQRFGGSGKRLRKIGIVALARKLLIALWRYLETGVVPDGARLKPMEV

SEQ ID NO: 435723 - protein, 399 aa, unidentified
MLAVGIDISKSKSVAAILNQDGSMHTSPFEFHHTQPELDAFIKYILNSNQSATILMENTGHYHYPVLKAFREAGLPVCMVNAYQIKKFGDMDLRKAKTDKKDAVRIARYALEKSYSLVPYTSMEQKYEDLRFLARQYNQRMLTLKTNKVFLLNLLDETMPGITNILPLTTRTPETSLSVLFINRFKSYDRIKKMGKSRFLDAFEKIARKSRNRQTKTYGLAIYEAALRNITTRGENEYTLAAQDQCLELVCESQKAADSIILKMKTLAETLPEYAVLRSMAGVGDRLGPLILAEIGDIRRFHSGKALNAYAGNDAPPYQSGIFESHNRHISKRGNAALRKYCFEVMQALKLTRPQDDPVYLFLLKKEQEGKPYNVAKMAGVNKFLRIYYARAMETLKQQ

SEQ ID NO: 435724 - protein, 311 aa, unidentified
MTEHTIGVDISKSHLDVFDAERRKAKRFENSISGFRAFEKWLGKAHIARVVYEPTGPYHRNFDERFCDKLPLVKVNPLQARRFAEACGTRAKTDALDARGLARMGGTLELEPDMPVAKVTRILKDLQVARAALIKERTRLNNRAHVQTNPVLKRQTKARLALVEKQLCELDREIDALIKADKTSARRRQIVQSIPGLGSVASAAILTYLPEIGTLDRRQVGSLAGVVPYNRDSGQWRGKSFISGGRKPLRDALYMPALVAMRCNPDLKAKYEALRAAGKPAKVAIVAIMRKLVETANALVKADRIWVPKTS

SEQ ID NO: 435725 - protein, 409 aa, unidentified
MRIIGLDIHRAFAEAVAWDDGKLKRLGRVDMRRPLLEAFAKKLSKEDVVVIEATGNASSVAAVIAPHVKKVVIANPMQVRIIAHAKIKTDTIDASVLAQLYASGFLPEVWIPDEPTQALRRQVTRRNQIVRQRSRLKNIIQSILHSHLIPSCPHADLCGASGRAWLFHQVLPEDERLAVERHLREFDRLGDDLKVIERDLARSALGDEGVKRLMTIPGVDMVVALAIVAAIGDVGRFEQSQKLVSYLGLNPSVRQSGPGPAYHGRITKQGRGHARGMLVEAAWAAARAPGPLHAFFLRVRARRGQHVAAVATARKLAVLIWHLLSKGESYVWARPALHARKLRDLELKAGYKAARDQRGVAHAYNIKSHRDQERRWVEQAETAHARFVSGWNPRGPKRVRTGAATEVRR

SEQ ID NO: 435726 - protein, 317 aa, unidentified
METSSTFVGIDVSKAQLDVSVRPLGVKNSFTNDQAGIASLIEWLRPIKPTLIVLEATGKLERELARSLANEEFPFYIANPRQVRDFARASGQLAKTDSIDASLLAHFAEVIRPKIRDLPDQASWELKDLIARRRQIIAMIVIENNRLDRASKAIAPGIVKVVRFLNKQLETLDHDLDRMIERNSVWQAHQQILQSTPGIGPVTSRTLIAEMPELGTLDRKQIAALAGVAPFTCDSGTLKGKRFIWGGRAAVRSALCMAALVASRRNVVIKTFYTKLRNAGKPPKVALVACMRKLLTILNSMIKHKTLWSDNFSTQTA

SEQ ID NO: 435727 - protein, 355 aa, unidentified
MAMLSFGGIDVSKDHLDITVLPDEQCSSVSNDAAGWAELIEQLRGSSITAIGVEASGGYERGVVRALLAAGMSVRQINPFKLRQFAKASGILAKNDRLDARMIASFVAIMPTRPAQRQTPMIEQLAAMLTVRRQLSDHKVATENASRLLEGAMLQRLSRRRAAGLAAEIDLLDQRLVEIVTADAALAHRFRLLTSMPGVGAVLACTLIALLPELGQVSRKQVAALVGLAPYDFDSGKLKGRRCIWGGRARVRHVLYMAALSATAAGTSRALRATWRCSQGFIAAAEAVQLKADLKGSTAAATGNAHAMRWSSPMEKLCSSHAYMKARRQPCSSFRWKRIRQQRQRSESLPGSITA

SEQ ID NO: 435728 - protein, 428 aa, unidentified
MTTPKSIPSYDLLVSLDRSDRSAALCLLEVSTGVILTESVLDLAPEALEAWWRKLRAAHPTARIAVAFEQPAPNLLAFFAPRQAAAIYALNPSATWAYRQSLTVSRARNDRSDAHDQALFVRNHLRELKPWQPPSLAVSHLERLTLSRRKQVDARTALTNQLQAALKRYFPQALDLLHEDIWRPMNLEFLRKWPSVRKLQTVPLSRLRAFYNKHNSRSQARWTERTGLIARLVPLADAGPADELEIETLVDQIEVLNESILKHDRVIAEHFAKEGKEAERVAALPGAGPILAPRLYVALARHVPNCESPEALAAAVGIAPVTDQSGKMRKVYRRLRCDNHTRQTFVEWAKESWKHSVWAEAFVRQRQQKGQGFYGILRALAYKWLRILWKCWREGTAYDEAKYLDCLRQKGSPLAPKTPPAQPSLQAT

SEQ ID NO: 435729 - protein, 366 aa, unidentified
MKKISTVQVLGNEILKEQKQTIGVDLGDRWSFYCVLDEAGKIILEQKVATTPEAMKQTFGKMPRSLIALETGTHSPWASRLLTELGHEVLVAHAQKVELITKSNRKDDRHDARTLARLARIDPELLGPVRHRSAKAQIHLTVIRARAELVSARTALVNAARGLVKSYGQRLPKCGTQQVNRELAVGLHTELREVLEPLLKEIESLNEHIKEYDERMEKIAQEVYPEVSLLKQVKGVGTQIALTYILTIEDPYRFEKSREVGCFLGLKPGRRNSGNSEPQKKISKEGDRYLRTMMVQGAHYILGPFGEDSDLRRWGLKLAERGGKNAKKRAVVAVARKLAVLLHRLWVGGEVYEPLRNSQKAMRAVA

SEQ ID NO: 435730 - protein, 432 aa, unidentified
MERLREKAAGIDIGSRKVFVSIEGDEVKSFFTFTSDFEKLREYLVENAIETVAMEATGIYWGILYDMLEEAGIDVWLVDGAQTKQVPGRKTDVKDCQWIQQLHSYGLLNRCFVAESDIKELRIYQRLREDHIRSASMHINHMQKALIEMNIRLPEVLDQVHGVSGLAIIQAILNGERDKEKLLRLCDKRIIKNKSDEILKSLNGRYTKSGLFALLQAFNSYQFYQNQIKQCDDMLEEVIKRMSRGKPDQTSKARRKPIRHNKPEIDNLGTEMLKIFDGRDATSLSGITDYTWMQLLSETGTDLSKWETEKHFTSWLGLAPGQHKSGKMVRNKRKKGRPKAGQIFRNIAQSLLTSKRIALGAFGRRLRSRKGSPIAIKAVARKLAILYWRIMVKGMDYVEKGIQSYEEQLIKQKQRSLTRLAKELNMQVVGNV

SEQ ID NO: 435731 - protein, 400 aa, unidentified
MGNIVYVGIDTGKETFSACALNMEGTELITPTKYGHGREEYARFLGEAKTVASVTGGRLLFGIESTGIYHLPLYDYLTKRNYQVRVFNGLELCGMRKSRIRKTKTDPIDARLIAGYLLMCFDKDKRSPVPFELRNLREFCRIRERLLRKSTRIKNQLTRDLDLVFPGFTGVFSDILGKKCLMLLEQACTPTELMNMPKEVLRKYVPEKKVVELKKISACAIPASNFNKSIVFEIGSLCRQAKCILEEMLRVEKEIDSEYSQIKTPLQSVPCIGPGTGPVILAEIGDIKNFDHPKRIVGFAGIDPVIKESGKSRKECRISKRGSASLRCALYQAAFAGITCNPVLKVYYNKKRSEGKTHRDAVVCCARKLCYIIYSVLSNNRVFYVPSHIIASNAQMNKQD

SEQ ID NO: 435732 - protein, 431 aa, unidentified
MISRAYRATRVNDVNWEQIARGKEGLGVTLGVDVGKFDVLVVCRWADGRFERPWRIKNPSEIATLVALVRQVKAEREPVVAMESSGTYGDALRQALGDNGIDVRRVNGKAAHDYAEVFDGVPSQHDGKDAAVVAELAALGKAKPWAYQAADPWEEELTYWVEEMVAQRQMVALWQGRLEGLLARHWPGASQVLKLSSGTLLRILKRYGGPQALAADAGAAEQLARWGRSLLSPAKIEELLAGARSSVGVRMGRWQRRQIQEYAERALDARQRSDRAQRRLSRLAAGHPVLQAQGKVVGVPTACVLWVSTGDPRKFDSAAAYRKAMGLNLVERSSGAYQGTLRISKRGSARARQWLYFAAMRLVQKCGVRPWYEAKKARDEGDARRVLVAVMRKLAVALYHVGVRDEAFQPRRLFGRIGRSARRSGASKQRA

SEQ ID NO: 435733 - protein, 482 aa, unidentified
MKSKPQEKNKKATNHPTQQHWHEMNRKQRREMMRKMQSEDLSLEVIHPDAAGIDIGNESHYAAVPPSRDSQPVRRFECTTAELKAMAAWLQQCGIRTVAMQSTGVYWVAVFDILEQTGFEVFLVNARDTKNLPGRKSDVQESQWLMKLHTYGLLRNSFRPSPEIRVMRTYWRQRNDLVQSASRHILRIQKALTQMNLQLANVLTDISGATGQAIINAILAGERNPHKLAEFRDPRVKASEEQIARSLEGNWQPDLLFLMKQEQDGYEFCQRQIAECDRQLSQYLREREDRSQSAPLPEEKRKGRLKKKRGNKPRFDLRKGLFRMTGTDLTRIDGIDVMTATTVISEAGYDMSKWQTENHFVSWLRLCPDNRISGGKVIGKGRLPTNNPISIALKVAATTLRQSKTYLGAQFRRLRTRLGAPIAIKAMAAKLARLVYRMLRYGMKYVDQGAEFYEAQHRQVQIKQLKWKAAKLGFQIVQAPAA

SEQ ID NO: 435734 - protein, 346 aa, unidentified
MKECNVIAIDLAKDIFQACIMNTHGKIIFNQEFTRKKLITWLPQQAVSLVAMESCGGSSYWARFALSLGHEVMVIPPRQVKPFRTGQKTDSNDAIAIAVASQAANIKPARYLNVEQQGLQSIDKMREMLDKQKLQISNQIRGLLLEFGIVIAKTASSFKSRIPEILEDAENELSIPLREPLTQMWILYAQIEENVEQFDRQLKQLAQQDDSCQRLMKLEGVGPITAVRLKLQLGHKEHFQNGRQASACIGLTPKQYSSGGKTKLGSISKISCDQSLRSALFMGAWSVVTKLKKRPAKTQKEHWLKTLILRRGVNCASIALANKTVRTAYALLKHGTDYEPIPIAMN

SEQ ID NO: 435735 - protein, 409 aa, unidentified
MERQLERCCGLDVHKETVAACVRIGGRSGKAEQHVQTFGTTVGELLVLRDWLAAHGVTHVAMESTGVYWKPVFYTLENDFTCLLVNAAHIKQVPGRKTDVKDCVWIAQLLEHGLLRGSFVPPAPIRDLRDLTRYRKALIHDRTRVANRLHKALEEAGIKLASVASDILGVSGRAMLTALVQGTTDPAVLADLARGCLRRKLPALRQALDSRFRPHHAFVLGQLLAHLDYIDEAIATLSTEIERVMAPFAEPLRRLDTIPGINQRTAEVILAEVGPDMRVFPSARHLASWAALCPGHHESAGKHKSGKTRKGNRWLRTALIEAAAGASRAKNSALQARFRRVLRHRGPKKAVVAVAHALLRMVYHVLADGTVYREAGADYYDRHHSQRVTRRALQALERQGYRVTLEPAA

SEQ ID NO: 435736 - protein, 343 aa, unidentified
MKLFLGLDVSKDSFTAALAHEHTEPRQWRRLPAATFALSPEGIEELLAFIASHEGEAQQASSSSVACLCAEATGIYSLRLHELLREHAPHLPHLSIINPAWAKGTARSLGLREKTDREDARMLAMHALLHRPQPTVPRAPEHDALRELFALREVLQEEITATENRLSSVRTAPARKHLSLLLGQVEKRLEAVDREIDACLLRAPALKHDFDLLLTVAGIGRITALAILSTFGDLRSWSRQQIVAYAGLHPRSHQSGTSVNVRPRLIKGGAALLRKKLYMAAVAFVRRGPGKLSHQRLQQRGKAKMCSIGAHMRKLLLIARAVVISATPYDAERLERQQATLHT

SEQ ID NO: 435737 - protein, 387 aa, unidentified
MQTKTPATTVETTVRDHSNTLFASLELSKAKWLVTANSPGEEKFSKHVVEGGDGASLLVLLARLKAKAEQRHGVAVKVVVIQEAGLDGFWIHRLLVQSGIESYVVEAASIAVARRHRRAKTDAIDGVSLLRTLMAWARGERRVCSMVRPPSPEEEDQRRLSRERGTLLKERIQHTNRIKGLLSGQGIRGYDPLKPDRLDRLDALRTGDGRPLPDRLKAEIRRELARIDVVATQLATVERARDALVRTQTTEPTNPSALLIKLKGVGIEFASLVWLEGLFRSFTNRRQVAAYAGLAPSPWQSGGTNRDQGISKAGNHRLRHVMIELAWFWLRHQPDSALSRWFHNRVGTAKGRVRRIAIVALARKLLVALWRYVTQGIVPEGATLKAA

SEQ ID NO: 435738 - protein, 296 aa, unidentified
MLIIGCDFHPRYQQIAMMDTETGELVERRLEHENGEARAFYASLPKPVLVGMEAPGYAQWFERMLAEFGHELWIGHASEIRAGVVRKQKTDARDAQHLLRLLLEKRFPRIWIPSPAERDARQLLRHRYKLVCFRVSVKNQLHGLAMSQGVCRKKKLFTAQGREELEKLSLGPWGSCRRQELLGMLDQLNPVIDELDRALRQEAESRADAARLMIHPGVGPVTALAFVLTLGPVARLRRSKQVVSYLGLNPKERSSGDKQHTYAISKQGRRNAVELARGRAVNFSESRREPHKFGQR

SEQ ID NO: 435739 - protein, 347 aa, unidentified
MTYGRQHRFYCGVDLHARTLFAHVLDAKGNTVFEQDLAANPDDFLRAIKPYRKDLVVGCECMFAWYWLADLCEDESIPFALGHALAMKHIHQGKSKSDKIDAGKLAAMLRGGLFPLAYAYPRAKRQTRDLLRRRSFFARQRSQLIAHVVNTNSQFNLPALTKKLTYAANRSEEIAGRFTDPSTQLMVRADLALIDDYDERIAELELYLTRTAKVDDPVTFGFLRTVPGIGPILGLTLLYEIDAVARFPEVGNFLSYSRLVRCEHSSAGKVKGSGSKKIGNAHLKWAFSEAACLMIRSVPAVKSWMQRQETKRGKRKALSVLEAKIGRAVYHLWRKQQAFDLKRFLKG

SEQ ID NO: 435740 - protein, 326 aa, unidentified
MTRYIGLDGHSKTSTFVTMNEKGKLLEQKQVVTCERELLEFVREQKGKKKLVFEESHLSQWLYTLLLPEVDELVVCHPGYLAKRQGPKNDLRDAIHVANELRCGHVIPVFHDPGRMMELRSLMSGYQDLVQDIVRSKNRYKSLFRSEAIQVPGVGVYRSRDRIGELSRRTDRFIAEHLFDRIQYLEQQKKVYSERFRQNMKKHPDIKRLAGLPGIDTVRAHVIATIICSPARFLNKHKLWSYSMLVKHDQQSDGKSYGKVKIHGRSELKEAFLGAAESILQTTDTSLKKYYQDQIDKGIGHRNAKIALARKVAAICLAVLKSNETV

SEQ ID NO: 435741 - protein, 299 aa, unidentified
MQAVTTIGLDIAKSVFQVHGVDAAGQVLIRRQLKRRVVLAFFQKLPVCLVGIEACASSHYWSRELQALGHSVRLMPPAYVKPYVKRQKNDMADAEAICEAVARANMRFVPTKTPEQQSCLMLHRTRHLFIRQQTAVINSIRAHLAEFGIVAPVGRKGVTELLHIVADPSDKRVPEVARVCLAALGNQLLSLKEQIVEFDRMIMVWHRSNETSKRLHYIPGVGPMLATALVASVADPRTFRSGRNFSAWIGLVPKQHSSGGKDRLGSISKQGDRYLRSLFVAGALAVIRYAKIHGTKHRP

SEQ ID NO: 435742 - protein, 385 aa, unidentified
MQKLNDLSQSRIILKQDNTLIAVIEMSLSSWLVAGIVPGVERQPLKKLAVDESALLKLLYRWREEAEKKGRRIERIAVAFETGRDGFWLARWLRARGTEAHVIHASSVAVSREHRRAKTDRLDTELLKRVFLGWLRGERDHCKMVAIPTIKDEDAKRPHRERESLVREQTRIVNRMKAALIRLGIRSFNPKLKKAAERLEDLRTPEGEPIPPNTLAELRRDMERRHLIRDQIRQIEDARLQRIERAPSDRPHAMVRLLARVIGIGIETADMLVQEVLSRTMRDRRAVARYAGLTGAPDESGAKRREKGLARSGNHRVRRGMIQLAWRFLMFQKDSALAQWFRARTENTRGTRKTMIVALARKLLIALWRLVTTGEVPAGVVMRAA

SEQ ID NO: 435743 - protein, 331 aa, unidentified
MKFEEVIGIDVSKLTLDACIHSQQIFTQVPNTKKGYSKLLTWATKSSGCSMDNVLFCFEHTGMYSYALACYMSEKQMNYIMVPGLEIKRSLGIQRGKNDRVDAMRIAQYAYRRREEVTTYQLPEKSINRIRQLLSLREKLVKQCAGYEASLKDMSDFIESSENKVLVSAQRNMIKALAKEIDNVEKEIDRVLEDSPEIMSNYKLITSITGVGRQTALYLIVVTNNFLSFDDHRKLASYAGVAPFANTSGTSIKGRTKVSPLANRKLKSLLSACAISAIRHDPEMKIYFNRRTEKGKHKMNSINAVRNKLLARVFAVIRRGTPYVPLCQYAA

SEQ ID NO: 435744 - protein, 409 aa, unidentified
MSLFCGIDWATEHHDVAIIDDDGRVVARARVANDAAGFATLLRLLAEAGDSAAHPIPVAIETDRGLWVGALRETGRVIYPINPLAASRYRSRHSVSGAKSDATDAVLLANIIRTDAAAHRPLPADTELAQAIRVLARAQQDAVWARGQVSNQIRDLLKEFYPAALVAFADLDGGLARPDARTILAAAPTPTQAAKLTSPRLRRLLIKAGRQRYLDRDVERLRAIFTGTYLHQPPVVEDAMGIHLTALLGQFDAACAAADALAEAAITHFERHPDAEIITSFPGLGNLAGARVLAEIGDDRSRFTDARGLKAFAGSAPITRASGKKTVVLHRHIKNRRLNAVGPIWALASLRASPGARRHFDTRRAAGDWNHQAQRHLFNKFLGQLHHCLHTGQLYDEHRAFPPPLPLAA

SEQ ID NO: 435745 - protein, 430 aa, unidentified
MKKKNHSNEKLEAITFKTLIVGVDIAKHNQWARFVDCRGIEHNKALKFENNRNGFNAILTRIYEICKNEDFNMVIVGMEPTGHYWKAFANFMLKQAKITVVLVNPYHTKKAKELDDNSQTKSDKKDALTIARLVKDGRYFETYLPHDVYAELRGLTTTRHSMNKRKKSIINTITAVLDEYFPEFVSVFKHPFKGKASMHLLKVCPIPKFILELGEDGVLDEIKKAVKKTVGRKKAAQLVEAAKDSVGVDYGEYAACFKIQQLMEELELITIQLDALEAEMAEALKKTEISEYLLSIDGIGVVSLAACLGELGNPLRFEDARQMSRLAGYNLIEDSSGKNKSGTCISKRGRKNLRSVLYQISLTMVTNNKEMRQLYDYLKTREKNPLKKKQALVVISKKVLTLIFTLSKKKEYYQPELVFGEYRKSQLLAA

SEQ ID NO: 435746 - protein, 358 aa, unidentified
MEVLYLSCAGLDVHAKTVVACLIKDGKKEVRTFSSMTDDLLLMSDWLISAGCTVVAMESTGVYWKPVFNLLEGLMEVLLVNAQHVKAVPGRKTDVKDCEWLCDLLRHGLLKGSFIPPLEIRELRELTRYRQTLVKEEASVANRIQRLIESGNIKLGQVASNVLGVSGRVMLKRLASGESDAEKLAKLAKGSLKQKESELRRALQGRLTSAQRFVLRELLSRVDELDAAIARVNEEIKQEVEESENPFLSEAIELVQTIPGVGLRAAEIIVSEIGVDMRSFPSDRHLSSWAGMCPGNHESAGKRKSGKSTKGNVYLRTALVQAAWAATHTKDTYLSAQFADWSNTKENSVRWSQSVTAF

SEQ ID NO: 435747 - protein, 343 aa, unidentified
MQITRVGVDLAKNVFQLHGVDRHGQAVWKRRLSRARWLQTLLDQVAPDGEIGMEACAGAHHWARELEARGYTVRLIPPQFVKPYVKSNKNDAHDAAAICEAMSRPGMRFVTVKSVAQQDIQATHRMRSELMSQRTAKANQIRGLVAEYGLVAPQTLQALRAAIPDWLEDAENGLTDHFRALLHGLWRDLTALDERLRELDRAIEQLANRHEVTRRLQQLRGVGPLVATALVATVGDGSQYHQGRQMAASIGLTPRQCSSGDKHRLLGITKRGDVYLRTLLVHGARAVVSQAKHRDDRLSRWVTGIAQRRHPNVAAVALANKTARMAWAMLRTGTDYDPDFAVS

SEQ ID NO: 435748 - protein, 392 aa, unidentified
METKLFAGIDVGKEKHRIVMKDENYRIIESFWFETNYQGFNKLLQRIPAQAVIGLEATNEYDKPLVNFLRNNGYEVYVFNPRKTKNFARINHIATKTDKVDAKTLADFMVMGFYKTQKQFTDKYPEIRQLTRARLKLIHDQNKYKLRVLNRLYVIFPEYESMFSENFGVTFTKLLEDYTSPENFSLLDTDELGKEMISLSKGILREDRAEKIIETAKKSVGVKNGVEGYIEEIKINLKYIQNLEKDVKRLDRKVREKMMSIDQKITTINGIGISLAATMMAEIGEIENFKGRRALFNFTGIAPTVKETGKYKRQTNHMSKHGSTYLRTAIWQAAISCINHNKVFRAYFIKKHIIDKKPKMTAVGAVCRKLTYHIYRIMKYDVPFDIEKAAYV

SEQ ID NO: 435749 - protein, 337 aa, unidentified
MGLYCGIDLHSNNHMLTVIDEADRRVYERRLANDLAITKAALEPYRAELVAVAVESTFNWYWLVDGLMEAGFAVRLVNTAAVRQYEGLKHTDDKHDAFWLAHLMRLGILPTGYIYPKSERGLRDLARQRMRLVQHRSSLITSVQNQVWRSLAVRLRSETIKGRGKQPWPEISDPDLALSVKAGRAAIDTLTVQIERLEKLILKRVDRSPQFRMLKTVTGIGPILAMTIALEVGDIGRFAGVGEFASYCRCVDSQRLSNGKKKGEANRKCGNRYLAWAFMEAAHFAIRNLPAAKRFYERKRRQRHALLAVKALAHKLARACFYVLRDQVPFAPERLFV

SEQ ID NO: 435750 - protein, 304 aa, unidentified
MFGIGIDVSGENLDVAVHEQAFRQFKNNKRGWASLIRWLQRWPAKQVVLEASGGYEQKALDALHEAGLPMVRINPGRGRSFASATGRQAKTDRIDAMVLAHMADALKLTRYVPPAAWQRRLGELCQRRRHLVQMRVSEHQRMRAFSEPCLISMLNQHLDEIQKSIKQLDATIAALLAEQDGWRDFAKLKGAGPVLMATLACELPELGKLSGKAISALVGVAPMNRESGTWKGRRSITGGRAVVREALYMAALTAKRYEPRLKEFFESLVNQGKPGKVALVAVMRKMLVILNARKREAEAQMASA

SEQ ID NO: 435751 - protein, 366 aa, unidentified
MKKIGTVQTFSNEILKEQKLTVGLDLGDRCSFYCVLDEAGKIILEQKVATTPEAMKQTFGKIPRSLIALETGTHSPWVSRLLTELGHEVIVAHAQKVELITQSNRKDDRHDARTLARRARIDPELWGPVRHRSAQVQIHLTVIRARAELVSARTALVNAARGLVKSFGPRLPKCGTYQVNQKLAEGVSAELRDVLVPLLREVESRSERIKEYEERMEKIATEVYPEVSLLKQVKGVGTQIALTSILTIEDRYRFEKSREVGCFLGLKPGRRNSGKSQPQKKISKEGDRYLRTMMVQGAHYILGPLGEDSDLRRWGWKLAERGGKNAKKRAVVAVARKLAVLLHRLWVSGEVYEPLRNSQKAMRAAA

SEQ ID NO: 435752 - protein, 443 aa, unidentified
MAKTLYLGIDVAMAENVCCPLLEDGTEARRRFTVPNNLPGAEQLVKEILTLMDRYHLDHLLVGLESTNLYWWHLSCFLNSCSQLAHFHHSVYAFNPRLVRGFKKALPKTGRSDINDAYAVAERLRFGRLPAPFMPNELYQPLQRLTRFRCHLARQITREKNYFLTFLFLKFSEYQNLDPLSNTFGAASKAVLTDYLTVDEIVAAPLEELVSLLMKEGKNHFPAPEAIAAAIKKAARDSYRPHPSLKEPLNLILSATLENIRTFSQQVKKLDAAIEREERKFPNPLNSIPGLGPVFAAGILAEIQDVHRFPDQAATAKFSGLFWRTNESGSFQAEETSLDKSGNDYLRYYLIEGANSVRMHTVEYGRYYRTKYNESTKHKHKRAVVLTARKLVRMVDAMLRHNQLYIPQPLNPIEEVIPVLTRSRPAKQHHYRLPGSPVPTLSN

SEQ ID NO: 435753 - protein, 320 aa, unidentified
MRNTVGLDISKLTFDASAIVGNAEYSAKFDNDSKGLDQFSDRLKSLGCQNLHICMEATGNYYEEVADYFAQYYSVYVVNPLKISKYAESRFKRTKTDKQDAKLIAQYCRSAKESELVKRQKPTDEQYRLLRMTAAYAQIKSECAAMKNRHHAAKDEEAAKAYAEIIKAMNEQLEVLKEKIKEQTEKPNCKEGVKRLETIPAIGRMTAAVLFHHLTSSKFETSNKFAAFAGLSPQQKESGTSVRGKGKLTKFGNRKLRAVLFMLTMVAYRIRAFPDFIKRLEEKKKPKKVIIAALMRKLAVIAYHVHKKGGDYDPSRYKSA

SEQ ID NO: 435754 - protein, 347 aa, unidentified
MKVLKQVSGIDVSQKELVVTLGRLKEDLTIELYANRVFKNNTKGIDSSVKWIEKMTTKEAPVQYVMEATGVYHQKLAYYLDERGFEVSVVMPNKISNYMRTLENKTITDKTSSEAITQFGLERKLDHWHRPDLVYKKLQQLTRERDQIVSERVMVKNMLHAEKSEAEPNPNSVKRIKARIQFLSKQELQIKKEIDQCVESNGKLKEDIKNICTIPGVGQLTAVVVLAETNGFNLIRNKKQLTSYAGLDVKEKLSGTSVKGKPRISKKGNTAIRKAMHLPSLSAIKHDERFKGLFARLVSRHGVKMKAVVAVQRKLLELIYLLYKNNTVYQKDYEESKRVQLQVVNTL

SEQ ID NO: 435755 - protein, 410 aa, unidentified
MELLHPHCAGLDLHKETVVACVRHMADGKVTTDVKSFQTTTHELMELSDWLSSQGVTHIAMEATGVYWKPVWHILSDGEFALILANAAHVRNVPGRKTDVNDAVWLADLMAHGLIRASFVPDEPTQQMRDLLRTRKQFVRERSSHTQRIQKTLEDANIKLDSVITDIVGLSGRRMIEALIGGETDPEALAALAHGRIRATKAELEAALRGRVTAHHRFMLRIHLNHLDALNTTIADIDKEVDANVEPFRVAIEMLTTIPGVSSLAAEVMVSEIGIDMSRFKTEGHLISWAGLCPKNDESAGKRRSNRMKKGAPWLKTTLIQCAWAASRTKASYLQAQYLRIRSRRGPKKAIGAVAASILTAAYHMLKDGTLYQDLGASHFDNRDKGKQALRLVNRLQSLGFTVQITSMAA

SEQ ID NO: 435756 - protein, 559 aa, unidentified
METKVPRRLRVLVADDYPDVAKAVGRLLAVDCEVVGTVADGSALLEAAQRLQPDVVVLDLNLPKVHGLEVCRQITQLHPRMKVIVFTATDDPTVTERSLAFGATAFVSKLAHGDLLSAIRRLCVDESVAPRAGLEPATLVRRFECFTADLHRLADWLQQCGVTTVAMQSTGVYWIPLYEILDARGLEVYLVNARHTKNLPGRKPDVQESQWLLKLHTYGLLRNSFPPSADIRIVRTYWRQRGGHVQAVSTCIQRMQKVLTQMNVQLANVISDLSGWTGQRIVRAILAGERDPQTLAALSHPGIHATRDQIARSLEGTWQSDLLFVLQQEVTMYDAYLQRIAECDHALEHHLKTFANKAIPDAPSNAGPSSPVAPRQTRVKHRRKAGSHTPQFNLGHELHRISGVDLTRIDGIDVGVAQTVISEVGVDMTRWKTEAHFASWLGLCPDNRITGGKVIRKGTRHVINRAATALRLAATTLLRSHSYLGAQYRRLRARLGAPKAITAMAHKLARLVYRMLKWGHEYVDKGLQYYEERHRDQQVQLLKKRAAKLGLQIVDPDAA

SEQ ID NO: 435757 - protein, 447 aa, unidentified
MASRNRARSQSTLSLTHPNAAGIDIGSASHFVAVPPDRDDQPVREFKSFTAELARLADWLDACGVDTVAMESTGVYWIPLFELLERRGFTVLLVNARHVKNVSGRKSDVLDCQWLQQLMSFGLLRGAFRPADAVCVLRALTRQRATTLRTQARCVQHMQKALVQMNIQLANVIADVVGETGQKILRAIVAGERDGQRLAALKNTRIHASADEIAASLLGNWRAEHLFALKQALAAFDFCGTQLAECDAEIQAQLQALQRCEGEPAKGKKRGRARNAPRFDLRGQLFRMCGVDLTRIDGVDVTTALVVVSEVGTDMSRFASDKHFASWLGLCPGTKITGGKVVSGKTQRVANRAAQALRLAAAALRASKSALGAYYRRLCARMDKGKAVTAAAHKLARLIYAMLSKGQEYTDAGQDYFEERYRERVLRNLRQRAQQLGMQIVPVAQTA

SEQ ID NO: 435758 - protein, 423 aa, unidentified
MKNSAAKKRKQVPSGYLVVGVDPHKKKHATVFMTQDFTTHSRLKFDNSREGFEMVLERARAEMLRTGCRGVIFAIETGAHHWRNLAYFLDERGIPLRLINQFTLKRRREGKDLNHRKNDYRDSEVAAQLLCTGEFNTARLPQGVYAELRGAYGSYRRIVKERTRIVNLVKSLLDGLFPEFTQVFKNPCGQTAATVLCTCAVPKAIAGMTELEFIDAIKAAGQGRVMKGKLKALHHAAKASIGIEAGARSVSSEIAFLIEKFRLLAQQRRHMNEIIERLVHETREGKYLLSIPGLNYISAAGMLAELGSFSSYQNAKQLIKMAGSNPTESESGGKRHSHTPISKQGRPVLRHCAWNAVIPMLRFNADFRDWAKKLRERPAGANPLSGREVMVAGVNKLLRLAFALVKKQAFYRIPAPQPVEIPI

SEQ ID NO: 435759 - protein, 318 aa, unidentified
MSAAENSKVSVGIDVSKNKLDIAVHESGAVWSSNNDSRDCPALAIKLKQLQATSIVLEATGGCETLVTAILAAAGLPVIVVNPRQVRDFAKATGQLAKTDRLDCCVLAHFAAAINPPVRPVKTEETQHLEALLGRRRQIVEMLTAEKNRLASNHDRAVSKDLQAHIAWLERRLKSSDDELQRVLKNSPAWRERDQLLRSVPGVGPVLALTLLAQLPELGQLNRREIAKLVGVAPFNWDSGLWRGSRHIWGGRAEVRSTLFMATLSAIRFNPTIKPFYQRLIGAGKAPKVAIVACMRKLLTILNVMLKTQTSWRTVHSS

SEQ ID NO: 435760 - protein, 404 aa, unidentified
MSVHVAPVTSSTIVVAVDVGKTSAMLSVTDCARKRVFGPVEFSMTRSGLVATVHRVEAVVVASAQVKVGVEAAGHYHRPVLDYGWPTGWEVLELNPAHVAEQRRVVGRRRIKTDAIDLEAITDLLLAGRGQLITEREVLIGELSAWAGQRSRRVATRSATKNQLLAQLDRAFPGLTLALPDVLGTKIGRLITAEFADPARLCALGVSRLIRFAAARDIQLRRAVAERLVTAAREALPTRDGVVARRVLAADLGLLADLDTQIETAERELAALLPASPYATLTSVPGWGVVRVSNYAAALGDPDRWPGPRQIYRASGLSPMQYESAGKRRDGTISREGSVALRRALIDLGLGLWLTEPAAKAYAAGLKSRGKPGGIIGCALAHRATRIAFAMVRDHTSYDPSRWA

SEQ ID NO: 435761 - protein, 312 aa, unidentified
MDTACIGIDVSKATLDVYVLSSKEHIRVPNNVKGFKKIVSRIKAIKPSKVVMESTGGYEALCAAHLVAYGIPLAVVNPRQVRDFARALGILAKTDTIDARILALFAEKISPQCRPLSSEEERTLKELVVRRRQLVKMRTMESNRRGRIGSRDVSKSITSVLKSIDRQIDLIEREINTRIKASPVWRDKDDILQSIPGIGPKTTYTMLACLPELGCLNRHQIASLAGLAPMNRDSGMFRGRRTIVGGRSIVRTSLYMPTRNAVRNNPVIKQLYNRLVAAGKPDKAAITACMRKLLTIMNAILRDNRPWCPLSP

SEQ ID NO: 435762 - protein, 341 aa, unidentified
MSDLALVGIDLGKHTFHLHGQDKPGREVFRKKCSRQQMMRLFSNLPACTVVMEACAGAHFVARELIAMGHQSKLISPQFVKPFVKGNKNDFVDAQAICEAASRPSMRFVSPKTEAQQTLSVLHRLRESLIRDRTKAVNQMHGFLLEFGISLPQGLTVMKRLTSILSEHELPVRLTVLLQRLHDHFVYLDGQIKELDKELACQLADDDLGSRLLGIPCVGPITASLLAVEMGDGQQYRCSRDFAASVGLVPRQYSTGGKANLLGISKRGDKNLRRLLVQCSRVYMQRLEYQKGPLADWVRSLLMRRHSNVVACALANKLARIAWAIAANHTEFEAGPSTMAA

SEQ ID NO: 435763 - protein, 343 aa, unidentified
MNQYIGLDVSLKDTAISIREDGKRIWRGKCPSDPKLLAQIIRKKAPRAQRVVFETGPLSTWFYHALTGEGLPAICIEARHAQKVLNETLNKTDANDADGLAQLAEAGFYKAVRVKSFDAMRARTLVAAREQLFYISTQLGNQIRGLMKTFGLIIPKAKGRVFDGDVRKLLDGNSELAKIILPLLEAWHDIRKRAADLSRQLLIAARASQAAKLLMTIPGVGAVTAVSYVTAIENPENFRTSRSVGAWLGLTTRRYQSGEVDYDGHISRRGDNRLRGLLYEAATVLLTRTSARTESRLKSWGLKLRERLGFKRAAVAVARKLAVIMHSMLRTGEVFNASAGATI

SEQ ID NO: 435764 - protein, 343 aa, unidentified
MKIIRVGVDLAKSVFQVHGVDRSEKVVWRKKLGRAEWLAALLEKIEPGCEIGMEACGGAHHWARQLQMRGYTVKLIAPQFVKPYVKSNKNDANDAEAICEAMSRPNMRFVAVKSVEQQDLQAIHRIRAELCSQRTAKGNQIRGLCAEYGLVAPREMIQLRAAVPCWIDELDNGLTIRFRRLLRGLWLDLLKLELRVKELDQEIEVAAATDPVATRLQQLRGVGPIIATAIVANVGDAKQFSSGRQMAASLGLTPRQNSSGGKERLLGITKRGDAHLRTLLIHGARAVLRTAASKDDRLSRWVAHIAQTRHHNIAAVALANKTARIAWAMMTKGTDYQPGLVAV

SEQ ID NO: 435765 - protein, 346 aa, unidentified
MMIIGCDFHPSWQQVSWLDTETGETGERKMVHASGDAKTFYQQLAAPALIGVEATGNSQWFIELVQDLGHEIWIGDAAQIRASYVRKEKTDKRDAAHILKLVVEGRFPRLWTPDREQRDLRQLVLHRHKLVMIRSRVKNELQHLSLNKGMQRKQKLWSQAGQKLLRELPLKPWAACRREDLLGLLAMLNQQIGKLDQAVQQAADQHPQAKLLMTQPGVGPNTALAYVLTIGDVSRFPRGKQVASYLGLIPREESSGGRQKLGAISKQGNRLLRSLLVEAAQIAVRFDPGFRKQYLHCCHQKPKGVAKVAAARKLAVRLYWMLRTQTAYPEIVRIESSPRVPLVGAS

SEQ ID NO: 435766 - protein, 425 aa, unidentified
MKITQTAQKIKINFAMDVSVDVHKDTLNCFFETEGKEYYDEFSNRNTVIEKKLKEYHEVAMRYGFKTLRVICEPTGQYQNKLFRTARKMGFLTCLVNTESVAKFRVIETNDTGKTDIKDPRVIRTLGQLNKTIKHRYLGQEYLVLRKLNRIYDEADEAVISLKGRINKLLVELFCDYSFKKDFLYAPSGMALIEKYGCNPYRIIREGFSAFCRRMKKAAPYIRRKTLQRLWDDAQSSVMNELPDEYIETLQMHLQQLIQDYIAQVERKEATAKRMVNILKQLRAKDPNIPAATKGVISDKNIARLLGETGPLNDFSNWRLVMRYSGLNIRMRQSGKYKGLNMITKRGRPLLRKILQQIVLPLVRKNWLYGPYYHRKKDVDKMPGNKAMTCVTRHFLKKFYGWYKSGEAFNQQRFFACETQYRKAA

SEQ ID NO: 435767 - protein, 414 aa, unidentified
MEDILECCCGLDVHKESIVACLMKGSIGEGLKPRSEIGEFGTQLKDLIALKEWLEENECHYVAMESTGIYWQPIYAVLEKSLVDDMHLLVVNARHMRNVPGKKTDMRDSEWIATLLRAGLLKGSFVPEHDIRDLRQFTRYRKALIRDITSQKNRIEKLLQSSGFRLSSFLSDIFGSSGLAIMHQLVQVGSISSQSLEGCLKGRARQKAAEILSSLNGTLSVPQRQLLAMQLAHLKDLQDNLQEVEDQIRDDFNKYERPIQLLDSIPGIDLTAAYAILAEISSNLSSFPTAQHICAWAGLAPGNNQSAGKKKKQRVTQGNNYLKTILCEVAWVIASHKELYLSGWYWRLKQRTGAKRAIVALARKLLVIIYTMIKTDSLYDEQKFFERKNATNQRHLKRMVNELTQLGYAVSLPA

SEQ ID NO: 435768 - protein, 271 aa, unidentified
MTFRPHALHLKAELFVKSSRVHVRDDGFTRCNFHLKFFIMVYRGIDISKSSFVAAYPSTNGNPTKTFPNTTAGMRELIGTLAVAEHHCVMEATSNYGCCCTCYIRTVLPSVLPPPPKKKEIKHFSRMMMPVTKTDEKDAYMIAMYGEKMNPPIYKMPSQATIRILTTEGFTYFDNAKQLSRFIGICPTYQQSRTSVNIREHINRNDDERLRSLLYIAFWTALRYNSRECYIRLKANEKPFKVALIAVTNKLVRPVLTITTINSIYRWICPG

SEQ ID NO: 435769 - protein, 344 aa, unidentified
MVYVGMDVSSKSFVVHAIDERKRLVWRGEVAATPSGLKRALREIGAGAKLVVFEAGNQMKWIARELGRCKEVTRHIVHPNEVKWISQSSGKTDKVDARKLAELARGDLLPRKVHVVEGHIRELRELVGARHTLQSKRVALLNTVRAYVKQEGHRLPEKFFQRRDWHQALGKLGVSAVTQQIIETFKTSIDALQQSEAALTRRLVAIKDERITQLESIPSIGALTARVVLGALDDARRFDNKKCAAKYGALTPSIYQSGEMVHLGRINRDGRQEVRRVLLQCAHTLARMKSGGARPLRAFYERVARRRGKKIAIVALARKLLTTAYGVLKSGTVYDPAKLVAQRA

SEQ ID NO: 435770 - protein, 392 aa, unidentified
MLYLGIDIAKNNHVASLLDDNAKPLFKAFSFSNTTDGANSLLDKLSAFVNITADVEIGMEATGHYWLSLYSFLIEHGYTVHVVNPIQTDGWRKGTEIRKRKTDVIDSVLIAELIRYGDFVETSLADEDTMSLRNLSRFRNYLISSISDLKRKVICVLDQVFPEYQTVFSDIFGKTSKELLTHFQTADDFENITADQLNKVLENVTLKGFLKNKITHISELAANSFGLKFCRDSFSLQLKLLIEQIKFIEAQVSDVEDEINVILDKINSPITTIPGIGSVTAAVILGEIGDISRFSNASKLAAYAGIDASVSQSGEYQSSSNKMSKRGSPYLRKALFNAALIAAFHDPVFSAFYQKKRNEGKHHLTAIGAVARKLCNTIFAVLKYNTPYKLQL

SEQ ID NO: 435771 - protein, 408 aa, unidentified
MNPLFVGIDVSSKNNVAYLMKPDGSKHSSFSVQNNLGGAKLLSERIVSALGSMQLERVVIGLEATSIYGDSLVYALREDGRLGRFQRKIHVLNPKQVRKFKEAYPDLPKNDWVDAFVIADHLRFGRINREVYMDDYRYKALQTLTRARFDVIQNLTREKQRFANYLFLKCSGMAQDKDIQNTSATTIALMEHFETVDDLANADLEELTAFITETGRGKFADPDATAKAVRAAAKGSYRLPKTVNDTVNQAMAVSIASMRALKGQVKVLDKAIEQQFEIIPNTLTSIPGIGKVYSAGIIAEIGDIHRFDSQASVAKYAGLVWNRSQSGDFEAEHSRMIKSGNRYLRYYLLEAANSVRRCDSEFRRYYDLKFKEVNKYQHKRALALTARKLVRLVFRLLKDNRLYIPPEG

SEQ ID NO: 435772 - protein, 333 aa, unidentified
MNFTHFVGIDVSKDTLDFAVVISNKVVFHQRVSNDKKGITQFLKELRKQTKAKLVDCLFCLEFTGIYNNPLLNALHSQTSIWVERAAHIKDSLGLCRGKTDKLDSKRIALFAYKNREDARLWAPPRQVISKLDRLTAQRARLTKAIKLLKTPLSNTEGFISKDDQKANLQACQQSLKALKSDLKATDKSIAEVIESDAELKHLFERVTSIKGISQTTAVEVIITSNEFKSITDPKKYACYAGVVPFEHSSGQRKGKAKVSQMANKKVKSLLHLAALSAIQHCQELKLYYERKVAAGKNKMLVINNVRNKLVLRIFACVRDDRNYDENYTHSLA

SEQ ID NO: 435773 - protein, 383 aa, unidentified
MEVLMYCCCGLDVHRDLIEACILRGEGLEPEIIRESFGTTKPELKRLTLWLSKNDCFSVAMESTGVYWKPIFETLELSSEYLEQIWVVNANHMRNLPGRKSDVRDAEWIATLLRHGLLEKSFVPPAPIRDLRECSRLHRSFVQERCRYVNRLEKFLQAHGFKFSSVMKDILSVSGRKLLNILRDTGSLTPLDVAENCRRLRRSPEEISAAVCGNLTVAEQRLLKQLLHKIDSCREDIDSILADLRLLSQQFQEQLAIIDSVPGFDEESSIEIIAEISAAPQEHFSSGEKLCHWAGVTPRNDESAGKMKSRKTLHGNPYVKSILCQAAWAAVKVRTSPFHDWFWSHQHRLGQKKAIIAVCRKLLMLIYLLLQTKQYYQPPQKIP

SEQ ID NO: 435774 - protein, 479 aa, unidentified
MNVKARRTKKQVNVENQAITLLSKEELDRKIEAIKKELRSYTWRDLETNGKFAKNDKLSFITDDMLIAGCDIGSETHYIRAIDVRGRELSRWAFEFSNTSEGFENAAWVLALAAKNDKKQIVLGLEPTGHYWFALAAWMISNGISVVQVNPYAVKQSKEIEDNSQLKDDRKDPKLIANLVKDGNYGMPYLPEKVYADMRRLSMFRDQLTEDRIRNINRLHRELKIYFPEYMDAFGKIGGAFTLEVLKVSAIPTDITALGAEGMKNIWHNAKLRGRGYSRANEIVSYAKKSVGLTDGTDAGREAVKWYAEQILRLDEQLAEIESALHEKCREIPYAENILAINGVGENILAGILAEMGDISRFDDVKEIQKLSGMGLVACSSGKHKGQTKISHRGRKRLRYWLFQAAKSAVSHADEFKQLHEYYTTRSNNPLKKMQSLVVIACKILRVIYTILKTGTTYDPQKLLKDMKHPAASQAPMAA

SEQ ID NO: 435775 - protein, 433 aa, unidentified
MASRTYSKIIAFRRARRDNFYKGRLVMEVVYRCCCGIDVHKKVIVACLVNGGEQELREFGTTTSEIKTLANWLTESGCEMIAMESTGVFWKPLYNLFELMDLDAMIVNAAHMKALPGRKTDVKDAEWIADLLRHGLLKASYIPNREQRELREITRYRKSLTEERCREVNRLQKILEGANIKLDSVVKDITGKSARKLLQRIIDDDIPDSDEVSKLVHGRMRPKLDQIVASIEGITTPLQRKLLAQIIDHIDDLNRRIGELDKLVQEYMAEYEAAIEAIDEIPGIARRSAEVILAEIGLDMGRFPSAAHLCSWAGVCPGNYQSAGRRKHGKTTKGNKALKTILTQCAKSAKTVKSSYFFAQYQRISARRGKNRATLAVAHSMLIAIYHILKNKTAFHDLGSDYYDSFNRDRKINSYLKRLKALGWEPDAIPSSA

SEQ ID NO: 435776 - protein, 372 aa, unidentified
MQQSSTLYVGMDVHKESIAVAYMAQDHGAEVVSLGTVGTRPCDIDKLIRQLQSKSPQLVFVYEAAPCGYGLYRYLMKKGYVCWVVAPSWIPKKAGDRVKTDRRDAMQLARLMRSGDLTPVSVPAVDDAAIRDLSRAREDTLRELQAAKLRLKAFLLRHAIRYTGRANWRPAHLRWLSAVVCPTPAQQIVFQEDVQTVTAQTARLQRLEQELHEQVHTWRLAPVVEALQALRGVQFTVAVTTVAELGALTRFDNPRQLMNYLGLTPSEYSRGGRRQQGGLTKTGNPHARRALVEGAWAYRYPAKGSRHLQRRLEKLPAAIQAISWKAQVRRCKRYRHLMATGKKAHQVVVAMARELRACMWAIAKQVAVRAKA

SEQ ID NO: 435777 - protein, 346 aa, unidentified
MGKLPTDLSCVTTVGLDLAKHIFFVHAIDAEGKIVVARELRRRDVAAFFASLPPSLVGIEACGSAHHWGRTLIAQGHDVRLMPPAYVKPYVKRQKNDAADAAAICEAVTRPSMRFVRVREIDNQAVLMRHKAREMLVGQRTQLLNGLRGHLAEIGVIAAQGAGHARALAALIREGHEEIPDSVRAALLPLVAQLDHLDAAIDDADAAIARLAKAEPVARRLMSIPGIGPLTASALVATVGDPSAFAGPREFAAFLGLVPRQHSSGGKPRLGRISKMGNQYLRKLLVVGAHAVLHHRARHSDPLRCWAEKLIATKPFKLVAVALANKLARMAFAIMTSDERYRGTPA

SEQ ID NO: 435778 - protein, 416 aa, unidentified
MDAIVERCAGLDVHLDTVVACVLYGKLDIKPKKEVKTFSTTTKGLLELLDFINQKECTHVAMESTGIYWKPVWNILESGAFDLIVANAKKIKNVPGRKTDVKDAEWIASLLRCGLIEKSFVPPEIIRDLRDLTRLRKELLGEVNRNKNRIHKVLQDANIKISSVLSDVFGETGKSILNQIIDNQCITEEFIYSLYEGRGKSKLKSTPMEMYEALNGKIRGHHVILLGMHNSNIVFLEKQINELEKEIDILLQKERDSLELLETIPGISKISASSIIAEIGTSMDVFKTEKHISSWAGLCPKNNESAGKKKRSGIKSGNNWLRSMLCECAWSATKKKDSRFKNKYWSMVPRMGRKKALIAIANMMLRLIYHLLKTKSTYKELEIQYFIDKDKRREDRIIKELKSKGYLVEKDSLQMA

SEQ ID NO: 435779 - protein, 408 aa, unidentified
MLFVGDDWAEDHHDVEIQDESGHRLAKARLSEGVAGMARLHGLVGEHLADLDDDAGTNAVAVGIESDRGPWVRALVAAGYHVFAVNPLQASRFRQRRSVSGAKSDAADAHSLADMVRTDRHQLRRVAGASELAEAIKVVARAHKTLIWERTRHVQRLRNALREFFPAALEAFDDLTSPDALELLSKAADPVAAARLTRAQIIAALRRARRRNVTARAEQIQDALRTEQLTQPPAITAAYAATVRSQVVLLVTLNTEIATMQGEVEAHFGQHPAAEIYLSQPGLGAILGARVLAEFGDDPTRYADAKARKNYAGTSPITRQSGKQKFVLARYVHNDRLLDALGRQAFTALTASPAAREYYDQLRARGKDHNAALRQLANRLVGILHGCLKTNSLYDEHTAWPQAHNAAA

SEQ ID NO: 435780 - protein, 368 aa, unidentified
MDKIITSFVGLDVHKDSIAVGIAPAGREPPRFVGMVAPQWAALSKALGRLGRVQELQIVYEAGPCGYTLARQLRSHGYACEVIAPAKIARSPGDRIKTDRRDALLLARAARAGDLVNVTIPDERDEALRDLVRARGDAVRARLKARQQLKALLLRHGHRYTGKTSWTAAHERYLAEVSFAHSAQDIAFVEYRSAVREAQERVERLTAALRAQLEHWRMRPVVAALMSLRGIDLIAAMTLVAEIGDFHRFARARELMGFLGLVPSEHSSGSKRRQGAITKTGNSHARRVLVEAAWNYRFPARVSPILQVRQEDQPRTVREIAWRAQLRLAQRFRHLSARKLTLNKVCVAIARELSAFVWDIARQVKPSV

SEQ ID NO: 435781 - protein, 401 aa, unidentified
MNAVGIDVSKGRSTVSIIRQFGEVVRAPFDVTHTAEDLKELAALIKSLPGETKVLMESTGNYHEPVARTLSAEGIFVSVVNAWLIKQYNVNHMRRAKTDKKDSLKLAAFCIDCWMELVEYRPEEDIRRDLKLLNRQYQLNIKTQTQVRLHLISQLELTFPGIRGQFTSPIRDSDGHEKWVDFVSAFPHRDCVAKLSLSIFKTKYRSFCKKKGYQYTDAKAAQIHSFSRNIISSLTLDDTVSFVIRNLTSQLTMFMENSFEIRRRMTELAVQLPEYDTVIGLFGVGKTTATQLMAEIGDPRRFHSAKAITAYAGLDTEPDDSGQVVNKGERHITKRGPAFLRKTLFLVMTTYLEMKPMDEPVYQFLDKKRSEGKMYYVYMTAAANKFLRIYYARVRDALTEH

SEQ ID NO: 435782 - protein, 350 aa, unidentified
MVDVAIDLHKRHSQVGTLDEWGEVKQQRIEHDGDAGGMAAFFQGLEPGSRIAIEATGNWWWVVDLAEAHGHEVVLSNPKKTRAIADACLKNDQVDTEQLLHLLRLGYLPRVWIPPAPLRYGKEVLRYRALLVGLRTGLKNHLGAMLTKRNLKGPGKSLWSKPGQAYLEKLELNAEAAEIRDQTLALRKTLDACIGHWDQALNRRVKDDARVRQLKTAPGVGAQTAFAYRVFVGDVHRFRNGKQVAKYFGLVPRERSSGEHRHLGHITKEGDGLMRALLIEAALRASRKPGPLREFYRRMVRPKGKAKARVAVARKLAVILYQMWKKNLTYWEFLQREAQFAGGPVGSAGH

SEQ ID NO: 435783 - protein, 475 aa, unidentified
MRTIGIDLSTKGEHKAVVVDERGHFVSPILHFRTDPASLMRLLEVAQEGNPDRQLQAVMEPTGMAWFPVAVFLIRQDVVVYLVNSQQVADLRKYYKKHAKSDRVDARVLAKLPIIDEEKLHRLELSGPEALACQRGCKQLDRLMKQHTACKNRLIALDRFAWPGLEDSVFSDPFSPAAFWFRQNYYDPLCVHQASAEKIRQEWLESGLDPQDSGDWAAFLVQLAEKTLSIYGEEGTYLDYELLQAEAIREQEYLAFVDKMHHRLLLKTVRPLYRQLHPSRNLETIPGVGQDGAAVYVSFIGNPHRFASLRQLRGWSGMVPNSKQSSESQASGLKITQAGPSLIKKFAFLDAEAARHCDPQIAAIYYEQMVRRGKHHIQAVCTCSAHILDRVQVVLREDRPYELQDVDGIPISKEQARKIIAERFTVPDEVRKRNSKHRRLEQVEQRAEKNQKEEKPHQLVFPGSVPQASQVRGKP

SEQ ID NO: 435784 - protein, 360 aa, unidentified
MSMQKYEINFKEEKVYIGIDVHKNQWHVCVRTADLSMKPFCQPPSAESLKKWLTTNFPGGTYISAYEVGFTGFSTHYALENVGIRNIVFNPGDINDSQKERSRKTDAVDCMKICRNLMNGELKPIYVPSLSELSGRGYLGARDTAVKKRQQSRQRIKSLLYRNGISYPKEYRESNKHWTRNFNSWLESLAAELGGGEGYRLLCLLEDMRFAHVQSLEAGRKILCVIHQCHKEKYELLMTIPGIGRHTASRICLELPDISCFKNEDHLAGYVGFVPDVRSSDKSVYVRGVSYRGRRMLRATIIEAAWKSITKDPALGLAYTRYVKRGLKPNNAIIRIARKLLNRIRFVLRTGQRYETSVAR

SEQ ID NO: 435785 - protein, 343 aa, unidentified
MDYFAGLDVSVKDTSVCIVDEIGKIIREVKVASEPDALLQVLRNAGYHFKRIGLEAGPLSQWLFSALGEANLPVICVETRHMRAVLKAQINKTDRNDARGIAQMMRVGLYRPVHVKTLRSQKLRMLLTHRKLLQSKAIAIENDLRSTLRNFGLKVGMVGTAKFETRIKELIENLPDLILLVEPLLVVRRVLREQLDLLHRRLLAVVRDDAICRRLMTVPGVGPVVALTYRATVDMPARFRKSKSVGAVFGLTCSRDQSGERDRPGAISRRGDEMMRAMLYEAAQAMLLRSAKWSWLKAWAMQIARRRGMKRAIVALARRLAVILHRIWVDGTEFRWTREAAAA

SEQ ID NO: 435786 - protein, 344 aa, unidentified
MDNHTQYSGFAGVDLAKKVMQIHFVTGDGEITDKQVKRAEFLDFFRNRTKCLIGMEACGASQDWARKLEAMGHEVHLMSPKAVKPLVSGQKNDYNDAIGIYKAMFNGVRRVPVKSTEIRDLQTLRRIRSQVTKDKVKEINHVRGLLAEYGIVMGKSITAFNKGISSALESLKERGDVSPLVAEELQTTVESIKTKIERQKRLDREIEQLARGCKNYENFLKTPGVGPFTAAMLCVLLCDPAIFANGRQFAAYIGLAPRSRGSGGKNFIIGIPSKFNCDSESRAVFVECAQALARYKNKSPWVDGILRRKPKKVAVIAIANKLARQVWAMANKGESFKQMTILTA

SEQ ID NO: 435787 - protein, 402 aa, unidentified
MDVHKTFIIACIATTDSKGFTHYQSKRFSTFTGDLRKLAAWLADNNCRDVCMESTGKYWIPVFNMLEQSCSVVLAHPKYVKSIRGQKTDKKDAQWIADIFKHNLISPSFIPPFEIRQLRDLARYYTKLTGFTTGEKNRVQNCLTVSNIQIDQVFSDVFGKSASAITEQLLEHPNGDFDVAPFVNHRVKTPVSKIQTAIEGSICFQQAEKLRLIRQHLNSIQYCKASLDAFIDKCASQFQPQIELVMTVPGIQRFSAISIISEIGVDMSVFPTAKQLCSWAGLVPQNDQSAGKKKTTRISRAGAYIKPLLVRCSLGAIASKKHPEIKERYTALKKRRGHKKAIIAISRMLLTAIYAILKKAEPYDPSHYRAFDLSPANRSITPEQAMRLARRLGYTIVTTQAS

SEQ ID NO: 435788 - protein, 338 aa, unidentified
MELYAGIDLHSNNSVLLVMDDQDRTVFAKRLPNQLGGILDALRSCSGTVRGIAVESTYNWYWLVDGLQDAGFPVSLVNTAAVKQYDGLKFSGDFSDARHLAHLLRLGILPTGYIYPREQRALRDLLRKRSQLVSQRTSQILGIQNLVARNLGVQMSGNSIKHWGEKDVTALPLIAEQTQALQANLAVMNCIDEQITSLERHILEKASLREDFKALQTVCGIGKILALTIALEVGDIGCFTSAGHFASYARTVNSRRESNGKKKGEGNTKCGNRYLAWAFIEAAHFAIRYDPTVKRWYQRKCASALSVVAIKAVAHKLARACYHVVRDGESFEVQRAFG

SEQ ID NO: 435789 - protein, 370 aa, unidentified
MGEYSEAFVAFDVAKAKHAVAIAEGGRGGEIRFLGEIENTTARIERIIKKLSGRYGRLHVCFEAGPTGYGLYRQIQELGHDCMVVAPALIPRRPGERVKTNRRDAVTLARLHRAGELTRVWVPDAVHEAIRDLVRAREAAADDLRRKRQQLLSFLLRHGRIYTAGRDHWTQAHRRWLARQSFEHAAQQIVFQEGVDAIEDAARRLHRLEEQLAGIVPSWSMAPVVEAYQAMRGASFLVAVTFAAEIGDVRRFDTPRQLMAFLGLVPGERSTGETVRRTSLTLAGNRRARRVLVEAAWTYRFPARVSETLRARLEGLPKAVRDIAWKAQVRLCARYRRLSAAGKKLPVVVAAIAREMAAFLWAIGCKVAPS

SEQ ID NO: 435790 - protein, 348 aa, unidentified
MAISYHLGIDLHKKFSYWTLLNNNRDVIFQGKVPTTEGDMAKALQNIPVEKRDIQAVIEPVTEWGWYAEALEKQGLTVKLADPGKSKLIAASRLKNDKVDSTILAELLRSDFLPTAYLAPRETRELREFVRGRIFLVRLRTKIKNRIHSIVAKQGLHSSRSDLFGKKGLAWLQGQTLSPVFQEQVVSLLSIIDLLNEEIKKKDMAIIERAKRDAEAKLLMSMPGIGAFTATMIQAEVGTFARFASADKLASYAGLVSSSRSSGEKQRFGSITRAGSAYLRSIMVEAACHLRPSWGYLFSFYTRIKEKKGNKIARVALARKMLTILWHMQNKKEPFRALPLGDSPGVKR

SEQ ID NO: 435791 - protein, 352 aa, unidentified
MEQFIGCDAHKRYSVFVAVGEDGRCGPEWKVSHTDGAFEAFLEALPAGSEIALEACSSYYWMVAAMERNRHRPHLAHPLEAKRRMGKSHKTDKLDAKGLAILLRNGTLPEVWIPPAELRDQRELLRLRMQLAQQRTRWKNRIHGAWIRYNLHVEASDAFGVRGREQMPQQLGTLPPHTRRSVEQQLAVLDFVESQIADCERRLAGLLEPSEEVRLLRTLPCVGPILSAVLWLEIGDVNRFPDAPHLASYAGLVPRVRASGGHTRLGPVCRDVNHHLKWAFVEAANLVAVNQRRLGPCHVLELYQRLKKRKNHQKAVVAVGRHLAEAAYWILKKREAYREPKAPRQAVSATCG

SEQ ID NO: 435792 - protein, 413 aa, unidentified
MQNNLITAVGIDVSKEKSVVAIRRPGGEVVQMPFEVKHTISDLKAFVTLLHQTGGEIRIVMEHTGIYWYPIARALSNAGFFVSIVNAILIHDFSDNSLRKVKTDRADSLKIANYALTFWNTLREYTPEDETRILLKTQSRLYERTTDTSVVLRNGLISLLDQSFPGVNKLFASSYRNASGHYKWIDFAKRFWHRDCVASLSLSAFSETYAKWCRREGYLFSESDAHRIHSKAKETFAVFPKNKSTQAIIVQSINTLNAVYDSLQVMREEMDRLASMLPEYDMVMGMHCVGPVTGPQLIAEIGDIRRFTGKSALVAFAGVDAPPFQSGVFDARSRRISKRGSPHLRRTLFLICTAILQHGNLEEPVYAFMDRKRAEGKHFYVYMVAGAAKFLRIYYAKVTEQLNAIEGELHQSA

SEQ ID NO: 435793 - protein, 288 aa, unidentified
MKKVSTAATMQSRDFCVQQKLTIGLDLGDRHSWYCVLDEAGKVQLEQRVRTSGKALRELFSTMPRSRVALETGTHSPWISRLLSELRHEVIVANARKVRLIGESRKKDDRLDAQTLARLARIDPELLCPVKHRSAKAQADLAMIRARAGLVRARTGLVNTARGLAKSYGQRLLSCNVRNMNPEKAEELSPELQRALEPLLSAIEELSERIVEYNEGIEALAQKSYPEVVLLKQIKGVGTLIALTFRLTLEDPHRFGKSRDVGGYLGLHPGHRKSGESEPQMHNPSVRR

SEQ ID NO: 435794 - protein, 394 aa, unidentified
MKLVGIDVGKNSHHFCIMDKETGEFNVTPTSFSNNKEGFDFLINSLKPYSKKSILIGMEDTGHYHVALLKFLLSNGYTVALINPKTTDLTRKMEGGITKNDKLDTITICDVLDTPERKKQYRITKVDRFDLYEQRQLTRHHHNLKEELNVYCNRLQKSIDLVFPEFNTLFSSKYSIVYMNLLKTFGSAEAIASTDIRTIRKCFEIKGRGNRISLTPEKLKECAKNSIGISSEVETIQIRHLVSQITLIKEQIAEIDKKIEEFSITNNSPILSIPGISHFSGTSILAELGDIGNYSKPSQIIKFAGVAPYHYESSQYNAQHTGITKKGSKYLRKTLYQIILPIINNNPVFQKYYRLKISQGKGHRCAQGHCIRKLLRIIYHLLETGQSFDPALLR

SEQ ID NO: 435795 - protein, 369 aa, unidentified
MEKIVKYVGLDVHKDSITISFADDGRDGEVRVYGKIANDMGQIDKVMRKLISQNCELHCVYEAGPCGYPIYRHLTSKGIDCVVVAPALIPKKSGDRVKNDRRDAVKLATLHRAGELTAVYVPDQEDEALRDLARAREDIQKALRKVKQQINAFLLRHGISYPGKTKWSKAHHNWLAAMKMPHPAQQIAFTEYLDALANSEDRISRINQQIVSFCQTWRMRPVVEALQSLRGVSLISAVTFVAELGDLTRFENPAQLMAYLGLVPSEHSTGDKIKKGGITKTGNTHARRALIESAQAYRLPARKSPTIRKRQEGLSQDVLDIAWNAQLRLCHRYRRLITKGKKRNVVITAIARELAGFIWAIARVVPLAA

SEQ ID NO: 435796 - protein, 356 aa, unidentified
MSVYLGVDFHARTQTVCWCDTADGLIHQRTLDHEHDDVRGFYTQFAVPAVVGLEATGYARWFHRLLEALGHRLLVGDAYVIRKCALRHQKNDRRDAELLLDLLLHGDFPAVHIPPIASQPVLRLLRYRQRLVEIQTKLRNGIKALALNHQLRLGPKLWSKQGQQQLLAIELDDTDVLQRENSLELLGQIRTRIRTLEKELTSRADQDARVRLLRTHPGVGLLTSLAVVHTLEPVTRFDRARRIAAYCGLDPRETSIGETVRMGHISKQGNRLLRHLLVEAAHRAVHSKADAELRNFYFRLMERKKNAAVAITAVARKLVLRLYRMLREDIDYTEFRRRGREARRAWKTPSPTAGGC

SEQ ID NO: 435797 - protein, 337 aa, unidentified
MEHFAGLDVSMEETHICVVDREGALIREGKTRSSPAAIAAFLAVGPRCEQVVFETGRMAPMLYHGLIEHGVRVVCIESRQAYQALKSLAGHKTDRNDARGLAHLARTGFYKPTHVKSLSAHAVRSLIAARKKLVGQRVTIDNQIRGLVVVFGVRLPRALSPAFKDAALKVSDGVPGLHAALFGLFAAREAMLSAIAAIDADMKKMARASKVCSRLMTIPGVGPITSLAFAAAIDDPSRFKRSRDVGAYLGLVPRRYQSGEIDYTGSISKRGDVRVRTLLYEAANVMLTRSAASLELKDWARAIGARSTMRKARVALARRLAIIMHAMMRDGTEFQAA

SEQ ID NO: 435798 - protein, 420 aa, unidentified
MKSKDSVEIAAFVSLDWADQKHAVALQESGGDQRQHITLDHTPEALQSWVQSLRERFGGRPVAVAVEQKRGALIYALMHVEFLHLYPVNPVTVAKMRQAFHPSGAKDDPSDADLLLDILVSHRHHLRVWTPDDALTRSIQLLTEDRRRVVDERTALTNQLTAVLKTYFPQALDWFGDLHTVRACAFLQRWPSLQQLKQATTSSIRKLYKEQGYRGDEKLAQLLGNIKQAQPLTDDSAVLLSGSMKVDTLVQQIPLLTQAIQRYDEKIAALFDQHDDSTLFGSFPGAGSALGPRLLAAFGSNRDRFECASEIQELAGIAPVTEKSGQGIWIHWRLACSKFLKQTFQEFAGCSIVQSDWARACYDQLRTRGKSHHAALRALAFKWIRIMFRCWKDRKPYDEATYLNSLKIRRSPLADDLPAA

SEQ ID NO: 435799 - protein, 449 aa, unidentified
MAQGSGLTRGDRNRNRRLDALREAVRHDRAVLAIDLGEDKQVAVVMDHEGRVLARKVSAQKAHQLAGLLDWAAQRAAKAGLTGLLVACEPTGHRWKALMGLADAAGHGFACVQSLAVHRSRESDDYTLAKTGHRDAYLIGKLVVRLECYLPGRADEDWGRLRHLGARRFALVTGQTAIRQQAADLLGCAWPAPLAACRKPLESKTWLACMAVITSRCAGRPERLRKMGYEKFLAAVRRELPRWGGRLVWHSIARSLWDALADGAGVAAQRPGALERVELLLDDLRDLRRRLAETEKRMLAALGGLGLTELAASIDGVSALTAAVILAESGDPRRFATARALVKHSGLNPAEHSSATMKGQARISRRGRPCLRAAAWRAAWGAMRGNAVLRAKYAHLTTRDGSRLAGGQARVACAAAILRWLWAVIATGRPWDARIAAGETAVRPAAAAA

SEQ ID NO: 435800 - protein, 421 aa, unidentified
MAAKADEPPQVGWVDNTPEALQAWAQAWAERYGGRPVAVVVEQCRGAVVAQLSQYGHVVVCPVAPALLARYRQAFRSSGAKDDPGDARALLDLFFRHPEQCRPQRLDTVATLTLQYLTEDRRRLVEERGRAVQRLRARLQPYFPQVLAWFGELDTPLVAALLRRWPTLEAMQRARPDSVRRFLRAQGVHDGERVESLVAAVRAAVPATQDAALIEAGTPWVGHMVDLVEQLQAAIADYEERIEEVARAHPDYEIVRSFPGMGAALAPRLIAALGTDRERFRRASELQSWAGIAPVVIESGRKRQVRARWACPQFVRQTFHEWAAHSIPHCGWAGRYYREQLGRGAAPQAAIRALAYKWMRILFRCWQERKPYSDAYYEQRLAARRSRAAAPAAPPAAPVEKTVQSLWKKEGGFYRPSSISA

SEQ ID NO: 435801 - protein, 334 aa, unidentified
MKKRYFMGIDVAKATFDFCLLSRSGACLWRGQFSNDARAIERFVHQLRAHGWKLEQIHFALEATGVYGQKLIAALHQAGLAVSVLNPAQVKYFALSVLRRTKNDTVDAEIIARFCRERKPLATQPLRPIETQLQLLVRERESRVVEQTRERNRAKKDPYQIELPKLISRQRHQRLAQLKKELAQLDAEIDSLIASDQRLKTQSQLLCSIPAIAKLTAAKLLAELAGKEFQSARQLGAYAGLTPAESRSGYTLYGKTRISKIGNAFLRKALYMPAAVARRWCKPFQLWIAMLQSRKLHDLAIRGAIMRKLLHIVFGVLKHQQPFNPMLASIPKTV

SEQ ID NO: 435802 - protein, 449 aa, unidentified
MKKRNFESMPIINPQSAGIDVGSRSHFVAIGQDPEKDVSEFGVYSQDHQKMIDFLRNHRITTIAMESTGSYWQSLFYALQNAGFEVLLVSGQQTKNVRAKTDVKDCVWIQKLHSLGLLRGCFLPDKHTAKLRHLYRHRMSLIEESAKMTNKMQKAMRMMNVRLDVVINDITGKTGIAIIEAILAGERDGQVLSQLADSRIRRSKEEIALALKGRWDEELLYELEDCYQIYMMLQGKIKASEKRLEILLNEFTEDIHVDNQEVNLTRKQTKGKNQPKFNLTTLSYKFYGVDLFAIESISTSTVLTLICEIGQGIYKFHSAKQFASFLRLAPNNRISGGKVISSRTPKGGNKFALALRNAANTIDRTKDGALTRFFKRVAYKKGRAAAITATARKLAVIIWNMIVKNESYQPLDVPHYKELIKARTIASIKNRMIKMGISVLELSPQTEVS

SEQ ID NO: 435803 - protein, 445 aa, unidentified
MSNYYLGCDVSKGYADFIILDGAKKIIEPVFQLDDTFEGHNQFYRFIQDFFKRYPRSILFSAVESTGGLENNWLALFKRLADIMSIKSARINPVGPNALHKASLERNSNDAISAKLIAEYLITYPEKVNYAADDPYISLRKQWNLIEMYKKQKTQLLNQLNILLYTSMPFLMKYTRDGIPNWVLLLVKTYPSSSKLTRAKETTVAKIPYISHKRAYTIIADAKQSIGSVDDETAGFIIKSTVEQILNLKNKIEQHKHYMIGRCDLPEVKLLRSFKGIGVYSAIGLVLNIVSIDRFPSAKHLTSYFGVHPVYKTSGDGTGGFHMSKKGRAAPRQILYMVARSSIIHNPLLKEVYINHLKRGNTKLSALGVCMHKILRIVFGILKHQKEFDPEIDKQNRNKTRIVKKNNTGSDIKRRYQEKSNDAPVSRRQSSKRRKRKQSQNLLEV

SEQ ID NO: 435804 - protein, 349 aa, unidentified
MLAEKVDYVIGVDTHRDQHTLAIVTASTGAVVAEHAVGTTVRGYAAAVAFAECYAAGVRVWALEGAGHYGAGFTRYLSSRGQLVIEVGRTARADRRLQGKDDALDAVRAVRSALASETLTLPRAGQRQEALRVLLLTRRSAVDVRRLALVQLRSVIVTAPESLREELRWLPVGQLIRRCSRFRRSESRTPDELAAVLVLRSLARRIEAATEEANDLEREIIGHVRRLVPELLNEPGVGPIVAAQLIVTWSHHGRLRSEAAFARLAGVAPLPASSGQTIRNRLSRGGDRQLNRALHTVILHRRQHDPATRDYIARRVAEGKTARDATRILKRYLARHLYRVMQNAPLAMT

SEQ ID NO: 435805 - protein, 408 aa, unidentified
MEVLYPRCAGLDVHKDTAVAAVRCVSEPEHREVRTFPTTTSGLLELSEWLSSHGCTHVAMEATGVYWKPVWHILEGNFELVLANAQHIRNVPGRKTDVSDAAWIADLLAHGLVRSSFVPPAPVQELRDLTRTRKQLVREVAQHTLRIQKVLEDANLKLASVLSNILGGSGRAIINAMISGEEDPERLAELAQGKARKKQKALVEALRGRTTSHHRNLLKLHMQLIDALEAALGEVDAQVGKALAPIQDGTKLLKTMPGVSDIVANVIVAEIGVDMSRFPSAGHLVSWAGLCPRNDESAGKRRSTRVRKGAPWLKTTLVSAAWAAVRRKGTYLQAQFLRIKARRGAKKAIIAVAASMLGAAFYMLRDGTEYRDLGPDYFVRRDKSKTIGRLVKRLRDLGCQIELKTAAA

SEQ ID NO: 435806 - protein, 349 aa, unidentified
MNFYTKQHQFYCGIDLHARLLAVCILDQAGNIVCQTKIAADKQILLDTLAPYRVDVVVCVECLFAWYWVGDLCKENGIPFVLGHALYMRAIHGGKTKDDDIDAEKIGRLLRGGNIPTAYVYPKGMRETRDLLRRRNHLVRKRAQLIAHIQITNAQYNLPPFPKKLIYAHNRAEMQVAQRFPEGPVRKSIEVNLAVVDALDVQLADLELYLERTVKVENPQSYHVLQTIPGVGKILALILLYEIHTIRRFATAGDFLSYARLVRCVHKSAGKTLGHGGKKIGNAHLKWAFSEAVCLLVRCCPTVKIWQQRHEKKHGKKKTLGILAARLGRAVYHMLRRGQAFDLQKFLGQ

SEQ ID NO: 435807 - protein, 345 aa, unidentified
MDKVGGRMPAAHGKIQWGWKGMEQVWLGIDVAKSKFDAALLVEERTYHKVFAMDSRGFEALDRWLAQQGAERVHACMEATGEYGAALALYLHESGHVVSVVNPVRIAAYGRSALARNKTDKTDAALIAHFCRSQHPVSWSPPPADLRELQELVRRVEILQEMAQQEKNRRQSLANSPAVQASIAATLEFLEGEISRVREQIGEHLGRSEELGEKHQQLCSIPGIGEWTAARILAEIETVRESVSARQLAAYAGLTPRHRASGNSVRGQPRLSKTGNSRLRKALYMPAIVAMRHNPVLREFAERLRERGKHPMVIVGAVMRKLLHIIYGVLRSATPFDPSYLSAAA

SEQ ID NO: 435808 - protein, 345 aa, unidentified
MTSMNFIGLDIHKKTISYCVKDISGKVLSEGKIPATRQGLREWVGTLTKPWTVAMEATMFTGWIYDYLRPHAAAVKVAHPLMLRAIAVAKKKNDRIDAGRIADCLRCDFLPECYMAPMEIRQRRRTLRYRKLLVRQNVQLKNKIAQLLMESGVSYNKEKLHQQGYFHQVLPANPEIDPSLWPLLKLTREMIERTQKTERALLRSLEADPLLATRVERLMTIPAIGHVTALTWVLEVGEVERFHSVKQVISYCGLCSGEKTSADSSRRMPISKQRNRHLQTVLLEAAHLAPRLNPELAVLYEREAAQSNRNQATIAVARKLAAYLLAIDRGERAFVTHQVHSRVAA

SEQ ID NO: 435809 - protein, 401 aa, unidentified
MKTVLSVDVAKNKSMIMLMNSEGEIFIDTKEINHNLEDFEKVKEEIKEINPQNLTVFMESTGTYHLPVERYFKENGFNTLVINSLTTKNNYDTIRKTKTDKKDCYRLAKLFFVNEVEYHDLSKKDLYANLKAMTRQYFYLLQNNVSCKNRYKRLINICFPELEKIFKSTRIYDDTALNFIKEFPHAEIVKEKRIDALYNNLYKTNGRNLNFYKKLATTIKTASINSYPGVDKEHEDVKNLSYMAKIVQNNNNIINELRGKMIETAKQSPYYKIINSLYGIGDTLTAEILGELGDITRFDSPKEIIAFCGLDPTIKQSGKSINVKGAISKRGNKYARYILFNCSQMVVKLGASNYPEHPVYIYYQNKKAEGKHYYESLTACSTKILRMLYSMCKNNKQFLEN

SEQ ID NO: 435810 - protein, 404 aa, unidentified
MLLVGDAEDHHDVEIMDPAGRTLAKARLPEGIAGLARLHALIAGQRGDDAEQVEVRIGIETDHGPWVAALTAAGYTVYPVNPLQAARYRDRHAVSGAKSDAADAHTLADMVRTDAHQLRPIAGDSPDADAVKVVARAHKTLIWERTRQTQRLRHALREYFPAALDAFDDLDAADTLELLAKAPDPTAAVRLTRAQISAALRRARRRDVDTKTTAIRAALRTPQLGRPAVVVAAYAATTRAAVAVLATLNAQITALEAQVGAHFRRHPDAEIILSQPGMGPVLGARVLGEFGDAPGRYADAKARKNSAGTSPITRASGRRKTVHARHVHNDRLVDALMLQAQSALQASPGARAYYDRQRARRLDHNPALRQLANRLVGILHGCLKTRTRYDEATAWSHHNQQTAA

SEQ ID NO: 435811 - protein, 420 aa, unidentified
MPDDRCRLGSDDVVIGLDLASAEHQVVVLTADGQRLTRFKIPHSRVGLEELLRRTIPAALSRPGGSRVFAFEATGHVWEAVAYILRARGERYVVINPLTTFRVREARQLSREKTDLTDAEQIAELCRTGLVTRTQLEARPYLALRRAWGEYRRLREERARLKVLVAHQLYGLFPEFLRVWANLLQPGALAVLRTGLTPAMMAALSLGEFVARVREHRAGRRVWRFKLAQVHRYAEQTIACPDGVDVLAREVQRAVARIDVLTAQMTTVATEVDALLADLEETPYLRTIPGLGWASVAGLLAHVGAITKYRHGRQLIKLAGTNPSRRDTGQTVGRGQRMSRRGRAGLREVMYLATISCLQHNPRIRAHYDRLIQRADRPLSKMQALGACMNKLLLYAFAVMSRREAFQLDHDWLRPMSRVA

SEQ ID NO: 435812 - protein, 347 aa, unidentified
MIIIGCDLHTRTQQIALLDTATGELVERRLEHENGEAKRFYAELQEPALVGMESTGYALWFAALLAELGHELVVGDAAKIRAMEPRKQKHDRRDAEHLLNLLVRGDFPRLWLPSVEERDVRVLLEHRHQLVELRTRAKNGLQAIALNYGLARRTRLWTERGQAELQKLPLREGMARRREDLLRLLAQLDSWIHELDQRLQREAEKREAAQRLMTHPGVGPLTALGTVLVLGPVERFPDGRHVTSYVGLIPQEESSGSRQRFGHLTKQGNRLLRFLLVEAAQSASRLDPALKRVYRRLAFRKGHASAKVAVARKLLIRLYIMLRDEIDYAEFVRRGSHAGMLGEVALA

SEQ ID NO: 435813 - protein, 342 aa, unidentified
MQVATIGLDIAKQVFQVHGADATGKPVLKQRIRCGQVLEVFRALPPCPVGIEACATAHHWARELQALGHLVRLVPPSYVKAYVKRGKNDAADAEAICEAVMRPTMRFVPVKAREQQAVLMLHRARNLVIAQRRSRGNAIRAHFAEFGIVGPQGRAGLRRLLEDALDPVLSELPDLAQEVIRELGLQLIEAEAREAAIEARILAWHRANDVSRRLATIPGIGPITASAIAATTPDPAQFTSGRHFAAWIGLVPRQHSTGGKERLGPISKRGDGYLHRLLVTGSQAVLRWMRARPANQTPWLTHMLERRPWNVVATAFANKTARIAWAVMARGETYRKGSVAPA

SEQ ID NO: 435814 - protein, 386 aa, unidentified
MSTHAWSQGGAHLSDHDTGLLALADWLAEAEITDVAMESTGVYWKPIFNVLELTDLEVMVVNAHHIKAVPGRKTDVKDAEWIADLLKHGLLKASFIPERGHRELRELVRYRKSLTQQRNNLVNRVQKLLEGANVKLGDVVTDVMGKSGRAMLKAMVEGKTDSAELANLAKGSLRGKRTQLEEALEGSMGSHQRYLLGHQLDLIEFLDHQIDELSVEIEERMRPFEPAIQQIMRLPGIGRRSAEQILAEIGVDMSRFPTHRHISSWAKICPGNNESAGKSRSGWTGKGNPWLRAALVEAAWGAARSHKSYFAVQYNRLKIRRGTKRAAVAVAHSLLIVIYHLLRDGTIFEDLGAAFLDERQQQSVVRHSVKRLERLGYRVTLTPAAA

SEQ ID NO: 435815 - protein, 297 aa, unidentified
MMQIISSSVPFFAGIDVSKDKLDLARSDTGQILTVGNDDNGIAQIVQLLSGACRIVVESTGGLERPLLAALLDAGLPVALVHPGRVRYFAIGCGILAKSDSIDAAVLMKFAQLAEPRLAQKHSENQAELDALITCRRQLCAARAQQSNCKLTTSSKQAIKSIDAVLVTLDKQIEKLDKQIRKLIDSDDDFKHLDRQLRSVPGVGPVLSSTLIAELPELGDTDRQTIGALVGVAPFDRDSGKSKGKRSIRGGRIQVRCVLYMATVCAIRFNPVLPPKLMAAFRACPAGLLEQVAFLLP

SEQ ID NO: 435816 - protein, 446 aa, unidentified
MEVLYERCAGLDVHKKTVTVCRVRLVGRQREQEVQRFGTTTPELLSLADWLAAWSVTHVAMESTGEYWKPIYNILEGNYDLLLVNAQHLKHVPGRKTDVKDAEWLAECLRHGLLRASFVPERPQRALRDLTRYRTKLVQERSRLANRLQKVLEDANIKLGSVAADVLGKSGRAMLEAMIAGEEDGEVLSDMALRKLRSKRTQLEKALTGRMTDHHRFLLTQQLQHYDFLNGQIAVVEERVQQQMMDMDDQRPPTERDNPPEDTVDQDDSPSSEPLTHSEAIALLDTIPGVNERTAEVIIAEVGLDMERFPSHKHLAAWSGVAPGSNESAGKRYSGKTKPGNKALRAALSQAAWAAGRTKGTYLGTQYKRLAARRGKKRAIVAVGHSIIVCAYHILAKREPYRDLGAQYFDQYKKERTIKRLINRLNNLGVEVDISAPTVIPANGGI

SEQ ID NO: 435817 - protein, 399 aa, unidentified
MIENYDSVDVFIGVDVGKGEHHAVALDRAGKQLFDKALPNDEAKLRELIGQLKRHGRFLFVVDQPATIGALPIAVAQAEGVLVGYLPGLAMRRIADLHAGEAKTDARDAAIIAQAARSFPHALRSLQLADEQVAELSMLCGFDDDVVGQITATSNRIRRLLTQIHPALERVLGPHLDHPAVLDLLQRYPTPAAMKAAGTTRLGYRLVKLASRMGRRLADEITQALSEQTVVVTGTNASSIVLPRLAEQLAALRRQREEIAVEVERLVEAHPLHPVLISMPGVGIRTAARLLTEVSGKDFATAGHLAAYAGLAPVTRRSGSSIRGEHPSRRGNKILKRALFLSAFAALRDPLSRAYYDRKIAQGKRHNQALVALARRRCDVLYAMLRDGTLYQADHQLAA

SEQ ID NO: 435818 - protein, 366 aa, unidentified
MLHAGLDLSRKRLDVCLLSDQGELVRELTAFPDAGGLKALARRVEADGEPVRAVIESMTGARFIHDTLERYGWEVEIADAQKVKGLAPLAVKTDRIDARVLAVLSHRDLVPAVWLPDPRVRREREWARFRLHLVKHRSQLKNRIHSALNSFGCPCPVTDLFGVAGREHLARLDLPEPWRGNIAASLALIDQLEAQVVEVDAKLRASGADHPYVPLLLTVPGVGWVLAFTIAAEIGEIERFASPAKLTGYTGLCPRVRQSGESDRRGPLSKHGPRYLRWALLEATMHALRHPAYAERYQRNKRRLGRQRAPRSPRSTSPAGSPTRSGTCSLATRSSLPEAPLFDWRPDRPFGLAPESEASDFAWSSR

SEQ ID NO: 435819 - protein, 315 aa, unidentified
MPNDKKHFVGMDVSKDTLDVAVLSKRSIEQFANTKKGIAKLVRGMHPLNPKRIVVEATGGYEQALVLALFEAGLPVALVSPQRVRQYAKAKGLLAKTDKLDAHILADFGKHIQPRLFVAKSEERQRLSGLVARRKQLNEMLQAEKHRLRTSSVEVKNSLKRVIACLKTEMQELDAQIQAFMKTHEDFGEQEKLLRTAKSVGAVTAATLLADLPELGQLDRKQVAALVGVAPMNKDSGKKRGKRKTQGGRPDVRRALYMATLTGIRYNPVLQPQYEQLVKRGKEKKVAITACMRKLLTILNAMMRDQQPFRYPATT

SEQ ID NO: 435820 - protein, 363 aa, unidentified
MHLRSERNDSLPKISPAHTVSVNRNLAAPCGDRLLRQANAGVVPPRVYKRGHYIMDVKFYGVDVSKAKLDVACCGRVVEIENEKKAIRAFVKSVPLGSYVVMEATNTYHLEMADICHTRGMRAFVVNPRVTRHYREANGLRGNNDRMDARTLCRYIEREHDGLREYVPKSADQRRLKTLVRRRWKLVGMRTQVQESLGSIKELSRDLRALVARIDALIAKLELLIDKQLAGNPDRARIATIKGIGPAVSAVLIADLSSCEFASADAFVAFYGLDPMPKDSGKRKGRRKLSKQGDRLGRAMLYNAALSASRTKVWKPMYDSCLERGLTKVQALIVVARRIARTAWSVYTHKTTFEPSRLFRALT

SEQ ID NO: 435821 - protein, 397 aa, unidentified
MNKTVHYIGLDVHKETIAVAIAPQNSMEVRRYGIIGGTLDAVDKLLKRLSQPNLELRVVYEAGPCGFVLCRHLRSKGIHCDVVCPSLIPKKPSDRVKTDRRDADQLARLYRAGELSPIHVPDQEDEAIRDLIRARSAAVNDQRQARNRLKGFLLRLGFRYTGKSSWNDAHKRYLSGLLMPQPPQQIAFQEYIHAIDDASDRVGRLTQAVEDALPGWKWEPVVRALMSLRGMQVLSGMTVVAEVGDLSRFENPRSLMHFLGLTPSEHTSGDKRVLGGITKCGNARCRHVLTEAAWHYRLRPLVSEAMQKRQEHQSKEVRAIAWKAQQRLHKRFKQLVVRKKSVVAVTAIARELVGFVWAIACKVKPAQQPPAPEVIRTCRGKVYVLDPNRKMPKTKAK

SEQ ID NO: 435822 - protein, 345 aa, unidentified
MNITRIGLDLAKSVFQVHAVDHKGHRLFSRALKREKMMAFFQNLSPCLIGMEACASSHFWARTLMAMGHEVKLIAPQFVKPYVKGNKNDANDAEAICEAVSRPNMRFVPVKTVEQQDIQALHRIRQEQVRQRTALVNQIRGLLSEYGIVISRRVESLRNALPDILEDAENRLTADFRILLKGLQEDLLHLDDRIGSQDQAIRKLSQEHEGAKRLQQLRGIGPITATALIAAIGDGRQFARGRDAAAWCGLVPGQHSSGGKCKLLGISKRGDTYLRTLMIHGARAVLKTAQSKDDRLSQWLQKLCNRRNKNIAAVALANKTMRMAWALLVRGQDYDPNFGYEIGAA

SEQ ID NO: 435823 - protein, 312 aa, unidentified
MTEVTIGIDVSKDRLDVHRLPTGEEQAFANTKAGLTALIRWLGTDPVLRIVFEPTGRYHLDLERRLAAAGYALVKVNPRQAKRFCEALGVRAKTDRADAAMLARMGAALALDPQPVRSEILNELNELVTARRALIKDRTAAKNRAKGLRLALLRRQNASRLTRIEADLAAIGKAIAILIASDPALAGKQAILLSIPGISDVTAAALLAQAPELGDLDQRQIAALAGLAPITRQSGNWRGQSFIRGGRAQLREALYMPALTAIRLNPDFKRIYARLTDSGKPAKVAITAVMRKLVILANALLRDKRNWSPEAP

SEQ ID NO: 435824 - protein, 362 aa, unidentified
MVRVPSIGIRRTAMEHYAGIDVSLELSSVCVVDAKGKIVKEAKVPSDPEALVLFFTGLRFVVERIGIEAGPLSQWLHAGLAKAGFETVLLETRHVKAALSAMTVKTDRKDARGIAQLIRMGWFRPVHCKSTGSQEVRALLVARKLLLGKLLDVEFSIRGILRGFGLKMGVVTRNGFDARVRELCAGQAILEQIARSMLAARCALQTEYTKLHKAVLSIVRGDAICRRLMTTPGVGPVVAITFKTAVDDPTRIAKSKAVGALFGLTPKKYQSGETDVTGGITRVGDESVRAALYEAANVLLSRVTRFSALKRWGMDIAKRRGLKRAKVALARKLGVILHRMWVDGTSFRWTKVASGDEQPARA

SEQ ID NO: 435825 - protein, 320 aa, unidentified
MNSITIPVGIDVSKDTLDVFIDRVSGRKRMKVSNDEEGVRQILCELEVGTYKVAMEATGRYEVLARRMLEEAGLAVSSLNPRLARHMAIGFGVEAKTDPIDAEILARLATVCKPTDPRSQLRESLGDTSRTVSTLILERSGHKKRLQSPGFHPQVAQSLEVIIAVLDTEIARLEKLFVVEVRKSELAERYKLAQTVPGVGPAMARVLTSELPEDLSRYTTRQICSYAGLTPVDNASGKSIRKSKLKAHGNMFIKAATYMPAVSLLACDPKAMELYRRSIAQGREHQQALVPVMHRLLRRAAAVIKRGSPWRSDPPATTLT

SEQ ID NO: 435826 - protein, 466 aa, unidentified
MSGSRFHYRTFGGTKQPARNRSDSDGGYGCSPVRTRFVAFVGIDWGDQKHCWKLMVAGAQTIEAGELKQTPEELSSWALALHHRFGGRPIAVALEQSRGALVYQLSQYPHLWLYPVNPAAAACYRQAFYPSGSKSDPGDSKLLLELVVHHRDRLRRSAPETAETRLLRMLVEQRRQLVNEKTRWNNRLKAALKTYFPQVLEWIDIDTVLGCDLLERWPTLQLLQRAHPGTLRKFFREHNCRSASRLKERVDAIYQATPAVEDTALLEGESAIAASCVAQIRTLLASIAKLDQQIATSSSQHPEAPLFAQLPGAGAALQPRLIVAFGTQRDRYASASEVQAYSGIAPVTESSGHSRWVHVRWACPTFLRQTFHEFAACSVSHSEWARAFYDAKIAAGKSHHAAVRALAYKWIRVLFRCWKDGRPYDEPTYLQALAKRNSPLRPSTVTSTKVGWKSVGGFKKLSTENS

SEQ ID NO: 435827 - protein, 347 aa, unidentified
MNQVSTLSIDLAKNVFQLLAVDKHGKPCFSRRVNRQKLKETIQNMPPCEVVMEACGCAHYWGRMCIKAGHKTHLVPAQHVTPFVRGNKNDKNDCLAIYEASRRPYIRFVPVKSESQQAVLLLHWMRERLVKARTACLNQTRSFLLEFGIETPKSYRAFYNHIQTLLDQQLQPVILLLIHETCAELRAFERQLRQLDSLFRDANQRSPAVEIMQSLPGVGPIIASAFSASIDKGQAFNSAKEFGVWLGLTPRQYASADKSVLSHITKRGDRYLRKQLIHGARTVVTHAHKKDDDLNRWVSALRERVGVNKTIVATAHRLARLMWILLQKNEPYQPQYTQSGATQCIKD

SEQ ID NO: 435828 - protein, 346 aa, unidentified
MYYCGIDVAMKSSYIFITDEKGSKKLSGEMPTTHDSFENSIRPFLADSIKVVIEAGNQTRWIYKSFCAIGADVTVVNPAMVKPIATSRKKTDKIDAKTLCKMLRGGMLPEAVHMPSQSAAALRDLLQARKQLVQTRTKVCNTVRGMLRQEGFFLPRGYLTTFTGWQELLSAENLPVHLKPIVEANYPAFESLTRGKQQLDRELNKREKADDRCKRLRTIPKVGRLTALTFVAAVDDIQRFSSSRKLSSYSGLCPTVRASGDRVEYGSINRQGRRELRTIFVQIAHLIVIDKNRSTARLRHWYSKAARRRGKKTAIVALARKLITIAFRLLKDGTDYKSSRVSRLAA

SEQ ID NO: 435829 - protein, 312 aa, unidentified
MKTICGVDISKARLDACIEPGTLRGSYTNDVAGIAELAAFCRQHQVELVVMESTGSYERRAFVLLSEDGLPCAITNARNVRLYAESMGVPEKTDRIDASMIARFARHKDLQPMQLPSPAQRRLKALVARLRQLTDDLIVQKQRRSSLCDDAEMLASIDEVIALLKRQSRAIEGEIGSMIDDDPLWAHLSQTFRSIKGVADRTVAWLMAELPEIGTYSNKAIAKLVGVAPIANDSGPRRGKRPVRGGRPGVRSIMFLVAAIAARYDESLGRFRDRLIAAGKEKMVVRIALARKLLVRLNAKARDARAAFAYAT

SEQ ID NO: 435830 - protein, 339 aa, unidentified
MGEVTTIGLDLAKNVFQVHGVDAAGAVAVRRALRRGQVLGCFAKLPPCLVGMEACATAHYWGRELARLGHRVRLIPPAYAKAYVRWNKNDAADAAAICEAVSRPSMRFVALKTAEQQAAAGLHKVRELLVKQRTMLINALRGLLAEFGLVAAAGPQHVDELVRMLNEPAGAVIPEPLHGGLMQLVHSLRLVQREVETIEKEIVRWGRDNRTCRHLDTIPGYGPILASAMAAMVVEPGAFKSGRHFAASLGLVPRQDGTGGKVKLGPISKRGNGYLRRLLVNGAMSVLRGKRARHDPWLAKLLAEKKRMVVACALANKMARIGWAVMVRQEEFRARPAAT

SEQ ID NO: 435831 - protein, 338 aa, unidentified
MAITTTIGIDLGKSSFHAIGHDASGKETFRKKLSRAKLLQMLSAHEPVNVAMESCGGSHWLARKCKSYGHVVKLIPAQYVKPYVKTNKNDFIDADAIAEASTRPSMRFTSPKAEEAQVASMIRKIRSSFMKERTACMNRIGAMLLEFGLSLPRGHSHLKKLFAWIELQNEVLPNSLICELKAQVEYYQYLSEKIESQEKKLRLINKENLRYHLLQTIPGVGPLTAACCVSNVADPKDFSNGRNFAAWIGLVPHQHSTGGKSRLLGISKRGNSDLRELFIHAARSILKRTETAEKHFGEWVVNLKRTKPFNVVVVALANKLARIAWSVMVTNKEFSLKI

SEQ ID NO: 435832 - protein, 428 aa, unidentified
MNCNTQNAKIASITEKTLIVGIDVGSETHFARAFDWRNYEYTKKPLEFSNTEAGFMMFKAWVEDIAEKQGKTAVIPGMEPTGHYWFALGKFLQDSGMKPVHVNPHHVKKSKELDDNNPNKNDRKDPKTIAALVNEGRFSYPYIPTGIYAEIRSLSNLRFQTQEELTRIKNRIARWFAIYFPEYKDVYGDLMAVSGRMILKEAPLPEDIRILGVNGVNQIWRNAKLRGTGMKRAKILVSAAEHSVGSKEAPEAARIELKNLLNDMDVYVSRMEELLQTIEEKLKTIPYVDKLMEIKGIGLITVSGFIAEVGDIGRFDNPKQLQKLAGYAIVANDSGKHNGESRINYRGRKRLRYVLYEAAISLVGKNAEFKEIHEYYRTRKENPLKKMQSVVAVACKIIRVFYTILTKGVDYDPMKLMSDIRRPQLQAA

SEQ ID NO: 435833 - protein, 328 aa, unidentified
MGGGADMGTRPVFVGIDVAKAQLDVAVRPAEVAAAWQVANDEEGITALVARLSAVAPVLIVVEATGGLETPLAVALWDANLPVAVVNPRQVRDFARASGKLAKTDRLDAAVLAHFAEKMEPEPRPLPDAQAREVQALLARRRQLLQMKVAEGQRKRSTTIAAVRTRLDAHIAWLQAELDDLERQLRQHLQDNPRWRAKDEVLQSVKGVGEVLSATLLADLPELGMLGRQQIAALVGVAPLNHDSGTQRGVRRCWGGRAEVRATLYMATWSAIQHNPVIRAFYDRLRARGKLEKVAVTACMHKLLTILNALLRTGTRWDPQMAAAAGRA

SEQ ID NO: 435834 - protein, 319 aa, unidentified
MAKQTIEYEQVIERGCGLDVHRDTVVATVMGKGLQTETRTFGTTTSSLKELGEWLEHLQVTDGAMESTGVYWKPVLHVLREYPINLLVVNARHIKNVPGRKTDKADSQWICKLLISGLLKGSFIPPENIQALRDIHRYKKKLVGTVASEKNRIIRVLEDANIKLSSVVSDTSGVTATYLINGLIEGRKDLEKLVSECYHKKLQATPEQIVEAIKGRLTPHLMFLLKSMQKHIQSVEEQIAEIDAEIEKHIKDFEKEIELLQTIPGVGKEGAIGIVAEIGVDMEVFPSEHHLASHSGMCPGNNESAGKKKVQEHDKETNI

SEQ ID NO: 435835 - protein, 346 aa, unidentified
MIAIGSDVHKGRCVFAMMGEEGKVKMLEPIECTREAWRKRLAELPPEAEVALEVSTSGYFVMSVLEEAGWRKRAHWVHTAGIDSLRKQKSDRLDARRLARKLAANTADPLPEAWFPPAPIRQLRMLARQRCRIARLRVLTKNRINSLLQMHGLRPENSPISAAGRDWIRQQALPAPVEQCFEQLFRLYDFLHSERETSEQNLAAHAALFPEVKLLRTIPGIGHILAAIIWGEVGTLERFPCAASLVNTTGMVSSLYESGEVSIQGPITRQGSAWLRWALITAANCVTRSKSPLGQRYWSLRRAHKKPNVAKTAVACSLARCVYGVLKHGEPFQAERWGRRSGKLEP

SEQ ID NO: 435836 - protein, 348 aa, unidentified
MKKVTVIGMDLGDKNHKAVGLSESGEEVERAEVPCTPEGVRAYLERHPGALLAIETGTHCRWVAGVAEELGHEVLVGNARKLRVIWQTSRKDDWRDAEMLARIARTDRRLFHPVKLRNAGGQRLMRLVKSRDVLVRNRTAIVNQVRGFCKSEGAPLPRCSAEAFANLKELLPPEVMDVACHLFEVLQGLNDKIKRYDKIIAKALKRLRGGDAALLDSIAGVGPVTAAAFLAAVGDPATFGSAREAGPYFGLVPRRDQSGATDKQLRISKEGNQVVRRLLVTAANYIMGPFGKDCDLRRHGMRIAERGGKNARKRAKVAVARKLAVVMLAILRNRTACRPLAEDAGPVA

SEQ ID NO: 435837 - protein, 403 aa, unidentified
MNSVGIDISKGRSTIAVMRPFGEVVISPFEIRHTGSELSKLAKQLKSLDGETRVVMEATGNYHASVAKLLHNAGLYVSVINAKLVHGYGNNELRRVKTDRKDAVKLANYGLDRWLTLPRYIPEEDTRLLLKNCYRQYRQYSKVQTVLKNNLISLLDTVFPNANRLFSSPIRGDGSEKWVDFVAEFWHCRCASEKSERAFTSKYLRWCRKHGYNFREAKAHTIYAEASGHIGVMPKSETTKLLVEQAVAQLRATSTALAALKQEMQSLASVLPEYPVVMDMFDVGPTLGPQLIAEIGDVRRFYSKKALVAYAGLDAPPNDSGDVTGRHKSMSKIGASSLRRTLFLVMSVYLQTAPLDEPVCQFMDRKRAEGKPYRVYMMAFANKFLRIYYATVKAYLKSLEHTA

SEQ ID NO: 435838 - protein, 362 aa, unidentified
MRMKSHPQYFISKRRRSSKVGITIGIDLGDIWSHYCTLNEDGEVVDRGRFRTNPSGVDKRFRDLERARVAMETGTHSIWVSEQIQELGHEVIVANVRELRAISHRDRKSDKVDAEKIARYARLDPEILRPIAHRTVAQQETLTLIRAREVLVRLRTGAVNSVRGLAKPCGYRLPASSTLTFAKRCLAVLPSGLAQALAPLLHQIADMTVKIKQYNREIQKLTETTYPETQALIKIYGVGHLTALTFVLTLGNKQRFQRSRDVGCYLGLRPRRSQSGDSDPQLGITKAGNGYLRQLLVECANHVIGPHGKASALREWGLSLGARGGSHARRRAVVAVARKLAVLLHRIWITQEVYVPFYEVAA

SEQ ID NO: 435839 - protein, 388 aa, unidentified
MYYVGLDVHQRSVSMEILDCNGRSVKRSEIKGPWSQLARRVAAQAPGPFAVCFEASCGYGYLYEQLGAVAQQVKAAHPGHLRLIYGSKRKNDRVDAAKLAKLLFLDAVPAVHVPGRDVRLWRQTIEFRQTLLARRVAVKNQVRAMLRERGVAPPRGLWTRKGVRWLSDLGLEEAAAALKRDLLVEELAELARKVARVERQLKVAAEGRAGVALLRTIPGVGARTAEALAAYVDDPKRFARVRQAGSYFGWDPCQDASGDRNRLGHITRNGPGTVRKLLCEAAWVAVRRSPTVRAFHERVARGDADRKKVAIVATAHYLTRVAVSMLKSGEVWREDPRAGGGHPRGPSAGGGEPPSGPQGCSPPPGAAAPAAAAGADAPLPTPLPLLPG

SEQ ID NO: 435840 - protein, 431 aa, unidentified
MKGGDLMKNNILSTLYVGIDVSSKTNVLCALDFEGNKLLNLKALNNQPGAESILESIIECLNSNGLKYVVIALESTSFYSTHIANFLASNELLLAYKPLVYCLNPKTIANYRKTFVDMDKTDPLDAYIIADFARCGRITSNPWRGAQFLALQRLTRHRLHLIEGITREKAYMISNIYLKFSELAVLDKEDQPFSNTYGATSSAILTEYLSLDDITYSSVEDLVEFIKQKGKNRFSDPEKTAQVLQKAARDSYRLDKVLYEPLNVAIASSFNVVKALEDEVKAIDKAIEKNIKGINPTEYQSLISIPGIGPVLASGILAEIGTITSFDSHDALAKYAGLTWRVNQSGNYSSDDTRMTKTGNKYLRYYLIEAANSVKNHVSEYKEYYYKKYGEVTTHQHKRALALTSRKFVRLIFGLLTKNQIYSSDKVGEIN

SEQ ID NO: 435841 - protein, 341 aa, unidentified
MENCGIDLHQKSSQVTVVDQEGEVLERASIPTTRAGLERWFGRRERMRILVEASGSSPWVVRLLLELGHEVEVIDPRRVRLIAQSTLKTDRIDADILAELARLRTKLRTLVWQRSETTQRQRGHLRVRRALVEARAGFIVTVRGLLRSFGVRVASCRSDRFAARCQATAIPPELAEVMTPLLDAIHDLDARIATMDAVVEQVGHLYPAVGSLQDIPGVGPVVALAYVLSIEDPSRFRRSRDVPGYLGLRPTLRSSAATVRQGRITKEGDADVRRLLVQAAHAHLRSHADTALKSWAESLIPRIGKRKTIVALARKLAVLMHRLWITGKVYQPFPHDTAKAA

SEQ ID NO: 435842 - protein, 426 aa, unidentified
MRHFARIVFSTVAANAIAFSRPARAEFTDPHPERALMAFNALKFSPGVQFSEAVQSRDVRTVLPTTLSSAEIRDALDQDLIDRAVFSARMANADFLQEIDDITRDLIDGRIGKSEAERRFPNTPSGHKELQRYLTRAAARVRVCLESTGLYGLDVALYLQADSRLEVMVANPRAVKDFAKALLERSKSDPIDAWVLAEYAARMPFRAWQPPSSAALSLTALVRRLHALTETATREKNRLHALSVTDTSLKIILTELKRSLQWIERSQARLTRAARKVIAAEPRLERRFRLLLSLPGVGESSALQLLGELALIPADAEVRQWVAYAGLDPCECSSGSSLRKRPRISKVGNRHLRRALYMPALTAAHHDPAFGSYYRHLQQRGKCKMVALVAVMRKLLHAAFGMFKHDALFDGARVCPSLAVPTGVAA

SEQ ID NO: 435843 - protein, 451 aa, unidentified
MCLEDRPILEANAAGIDIGAREVFVAVPPDRDEHPVRVFSTFTEDLEKLAQWLVSCGITTVAMESTGVYWIPLYDVVEKYGVKACLVDARGMKNVPGRRTDWHECQWLQFLHSVGLLRAAFRPEGDVCAVRSMMRYRTELVEMTSQHIQHMHKALTQMNVQIHHVISDLTGVTGLAIVDAVIAGQRDPVVLAKLRDPRIKASEETIRKSLVGNWRAEHLFTLEQSRKSYQHYQGQISACDEAIEKLLVAFVPRVDPTERPLPPDRKRKQRGRKKKNANPNTFDLRTESYKLFGVDLTQIPGLMAMVLMLFSEVGRDMSRWKTAGHFVSWLALCPDNDISGGRVLWRGMRRVHNRAGDLFRMAAYSLHHDATPLGDYLRRMKSKLGPAGATTATAHKIAIIFYTMVKKQVEYDATLWADRDAEREKRFEAKLKRQAQQLGYKLVPIEERPAA

SEQ ID NO: 435844 - protein, 382 aa, unidentified
MVTGGVDAHSDTHHAAALDERGRLLGDSAFATSAEGYQELLAWLESFGQVARVGVESTGSYAAGLTRFLAARGVAVVEVNQPHAHTRRRRGKSDPLDAEAAARKVLAGEATAVAKHTGGIVESIRQLRVAREGAVKANTAALNQLYELVITAPDELRQQLAVRKTSRGKASLCLRLRPDRARLHEPLQAAKLALRSVAERVRDLDRQIGLLDQHLAPLVATAAPRTMSLLGVSTQHAGQLLVTAGQNIERLPSDGAFARLCGASPIPASSGRTSRHRLSRGGDRKANRALHLIAVCRLRYCARTRAYANRRTAEGLSKPEIIRCLKRYIARELYHTLRADLADLNLPAPSAQQAVTINCGAGPTGITPTRATATNRRRRRRT

SEQ ID NO: 435845 - protein, 456 aa, unidentified
MERKSPATIWCVLANAQNIEDRRLPTMKNGMTEKLNAVAGALIVGVDIGKDFHWAQFTDCHGIQVAKAMKFSNDRTGFESIVTRIQSLCNNAVLAHPYRQVVVGMEPTGHYWKTLARYLLGGEYELVCVNPYHTKKAKELDDNSQTTSDPKDALTIARLIRDGRYFEPYLSEGMYADLRVLETTRTSVKREENRVKNITTALLDEYFPEIYRVFKKPFQGKASRQILRDCPFPSQILEEGEAGVLTIMRKAVKRGVGVKRARLLLETAKVSVGVNQGLRAARLKLNILLDDLERYEAHLEQIEEQMAEALNDTGYADQLLSIKGVGVVTAASFLGEVGNPMRFQDARQIVRLAGLSLVEDSSGKSKGRTHISKRGRPHLRSLLYTMAMTMVSQNPQMKRLYNYLKYRQANPLKGKQALIVIAQKIITMIFSMLKHGTQYCPEKVLGTTRLKMLEAA

SEQ ID NO: 435846 - protein, 397 aa, unidentified
MDPTYAVFCGIDVGKGEHHAVGLDPAGTRLFDKALPNDETKLRAVFDRLAEHGPVLVIVDQPNTIGALPVTVARDCGHAVAYLPGLTMRRVADLYPGQAKTDARDAFIIADTARTMPHTLRRVDVGDEALAELGVLVGFDDDLAGEATRISNRIRGLLTGIHPALERVLGPRIAHPAVLEIMSKYGGPVGIRKAGKRRLTSLATKHAPRIGTRLAEEILTALDAQTVTVPGSNAAEIVLPKLADSLKEVVHQRRSIADDVERMLDDHPLSPVLMSMPGIGVRTAARILLEVGDGSAFASAAHLAAYAGIAPVTHRSGSSIRGEHPARSGNRKLKRALFLSAFAALHDPTSRAYYDRKRAEGKKHNAALICLARRRCDVLYAMLKNKTFYRSPTAEAA

SEQ ID NO: 435847 - protein, 355 aa, unidentified
MNDAKYIGLDVHQATISATVLDSAGTLVMEAILETKAETILQFIHGLRGSLHVTFEEGTCAAWLHGLLRPHVAQVLVCDPRKNALMKAGNKNDRADARKLADLLYLNKLNAVYHGETGIGALRELARSYLALTRDTTRVMNRLKALYRSWAIPCAGQRVYAPRYRSEWLAKITEAGVHRRAEIYYQQLDALRSLREQVRRDLLAEGRKHSAMKLLRQIPSIGPIRAALLIALMQTPHRFRTKRQLWAYCGLALKTSTSGEYRIVEGQLKRSKKFLAIRGLNVNHNHDLKNIFKGAATRAAAVPGPFQEFHAGLVARGMKPTMARLTLARKIAAITLIVWKKGVDFDAEHLKQQAA

SEQ ID NO: 435848 - protein, 343 aa, unidentified
MDGRAKRRKNQKQHQKAMNDSEQWQQHRALGALDWASEKHTVIVVDQAGKVIEDFEIEHSALGWKKFREKLRPYGSIPFAIETSQGAAVEQLLEAGMLVYPLNPKSAQAYRERKAPSGVKDDQLDAWSFADALRVDGQNWKALRPEEPLIKELRLLCRDEVSLIEQRTAFINQLRHALAEYYPAALEAFEDWTSVSAWMFLQRFPTPELLAQAGKRQWQKFLHSRRLWGSDQGPRRMEIFAHATEFAGTPPTARAKSLLALSLVQMLFAIEKQLALYRQRIEELFAHHPDHDLFGSLPGAGPKIAPRLLSEIGDDRERFGGDPQNLQCLGGTAPVTQRSGKRR

SEQ ID NO: 435849 - protein, 342 aa, unidentified
MAEIATIGLDIAKSVFQVHGIDTAGQVIVRRQLRRSHVLKFFASLAPCVVGIEACATSHHWSRQLQALGHSVKLMPPSYVKPYVKRQKNDMADAEAICEAVTRPTMRFVETKTPEQQSVLMLHRIRLMLVRQRTLLSNTIRAHMAEFGIVAPIGRHGLDDLLAVLSNLDDERVPALARACLVAAAEQLLLVKKKILDMDRRITACHRSSEMSRRLAEIPGIGPLLASALVAAVPDPRAFASARNFAAWIGLVPKQHSTGGKERLGGITKQGNRYLRSMLTVGALAVIRYAERHGTRRPWIVKLLARRPTKVAAVALANKMARMAWAIMIKGERYREPVIVAL

SEQ ID NO: 435850 - protein, 334 aa, unidentified
MENIALIGIDLGKNSFHIHCQDRRGKAVYRKKFTRPKLIEFLATCPATTIAMEACGGSHFMARKLAELGHFPKLISPQFVRPFVKSNKNDFVDAEAICEAASRPSMRFVQPRTESQQAMRALHRVRESLVQDKVKTTNQMHAFLLEFGISVPRGAAVISRLSTLLEDSSLPLYLSQLLLKLQQHYHYLVEQIKDLESQLKRKLDEDEVGQRLLSIPCVGTLTASTISTEIGDGKQYASSRDFAAATGLVPRQYSTGGRTTLLGISKRGNKKIRTLLVQCARVFIQKLEHQSGKLADWVRDLLCRKSNFVVTCALANKLARIAWALTARQQTYVA

SEQ ID NO: 435851 - protein, 347 aa, unidentified
MKLYAGFDLHSSNTYVAIVDAEGKRVFKKKLHNDPNQILSELRPHKRALAGIVIESTFNWYWLVDMLMSAGYKVHLANPSAIQKYSGLKHSDDTHDAFWLAEMLRLGILPEGYIYPKEERPIRDLLRKRGQLVKLRTSLVVSLQNTISRNCGISVSVNDVKALKEDRISPLLSDNEDLELAGSVSKETIDYLTRKIKGIEKVIENRIALDAQYQNLVTIPGVGKILALTIMLETGPIRRFKKVGNYVSYCRKVSSTWTSNGKAKGKGNKKNGNKYLAWAFSEASELSRRFDSQARAYFNRKASKSNRMVAHNALAHKLARAAYYIMSSKRTGGISWLAGCSTYHFKG

SEQ ID NO: 435852 - protein, 343 aa, unidentified
MKLHVLGIDLGKTVFHLVGLDLAGRVVIRKRCSRTQVLAFTANLQVQLIGMEACSGAHFLGRALREQGHEVRLMPAQYVKPYVQTNKSDYLDAEAIAEAVQRPRMRFVPIKTEEQLDLQALHRVRERWVMRRTAVVNQIRSLLLERGLTLPKGRSHLDEQLPRILEDAELNLADSFRALLAQLKLELEQLAARIEEMDRVIQKTARENEACQRLTEIPGVGPVTATALIAAVGNASAFAKGRKLSAWMGIVPGEYSTGGKQKLLGISKRGNKYLRRLFVQGARSVLQQRHKQAPGLKEWLGQLLVRTHQNVVVVALANKLVRMAWAVLCKNERYRAPVFAGTN

SEQ ID NO: 435853 - protein, 334 aa, unidentified
MDTHADMHVAAALDPVGGLLGVREFPATAAGYARLLGWLSGFGTVALVGIEGTGSYGAGLARHITAAGVRVVEVDRSDRQDRRRQGKSDPLDAVSAARAAQSGRAHGAPKGRDGAVEAIRALMVAKRSAAGERTRTINQARALILTGPDDLRARFATHTAAALVAGIASLRPRPGDVPGYATRVALRELGRRAVFLGSQLERLNELIVPLVTARAPRLLALYGIGPNTAALLLIAAGDHPGRLRSEAAWAHLCAAAPIPASSGKVTRHRLNPGGDRQANHALWRIAFTRMGSHPATRAYVERRTKEGKSKAEIIRCLKRYVAREVYPHLRPAAD

SEQ ID NO: 435854 - protein, 354 aa, unidentified
MTSTKYIGMDVHTESISIAVRNSVGKVVMECVIETNASTILQFIDGLSGDLRVTFEEGTWATWLYDLLKPHVTEVLVCNTRKNTSRNGSKSDRIDARKLSEQLYMNNIKSVYHGEHGLRTLKELARSYLTISKDLTRVMNRLKALYRSWGIPCAGKEVYAPRHRAEWLAKISEAGVRRRAEHYYQQLDALRPLHQEARRDLLLEAKKHKPWKLLRLIPGIGPIRAAIVIAVMQTPHRFRTKRHLWTYSGLALETHDSAQYRVAEGQLERSKRPATVRGLNKDYNHDLKDIFKGAAMRASTAAGPMRDFYEALLAKGRKPTMARLTLARKIAAITLIVWKKEVRFDTNYLKPQAA

SEQ ID NO: 435855 - protein, 475 aa, unidentified
MGRDSGKQKKENMKALSPEQEAGLKQKAEEISKGLQSYTWRDLETGGKFTHNDKLTFIRDDMLIVGCDIGSEMHYARAIDAKGRELSKGAYSFENSAEGFQSAKDWALCLAAQHGKNQIVLGVEPTGHYWFSLAAWMIAKGISVVQVNPYAVKQTKELSDNSQAKNDAKDPKLIAELVKNGNYGVPYLPEDVYAELRVLCTLRDQLMEDRVRNMNRLHREMKIVFPEYREAFGKIDGIFTLSILANAPLPSELVALGEDGVKDIWHAEKLRGGGYKRAKEIVRLAGVSAGLTQGAEARKIAIVSFVGKVMELAAELEEIEAQIALKCREIPRADNILEIHGLGAATVSGILAEMGDIDRFDAAKEIQKLSGLGLVACSSGKHQGQTKISHRGRKRLRYWLFQGALSVVSHNEAFRQIHEYYTTRAENPLKKMQSITVIACKLLRIIFTILKKGVRFDPDKMLSDITHPAPLDAAA

SEQ ID NO: 435856 - protein, 334 aa, unidentified
MENIALIGIDLGKNSFHIHCQDRRGKAVYRKKFTRPKLIEFLATCPATTIAMEACGGSHFMARKLEELGHSPKLISPQFARPFVKSNKNDFVDAEAICEAASRPSMRFVQPRTESQQAMRALHRVRESLVQDKVKTTNQMHAFLLEFGISVPRGAAVISRLSTILEDNSLPLYLSQLLLKLQQHYHYLVEQIKDLESQLKRKLDEDEVGQRLLSIPCVGTLTASTISTEIGDGKQYASSRDFAAATGLVPRQYSTGGRTTLLGISKRGNKKIRTLLVQCARVFIQKLEHQSGKLADWVRDLLCRKSNFVVTCALANKLARIAWALTARQQTYVA

SEQ ID NO: 435857 - protein, 428 aa, unidentified
MAGPGNPTTPCNLVAIDVARYWNAVLIETPGGKRHRFKMANTAADFDRLLGFLRKLQGRCCVALEPTGDYHRPLAHRLLVEGFDVVGINSVAQARYREAMFNSWDKNDPKDAAVILEMLRRGAVQRYVDPMLAGNHDLQELAKTYYQVSRARTKVQHSLINHCLPLYFPEMHRYWATTRNEWFIRFLLQFPTPAHVRSLTRDQFVEAAWEVVGRKVDKRAKLEEMWEMAGATAALPHAPDSLAVETFRVTLRRYQELNTLRADLEARAELALSANADFAHLKTLPGIGSVLAMTILAEGGNLRRFGHHRQFLKYCGFDLAKTQSGTQRGREQLSKRGNARLRLAFWLAAVAAVHMRENSFRAKYERYIHTAPDDADLRRKALTAVAAKMARVAYGMIKKNQPYRQFFEQSLPSGSIPLSVAVGALATP

SEQ ID NO: 435858 - protein, 375 aa, unidentified
MEFFTGLDVGMDETAICVVDDKGEVALQVTVVTDPDAIKAALKPYLGRLRRVGHEAGTLSPWLHPELLKLGLPAICLETQRVRAAMSAQRNKTDKADALGLAHLMRTGWFRTAHIKSESCYRLRLLLTHRRNLKRKFLDLENAIRHSLKTFGIRIKGTGRGGFAQAVREAVAGDALVAELIDAMLSARAALWKEYCRLHELVIKFVAGHELCRRFMQIPGVGPIAALSFVTAIDDPSRFRRSRDVAAYFGLTSRRWQSGSSIDVQGRISKAGDGDVRRALYEAASALLTRFKRKDKVKTWGLAIAKRSSHRKATVAVARKLAVIMHAMWVDGTFYRGDRRQPRRTSAPTPPLRRASCCAVTHERWMTDVEFLTTR

SEQ ID NO: 435859 - protein, 430 aa, unidentified
MEEVTDEPLYRDRVCGIDIGKAGMVATVRVPSEMNPARRMAEPRAFATTKRGVLALADWLRCWQVPAVAMEATGDYWKGPFYRLEAEGFECVLADARQIKNLPGRPKRDSSDSAWIAVCFERGSITSCFVPTGEFRLIRLHTRYRRDLTGDRTRDKNRVEKLLESAAIKISAVLADVHGMTGRDIMQQLIAGQRDPKALAQLARRRARAKIPQLEQALEGADFFTEAHAGLLKAMLERIERADEEIARLSQVIEQLLSPYEEQLQQAESMPGWARRAAQDVIAETGVDMSRFPTPGHLASWAGRTPLDHQSGARRGKARRKHGNRYIGAVTGETAVAAGRTDTREGARHRRLARKRGKGKACVATGNTQMRVFHVLLSNPGMRYTDLGPDWYADERQAARRLTRLVGALDAMGYEVTLCRKPEPQDSPAA

SEQ ID NO: 435860 - protein, 328 aa, unidentified
MFRGLIESGEYMEAMIKRCAGLDVHQETVVACVLTGSLNKKPKSEIRTYGTYTKDLEELHEWLLEEKVEQVAMESTGIFWKCVWNIIEDERYEIKLANAKEIKNMPGRKTDVKDAQWIAELLRCGLVKSSFVPEVEIRELRDLTRYRRKIIQQASAEKNRIHKILQDANIKMTTDISDIFGDTGRKLLEKIIEGKEITDQDLIEITSGRGKASLREKMPRIKEGLKGTTREHHRKMIKLIYEHLKYLEEEQKEIEGMIDEACEEYKTEIKLLDSIPGIDQESAKSIIAEIGVNMKQFPTVKHLTSWAGMSPGNNESAGVKKRKDNKWK

SEQ ID NO: 435861 - protein, 344 aa, unidentified
MEHFAGLDVSVNETSVCIVDEMGRIVRETKVASEPDALLAALKSGVYHFKRIGLEAGPLSQWLYNALGEANLPVICVETRHMRAVLKAQINKTDRNDARGIAQMMRAGLYRPVHVKTLRSQKLRMLLTHRKLLQSKAIAIENDLRGTLRNFGLKVGVAGAGKFEARIRELVETFPDLTVLVEPLLIVRRVLREQIAVLHRRVLAVVRDDEVCRRLMTIPGVGPVVALTYRATVDVPSRFRRSRAVGAVFGLTPARHQSGESDRPGGISRCGDEMMRVMLYEAAQIMLTRTNKWSWLKAWAMQIARRRGMKKAIVALARRLAVIMHRIWVDGTEFCWTRPESAAA

SEQ ID NO: 435862 - protein, 415 aa, unidentified
MMEQRNKVCGVDIHKRFLIATILSRDGTKIQKRYSTDIDDLFGFRDWVLENNCDCVAIESTGVYWYPVNAVLENKIELILANARQIKHTPGRKTDSIDSEWIAEVALNNLIYPSRIFPKEERDLRRLTRTRESLVKMRSQIKNQVHQGLESCSIKLSSVLSDNFGKSGRHILDGLIKGENIDRIIEEIPSKRVKNNEDKIRAAIRTGLDETQIFLIQSHLNTIDSLTKKLDEIDSEIKDKISGRKKDLQIAMSVPGIGFTAAATILAEIGNYRDFSTSDKLASWCGIVPNVYQSADKLITGSITKQGSKHIRWMLVQVAQAALKKRESRFRRFFLRIKARKGHNVAVVALARKILCILYHLLMNQEMYQEDGVTKSRQSKIDWSSARIDKMSLQSMIEIIAKAGYEVKKIEESGG

SEQ ID NO: 435863 - protein, 383 aa, unidentified
MKSVCGLDVHKDSVYLCILSEFGELIEKVFGVLTYELEEMRDLMLHHHVVEVSMESTSVYWIPIWRVLSPHFKLNLANPYFIKQLPGRKSDVKDAQWIAECTMKELIRGSFVPPEIIQQLRQYDRRIFDLNEEIVRKLSKLDAVLQRCNIRLSNYVSNVDSKSYKAVVRAISQGITDPEELVKLIHGRIIKHHGMDVITASLKGVVSLAEIDMISQLRDELDMAEAHKEKCQARMLEICEREFPEELKRLQTIPGIKERAATSLIAEIGTDMNKFETANHLASWSGLKPRNDESNKKIKSRSITHGNVYLRKTIIECAWAASRTKDCFFSRFSYHQTQVRKKNKMKVLVAVARKMLIAVWHVLHDNTNYIDFTTDRKTSRTKG

SEQ ID NO: 435864 - protein, 355 aa, unidentified
MAEYAGQQFVGIDLHRRRSVVVRMTDSGEVLESVQILNDVDRLNSVVARCGEDPEVVLEATYGWYWAVDALQEAGAQVHLAHPLGVKAFEYRRVKNDVRDATDLADLLRMGRLPEAWIAPPATRELRELVRHRAKLVGLRSHCKAEIHAVLAKCGVQVLMSDLFSPAGEDLLDRCSLPGPYAARVQSLRRLIEDLQQEIDLFMRLARGRLVADPGYVALQQLPGIGPVLAAVFRAEVGDVTRFRTAAQLACWAGLTPKHHESDTHVHRGRITKQGSRLVRWAAVESVKRLGPTHVEGAYKKRVADRRGNNVGTVAAARKQTEFVFYALRDYHVRALHPPRPPTGATAGATAGAAA

SEQ ID NO: 435865 - protein, 455 aa, unidentified
MTLHENGVPPEAEEDFAAWVAIDWADKKQVWALQETGSSRRQQGEIEASPEAVDAWVSELLLRFPGRRIAVALEQKRGALLCLLSKYAALVLYPVHPATVSRMRAALYPSNSKDDPKDADLQLDILLYHRKHLRRLDTDTVGTRKLQILVEDRRQLVDQATAYSNQLRAKLKQYYPQALRWLPDLHAVVAGEFLKRWPTLPLLQKARRETIEKFFHRHNCRSEELIQKRLDEVPQAVVATTDAAIVDSSVTMVLALVELMAVLRTHIAALDREIAATAAAHPVLPIVASLPGAGPVMMPRLIAALGTQRQRFACASELSSATGIAPVKHASGQSEWTHFRWACPKFQRQSFHEWPDTPSPNAPGPRPTIGSKSARAKDTTPRCGPWPSSGSVSCSAAGGTVNPTTNRSISRLYGGGVPVRTGGRMKLQPGGISQQARREPVSRSNGQLAQLPGVA

SEQ ID NO: 435866 - protein, 334 aa, unidentified
MLYAAIDIHKRAFQAAVLDPDSGQVVEERFPADRESLDRWAEPWRGRVGAVAIEATTGWRWVWRELIARGFEVRLAEPLQARALLGRRRSAKTDRLDARWLARLLAKEMLPESWIPPAEIQELRDRTRLRKALAEDRRRWGQRLHACLLHEGWPCSKSNLLRPPGLRWAAALRLSAHARLQVDSLLAVMAALEAQLDTVDAELRRFARGDERCQALQSIYGIGPILGCHLLAEIGEARRFRCADQITRLAGLDPVVDESGESRRRGKLAKAGSPHLRWALVEAAVHAHRATHPDLALYQATRERRNTAVARLTVARKIGKRAFHALRELELATA

SEQ ID NO: 435867 - protein, 361 aa, unidentified
MKGIHINELDFKGQNIYVGIDVHLKSWSVAVLSEHSVLKKFSQNPDAEALHRFLTSNYPGASYHSVYEAGFCGFWIHRRLLGFGINNIVVNPADVPTMSKEKLRKTDVVDCGKLARELRSKSLTGIYVPDEAVLEMRSLIRLRSSIVKDTTREKNRIKSLLRFHGIDIPEAFTKHSIGNWSKRFLKWLQEVELSTEYGRKTLDLHIDQLIRLRGMLLQETRTIRTISRKEPFCKTIHLLISIPGIGITTAISLLVEIDDITRFPSSDSLANFIGLTPMCHSSGEKEGVGDITIRKHASLRCSMIEAAWVAIRKDPAMTLAYEGFRKKMIAQKAIVKIARKLVNRIFFVLKRRQEYVPCVVR

SEQ ID NO: 435868 - protein, 366 aa, unidentified
MKKYTVFHSVTAAPAVAKSKVMRSGSLLKIGLDIHREKFVAVAQYDHATARPPQHFVPAEFVPWVEARLREGFEVHVVHEGCGFGYGLYRALLEAGASCYVIAPQKLDEANTRVKTDGRDSHALCLRLDRYLAGNKNSLAVIRVPSEEEERARHWGRQREQLVHHRQKLEAQGRSLLIDHGLPAPARWWRPQSWSRLDKLLPVWILSHLELYRPMLLALDQQIRTLTAELEKAAPVALPKGMGALSTVVISREICDWQRFNNRRQVSSYTGLCPGEYSSGAKRVGRSITRHGNSRLRAALVELAWRLVRYQPGYHAVQKRLTVLAKGARATRAHRKKAIVAVARQLAVDLWRLHTGRCTPAVLGFK

SEQ ID NO: 435869 - protein, 345 aa, unidentified
MKITTVGLDLAKNVFQVHGVDERGATVLRKQLRRDQVVIFFARIEPCLIGIEACGGAHYWAAKLGSLGHTVKMMSPQFVKPYVKTNKNDALDAEAICEAVRRPNMRFVPIKAPEQQSVLALHTAREGFVRERTAQANQIRGLLLEFGLTIPQGIRCIYARVPELIEDAGDELPGRFRLLIDRLLQHLKELDRQVRELEREIVQWHRSSEVSRRLETVPGIGPITASALVACAGDPHNFKNARQFAAWIGLVPRQNSSGGKTQLLGISKRGDVYLRTLLIHGGRAVVQHAKVRIERANGWLAGVIARRHSNVAAVAVANKNARVAWALLASGRDYEPGHRVEVAAS

SEQ ID NO: 435870 - protein, 374 aa, unidentified
MSNLSEAFVAFDTSKLRNAVAIADAGRTGEIRFLGEIDNTPAATAKLARKLADKYARLTFCYEAGPTGYGVYRQITGLGHECMVCAPSLIPKKPGDRVKTNRRDAVSLVKLLRAGELTAVWVPDRHHEAMRDLTRAREAAVMDSRRKRQQVSAFLLRQGLHYPGKDTWGKKHMNWLTSQKLEFLEQRIAFEEMMLAVRQGQERLERLEQAVHSAVPDWSLAPVVTALMAMRGMDVISAATFLAEIGDLSRFQTPSELMGYLGLTPSEDSTGDKIKRGPITKAGNRRARRMLVECAWSYQHPPRVGRDKQAKVAAAPRAVREIAWKAQCRLNKRYRALIRNGKLKTIAITAVAREFAGFIWAVSREIATARAAAR

SEQ ID NO: 435871 - protein, 415 aa, unidentified
MAERSTAVVLDPSSFSYVVGIDIGSEICCFTVLTPQKQVVSKPSEFANTASGFAQLQQRLERLEADPAHLVVGLEATSRYGENLFQFLEQHGYHLCLLHPRQTHEFAKQRGLRAKTDRLDASTIARVLLSGEARVGYVPDEQIASYRELVRVHTQLSDELARDKNEIQGLLVVLFPEFSQVFADPCRLTALAVLQKYPSARAIADAGVDAILAILRASAPRNYGRETARRLVELAEHSISSKVALQARSLSLTIWCEQLQHTQAHLGQIDKQIEHLLTDDPQARKLETVPEFGTQTVAVLRAELGDVMRFQRLDQVVAYGGMDVEIKQSGKWQGKAKLSKRGSGLVRRMLYMAAMRSTWMPGSAFGVYYHRPLAHGVSKMAALMAVMRKMLVIAASLLRTGEDYDPTRVVAGPGG

SEQ ID NO: 435872 - protein, 319 aa, unidentified
MNHELIYSRWVGIDVSRDWLDLHVLPAGTSYRIPYTEGEYESWLQTQGGASDEVLFILESTGGLEKPLHEAIERQGYRVARVNPRQVKDFSRALNRAKTDALDAQTLAEYGRRMEPATTPLLCEAQQTLKDLVNRRRQLVEMKSAEQNRLSRAPQRVREDIEAHIEELQGRIQVLDEEIAALQTQNAEFSHKAKLLTSVPGVGMVTASVCLALLPELGTLNAKPIARLVGLAPLNHDSGQKSGKRMINGGRSQVRCALYMAALVGIQHNPVLRAFYQRLLDQGKVKRVALVAVMHKLLTILNALIRTNKPWQQPEPEAV

SEQ ID NO: 435873 - protein, 428 aa, unidentified
MNASIPTIAPGAVAAYIGIDWADEKHAVALRSATEPAKIQNQLIDQRPEALMEWIGQLQQRFGSQGKILVCLEQSRGALIYHLMGYELFELYPVNPLQLTRYRETFSPGGAKDDRPDSELLCELLYCHGDRLKAWKPDTELNRKLAFLNEGRREAVDQATGLSNAIKSQLKVYFPLALELLNDDTSTALAADLLLKWPTLEAVQKQNSHSLRKFFYAHNCRGESKMLQRLERVQQAKPLTQDRAVIESAILRVQMLARQLKALLPDIARYEQNIAELFAAHPNRFLFENLPGAGSALAPRLCSALGSDPDRWESAQEISTLDGIAPVRRASGKKTGKRASIHFRQACPKFLRQSFHEFAACSIRYCTWAKALYDSQRARGKGHHAAVRAVAFKWVRILFACWKNRVPYDPQRYVQALQQRGSPFANAC

SEQ ID NO: 435874 - protein, 345 aa, unidentified
MNATTVAVDLAKNVFELAAADRSWKVIEKARLTRSRFARWFDNRAVELVVMEACGTAHHWARTLRSRGIEVRLLPAQYVRAYVKRNKTDAADAVALLEAARASDIKPVTVKSIEQQALQALHRMRSAWMATRTGRINTLRGFCREFGMEVPVGAVRGLAQIARLIADDHSAIPAILRTPMRLALEEIRLMEARIEQLERELAQVARQSPACHALTSVPGIGLLTSTAMLAAVGDPRSFNAGRRYSSFLGLTPREYSSGGTRYLGRISKRGDRYIRMLLTHGARSVLRAATVARRAGRDLDRLRTWALAVQDRTNHNKATCALANKLARIAWAVWVKHERYQPAAT

SEQ ID NO: 435875 - protein, 348 aa, unidentified
MVVLGIDAHKRTHTVVAVDEVGRQLGVRVTQATSTAAHLELVAWADRFGSERVWAVEDCRHLSRRLERDLLGAGERIVRVPPKLMAHARDAARTYGKSDPIDALAVARAALREPGLPTARLEGPERELRLLADHREDLVAERTRATGRLRWHLHELDPSWDPKPRSLSRRTHITAVEARLAGLEGMVARLAADLTARIAALTQDANALEREITIRVRALAPALLALPGVAALTAAKIAAETAGADRFKSKDAYARHNGTAPLPAWSANPNRHRLSRTGNRQLNCALHRIAVTQKRCHPPAQAYLQRRTTAGDTPTEALRALKRRLSDIIYRTLLADTADTTATSSQAA

SEQ ID NO: 435876 - protein, 385 aa, unidentified
MGTQTFIPRDYDVFAGLDVDKKSISVTFTDHQGFLKSLNMPYKVEHLVNYVRKHYPDKKVAFAYEAGPTGYALYDGLEAQAYPCLIASPSMIPKAPGQRVKTNRLDSRGISENLRGGQLKGIHVPTPLYRELRQLTQLRDTLVSEMVRMKQRIKSLLLMEGLEFPPAPAGSQWSFLVKKKLRELPCSSTVRFKLDRLLDSLEFDEKQVLKATREIRRFCQADPELSQCIEYLKTLPGIGWIVASKLLARVGDWRQIKNIRQLPAFLGLVPTENSTGERTERGSITHTGDGRLRSKLIQASWSAIRQDGELREFFRSVAKKHPRHLGSRIAIVAVAHKLSVRAAVVLMKQRPYEVRQKVQSAPLTQEETVPQGTTRRLAVPGETNS

SEQ ID NO: 435877 - protein, 326 aa, unidentified
MQGKEASEQETNAKSSVGIDVSKDWLDAHVLPSGEALRVANTREGIRKLKRWVQRFEIALVVVEATGKWHRALRRSLDASAIQVAVVDPFRVRMFAKAQGIFVKTDRLDARVLALFAALMAPPLRPPAPQALEELNELVVARTSAVEQRTALKNQLSAAEGTFLKRLLARRIASSAKDIAALDREILKRIRADEGLARRYVILTSIPSFGPVVAASLVAGLAELGTCTAKQIGMLAGLAPIADQSGKREGVRVIWGGRAAVRRILYLAAVTAARANADMRAFYQRKIADGKPAKVAIIAVARKLVVLANTLITQDRTWELHAPKHA

SEQ ID NO: 435878 - protein, 321 aa, unidentified
MQLWYLGIDVAKAKLDCALRQPDGKHRHKVFDNNLTGFASLHAWLLQYEVTELHACMEATGVYWEDVAEYLANHGHIVSVVNPLQIKAFGASRLVRTKTDKVDAKLIAEFCKENRPEAWKAPSLQEQALRAMVLRLDALQEMRTQESNRLAVAREVVKDEISSHVEWLDKEIKALARKIRDSIDDDPDLKERKALLESIPGVGERTISLLLAFKLTPDRFKNARQVTAYAGLDPRQHESGSSVRGKPHISRFGHGVIRKLLYMPAMCTLYRTTWARPFLERLTRNGKKPMTIIVAMMRKLLHVAFGVLKAGEKFNPALHTA

SEQ ID NO: 435879 - protein, 342 aa, unidentified
MEKRYIGIDLHRDRFTCCVRLENGRNYLSEWRLEDLPRFVKKLRSTDELAVEITGNTRLLYDAVAPYVAQVLVVDSNQFRVISRSVKKTDSNDARLLALYLSKGLLPEVRMKSKQHAHLASLTQTRDTLVKQRSALKNKINNILSARGLNLPKEALSSEKRLTEILSLPFDAMVLLELRVIADQIRGLHKSIAQLEQAIAEASSELEGHTNLISIKGIGATTSAILLSVIGDVNDFPDEGRLASYFGIVPRVANSNQTEHSGRIHKRGTKLGRTALVQSALIAARYSPYLRSFYERVKARRGAGKAIIALARKFLGIIYRTLKNKWVFEDFPNFILAEEAQS

SEQ ID NO: 435880 - protein, 410 aa, unidentified
MDTLIERCAGLDVHKDSVTACVRPPAAGGGREQVLATFATTTADLLALRDWLGALGVTVVGMEATGVYWKPVYYVLEERVQCWLLNARHLHNVPGKKTDTLDAVWICQLLEHGLVRPSFVPPPAIRELRNLTRYRKAQIEERTREAQRLDKVLQDAGVKLSSVASHLLGVSGRAMLQALVEGTRDPATLAELARGTLRKKLPALREALHGRFSRHHALLVGAILTKLDFLDEVISDLSAEIEQVIAPFAAEVALLDTIPGVDRRTAEAIVAEIGVDMSRFGSAARLASWSGFCPGNNESAGRRGPGTTRKGSKWLRTHVVEAAKAASRTKQTYLAAQYARLRPRRGTGRATVAVGHSILVAAFYILDRHQPYRDLGPDYFRRRHSREHHARRLARQLQALGYRVTLEEAA

SEQ ID NO: 435881 - protein, 454 aa, unidentified
MPDAITGDRPELKPVNIGAAAIDIGSKMHMAAVNPACTDMPVRTFGTFTQNLHDLADWFKACGVTSVAMESTGVYWIPAYEILEKHGFEVILVNARYAKNVPGRKTDVSDAAWLRQLHSYGLLRGSFRPDAEIATLRAYLRQRERLVEYAAAHIQHMQKALMEMNLQLHHVVSDITGATGMRIIRAIVAGERNPDVLATYRDVRCHSSIETIRAALVGNDRDEHVFALAQWLELYDTYQAKMLDCDRKLESLIAALTDRGAKPVGKLSRPRVKTKQVNTPSFDVRAALYGVLGVDLTEIHGLGPSLALKLIGECGTDLRAWPTAKHFTSWLCLAPGNKISGGKLLSSRTRRSSSRAAALLRLAATTIGRSDTALGAFYRRLSSRAGKAKAVTATARKIAVLFYNTLRHGMTYRDPGADHYEEQYRSRVLANLKRRAKAMGFVLQAVPCHDPAVS

SEQ ID NO: 435882 - protein, 377 aa, unidentified
MHSENIAAYIGLDVHKETLAVAIAAPERLGEVRYYGTINNEAQAVRRLFQKLQGLYGNILSCYEAGPCGFGLYHQLTAMNIKCQVIAPSRIPKSPTDRIKNDHRDAISLARLLRAGELTPVWIPDLTHEAMRDLIRARAAAKRDSRVARQRILSMLLRTDKRYAGKHWTGKHRTWLANQSFSQPSQQIAFQHYCQSLEQIEDRILQLDQEISRLLPEWSLCNLVCQLQALKGVGQLTAITLVAELGDFSRFSNPEQLMAFLRLVPGEYSSGNSIRPRGITKVGNSELRRLLYEAAWSYRTPAKVGAWLIYYRPDSVTQYSKDIAWKAQQRLCSRYRTLTAKGKKSQVAITAVARELTGFMWDIALAAQSSFSQQKQN

SEQ ID NO: 435883 - protein, 315 aa, unidentified
MGTQVFVGIDVGKDVLFVAVRPFGDTLEIPNREDGIADLVKRLRSLEPTLVVMEATAGYETPVAVALYRVGIPVVVSNPRLIRSFARATGRLAKTDKIDAGVIAHFAEVIRPAPRRMDEPDEARLGQLVTRRKQLLRMIVMEKNRVSKGPMEMRKDIQKHLDWLAKELERIDQALADFIQKSPIWRAKDEILQSVPGIGKVGSHALMSDLPELGKLNRKQIASLVGVAPMNRDSGNYKGRRSIWGGRAQIRTVLFMVAVVASRCNPVIREFYQRLCNAGKPKKVALTACIRRLLAILNAMMRNGTRWGEFKPAVT

SEQ ID NO: 435884 - protein, 452 aa, unidentified
MAKRKQLRRRKRQNRPAPVINPNAAGIDVGVTEVYVAVPTERDSDPVRTFATFTRDFHELADWLEVCGVKTVAMESTSVYWIPLYTVLEERGIEVCLVNARHLKRVPGRKSDVFDCEWLQYLHSVGLLQGSFHPSEAVAAVRTVLRHRTSLVQMAASHVQRMQKAMTQMNVQLHLVISDITGLTGLAILDAILAGERRPEVLAQLRHRNIKAKEKTIIKALEGTWRREHLFTLRQSLAAYRNYQTQIEQCDSELQDMLGTFESWRDPDAPPLAGEPKDRPDPRGFDLRAEFHRIFGVDLTQIPGVEVQTVYTLFAECGRDLSAFPTAGSFASWLGLCPDNRITGGKVLSTRTRKVNNPASTALRMAAQSLHRSESCLGDSYRRMRYRLGPPKAITATAHKLARIIYHLVSTGQAFDDSVLAQDEHQTRSRKTRRLKSLAQALGYELVPVPSP

SEQ ID NO: 435885 - protein, 338 aa, unidentified
MELYAGIDLHGNNSVVTVLDEQDRTIYAKRLANDLDLIVAALRSCVGTLHGVAVESTFNWYWLVDGLQAAGFSVHLVNTAAVKQYDGLKHGGDFSDARHLAHLLRLGILPEGYIYPREERAVRDLLRKRSQLVRQRTSQVLSIENLVARNLGARVGGNEVKRWTAQHVDTMELLDEQKRALKANVAVMHCIDDQIEQLERSILAKAKLRADYKALKTVSGIGQVLALTIALETGDVGRFAGPGNFASYARMVDSRRESNGKKKGVGNTKCGNKYLAWAFIEAAHFAVRYDAAIKRWYQKKSANSLSVVAIKAVAHKLARASYHVLKDGTPFDAAKAFG

SEQ ID NO: 435886 - protein, 346 aa, unidentified
MNQIIRIGMDTSKHFFQLHGVDAAERPVLRRKLRRHQVLAFLAKLPPTVIGMEACGAAHYWARELRKLGHEVKLMAPQHVKAYVKRNKNDGRDAEGLCEAMSRPTMQFVPVKTEEQQAALMLAGVRQQLITRRTQLSNAIRGYAAEFGLTVAKGLDKIELLLAQVAQDETVPEIARELFAFHGKDYARLQIDLKTIEAKLMAWHRADATSRRLAQIPGIGPIGATALVMKVPDPRLFRSGRHFAAWIGLTPKDHSTAGKTRLGKITRAGDEMLRSVLVAGATAVIQQARRGRGRPSPWLVALLARKPPKLAAVALANKIARIAWKLMTTGESYDGARMPGALAVAA

SEQ ID NO: 435887 - protein, 451 aa, unidentified
MSKQRNKAISLPVIEPNAAGIDVGATEIFVAVPADRDPEPIRCFPTFTVDLERLADWLQQCHIRTVAMESTGVYWIPLFQILEKRKIDVRLVNAHHVKNVPGRKTDVSDCQWIQHLHSVGLLRGSFRPDDEICAIRSLWRHRDNLIQLATLHLQHMQKALDQMNLQIHHVISDLDGTTGLAIMDAILAGERDPHKLAQLRHPRIRASEETIMKSLVGDYREEHLFTLRQSLKAYRYYQELIQEVDAQVKQMMQRLPSKVAEGEEPPQGSKRRARETPWRNEPPQLREDLYRAFGVDLTEVPAINSLTAQMLLTEIGPNLDRFPTAAAFCSWLRLCPDPKISGGQVLSSRTRPTKNRAALALRVATQALYHSDSFLGDYFRRMKARMGTPKAMTATAHKLARIIYHMVTTQQQYDSTIFQKQEERRRHQKSAKLHAQARELGFQLVPINCVP

SEQ ID NO: 435888 - protein, 350 aa, unidentified
MTMISEPRPVVTGGVDTHLDMHVGAVVSVVGGVLGTAEFPATAGGYRRLLAWMRTFGELDRVGVEGTGTYGVSLARHLRQEQVEVVEVMRPNRQVRRRHGKTDVVDAVAAARAVLSGEATATPKTHDGPVEALRSLKVLQRSATKARTQALNQLRALLVTAPDELRARLRDLTQRQLLQTCAGFRVGTDDDSLATITRFALRELAQRVCYLNDSLDGITLRLERITEQVAPAPTDLRGVGPDVASTLLLAVGDNPERLANERSFASLCGVSPVQASSGKTHRHRLNRDGDRQANSALWRITLVRLHCDPRTKDYLARRVKDGKSKTEAIRCLKRYIAREVFAALPLPTTT

SEQ ID NO: 435889 - protein, 346 aa, unidentified
MEQSIRCGVDIAKLVFQIHGVNAKSGETVMVKKLARGEMLRYFANKPPMLIGIEACGGAHYWARELTKLGHTVKLMTPQYVAPYRRGGKNDANDAEAICEALARPNMRFVAVKSESQQAVLVMHRMREQWVRERTSLMNQIRSYLHEFGIVINQGRAALAKTFPLVAESETLPLLFRQSIADLADKLADLETRIHSLNKRIESWSKQDTTAKALLELCGVGSVTATAAVATAGDVSVFKNGRQFAAWLGLVPKQNSSGGKTQLGAITKRGDRYLRTLLVQGARTVMLAASRAQKSSQTTPIFEWIYKLQERRPNNVVAVAIAAKQARMLWAIMAKQQRQDILGLAI

SEQ ID NO: 435890 - protein, 368 aa, unidentified
MQTINRSQILYVGIDVHKDTHTAVALSPFGEKIFEMTIGNESEDFISLVEKTKKEADKIGVTPSFGLEDVHSWGERLSSFLVEEGHSVTAVAPILVDHLRQKTTHPEKNDSLDALGVAKVMIQRIDTLPRYTITEEAKKAKQIRELSVEREYLTKERARLKNQLHILLHRIHNSSYRTKFKDPFSKKALRYWSRSISRNIDPILEQRTKRALRRLLDLIEETQEIEDELTDLMEKGGFKIHTASGCGPVISAELIGEIGDINRFKSPGSLAKYSGCCPRECSSGKKTKWRKTRSGNRRLNRAFHRMALSQISRSGNDAARKYFKRKISEGKSKSQALVCLRRQLVNIVWMIMKHKTEYIYPTKTDTLN

SEQ ID NO: 435891 - protein, 359 aa, unidentified
MTIVAHTHPFVIGVDTHARNHALAILAAPTGEVIDDAQFPATAAGLTRAVSWVARRTSGDLDVLWVIEGVGTYGARLARAAADAGYAVVEAARMSARANRGVGKSDPLDARRIAQAVLPLDVTALRRPRADSGVRAAVRVLVASRDHMSAERTAAVNALTALLRVSDLGIDARRPLTSGQIATVAAWHTRQEDLATATARAEAIRLAKRVSALEEELRTNTKRVTELLTQSPARELLSQPGIGPVTAAVALTAWSHPGRLRSEAAFASLAGVNPIPASSGNTVRHRINQGGDRRLNRALHMAVVTRMRMDPRTRAYVERRTTEGRTPREIRRCLKRYLARQIYRHLNTAATVQNAPSTA

SEQ ID NO: 435892 - protein, 404 aa, unidentified
MQFCGIDWANDHHDALSIDEQGHQLGSIRVAHSPEGLSQLDNYLERIAGPGGKGQLACIVETTHGLLIAHLLEQGWAVYPVNPRTVERRRAPSGAKTDTIDAYLLAKTGRADFQDLRRLNPDSEQIQELKTLTRDQDALVHMQTRLVNQLTACLKAYYPIALDLFGKLQQPSTLSFLRAYPTLQAARSASVEDLTALLKQARYPGARKAAQHMVEQLQQPCLQANAVTTRTKSRLMLALVDQLEPLLKQIADYDKEIERLFLSHADSEFFQALPGAGKRLAPRLLAESGDDRSRYESASSWQALAGTSPVLFQSGTYQKAHRRLGCIKPWRNALQQFAWQGTHQEAWAKEYYQRKRAEGKSHTVAVRALANVWARILYAIWKKKEPYQTTTFEQARQAHAPRVA

SEQ ID NO: 435893 - protein, 361 aa, unidentified
MKGRFIGIDVGKRTMVACFMDNQQTQLHMESYKTSVRCRKRLYRQLHAEDVVGIEAGSLTFTIAKEIQKDVGATVHVLHPAKLHFIFKSVKKTDTEDARKISRHIVMNTADVLCTICIPSDQEVENRAIAKEALYISKSRTREINRFHAIFVRNGITTMKSKDLKTKKAREKAMQNLSGLSLEEAQRLHKHVCIHEEDMKTLEEKIKDRLSNNTQAERLLSIPGVAVKTAFAFLAYVGDGSRFTSGKEVANYVGMVPRLDSSGDSEYFGRIHKRGPSILRAYFVQAAWALVRSKEGGVLKLHYEALAARRGKRIAIVATARKMLELAWTLIHKQEFYRYSSSAGRLRKIKYYKLHFEGCGV

SEQ ID NO: 435894 - protein, 360 aa, unidentified
MSSMPQPQPSDADEVILGVDTHKDVHVAAVLTALGVLLATSSFPTTAKGYRQLLAWARGFGALHRAGVECTGSYGAALSRHLSSEAVTVIEVNRADRGDQRRRGKTDTIDAETAARAVLSGRATAIAKSGDGPVEMVRMFKLVKASAIKSRGQAINQLKAVLVGTDPALRDSMTGLSNPALFRCCAELNQSNPTDTPSAAAFTLRLLARRILELSSEIDELNAQIATTIEASAPRLLQRYGVGPDTAAALLLAAGDNPERLHSEASFAALCGVSPIEASSGKMHRRRLNRGGDRQANSALYTVTIARLRWDKRTQDYVQRRVAEGKTRREAIRCLKRYIAREIYHDITSTRAAPTARSAA

SEQ ID NO: 435895 - protein, 368 aa, unidentified
MGQKSSKLYVGMDVHKESIDLAVAEEGGEVRHHGQIGGDMNALWRAVRKLESSGRELVFVYEAGPCGCGIYRSLTARGHTCWVVAPSNTPRRVRDRIKTDRRDSLKLSGLARAGELTPIYVPDVRDEAMRDLVRAREDAVVMQRQARQRLAVLLLRNDVRYAGKTAWTAAHRRWIADLKLPQSAQRLAFEEYVQAVEEASARVQRLGQCIEQELATWRWRSVVAALQACRGIQLIHGVRIVAELGDLSRFSHPRRLMAYLGLIPSEDSSGEHRQQGAITKAGNSSARRALVEAAWAYQYTAKVSALIARRQAEVPKAALDIAWKAQVRLCARFRRLAARRVNRNKIVVAIARELAGFVWAIAQQVKPV

SEQ ID NO: 435896 - protein, 305 aa, unidentified
MISPIHKQFSNNPKGFEAFFLWINKSKKEVYTCLEATGIYSFDLAQYLSHKKINVMVVNPIITHAFFKMELNRNKTDKADAQLIARYCEHVVVTGGYEKKSYQPKGADYEAIQRLVTRCDQLEKSKTQENNRLEASANKQASCSIKRLQKAIDNEIVRVKKEIADIVKNNQYLCQQVELLVSIKGIGERTAWSILAYIGDINFFSNAKQIASYAGLTPKIIQSGTSIDKSSLSKLGHKRLRKSLYMPALVAIRYNPILKAVYERLVNNGKPKKVAIVAVMRKLLILSYGVLKSEKPFDINYQMTD

SEQ ID NO: 435897 - protein, 418 aa, unidentified
MNKHNNSGKKSELTSKRAKPRGPMRRDTKEVLAELVGKLKEKLDPKKPAATSAGEKHKRGELRPNLDRLTVGVDLGDRWSNYCILGLEGETLAEGQLRTTQEDLAEFFQALNAARVVFEVGTHSPWVQEVIGGCGHEVLVANPRMMDGSKRRKRKNDRIDANKLARLGRVDPQSLHPIQHRSREVRQDLVILRARDALVAARTELINATRGLVKSMGTRLPKCSSPSFAEKVEGTVPAELRDALLPLMRMATALSDCIQEYDEKIEKLGREKYGHTELLRQVKGVGPITALAYVLTLENPDRFVKSRDVGPYLGLVPKQEDSGESQPQLGISKTGDTMLRKLLVGSAHYILGPFGPDTDLRRYGLRLCERGGKNAKKRAAVAVARKLAVLLHCLWVSGEVYEPLRQGTSATIAPAVAA

SEQ ID NO: 435898 - protein, 324 aa, unidentified
MFIGIDVGLKHLDLAATPTAPALPRRIANSPEGIASMVPVLGALTPTLLVLEATGTYHQPLLAALLAADLPVAVINPAQSAAFRTQHLGRHKTDRADAKLLARFGELHHSELRRAEPQEPALARLRQLVGYRDDLVAQQTATRNRQHAAAWTDSAQVVAWLAEDLAQLTARLKQVEAEIAAVLATIPDADVLTSQAGVGPMTAAAVLAYLPAGVHGQAKAAAAYAGVHPRQEQSGQRDRSRLSKQGCPALRRYLYLAAMCAIRFDPVLRGWYQGLRDRGKAPQSALCAVAHKLLRQMMGRLRQARAERRATAGTVSASALPLAA

SEQ ID NO: 435899 - protein, 342 aa, unidentified
MGNVKRGERSCHSMSALVCGLDVHKDSTYATILNHEGKIVNQTRMTNERVLPYLSHFKVCKVGMESSNQIAPLFRQLTAKGYDVVVSHPKKTRYIAEAKIKSDRVDSKAIAELVRLDALPLAYFPTGEIAKLREKVRRRAFLVRERVKLRVKVKSVLTYEGTKWPSDHGLFTKKGVEWLHELKIDSIESYLRILESLDEEIKLLSKELEGIAEDDEDVKLLMTIPGIGYYTAVLMKSEIGDIKRFPFPERLCSYAGLVPSTHASGKSVWHGNITKEGSRWLRWVMVEAAQTHVHKYDTAITKAYNRIAERKGKKIATVAAARKLLMCSFSVLKNKRPYYDQA

SEQ ID NO: 435900 - protein, 346 aa, unidentified
MSYSTTVGVDLAKNVIQVSVISEHGKELVNRSLTRRKFAEFLGKQTLSLVAFESCASAHYWARAAVRLGHDVRIIPAKAVAPFRQGHKTDSNDALAVAEAARRPNIKEAPMKSVEQQGLQAIQRARELLIGECIALSNHLRGILLEFGITVPQGFASLLRALPEILEDGDNELPGLYRPTLHRLHQRLIELREDIEAMTKEVDQLVKAHPVCHKLTALEGIGPIGALSLYAVLGSGNAFTKSREFSAYLGLTPRQFSSGGKTNIVGLSKKIGNRRLRSILIQGALAYVYRMKEPKSSKDRWLKNLIERAGPRRAAVALANKNARTAWALVTQGTEYQRRQPLEVAA

SEQ ID NO: 435901 - protein, 371 aa, unidentified
MKNTTKFIGLDVSKNKIAVGIADEGREAPRFWGTISHDENAVRKLINTLRTEGIHLEICYEAGPTGYELYRWLLKLNVKCIVVAPTLIPKRSGDRVKTDKRDALRLAQLFRAGELTSVYVPTPEDESLRDMVRAREDAIEDLNRHKQRLTKLLLRRQMKEPKTGRWTYAYEEWLDTLKFENECDQLTFAEYRQSILETKERIKRYDQAIEGHSSTCSQALLIEALQALRGVAVLSATTIACELGNVMRFQHPKYAMSYAGLVPKESSSGESRWQGGITKVGNSHLRRILVEAAWSYRHSPAVKKKMRQRIEGLPAEVQMIAWKAQHRLHKKFRSMLKKGKHKGTITAAIARELIGFVWAIAKVVEQQRCAA

SEQ ID NO: 435902 - protein, 460 aa, unidentified
MSQRRKKQKRAGQGGGAVPSLSCIEPNAAGIDVGATEIFVAVPQDRDPSPVRSFETFTEDLQRLKNWLQQCGITTVAMESTGVYWIPLFQILEKAGMEVCLVNAQHVKHVPGRKSDVIDCQWLQYLHSVGLLRASFRPEQRICAIRSLLRHRDSLVQMAAAHVQHMQKALTQMNLQLHHVLSDITGQSGLAILDAILAGERNPAVLAQLRHARVQASEEIITKSLVGDYQREHLFTLRQSLQAYRYYQSLITACDQEIEEQLQNLDSRTPPDASPLPPERYPHRPRKNEFRFDMRSELYRIYGTDLTAIPSINALTGYTVLAEVGTDWSKFRNGDAFASWTCLCPQNKKSGGKILSAHTRRSANRVNRALRLAAQTLERSTSYLGAYYRKMRARHGAPAAITAAAHKLARIIFHLVTTREAYDESLFAAEEQRQRKRMENKLKRTAKQLGYQLIPLRQTA

SEQ ID NO: 435903 - protein, 342 aa, unidentified
MEYYVGLDVSLKQTAICVVDGDCEVVWQGCADTHPEMIVAELDRWAGKIARLGLETGSITPWLARALKARGLPVVVMDARRASDAMKARPVKTDRADARALAEMLQAGWYWEVYLKSEESHRRKALLSARDQLVRNKRSFFGQIRGLLRPFGIRLGGRMGTSKFDQAARAATRHDDILYLSVNALLEALAAIESQIAVLDKAVRRLCDRSAACWRLMTVPGVGPITALAFEAAIEDPARFKRSRDVGAYLGLTPRRYQSGERDIAGAISKQGDAMARHCLYEAANCLLTTWSGRSALKSWGIKLVKRVGPKKARVAVARKLACLLLRLWKDNTPYEGDLRTA

SEQ ID NO: 435904 - protein, 374 aa, unidentified
MSFTSDTILVALELSNSLWLVGTRMPGAQKSHMHRVTAGDTAALLALVEALRSRQTAISGHPSPLACCFEAGRDGFWLHRFLTAKSIPTYVVEPSSILVNRRAKRAKTDRLDAEGLLRVLAAYLAGDNEICSMVRVPTPEEEDGKRAHREREYLVQDRTRLENRILALLATQGIRARPSLRNWERDLAALKTGDGRPLPPRLAAEINRLRRRLGLVLDLIRELDAERTEIIAASPDDAVTSKVTALRSIYGVGDNFAAVLAREVFYRPFGNRKQLASYVGLAPMPHQSGDMDRDRRIGRAGNARARKTMVQLAWLWLRYQPESELSAWFRQRVGQLQGRTRRIAIVAMARKLLIALWRFTETGEIPAGSTLRAA

SEQ ID NO: 435905 - protein, 460 aa, unidentified
MKDHREAAASSAPVRKASEPLRIVHPDAAGIDIGSRKHYVAVPPERDPEPVRCFGCLTPDLQAMARWLVACGVKTVAMEATGVYWIPPMQVLEEFGLEVYLVDARQAKGLPGRKTDVKDCQWLQQLHTHGLLTRAFRPADTICVLRSFWRHRKDLVEMASMQIQLMQKSLEQRNLQLHKVLSDITGVTGMKILRAILAGERDPVVLAQMKHPLVKSSTDTIAQALTGDWRIEHLFTLRQAVELYEVYQQKIVACDQEIEKYMQGLESRKEAKDLEPRPGGTRRKNQVHFDLRGQLYELTGVDLTHIDGIDAMTAQAVVSECGIDMSRFATEKHYSSWLGLSPNHEITGGKVRRRRTRRVRNRAAQALRVAAQSLHKSKSALGAYFRRMRSRLGPAKAITATAHKLALLIYRMLKYGMEYVDQGQEAYEKQYQKRTLQMLKKRVKQMGYALVDLHSGELVS

SEQ ID NO: 435906 - protein, 321 aa, unidentified
MTQIANGVAGIDVAKHKVDSCIRGLGSRQTFPSSPHGHRQLVALLRKHKVSKAVMEASGGYEREWAKVLRQAGIEVRIVDPKRVRSFALSAGRLAKNDTIDAEMIAWFAETFNDAPSQSYDAAREELAGLVKARKNLMDLKTRLQNQNEHVVPGLAQKAHSQVLKTLAAQIAKLEAAISAKVKATPEFAERAEIIESVPGLSCTTSAILIAGAPELGKVSDEIAAALIGVAPYDDDSGKRRGERHIKGGRRWVRNGLFLPCLGAATQHNPVLKAYYERLTAKGKEPKVALIACMRKLIIILNTMIARGEKWHPKPPRVAVS

SEQ ID NO: 435907 - protein, 429 aa, unidentified
MSEEKSLELRVSVDVGYRRHSVALGLSSGEVLEEFEIEHRIEGFQQFFSRIEKQRKEKNCAVAVAMEGYNGHARPLDSMVRERGYRLYNLNNLKFARFKEIFPGAAKSDRIDARKGLELFQLSDHLPLAREVLQEVTGTPAENEILKRLTRRRGRLVNERVRVVNNLQADLQAVCPGLLEITREASNQWFLNFLLSADTLPQLARLRRSTLLKIPSVGVKCVSIIEGWQKRAHFSQEVEWVGEMIQEDAKRCLELDEKIKRLEAKISGIAKDSKSAKILRSIPGFGAVCTAELAGEIGTIERFGSEGSLSLYLGMSTLENSSGKYQGTKAPKHVNTRAKAAMMIALDRHRKYVPESQRYYEKKRSEGKKHNQAVRALGRHLSRIIYKMLTEEREYQIRPEKGNTKTKVSPRSFIKTQIWRPKISAKVKK

SEQ ID NO: 435908 - protein, 385 aa, unidentified
MAALTKQGELIMRPKEFAHNESEMMTLITQLQSCGEEVRIVLEATGHYHFAIVKKFQAAGLFVSVVNPFLMKKYLDGSIRKGKTDKKDAMKITTYCLEKWHKLTPHSPLDKQYEELRFLSRQYNQTISMKVKGKVWLSQLLDQIMPGIKTIFKGQHSNPMRNALYDFIERYGHYENILTQNMEQFMTDYSAWAKEKGYRYATSKAEQIYLLAQNAIPSRAADSSACLALMQCLSILKQTELACNAILAQMQEIAMTLPEYGVVRAMSGVGDKLAPRLIAEIGDVRRFTSAKALNAYAGNDAPPYQSGQYEGTRRHISKRGSKSLRKAGYEAMKALKTVKPVHDDAVYRFILQKEAEGKPKNVAKMAGLNKFLRIYYARVLELYSA

SEQ ID NO: 435909 - protein, 370 aa, unidentified
MKNAITYVGLDAHKKDIYVAMLVDHERVPVTWQLANEPQAIRRLVRKLEREAAGPIRCCYEAGPCGYALQRQLTTERVRCDVVAPALIPRKPGDHIKTNRRDARKLAELLRAGLLTEVAPPTAADEAVRDLARARDDVREDLVRARHRLSKLLLRRGVHFAGPQRAWSEAHRRWVRSLTWDYAADRRVVDDYLLAIEQLEARRIEFDAALEEIAQTEPYRQPIAWLRCFRGIDTLTAVIIVAELHDFRRFHSARALMAYLGLVPSEHSSGEHARRGRITKAGNAFVRRVLIEAAWHYQHRPSVGRVLRGRQAGQPARVIAIADRAQQRLCRRFRRLVVERKPTPKVAVAIARELAGFIWAALQDSRPQAA

SEQ ID NO: 435910 - protein, 374 aa, unidentified
MTTQAAIEPEGVAVIGGVDTHKNTHYASAVDDHGRFLGHCEFPANDNGYQLLLAWMQEHGDVLAIGVESTGSFGAALSRFLTGHGVRVVEVNRPNRLARHMDGKSDRLDAEQIARAVLGQTSTATPKAKSGIVEVVRTLRVTRSSAVKARTQAFNTLWGVMIGAPSSLRDELVVLSKKTLVNRCLRLRPESDDLLGLAGDPDRLLMAGVKTALRDLARRWKQLDEEVKTLNKQIEALVRAAAPDLVELHGVGVEIAGQFLVTAGDNAERIRNEAAFAKLCGVAPQPAGSGRTSGRHRLSRGGDRAANSALYIVTIVRMRHHQPTRDYVERRTAEGLSKREIIRCLKRYIAREIFANLPRSEPATVPADVIASAA

SEQ ID NO: 435911 - protein, 352 aa, unidentified
MHTIIVGLDIAKAVFQVHAEDGAGKVVQQKRLRRSQVLDFFGKLPAALIGLEACGSAHYWARELRALGHEVRLIPAAYVKPFVRRNKTDARDAAAICVAVSRPDMRFVTIKSADQQARRGLERSRELLVKQRTQLMNSLRSQMSEHGVIAAQGRRGYAALVERVRQPEAELPEDLVIALGVLADQVEALTARIDELDARIAAAAREDDAMRRLMTIPGVGCHLAHAIVAAVSDGRQFSSARDFAAWCGLTPLRHDSAQTQRGKGISRQGDTRLRQLFALGAATIMRNARHRADRATDWQRGILARRPMKVAVLAQAAKTARIAWAVLTSGQAYRRPAAAAAAAAGMATNAAG

SEQ ID NO: 435912 - protein, 352 aa, unidentified
MTTLADVVDAVVGADTHRDTHTLEITTPTGAPVATLTVANTDDGAARALAWIAEQSPGPRVVAAVEGSRSYGIGLARALTAAGMPVLEIEQPRRNERRRGKTDAIDAHLAAIHALRLDTDRLPTPRVDGDREALRILLSARQELTVTKRRAINQLRALLITGNDTDRELNQPKQFSGKHLEQIIQRDPVGGETREQAIRRAEARRLAIRIRDTTTDLTTNTTQLTLIITDLAPDLLTKLGVGPVSAAQAITSWSHHGRCRNEAAFAALAGASPLPASSGRTTRHRLNRGGDRALNCALHTIVLTRWRSCPRTRDYITRRRTEGRSDREIRRMLKRYVARELFRALNATTTLP

SEQ ID NO: 435913 - protein, 378 aa, unidentified
MNATDVARTVEPPFGAGSVVGVDLAKDVLQVCVADGAWCVRESHRLTRAQFERFFLNRTVSLVVMEACGSAHHWGRWLNRLGIPVLLLHARYVRAYVRRNKTDAADAAALLQAARDNKLKPVRVKSVDQQALQALHRTRSLWKDDRTRRINTLRGFCREFGLVITTGARHGIEQIARLIAEPHSGLPPLLRPSMALLVEEIRLLEARIAQLERELAQLVRTSEACTTLLTIPGVGLLTATAMLAATAGDVTHFESARHFASWLGITPKEDSSGACRRLGRISKWGDTYLRMLLVHGARSVLRAAALAESRHKPLEGLRAWALNVQRRTNHNKAACALANKLARICFACLRDHAPYGQQAHVERKRQRQTFTLPTTCAA

SEQ ID NO: 435914 - protein, 439 aa, unidentified
MILIREVADAPVIMGISKPADLKSPCGEVKIMNPLFVGIDVSSKSNVAYLMKPDGSKHSSFSVQNNLGGAKLLSERIVSALGSMQLSDVVIGLEATSIYGDSLVYALREDGSLGRFQRKIHVLNPKQVRKFKEAYPDLPKNDWVDAFVIADHLRFGRIAKEVYMDDYRYQALRTLTRARFDVIQSLTREKQRFANYLFLKCSGIAQNKDIQNTSATTIALMERFETVDELANADLNELTAFISEAGRGRFADPDATAKTVQAAAKGSYRLPRTVNDTVNQAMAVSIASMRAMKEQVKVLDKAIEQQFEIIPNTLTSIPGIGKVYSAGIIAEIGDVHRFESQASVAKFAGLVWHKHQSGDFEAEHSQMIKSGNRYLRYYLLEAANSVKRCDSEFRRYYDLKFKEVNKYQHKRALALTARKLVRLVFRLLKDNRLYIPPEG

SEQ ID NO: 435915 - protein, 320 aa, unidentified
MLHAGLDLSRRKVDVCLLSTQGEIVDEWASPPDADGLRGLAARAAMRGPAVRGVIESMNGARFVHDRLEEHGWDVLIADATKVKGLAPLACKTDKIDARVLATLSARDLVPEIWLPDPSIRRERELARFRLHLVRHRTTLKNRIHAALIAFGHPCPVSDLFGHAGRELLNRLAIPDPWRRNIEVSLRLIDDLELQIAQLTVQLKRQGADHRYIPLLVTAPGLGWINAFTVASEIGDIARFPSPAKLCGYTGLCPRVKQSGATDARGPISKHGPKYLRWALFEAALNACKHPTTPSATSTPSAASVASAAPRSLRSTSLAD

SEQ ID NO: 435916 - protein, 436 aa, unidentified
MEQSCLFKEEDVMASQGTEPEFAAFVAIDWADKIHYWSLRAAGSNQIERGEVENTPEAVEVWAAQWSVRFNSRPIAVALEQRRGALVAMLSKYRQLHLYPVHPLTLAKYREAWYPSRSKSDAQDADLLLELLCQHRDRIRRLDPDTVEMRTLQFQVENRRKLVDERTAVSNRLTDSLKMYFPQILGWFEEVSSALVGDLLLHWPTLEDLQKAKPRTLRKFFQEHNCRDEVKTQQRIEQIRTAIPATHDEAAIVSSRSMALVSVRQIEVLRQAIAEFDKQIQQLAHKQDDWKIFDSLPGAGKALAPRLMSAMGSNRERFESASEAQCFMGIAPVKEASGNTEIVHMRWACPKFQRQTFHEWAACSIPQCGWAKAYYDELRGRGKKHHTAVRALAFKWMRILYRCWKDRQPYREEVYLASLAKRRVPMQRLVKSVQMP

SEQ ID NO: 435917 - protein, 465 aa, unidentified
MTPHKDFFLDPRPPAPTLPQSPVLSEALQVYNPHAAGVDLGEAEHWAAVPPGRDPQPVRRFGTFTADLDALADWLIDCGVTTVAMESTGVYWIPLFELLEARGVQVLLIDPRQAKRAPGRPKTERLDCQWLQRLHAYGLLAGVFRPDDQVCVLRAYLRHRQMLLTYAAHHIQHMQKALQQMNLKLTQVVSDLTGVTGMAIIKAVIAGERNPPHLATLRNPHCHHDEDDIAKALQGTWRAEHLFALQQAVTLYEVSHQQLALCDRQIKAHLETFADKSEGQPLPPKARRHKKTNEPRFDARTPLYRMAGVDLTTIEGIEEGTALVILSEIGTDMHRWPSVKHFCSWLGLCPQHQISGGKVLSRRVRPGAQRVTVALRLAARSLHHSQSALGAFFRRMKARLGTPKAITATAHKLARLVYSLLQHGSAYVQQGLDAYEAQYHERKVKTMAKQAKALGYTLVPLVAQG

SEQ ID NO: 435918 - protein, 343 aa, unidentified
MQTIKTIGLDIAKSVFQVHGVDADGGVVVRRQLKRRYVLAFFEKLAPCLIGMEACASSHHWSRELQGLGHTVRLMPPAYVKPYVKRHKNDAADAEAICEAVTRANMRFVPTKTPEQQSGLVLHRTRHLFVRQQTSVINAIRTHLAEFGIVAPTGRYGVGELLQAVADPADARLPEVARACVLALGAQLQRLKEQILEFDRMIRAWHRSSEMSRRLEECPGVGPVLATAVVATVADPKVFRSGRNFSAWIGIVPKQYSSGGKNRLGGISKRGDRYLRFLFVAGALAVIRYAKIHGTKHRPWLAALLARRPTKVAAIALANKIARMVWAMMVKGERYKEPAALAA

SEQ ID NO: 435919 - protein, 339 aa, unidentified
MNSMAVGVDIAKTVFQVHYIDQETGEIVNKQIKRAKFLEFFANRAPCLVGMEACGGAHHWARQLTKMGHQVKLMPAEFVKAFNIRNKNDAADAQAIWRAVQQPSKPVAVKTEMQQAVLALHRMREQLVKFRTMQINALRGLLTEYGEVMGKGRTALDKAIPEVLARVAERLPAVLIDTMREQWNGLTALDEQIAGIERRMREWKKDDPAVKAISEIPGVGLLTATAAVAMMGDPKAFRSGREFAAWAGLVPRQTGSGGKINLHGISKMGDTYLRKLLIHGARSVLTHAKQPGPWIDQISKRRPPNVVTVALANKMARTIWALLAHNRPYQKDHLSVKPA

SEQ ID NO: 435920 - protein, 388 aa, unidentified
MNRIIKIGMDVHSTNYTLCAMEPTIGAEDRIFGEVQVAPDYKAVICFIESLKMKLGFNNDYSIECGYEAGCLGYTLYHQLTGAGIKCVILAPSTMLTQQGQRIKTDKRDAHLIAQCLCYGGYHPVYIPTGEDDAVKEYVRMRDDHKLALKKLKQQINAFVLRHGHQYTGTKWTIKHLSWLRKLGLDPMYQETLDEYMASYEEQEAKIERYDKRIEEIAAEAQYQENAKKLGCFLGIRTHTALSLIVETGDFKRFAKGNIYAAFLGLAPGEHSSSKSVNRLGISKAGNAHLRCLLIEAAKGICKGSIGHKSKELRSRQSGQSAEVIAYADKANTRLRSKYYKMIRHGKKKNVAVAAVARELACFIWGMMTGNISTASAAGTSVPAVSQG

SEQ ID NO: 435921 - protein, 384 aa, unidentified
MNKHSMIFIGLDTHKEFHEVAYCEEQRGATPVHYGRISSSKVSVKKLLRQFESKYPGATLHVVYEAGPCGYWIYRLITSLGHCCYVVAPSLIPKKPGERIKTDRRDALKLVRSLKSEDLTPIYVPEPEDEAVRDLSRAREAAMKDLKEAKYQLKALLLRNNIRYEGTANWSKKHLRWLTELILPHPAQQIVLQEQLQTIEERIRRLERLDNELTHHVHQWRYYPVVKAVQAMRGVRLLVAVGVVAELGDLNRFDHPRKLMAYLGLVPSEQSSGGKRHLGAITKAGNGRARRLLIEGAHSYRYPANVSTELQLRQEGLPKDIVDIAWKAQLRLCKRYQRMSKKGKHYNLIITAIAREMAAYIWAIAKEVVLTPVNPKLRLSRVPA

SEQ ID NO: 435922 - protein, 353 aa, unidentified
MDLNLGWEIDMTINMLGIDIAKNTFQLHGADNFGKAVHKKRLARRELAAHVANLPACTVVMEACGGANYWARVFQGSGHTVKLISPQFVKPFVKTNKNDANDALAIVEAASRPSMNFVPIKQVEQQDIQSIHRIRARVVKNRTALINEIRGLCLEYGVVLIPGAARVKSSLCVAIADGDNELTPSSRESFQGLYEELVEVEGRVKNLNTKIRQLCRQNENCQRILKIPGVGELTATAIVAAVPDPGEFRNGRHMSAWLGLVPRQSSSGDKQRLLGISKRGDRYLRTLLIHGARSVLSHYKDLDNDYTRWVGRKKATLSHNKAAVALANKNARIIWSMLSSGEEFNYGAQTAAA

SEQ ID NO: 435923 - protein, 337 aa, unidentified
MDEKELFVGIDLHRKQSTIAIINFAGKTIKQEKLPNVPDKILEFLKDCPSNTKVAIEATRNWYWQYDLLKEHNFDVKLGNPYLLKANSAKKKKTDKLDALMLANFLRVDLYPQANASIGYQRKLFELLRLRDTHVKNSVLLKNKIHAQLGKYNFDSPFTDLFGKDGIAWLKTIKLDSISQSLVHDCLEIIGVHKKRILDVEKQLRLETKGDQIIKVLQEVPGFGFLTATWVRAYINDIKRFPDPQHLCAYFGIVPSTYQSADNTRHGHITRCGSGKLRAVLVEASHRAKRFNATSRAIFENIESRRGKNIAYVALARKLLTLVYSKWDNLVEKQVSS

SEQ ID NO: 435924 - protein, 396 aa, unidentified
MATIGIDIGGRSHALARCRDGEAKADREILRVSQSRAGFAALDAWFDRQAESVTLVTMESSGHYWMPLASHLRRSDVPVAVVNPLAAKYFAKSRLTRTKSDPADARSLAEMAMRDTPPARDPLAGAELRQAARFAMTLVTEQARVCQRLIRLVELGFPELGELFDDPTCRTARGVLRIAPTARAATRRRTSTLANANAGPGRRRLGVTKAERLQAAAADSIAVPELDAEVAFEVGLLLDQYDLLERQIAAADVRVAELLDGETARRLRTIPGVGPAIVATLIAEIGDIGRFSDFDQLLAYAGVHPAERSSGRKGSNPETAWHMSKAGNSQLRAAAYRMAVVGIQHNPVIAAHYARKRVAGKSKMNALGHCMRKALSIVWGVWRNGADFDPDWGVEA

SEQ ID NO: 435925 - protein, 342 aa, unidentified
MYYIGLDVHKKTISYCIKDVGGQVQWEGTIPATRTELDSWMKTLPKPWTVAMEASIFTGWVYDHLLPQAAQVKVAHPVMLRAIAAAKKKNDRIDAGKIADCLRCDFLPECHMVSTEIRDRRRTLRYRHLLVRQMVQMKNRVSGLLLETGVSHNKQRLHKVKYFRELLATNKEVDDSIRPLLKLSRESIERLQKTDYALVSSLERDPLLAQRLKNLRTVPGVGPITALTWAVEIGDVSRFQSVKQAISYCGLCGDEKSSADKVLRTPLSKQRNKHIQRVLVEAAKLAPKQSHELALVYEKAKQKGNTNRATIAVARKMVTYLLAVDRGQRSFVPVEDLSSAVA

SEQ ID NO: 435926 - protein, 425 aa, unidentified
MQFKWNEKINQVTENTLVVGMDIAKRVHYACFVDERGRVIEKAFAVHQSKEGFEHLYEKIRQTMKEAKKTEVIVGIEPTGHYWMNLANFLDHYGIPLVMVNPMHVKRSKELDDNLPTKNDKKDALVIARLLKDGRFSYPRLLKEVEAELRIGSTLRSKLTEDLASIKNRIIRWLDRYFPEFTQVFPAFGKMALATLEMTPLPQDIDGKSAEELVFLYRKVKGMRAPQLPKAKLLIEAATNSIGLTEGTQMARHEIATLLRQYRLLENEIESVNSQLSEMAQTTMEYELLASVPGLGDATIVDLLSEVGSFSLYENPRQLIKLAGLTLRENSSGQHKGQKHISKRGRKRLRYILFKVIVPLIRHNEGFKQLHEYYTTRQQNPLRGKQSMVVLCGKLLKVLHGICKKKVHFNEQNMMKDLYCLSEAA

SEQ ID NO: 435927 - protein, 412 aa, unidentified
MQAIIERCCGLDVHQETVVACLLTGAADARARKEVRTFRTVMRELEALRDWLTAAGVTHVGMESTGVYWRPVYAVLEGHVELIVGNARHIRNVPGRKTDVKDAEWIADLVRHGLIAKSFVPPAPLRELRELLRYRRKLIEAQAAERNRLLRLLETANIKLASVMSDVFGVSGRAMLKALIAGSAAPEEMADLARGQLRRKRAELIEALTGGVEEHHRFLLAMQLGRIEAIEADVAALDARIAERLLPYSAEMALLMTIPGVNWLVGAVIIAEIGTDMSVFLSVHHLAAWAGVCPGSYESAGKQKSGRARKGNVHLRTILVGAAISAARTKGSYLRDKFHRLKARRGALRAALAIAHKIVVAAYHMLARGVAYRDLGEAYLDQIGERRIVANLKRRLERLGYQVTLEPKAEAA

SEQ ID NO: 435928 - protein, 439 aa, unidentified
MHFSGEVEEREERLNKQKVVAWVGIDWADEGHEVWEYTVQTDSATCYAIKHTAESLQEWVNQLRIRHGGKPVAVVLEQARGGLIYALMNTGFMEIYPVNPESLAKFRKALYPSGAKSDPTDAELLGQMVRQNPGRFRAWVPGDEQTRSLQLLAEGRRKLVEDMTALTNQLTSVLKTYYPQALNWAGDLSSEQACSFLEKWPTLADLQKSRPFRIRNFYEKYGRPPREVLDERVTQMEKAQPLTADPAVVMAGKMMVNAVVAQIRPLRAAIEKYDVEIERIFRQHPDRAVFESFPGAGKVLAPRLLAAFGADRDRFEAALEVQQFSGIAPVTERSGKTIWVHRRLACPKFVLQTFHEFANQSRRFCVWSKLYYQQQRARGKQHNAAVRALAYKWIRILFRCWKDRRLYDDSRYQKSLIKRGASLAPLLNVLDCGNGVQEL

SEQ ID NO: 435929 - protein, 364 aa, unidentified
MVYVGVDLHRKSSYVAVLADDGELLASRRIASQPDEFLRVFGELEAEPTGVAFEATYGWGWFADLLSDIGIPAHMAHPLATKAISSARVKNDRVDAKTLAHLLRTNLLPEAWAAPPEVRDARKLARTRVSLARISSRLKCQTHALLADQAIEVPVTDLFGLAGRAFLEEVLLRPVPQARLQANLRLIDLLAPEVAQADRELRELFHGDPRIERLTPIPGIGFTTAALIVAEVWDVSRFPSPEHLCSWAGLTPTERSSADHTRRGHISKQGSRWLRWAMVESASRPYLKDPTLRGFRDGIARRRGAKIAKVALARRLLTLCYYALRDEGGCRAFPVPPTSTKRPNRGRARSPQVMASSGTAAPSD

SEQ ID NO: 435930 - protein, 423 aa, unidentified
MDILYERVAGLDVHKDTVVACARIVVDGKTKRECRTFATTTEQLEELRAWLEECRCTQVAMEATGVYWMPVFRILGEGKFELTVANAAHIKNVPGRKTDMNDAMWIADLLACGLIKASFVPPEEMQELRALTRTRKQLVREQTRHVQRIEKTLAEANIRLDSVISDIMGASGRRIIEAMIAGVRQPRKLADLASKQIKATPKELYDALHGRLTDHHRFLLELHLRQWDGLDETIRKIDQEIDRRIGRMDVKAGASQVPFRSLIELLYTHPGISTVAAPAILSEIGCDMSRFPTAGHLVAWSGLCPGQNESAGKRKSSRLRKGAPWLKTMLVQCAWAAKRKKDSYYRAQFFRLQARRGPQKAICAVAASILTAIYHILKNGTEHHDLGADYFDRRPTEVKASRLVTRLKKLGFTVQLQPTAEPA

SEQ ID NO: 435931 - protein, 344 aa, unidentified
MKITTIGLDLSKSVFQVHGVDETGTPALTKRLHRKQMEPFFAKLQPCLIGIEACGTAHHWGRLLVGLGHEVKLMPPAYVKAYVKRGKTDAADAEAICEAVRRPTMRFVPIKSPEQQGILMVHRARSLVVRQRTMAANALRAHLAEFGRVANPGVRNLLKLTRSIFEETGDDRRLPEMARTALAVLARRLVELEEERQTLDRTLLAWHKENDASRRLATVPGIGLVTATALAATVDDPGRFRSGRQFAAWIGLVPKPHSSGGKTRLGGISKQGDRYLRRLLVVGATAVIRHCRDKETPMAAWLRELLAKKPFRVASVALANKLARIAWALLTRQQSYRPYLLGSA

SEQ ID NO: 435932 - protein, 333 aa, unidentified
MATWVGIDIAAKDVELVSRIDGKSSRPMKFKQTSEGHQRVIKHLRALAPSGVVMEATGVYYLDLAVALFRAGLPVMVINPKSFHHFAKLMLKPSKTDGIDTALLAEYGERMTPARWIPPDTTRLGLRDIGRQINRLTASRTQAKNRLHALQAKGMTLSLLLEDEQEGIALLDRRIARLQEAALTLVADSEELSVQLPHLTTAVGVGTASAIALLGELCVLPREMKAPQVSRHAGLDVRLNLSGTSVHRPARLSKAGNAYLRAAMYMPAMSAVRYDARAKAFYDGLVGRGKKKIQALCAVMRKYLTGLWACLQHGTPFDSTKLFSDCHQDNACR

SEQ ID NO: 435933 - protein, 332 aa, unidentified
MNKRVCGIDVSYKTFDVEIMVNGKSVFKKDYTNDLKGQKTLIKKLIKMKTSYVCIEATGNYHLDIALMIDKIKEVKLMVINPRIAHNYSKVLNQKAKTDSEDAHVLAHYAAHMEYFKWQAPDEILFSIRACGRRLSQITKQATQLKNQKHAYEVTKATPKFIITDVELSIYNLENQKTNLIENTLKIISENRKAQQMYDLITGIDGFSTKTAIKLIGELAVLDAQMKANELVAHAGLNPTIFTSGKSVNKTSRLSKAGNKYIREALYMSAMQMTYRYKNVAAYYEHMQIDNGLKKRQAICAIMRKMLMAIHGMIRDNVQFNENRFYKIPTNK

SEQ ID NO: 435934 - protein, 362 aa, unidentified
MTVNVGVDLHKTQFTVCMPKNGKQNFEVYPTNGTGYAAFLKNVKRWQSSGKEVRVGVESTGNTRYFKNVMEKAGVGVTVINTLKFKVVNESVKKTDKHDAATIAEFLEKDMLPESRLCSEASEQLRRLLKVRTTLVRTIVVVKNQIHALLTAIGMEDTKGSLQSKKGRQKVLNALKERENGLVVQPLFETIERLEENVNRIEKELEALSKNDPVVDLLMTIPGCGKIGAWTIRAYTDDIKRFSSAKKYAAYAGLVPWVQNSNEIVRHGKITKRGPEELRTALVQVVLGMRRSKKKTMSWRLMERYEAMKSAKGSGKSIIATARKVATIIWVMLRRKAEFDETRMTDKKLIRKAAQMRAISLN

SEQ ID NO: 435935 - protein, 376 aa, unidentified
MERGSPMLNTTTFVGLDVHARSIKAVALDAMTGEVRSATFGYDAAEVAGWVSSVDPSAKCVYESGVTGFDLQKRLSSMGIDCVVGAVSKMIKPSADRRRKNDRNDAEFLARMLSVGNVVEVWVPDDECEAARDLVRALDDARDDLKRCKQRLSKFLLRHGHAFSETTPSGRRKGNWTAAHWAWIKSISFAEKADDDVLAYYIDATRRAMEDKARLERLVEAEASKPRWKRRVDSVRCLKGIDVMSAADLVFEAGEFSRFKNARSFAAWIGLTPSEHSSGESVRQGGITKAGNKHLRRVLVESAWHYPGCSPHSKDLAKGQAPDPGARRHAAKGVRRLVGRRAAMLERGVHKNKANVATARELACWCWAIGCMVENG

SEQ ID NO: 435936 - protein, 466 aa, unidentified
MKHNRRRISRPRRTSPTVLERINPSVAGIDCGSAEHFVAVPPDRDPVPVQSFQTFTSDLLRLADWLTACRVTSVAMEATGVYWIPIYEILEARGFTVLLVNARHLKNVPGRKSDVSDCEWIRELHSVGLLRGSFRPPDAIVALRAYLRHRQTLIESAGIYVQRIQKALVQMNVQLPLVVTDITGVTGMRILRDIVAGQRDPHHLAEHRDPRCHASKEEIIGALTGNYRPEHLFVLQQNMELFDLCQQQVAGCDQAIDAQLQTLTASVAKPTAPVPPPRITRKPQDNEPAFELRTPLHHLTGGVDLTQIDGIKPYAALKLIAEIGIDMRRWATEKHFTSWLTLAPQNKISGGRLLSSRTQPSANRAAAILRLSAMSVGKTQTALGAFYRRLAARIGKPQAITATARKLAILVYRALKGDLVYRDPGAETYDAQQRTRVLRRLRQRAAALGFDLVNRATGKVTVPGVS

SEQ ID NO: 435937 - protein, 402 aa, unidentified
MNAVGIDVSKGKSMVAIMRPFGEIVSAPFEIKHTTSDINSLVELINSVEGESRIVMEHTGRYYEVLAHQLSKANLFVSAINPKLIKDFDNDSLRKVKSDKADSVKIARYALDKWQNLKQYNVMDELRNQLKTMNRQFGFYMKHKTAMKNNLIGILDQTYPGVNTYFDSPARSDGSQKWVDFASTYWHVDCVRKMSLNSFIDHYQNWCKRKKYNFSQSKAEEIYGKAKELVPVLPKDDITKLIIKQAVNQLNSASTTVESLRTLMNETASKLPEYPVVMAMKGVGTSLGPQLMAEIGDVSRFTHKGAITAFAGVDPGVNESGSYEQKSVPTSKRGSSDLRKALFQVMDVLIKTHPQDDPVYQFIDKKRAQGKPYYVYMTAGANKFLRIYYGRVKEYLSSLPEV

SEQ ID NO: 435938 - protein, 345 aa, unidentified
MHIASIGIDLGKTTFHLIALGERNKVLLRKKFSRPQLLAYTANLPASLVGLEACAGAHFLGTALREQGHQVRLIPAQFVKPYRKSNKNDFLDAEAIAEAVTKQNMRFAQLKTQEQLDWQAMHRVRDRLVRRRTALINEIRGFLLERGITFAAQPIHLRKNLPTVIEDAEQNLSPRLRWLVDRMWQEWKQTETEIQAITEEIERISNEDARCRQLRQIPGFGPLVSTATVAAIGNGSAFRRGRDFAAWVGVVPRQYSTGGKQKLYGISKRGNVYLRRMLIHGARSVLFRVKYDTGGFGQWVRRLAQRAPHNKVVVAIANKLARIAWAVLSSGQDYRHQPLQQRAAA

SEQ ID NO: 435939 - protein, 335 aa, unidentified
MDRQYVGIDFHRRRSVIVRKNAAGEKLGSVRVVNDPLAIAAVMADAGPEPEVVIEATYGWYWIVDWLQAQGASVHLANPSGLNWGTRRVKNDERDAIDLIDMLRLGRLPEAWIAPPATRELRELVRYRAKLVALRSGLKAQVHAVMAKEGVLPQRDDMFGPGGQRLLDEMVLGDAYTIRVESLRDLIEVYDREVAMLERNIHHRLRDDRGYRAIQKINGIGPTMAAILVAEIGDVTRFRSAAALCSWAGLTPRHRESDTTVHRGQLTKQGSRLVRWAVIEGTVRYHGGGKLAADWRQIAERRGKHKATVAIARKVLTLVYYGLRDGEIRCLAKAA

SEQ ID NO: 435940 - protein, 376 aa, unidentified
MGTPWAQTLDDVGVREIFQGLEGVPLMTMVGGLDVHRAQITFDYVDDDGLVHWGQIRPATRKTLRGWLAEHCPDGDAEFALEGCTGWRYVSEELAGAGVGVHLGDPAEIAVLRGPKKRAKTDRADARLLRTLLLQGRFPESWIAPAHVLEIRTLGRRYCTLMDERRAWQQRIHAQLFHQGCPPVRALLSVTGRAALAGAELSAVGGQYVDTALGRIDELSTEIEPLRAQLVNFARHQTGCQALPRHYGIGWLCAAIIWAEIGDARRFSSSDQLVRFAGLDVTVYSSDGKRSPGHLSRQGSPELRWAAFEAAKCAARRGSPDYGYYRKLAAKRDGHNGKNPTLAVERKILRRCHHTLRELGDAAVALPVAEPQEVAA

SEQ ID NO: 435941 - protein, 405 aa, unidentified
MGKVFVGHDWAETHHDVFVEDDSGKRLAAVRLPEGLEGVRRFHELMAAHAEAPDEVLIATETDRGLFVGAFVAAGYDVIAVNPLSTSRYRERLSTSGAKSDPGDARVLAELARVDGHNHRRIAGDTELAEAVKVLARAHQSMVWTRQRQTNQLRSTLREFYPAALEAFPDLASDDALAVLAVAPTPALGRSLSRSKIASALRRGGRQRRIDERAVEIQTALRTEQLEAPAVIADAMGASVTAVVAVISELVAQIDRLETELADRFDQHPDAKIIRSLPGLGTILGARALAEFGDDPNRFADAKSRKNYASTSPITRASGQHRVVLARYARNRRLADACYLWAFAALNASPGARAYYDELRARGNTHNRALRALGNRLVGILHGCLTHGTLYDEHIAWGHRTAAAA

SEQ ID NO: 435942 - protein, 413 aa, unidentified
MNAVGIDVSKKKSTVTIRQAGDVVLLPPRDYRHTQSSINELIAIIKGLDGETKVCMEHTGRYYEPMASWLTNAGIFVSAVNPKLIRDFGDESLRAPKTDKADSKKIARFALDRWTKLRQYSPMDETRNQLKTMNRQFSFYTDQKTAMKNNLIALLDQTFPGANDFFDSPARSDGSQKWVDFVYTYWHVDCVRGKSLSAFTEHYRSWCKRKGYNFSAGKAEEIYRVAADLIAVFPKSENTKMLIRQAVTLLNTTSQMVESLRIQMDQVASTLPEYSVVMAMNGVGPTLGPQLIAEIGDPTRFTHREALTAFAGVDPGADQSGDHNRKSNRTSKKGSPYLRRTLFLIMDGLIQRSPADSPVYAFMDKKRTQGKPYLVYMTAGANKFLRIYYGTVRDSLKQKGLWPDPESDEVNPV

SEQ ID NO: 435943 - protein, 337 aa, unidentified
MKHTVIGMDIAKHVFQLHTVDRQTGEIERLKLRRSQVREFFARRASSVVALEACGSAHYWGRELRALGHEVRLLAPKSVRPFVRSNKDDAADAQAIWTAVQQPGAHLVALKSEAQQAILMLHRMRAQLLKFRVMQTNALRGFLYEYGVVLPQGHRALAQAWPTALARLAEQLPGMVLESLREQWARVQRLEEQIAALERRLASALRANEQCAQIAAIPGVGLLTATAAVAAIGEARTFKSARQFAAWVGLVPRHVGTGGRVRHLGLSKRGDTYLRTLLIHGARSLIARGKHSPWIAALLKRRPYSVVVAALANKLARTIWAVLARGKPYNPAAFSAA

SEQ ID NO: 435944 - protein, 445 aa, unidentified
MSNAAAVAPSEPEWAAFAAIDWADQKNFWRLLPAGSRRSEAGELDSTPEAVEVWAANLQQRFGGRPIAVILEQTRGPLVYMLTKYPHLVLFPVHPTTAARYRETFAPSGAKSDPSDTDSLLDLLLRHRERLRPLRPDTVETRLLHFLVEERRQTVDEKTRANLRLTDCLKLYFPQVLHWFDDVSSPLVGDLLERWPTLEQLQRVHPGTLRRFFHEHNCRSEEKNAERMAAIQQATPATQDQAVQEACVLIAHSLVAMLATLRAQIDVFDKRIAELVADHPDGALFRSLPGAGDALVPRMIVAFGTQRDRYQSAYEMQCYSGIAPVTEASGNSQWVHFRFICPKFLRQTFHELAGCSIQQSEWARAYYDHLRNDKNKSHQVAVRSLAFKWLRIIYRCWKDGKPYDEAIYMQSLRRRGSLLAGVLGASTGVGWKPVAGFQKLSENNA

SEQ ID NO: 435945 - protein, 355 aa, unidentified
MNSEKYIGLDVHQATISVAVMDSRGKVVMESILETKAATLLEFLAGLRGTLSVTFEEGTWAAWLYDLLKPHVQKLVVCNPRKTALLKDGNKNDRIDARKLAELLRLDNLKPVYHGETGVRMLRELARSYLTLVKDLTRVMNRLKAMYRSWAIPCAGRDVYYTRHRAAWLSKIREAGVRRRAEHLYQQLDMLQHLRQQARRELLAESRKHAITAKLRQIPSLGPIRAALAVALIQTPNRFRTKRQLWAYSGLALETRTSGEHCYVQGQLRRSKKQVSIRGLNKDHNHDLKGLFKAAATRASVQPGPFQDFYQRSLAKGIEPTMVRLTLARKIAAITLTLWKKGENFDAEKLKSQAA

SEQ ID NO: 435946 - protein, 393 aa, unidentified
MFNPLKVRLMRSVCGLDVHKDSVYLCILSENGELIENVFGVLTFQLHQMRDLLLAHHVEKVSMESTSVYWIPIWRILAPHFHLQLVNPYFIKQLPGHKSDVADAQWIAECTMKNLISSSFVPPEDIQQLRQYDRRIFDLDEEIVRKLSKLDAVMQRCNIRLGNYVSNVDCKSYKDVVRKISEGVTDPEILIEEIHGRIIKHHGRETILASLTGVVSQAEIDVLRQLREELDLAEEHKQECLERMLEICQEKYPDELRRLQTIPGVRERTATSLIAEIGTDMSKFETANHLAAWSGLRPRNDESNRKFKSRRITHGNVYLRKNIIQCAWAASRTKDCFFSRFSYYQTQVRKKNKMKVIVAVARKLLVAAWHVIHDKTDYVDFQKQDRQSSASNG

SEQ ID NO: 435947 - protein, 326 aa, unidentified
MKEQQFVGIDIGVRDLAMNSWPSQQRLQVANDDCGRARMSEWLTAMSPQFVVLEASGGLEATLAAEIHAAGLRVAVVNPRQAREFARSLGRLAKTDRVDAQVLAQFGQSAAQSGRLRETRVADAAETELKELLARRRQLIAELVAETNRKPRAGKLVRKSIVQNIKWLKRLVEQVNNQLQDAVKASSLWQTRVNLLMTVPGVGPQVAMVLTAELPELGQLNRRQIAALAGVAPHAHDSGQFRGQRRIWGGRASVRCALYMAALVGSRRNQILRACYQRLLSKGKARKQALVACMRKLLVILNAMAKHDRAWQLPQQQFSPCPPNHA

SEQ ID NO: 435948 - protein, 339 aa, unidentified
MELHCGVDLHGDNGYYGIVDESGKRVFKKRLPNDLEEVLRALKPFRDDLKHGIVIESTFNWYWLVDGLKENGYQPRLGNPAAMEQYNGLKNTDDETDAFFLAEMSRLDILPEGYIYPKEDRPIRDLLRRRLMLVHQKTAHVLSFQNLIARQRGEGISGNSIRKLEPEEVKGFFKDERLVLMGQTNISAIGFLDSQISEIEKAVLKEAKLKPEYEKLQTVPGIGKILALTIMLETGEIGRFAKAGNYTSYCRCVKSHRISNQKKKGENNRKNGNRYLCWAYIEAANFIRRYCPEAKRWYQRKLSKSKQIVATKALASKLCKACYFIMKDQVDFDVKKIFG

SEQ ID NO: 435949 - protein, 319 aa, unidentified
MTQISTPPARFIGCDVGKAIVTVFDSLTGQTRDIPNRKPDLARLARAFDAGCLVVCEATGGYEAKLLAAMLAAGVPAHRADARKVKAFIRSFGTLGKSDAIDAQALARYGAERHATLARWVQPDPVREELQALVLTRVDLVRLRQAQRNRLAAPGADIVAAVLRALVREIDKQLRALEARIAACLRRHPALSRDLAVLRGMRGIGEVTAAALLALMPELGALSGRAAASLAGVAPHPHESGQRSGYRKTRGGRPDVKRALFMAALVASQGQGAMAEVYRALVARGKKPIVALTALMRKLVVIANAKLRDARAGDALQVS

SEQ ID NO: 435950 - protein, 407 aa, unidentified
MARVFIGVDPHKLSATIEVVDDRETVLATGRFSTDKAGYAAMRKTVSGWPERVWAVEGSNGAGRPLAQRLLADGELVVDVPAKLSARARLFDTGHNRKTDAHDAHAVAAVAVRTQGLRVLSYDVELEALRMLADRREELTRQRIQTVNRLQRLLSELTPGKAKKDITTVQAKAILATVRPRDLAGKTRRRLAVEQLAELVVVEKKIKTLTKELKVMVLARGSTLMDLPGVGPVVAARILADVGDVARFADRNRFASWTGTAPLDASSGEHVRHRLSRAGNRKMNHMLHIAATTQARLDTDGRRYYRRKLGEGKTRMEAMRCLKRRISDAVYRQLLTDAERTQLEAAVEEVGTGPGGHCGASQESSAVDLPPHIDTSDQPLPGPAQPTLQPPIPVRKSQKTKSPQPTG

SEQ ID NO: 435951 - protein, 358 aa, unidentified
MQSNKISFKGQKIFIGIDVHKKNWDVAIAPEIGIVKRHPQKASAKELFDFLKKHYPDGDYLAVYESGFSGYSTYYALKEAGIECIVIHAADVPTTQYEEVMKTDRVDSVKLVRSLKAGLLKGIYIREKENIDDRSVVRIRKTIQKQLSGYKARVKHMLHCNGVSLPERFEKPGSHWSKAFIKWLKEDVRLLSSTRNSLDLPIRQVETIRMTLLEATKMMRNLSQTERYKRKFDLLMTVPGIGVAVSMCILTEVYDVKRFHNENQFAAYLGLIPTSHSSGDKVAHGEMTFRGNKQLGPMIIEAAWITICKDAGLGSLYLRYKERMKPQEAIVRIARKLSNIIYAILKNEKEYVPYHSGK

SEQ ID NO: 435952 - protein, 403 aa, unidentified
MKQIVIGVDPHKLSATIEVVDQHERVLGSGRFATDKAGYAAMVGYVAQWSRPTWAVEGSNGAGRSLAQRLVADGEHVVDVPAKLAARVRLLDTGHGRKTDAHDAHAVAAAAVRAKKLRVLSENPELESLRMIVDRRDELTRQRVQTVNRLQRLLAELIPGTSKKDITVLQAKAKIASVRPRDLVGKTRRRIAADELADLVAVEKKIKTLTKDLKTIVKASGSSLTTLPGVGTIVAARVLAEVGDVTRFADRNRFASWTGTAPLEASSGEQVRHRLSRAGNRRMNHMLHIAATTQIRLDTPGRAYYRRKLAAGKTRMEAMRCLKRRISDAVFRQLLADARADANRPVGAGPGGHCGASRESSAVDFHPLVDTSDQPLPGPAEPTLQPVPRRWKTAGASALSPAS

SEQ ID NO: 435953 - protein, 405 aa, unidentified
MLNPQTLQLRVGVDVGSQRHSVAVGLTDGSLLEEFEIPHTATGFGDFFARINEHAKRHPYPIAVAMEGYNGHVRPLDSLVKARGWRLFNVNNLKLARFKEIFPAAAKSDRIDSAKTLELFQLHDHLPMAGDVLQEVMATPEENDILKRLSRRRRRLVNERGRVMNSLQADLQAVAPGLLHITRDVANLWFLNFLTCRKGLLELARVRRASLLKVPGIGTTYADAIQAWQSRAFFGHDASLVGDMIQQDAARILELKRQIKALEERMADVAESSSIASQLASIPGYGSVCSAELAGEIGTIERFRSEASLALYLGMATLDNNSGKYRGSKAPKHVNARAKAAMMVAVDHHRKQVPQSQRYYEKKRADGKRHNQAIRALGRHLCRVIFKMLVIAHRPVVMAVRTERQ

SEQ ID NO: 435954 - protein, 340 aa, unidentified
MEKITTIGLDLAKHVFQVHGVDASGATVLRKQLRRGQVVAFFARLPSCLIGLEACATAHYWARELRAVGHDVRLMPAQYVKAYVKRNKNDAADAEAICEAVRRPTMRFVPIKTAEEQAALLLHRGRERLVRQRTALVNALRGHLAEFGVIAPLGLRNVSGLIAIVRDEGDGRLPDLARQVLGVLAGQIEQVEAAVARLEKQLMAWHRSNPVSQRLATIPGIGPIIATALAATVVEPCGFGSGREFAAWLGLVPRQHSTGGKARLGGISKRGNGYLRRLLINGASANLLRSKATNADRRIIGLRRRRPGLVVAVALANKTARIAWAVMQRRENYRRMAATA

SEQ ID NO: 435955 - protein, 347 aa, unidentified
MDVHSKSTVWCLLDAAGEVLDTGSVATTSVSLAALVEKLGKDDLLAGQEIGTMSYLVHDTLSAAGVKILSFNAAQLRMIAASRKKTDRRDAYWLAKALASGMYPHPVYIPTGEIRELRALLTQRRMLQVERNRWRYRARAGLRSVGRTAPPGGAHLARSLRRWLAPGSGLESHVRELLGLCQRQEAALALELSRVDTELRRKARAIEPVTRLKTIPGIGDLVALTIYASVGEIARFPNAKLLGAYAGLVPSVYQSGASQRLGGITKQGSNLLRSALVQSANVLMARCRKAEAKPLREIAARVQTSRGRRKIAVVALARHLLRIAYYLLRDGTTYDDRRLQRRSELAA

SEQ ID NO: 435956 - protein, 355 aa, unidentified
MQKYKVSFKGQNIFVGIDVHLKTWHVVSITESGYKISFSQRSDAKVLFDTLNKKFPDAHFKSAYEAGFCGFSVHYKLTEVGFENIVINPADVPTSNKEKVTKTDAVDAEKIARALKQGQLTPIHIKSKEYMDDTNLIRLRSRFVKDLGRMKSRTKHLLYNQGVEYPERFQKNGTHWSRNFIAWLRNEVEFLSEEKRTLMLLVDEVENLRKAVLRITKEIRRLAVSPKYKENFELLTSVPGIGKITGMSLLTEIDNDLGRFSNERQFASFLGLIPTCHNSGEKTSSGMKTFRGNHQIGPLIVEASWVAIRNDRELSNCYINYCQRMKPQTAIIKIARKLACKLFAVLKTKKKYVHQ

SEQ ID NO: 435957 - protein, 310 aa, unidentified
MDHFVGIDVSLESCAVCVVTQSGTVAREAKIACEPEALIAFMRAMDVSITGIGLEAGPLSQWLHRHLCAAGLEAVLMETRQVKGALKAMPIKTDRRDALGIAQLIRMGWFRPVHCKSVSAQELRALLGARRTLQKSMISIELSMRGMLRGFGLKLGQITRRRLPERARELADGNEMLTAMVTAMLRGHAALRSELAKLENRLRRIARADRVCRLMMTVPGVGAVVALQVKAGIDDPARFRSSKMVGPHFGLTPRREQSGERDVVGAISAAGDQNVRTALFQAATVMLYHSQTKSLIQNSASVFSSLQDGG

SEQ ID NO: 435958 - protein, 352 aa, unidentified
MVDKVTEAAVVGGMDTHKDLHVAAVVDQNNKVLGTQYFSTTRQGYRQMLAWMTSFGTLKRIGVECTGTYGSGLLRYFQNAGLEVLEVTAPDRMERRKRGKSDTIDAECAAHAAFSGIRTVTPKTRDGMIESLRVLKTCRKTAISARRVALQIIHSNIISAPDELREQLRNMTRMQLIRTLGSWRPDASEYRNVTNVYRISLKSLARRYLELHDEIADLDVMIAAIVDELAPELIKRNAIGYESASQLLITAGDNPQRLRSESGFAALCGVSPVPVSSGKTNRYRLNRGGDRAANSALHIIAIGRLRTDAKTKEYVARRVAEGHTKMGNDSNLLIVFYVQIMPDDFVMQLHRF

SEQ ID NO: 435959 - protein, 457 aa, unidentified
MMETKRRREQRSMLPVHPDAAAIDIGATVHVAAVGPARDPEPVRSFGTFTGDLHRLADWFAQCGIKTVVMESTGVYWIPVYEILDQRGFEVWVVNARDAKHVPGRKTDISDAAWLQRLHEFGLLRGSFRPQGAIAALRAYLRQRERLLDYAAAHIQHMQKALTQMNLQIHHVISDITGTTGMRIIRAIVAGERDPDTLVSYRDIRCHSSVETVRQALIGNYREEHLFALAQAVELYEVYQAKVATCDEKIEGVLERLKQPCRAPAKPLRAARHKTRQPNAPAFDARGALYAVLGVDLTQIHGLGPYLALKLISECGTDLSAWPSAKHFTSWLSLAPGNKISGGKILSSRTRPSGNRAAALLRLAATTVGRTETALGAFYRRLSARIGKAKAVTATARKIAVLFYNAVRHGMDYADPGASYYEERYRQRVLTNLQRRAKALGYVLQPTEIKGVSLAVS

SEQ ID NO: 435960 - protein, 384 aa, unidentified
MFAGIDIASERHVLARLDDAGGAIGKPITISEDREGYDALLAALGPPPVLIVMEATGHYWKNLFVVLTTAGHDVALLNPLIARRFQETNLARTKTDALDATGLARLAFEKRPAPTHLHDEIAETLRELVRHRDRLRQDFDDRVRQLHRLVDLGFPEFTRYVRSLDSMLATCLLAEYPTAHAFARATPRRLARLRYDGRHFVGPELAHSLVEAAKHSVGQHHGPAYKLQARHICQDLDTWRKRLAEIEHDIENLLNTHVTGKLITSIDGIGPQTAARIIAATGDPAHFKSAGAFAAFVGVVPALRQSGKQKGARAGIGNLGHARLRRALWMPVLSAVRLNPWLRAFYLRLRAAGKPPKLALIAAMRKLLHAVYSVAKNRRPFVTT

SEQ ID NO: 435961 - protein, 531 aa, unidentified
MADKKRNTQRKHIRSEGTYSLDEIKSLTMDDGTRVITSADGDIKRPVCAGIDVHKEILMAAVCKTDSKTLNALFYVRQFKSTNSDIRAMAAWFQGQGVQDVCMESTGKYWIPVFNILEQCGLRPVLTHPKYVKQAKGQKTDFRDAVHIASMFRMDLVVASFIPPADIRDLRELCRYRLKLTYMRTSEKNRFQNSMTVSKVRLDCVFSDPFGKTASSIMEYLIMTEPEDVSDEQILSMVDRRVKASGEDILDSIHGYEFIGIQRDKLKIINLHLGQINECIRLIDEKLDYFRQKYSHIIRHLTTMIGVTEESALYILGEIGTDMSVWRDDAALASWAGLSPANNASAGKKKSTRTGDGGHYLKPLLVQCALAAVKSTKKDPYFHYKYETLKKRRGHKKAIIAIARKMLVAVYHMIRDDADFLPVDHDEVLHNAKKQKGLNLNNIIAFLKEQGADDDTLRLVEKQCGAQEIDAAEEMESVSCAEKKQSVSGSAATSQPIQESINGSPVLISGSKQGRALNHHPKDPAVVDAAT

SEQ ID NO: 435962 - protein, 410 aa, unidentified
MIYVGIDWADDHHDIVITDDSAKTLDQFRIDHTCDGFALLHSHLANHQTSPGLVLIAIETSRGLLVHELLQKGYTVYAINPKAVNRYKDRHVLSKAKSDILDAQALAHLLRTDRHLFQPIKPLPEDYRLLDRLCSDLRKVVDEKSRVTNQVISCLKEFYPKALETFSLNSQIFIDFLKTFPDHGTLNACTKKTFLAFLKKRRYPYPSRAEELWKVIQSPALQPDRVIARSGKLRLGMLLGQLENLKEHITHYEQEIQAILDSLPESNPIKSLPGVGERLAPELVATLGPNSKDGHHRFHAAVEIAKLSGCVPVVRESGKWRTVSLRYACVKPLRRTFHDWAFASINYSSWARAFYDYHKARNQSHCTILRNLGKKWIKILFAVWLKGTTYNETLHIQNLKARNVPWAMAL

SEQ ID NO: 435963 - protein, 455 aa, unidentified
MSNEMIRYVGLDVHKRVIEACIVDQAGNVLHRERFALNRHALHTFATKVLRPTDRVALEATTNCWAVADALRPHVARVIVSNPMATKAIAQAKVKTDKVDAFVLAQLLRCDFLPEVWQPDEATRRLREWTGRRSALVGQRTMMRNRIHSVLAMRLIETPVRLFNADGLAWLAGVELDDQARSLVDSDLRELEFLQHHIDAMDTELARRGYASERIRLLMTLPGVDLATAAALLAAWGDPTRFADADHAASYLGLVPSTKQSAANCYHGPITKRGNSHARWMLIEAAQHLDKHPGPLGHFFRRLAKKKTRNVAVVAAARKLAVIAWRMLAANEPYRYAIPRSTETKLARLRVKATGQRRKSGSPKGVKCTAKLPGGSRTVKPLAEVCHAEGLPQPKPLSPGETRTVNAAGSARFVAQIGQAQIVPRRTKRDATPPAATAPRNARTLRRPSRSAGEV

SEQ ID NO: 435964 - protein, 350 aa, unidentified
MTMVGGLDVHRQQITFDYVDNDGLVHWGQIRPATRKTLRGWLAEHCPDGDTEFALEGCTGWRYVSEELAAAGLGVHLGDPAEIAALRGPKKRAKTDRADARLLRTLLLERRFPESWIPPAHVVEVRTLGRLYCTLMDERRAWQQRIHAQVFHQGCPPIRALLTRAGREALAGAELSAAGRQYVDTALRRIDELSAEIDPLRTQLIGFARRQPGCRALQRHYGVGWLCAVIIWAEIGDARRFRSSDQLVRFAGLDVTVYSSDAKRSPGHLSRQGSPELRWAAFEAAKSAARRGSPDHGYYHKLAAKHDGHNGKNPTLAVERKILRRCYHTLRELGDAALALPVPEPEEVAA

SEQ ID NO: 435965 - protein, 354 aa, unidentified
MSRYYIGGIDVHKNYSQICVIDCQGKKVREQRVHHSVLATRSTMTEAFARALEGCQEVVIEACYGWEWLGDLLEEMGFEVHLAHPYKVKLIAEAKVKTDKVDAHILAQLLRMRFLPEAYSMPKELREIRTLIRQRMQLVKTRTAIKNRIHALLARRGIRIPASDIFGVRGRKIIRGLQLGGHYQEVLERYMKLLEQIEPEIEKIETWMTENLFVDEKVRLLMTIPGVGLISAHVILYEIGEIERFMRDKKLLSYAGLVPQVRQSGDKCYYGRLIKEANKYLKWIMLEIAVPGGISYSPWRRLYNRVKDRYGANTAKVVVAREMLKAVYWVLKKREPFRRKKERVSRRKKLSVAR

SEQ ID NO: 435966 - protein, 369 aa, unidentified
MADLTLFVGLDVHKKTISVAMVEAAAGAEVRFYGTIAHTPDIIRALCRKLTRDGQQLHFCYEAGPCGYGVHRLLTRLGHRCEVVAPALIPRKVGDRVKTDRRDAMMLAQTLRAGQLTAVWVPDEAHEAMRDLVRLRTQAMRDLRKNRQQLLSFLLRHGRNSPYRHGTKMHRRWLGELIFAHPAQHLALEEMLQRIERAEALCDRLKAAILELVPQWSLAPVVQAIQALRGVSLLVAAVIVAEVGNFGRFASPRLLMACLGLNPSEHSSGATIRRGAITKTGNSLARTCLVEAAWTRRFPVRVSQVIRDRLKKLPEPIRNTAWKAQVRLSARYRKLVAAGKPTPKVVVAIARELVGFIWAIARTVEPKFT

SEQ ID NO: 435967 - protein, 336 aa, unidentified
MTEITRIAIDTSKSVFTLHGTDADGRAVLRRNLRRQDMVPFFARRPPMEVVLEACGGSHHWGRVLAGLGHTVRLIPPQYVKPFVKRGKNDRNDAEAISEAAARPEMREVAVKSARQQANAMLLSVRELLVRQRTQLVNALRGHAAEFGHVARLGRQGVAKLLADVAEDAELPTPARDALALLGAEIGRLDARLAEVDARLVAQHKQTPTSKMLAEVPGIGPIGALSLVLRVDFSQFKSGRHFASWLGLTPREHSTGGKTRLGGISRAGDERLRQLLVLGATAVIRQAKPGKASAWLIALLARRPRKLAAVALANKMARIVWAMMTSGEAYRQPATA

SEQ ID NO: 435968 - protein, 340 aa, unidentified
MNQNEKSKGKQKMKSNDSVSVAAELPVLGLDVAKASVQAELRTNGKRVRFGFANNGKGFAQLARILKEHNVPKVWAGLEATGPYSHALALWLHGQGHRVSLLNPRRVKQYARSAGNRNKTDLLDAGIIADFVCAIEPAPWQPPTLEVAQLQALVRRREELSLMLQAEKNRLEGVAPNVRSSLGRMIAALSAEKTRLEKLILQQIRSHQQLSRDHQLLCTIKGIGSLTAAILLAEMARPGQVERARQAAAHAGLAPRREESGTSVRRNRGLGKEGNRYLRKALYMPALVAIKYNAPLRYFASRLHAAGKPKMSVICAVMRKLIHIAFGVLKHQKPFNPSLA

SEQ ID NO: 435969 - protein, 334 aa, unidentified
MSKTIYAGIDVSKAKLDLAMLFPNGSCRDMGEFENIKDGIHSMIAKASKQAKKVRAKHIHFAVESTGKYSNAVVSALRNENGSTVSCVNPAQVNYFGKMTMVRTKTDKVDAKLIATFCSVTKPQPIPETTPEFKKLRELSRHRCYLVQQCAHQKTYLESVEDVTLRQSILSIIDQFKAMIKEVDGLISQHLKSHGSLAHNVDLLCSIPGIAKQTAVTILTELHPERGNGKYTKSVQSAHSGLAPSKRESGAFKGVERISKTGNALLRKSLYMPAMNAMRNNPFVKELYDRLLAKGKKPKVALIASMRKLLMISIGVLNNQTPFDPHWVSIHPNA

SEQ ID NO: 435970 - protein, 339 aa, unidentified
MKLYVGDDLHGNNNFLAMVDRKGKRMEQKKLPNDLSVILEYLKPHQKEIVGIVVESTFNWYWLVDGLMDAGYKVHLANPSAIQQYSGLKHVDDKHDAFWLAQMLRLEILPEGYIYPKEERPIRDLLRKRRHLVKLRTSLIISLQNIISRNCGVQFQANEMKRLKEDRVSPLLEGNEDLALAGKTSKETIDHLTRQIHKIEGAIVHRVELKESYRYLLTLPGVGKILALTIMLETGPIARFAQVGDYASYCRKVPSRWTSNEKTKGRGNKKNGNKYLAWAFSEAAEFARRYDAQARVYYTRKMRKTNFMVAHSALAHKLARAAYYLMKDQVPFMPEKLFS

SEQ ID NO: 435971 - protein, 342 aa, unidentified
MSIVYVGLDLGSSNFQQVALNHDGVSRVNRDFRTSESNLVKAFSDLKGEIHVHLEAGELAPWAASIIAPLVTRVVCSHPQSNAWIAKDADKCDRIDAYKLAELLRLNRFKEVHYAPDQPRRNFKQLVQHYDELTAQQARMKTKLKARLRMQGVIVSGERVFSSRGRKPVLAEVKSPDLRTAITQLYTVLDQSVAAQAEARLLMLRAAQAFPEIRIFRTAPGIGPIGACRFSAYIHTPNRFSSTRKLWKYCRLSVSHRSSNGKPLRRPRLDRSGCGRLKDVSRKAFDVAMRSRQDNGFKRAYQRALETTHDATHARLTVQRKIISTLRAMWLNQTPYSDELMP

SEQ ID NO: 435972 - protein, 334 aa, unidentified
MENVALIGIDLGKHSFHIHCQDKSGKALLRKKFTRMKLMQFLATCPPAVVVMEACAGAHFMARRISEIGHEAKLISPQFVRPFVKSNKNDFVDAEAICEAASRPSMRFVQPRTETQQAMRALHRVRESLIRDKVKTTNQIHGFLLEFGISLPIGDAVIKRLSLVLAEHDLPEYLSRLLVKLHTNYIYLVEQITELESELNHSIKSDDATQRIMTIPGVGPITASLLSSQLGDGKQFSCSRDFAASTGLVPRQYSTGGKSTLLGISKRGDKNLRRLLVQCARSFMMQLEHQQGRLAEWVRKQLSNRHSNIVACALANKLARIAWAITTNHNEYQA

SEQ ID NO: 435973 - protein, 329 aa, unidentified
MGSNLQEEHLILKRFTIDANADLLIGYTARHFPHHHVQCCYECCCCGYHIYHSLTAAGWEVLVVNPGDIARGNKQVTTKTDKVDSAHLARELQAGRLKGIYIPNHKQEQFRSLFRRRNDLVKSLRRIKCHIKSMLLYYGIVLPETYDNVNWSKDMIQWVYKQRWSYAPATEAMKSRLEEYLFLRKQYLHVGNELRSYARKHFKKDYYLLRSVPGIGPLTAIGMLAEVGDIRRFRNIDHLSSYIGLVPSLHSSGEKTYSRGITYRSKRLLRSYLVEGAWVAAKQDPSLMVYYEERKGCDHKKLIIKLAAKTLSRIYHVIKTGEPYELLKP

SEQ ID NO: 435974 - protein, 320 aa, unidentified
MAQQGRIVGIDVAKLKADACIRSLQLRLSQPSTAQGQQDMITWLRRNEVGLAVMEASGGYERVWAEALRAAAIAVRIVDPKRVRYFAKSAGRLAKNDPIDAEMIAWFAETFAAAAEPAHDADRDALNRLVTARSLLVRLATPIRQLGEHGQPRVVENAQRAILKTIKAQLAKLEAAIEAKIAANAQFVARRAIIASVPGFGDHFVAGALAWLPELGRISNKAAAGLVGVAPYDDDSGQHRGERHIKGGRRDIRTLLYMAALGAATRHNPVVMAYYKRLRAQGKKTKVALVACMRKLVVILNTMLARGEMWNPTPRTTAVA

SEQ ID NO: 435975 - protein, 312 aa, unidentified
MPASRPEIGIDAAKDNLVIHHQDLNQTLTIDNTPQAIRQWLATLPKGCDIAIEATSTYHMDITERAHAKGHRVYVVDGYRLSNYRKGVGGRAKTDLADAQLLARHLHKEKDELRPWSPPPKAYRMLQSLLRRRAALVKARTALRQSLSGEPELKAPLQTLIAEMDRIDTLIQKRLKSAVSAAGLQTQVQRCDAIDGVGEITATALVMAFLRGDFTNSDAFVAFLGLDVRVRDSGKLTGKRKLTKQGDTEVRRLLHCAAMSASRHPVWRAFYQRYRDRGLHTTQALVILARKIARTAFALMKQQQEYCPAKLF

SEQ ID NO: 435976 - protein, 370 aa, unidentified
MKPNFEPSKWFMQCVGIDIAKSTFTACLCMYEFDMGCSTAPVVFNNNKTGFNQFVKWSRKEALKGYPLRYLMEPTGVYYEALACHLYKLGLDVCVVLPNKARDFAKYEGILTKTDDMDAYTLGMMGCLDKRLKTWTPPSPIFKELRQMTRFVADINKVKTELNNHLESLAHSETAEKSIVKHYNKLIDKIDKQLASNEKAIREKVKQEPGLAERIDRIVTIKGIGYMTVITILAETSGFALITNRKQLTRYAGLDVPAHQSGPVDPKRHISKQGNVHIRTALYFPAIVSTQYNPQMKEFYARLCKKNPQSKMVGVTAIMRKLLLLIYSLWKSGEKYDQEREKPVCSRKKKEAEPIGVQPHGIDIGTVAEE

SEQ ID NO: 435977 - protein, 408 aa, unidentified
MEVFHQRCAGLDVHKEVIYICVLIGQGRSFQKFKFKFGTFHHQLIEMRQKLVELGVTHVLMESTGVYWMPLYDVLEGFLEIVVGNAQHIMNVPGRKTDESDAEWLAKLLCYGLVKPSFVPQRQFRELRQLTRYRRAVVQTRASEQNRVEKHLQIAGVKLSSVASHLFGVSATHMLNRIAEGTTDPTRLADLALGRLRKKIPQLRDAFQGSISEHTQQLIATQMDQMNRLDCTIAQIELKIDHKVQPYAQILARLDQIPGIDLRSATEILAEIGTDMSAWATHRQIAAMAGLCPGNYISAGKRLKNRSRQGNPYLKSILVQAAAAAINTNGSYFQNKFRRLKQRRGHKRALVAIAHAMLVTIYSMIKKGEPYRELGANFVTDYENGRKKNDLVKQLQKLGYSVSLTEIA

SEQ ID NO: 435978 - protein, 397 aa, unidentified
MKDSITSDSVNTTVPQAVAAALQLSEADPAAAGICCFVGMDVHKDSVAIAVAEVGREAPRFVGMVGPELSQLLKALKRLGPPDTLLVVYEAGPCGYTLARQLRARGYRCEVVAAGKIARRSNERLKTDRRDALTLARLARSGDLVNVVVPDEGDEAIRDLSRSREDAVKARLRARQQLKAMLLRHGHRYTGKRPWNEAHERYLAEVSFAYAAQNIAFTEYRAAVKDAHERVERLTESMRAQTEHWRLNPLVRALACLRGIDFIGGTTLAAEIGDFTRFAHPTEVMGFVGLVPSEYSSGDTRRQGGITKTGNSHARRVLVEAAWNYRFSARISREMQIRQEGQCKAVRDVAWRAQLRLTRRYRQLSSRKLQPNKICVAIARELAGFVWDVARHVKVTG

SEQ ID NO: 435979 - protein, 352 aa, unidentified
MLIIGCDFHPGFQQVAIFDNQTGEYEEKRLGHRAEAEQFYCGLRGRQVRVGMEACGHYPWFERLLSGLRFELWLGDASKIRAAEVRKQKTDRRDAAHLLQLLIEERFPKIWVPSLEERDVRQLLVHRHKQVQTRTRIKNQLHALALSQGLQRKRKLWTQAGRAELEQLELLPYAAARRQQLLEALDRLEQEVAQLNQRVSTEVAQRAAAVKLMTHPGVGPVTALAMVLTLGPAERFGSPRQVASYFGLIPSEHSSGGRQRLGHISKQGSPFLRFLLVEAGQSAARYDSVLGRFYRRLAVRKHRGLAKVAVARKLATRLYLMLREDWTYAQLCRAVVQVSPSHSVDGKQKPSA

SEQ ID NO: 435980 - protein, 351 aa, unidentified
MASSKHHRGTTMSYYAGIDVSLEASHVCVIDGSGKVVREARVASEPEALIAWLGSVGLELTRIGLEAGPLSQWLYAAMRDAGLAVELLETRHVRNAFKIMPVKTDRKDAQGIAELMRLGWFRPVHCKSMEAQETRAMLTARKLVQKALHEVEMSLRGVLRGFGLKIGKVAPMQFEARIRELVEGHPSLEVIVTAMLAVRATLRRELSGFEKRLRAMARSDMRARLLMSVPGVGTIVALTYAAAIDDPTRFTSSKTVGAHFGLTPTRYQSGETDRIGRISKIGDASVRATLYESAHIIITRPVKGCTALKSWAMRIAKRAGMKKAKVALARKLAVIMHRMLVDGTTFTTQPA

SEQ ID NO: 435981 - protein, 383 aa, unidentified
MKNTMVHDEGAASLEDAVKRIKLSGSMIKIGLDVHARLYVAVAQYDHLLPKPARRLAPWEFLPWVEQLLRAGHTVHVVYEACGFGFSLYRELKALGAHCYVIAPRKLDEQCTRVKTDPRDATTLCQRLSRYLDGNTRELAVIRVPTEEEEQDRHVSRQRQQLVHLRQKLEAQGRSLLISHSLPSPAHWWKNQTWSRLRKLLPAWICIRLEVHRPALLTLQQQIDALTAELEAAAPADVPLGIGKLSTVVMTREICSWERFNNRRAISCYTGLCPGERTSGSKRVPGSVTKHGNPRLRAALVECAWRMVRFQPNYPPVKKRLSVLAKGARATGAQRKKAIVAVARHLAVDLWRIHTGRCSAAQLGLTNTETLSCSRGTVVNPLA

SEQ ID NO: 435982 - protein, 322 aa, unidentified
METVAVVGVDLAKSVFQMHGVDESGAVVLRRRVSRGQFVKLFAKLPPCLVGMEACSSSHHWARQLMALGHEVKLMPAQYVKPYLKRGKNDAADAEAICEAVTRPTMRFVGVKSPEQQAVMMLHRVRKILTRQRTQLTNALRAHLAEFGITARVGRLGLDRLLAVVADPNDDRLPTQARESLAVLASQLEMVKEQILDNDRRIMADARRSEAGRRLMKIPGIGPLLASAIVASVADPAMFSNGRSLSAWIGLTPRQNSSGGKERLGSITKAGNGYLRELLVMGAMAVVRHTPPFAAHCWTQHRDTVLNDSVEEVLRYEPILVV

SEQ ID NO: 435983 - protein, 338 aa, unidentified
MKVYAGIDLHSSNNYVGIINDQDQRVYQKRLPNQLEHILEALEPFKESMEGVVVESTYNWYWLVDGLQAHGYKLHLANPSAIKQYEGLKHTDDKWDSFWLAHMLRLNILPEGYIYPKEERPVRDLLRRRLLFVRHRTAQILSLQSSITRNLGYKMSARDIKKLDKLDADKLFEDSFLILAAGNTISTIRFLKTRIAEIEKAVKAHIQLTPQFRYLLTTPGIGEILGLTIILEIGDIRRFPKVGNYSSYCRCVKSERLSNSKKKGEGNRKNGNKYLAWAYVEAAHFAIIHYPEIQSFYQRKKVKTNGIVAIKALSNKLARASYYVMRDQVPYDPKRLFR

SEQ ID NO: 435984 - protein, 469 aa, unidentified
MKFKMQDKQNQLIERITEKHLVVGVDIAQQFHVARAVNFRGIVVGDPITFPNNEEGFSSLLIWINSIKSLHKLEAAIVGMEPTGHYWINLSKWLMKQDIEVVTVNPHLVKRNKENRDNTQSKSDKKDALVIADMVKNGYYSFVRDTSESFEKLRVLMSNRDVIVKRLVSSINQLNRWVDIVFPELRQVFKDITAKGAIATLRLFPSPMELGSMKPEEIVAGWKLLMKRQPGLKKAYLLLNVARKSVGTRQALEAYKFHLEQLLEEYDLAIQQLERVELAIKDELPKIPFANKLLMIKGISEISLAGILGEAGDLSGFSHGNSLLRHAGLHLAEASSGKWKGQIIISKRGRSRLRRFLYLATMSLVMNNPEFKALHSNNVKLKKMKKMKSIMKLIGKLARIFVGIARKNEAYCAKKVQPLTELARSPIHFFSKRIITPYIFKDRVLAYSQDFKYVRSTRFVQQKGTDPSG

SEQ ID NO: 435985 - protein, 325 aa, unidentified
MNIANFVGITHNSDNMSQISFDRVVSKGCGLDVHQKIVVATIDGDGIKKVTREFGTFTRSLTELRDWLLEHGVTHVAMESTGVYWKPVYHILEPTGMKVWIVNARHIKYVPGHKTDKKDSAWLCKLLLAGLLKPSYIPPREQRELRDLTRYRKKLIESITANKNRIIRILEDCNVKLSSVLSDTSGVVGKKLIDRLIDGRQITMEDIDYVYHRKLQASKEELLEACNGFITDHHIYMLRMIRTDTTSTESLISSIDTRIKEMLAPYDNVLALLKGVPGLNDKSIEDLVAEIGLDMSAFPNEKHLCSWVGIAPGNNESAGKKKVDA

SEQ ID NO: 435986 - protein, 383 aa, unidentified
MSLQNAPNINVDGKMDVSNIHFINENAGGAFMAKYNIGVDYHKKFSYLVVKEEKGRVLRSGQITNSKKAVADFLKPFKDDSTAVLESCRNWCVMHDWLEDIVGDVILANPYKVKAIAEAKIKTDKIDATVLADLLRADLVPQAYIAKRPVRDMRNLLRERIYFVRLRTMTKNRITTIFDRYPEEVRKEKAKTDLFGKKGRAQLENIELRPADRALINRELNFIDFINVFIKEVEEVIAENFQISKNAKYLKTIPGIGQFFSMLIDAEVGDINRFRNEKKFAAYIGLVPSTYSSGGNTVNGRIIKRGNKLLRWAFIEAVIPAIAHDEYMRWEYDKLRERMNYNKAKTAMARKLSSIAFKCLKEQRNYKKFNKIELEYKKLGRAS

SEQ ID NO: 435987 - protein, 417 aa, unidentified
MLKIVNRNCAGIDVHKKIIVVTIAKTNEQDITEYQTKSFLTFTEDLIKCRNWLLSNNTKDVCMESTGKYWIPVFNILEKDCNCVITHPKYVRTILGKKTDKKDSVWIADIFKHGLVEPSFMPPEDIRQLRDLMRYRNKLVYNRTGEKNRFQNSLTVSNVQIANVLTDVFGKTSQSILKLMLEQPNLTLEDIKPLLRKNLKSSPEDILKSINATFDECQSSKMAICLKHYDSINECIEALEEQILKIAIKFKTEINLLLTVPGIKELSAIFIIAEIGTNMNVFVDDKHLISWAGLSPRCNESARKKKSVKITKAGVYIKPLLVQCALCAIKDKTCPYIKARYESLKRRRGHKKAIIAIARLLLTSIYHILNTGEVFDYERFDKLLNRNFKSQQKAKNTPEEMISYLTSLGYEVTMQNT

SEQ ID NO: 435988 - protein, 363 aa, unidentified
MFTERTSVGLDVHARSVAAAAIDSVTGEMFHARLTPSYDHIRSWIADLPGPVAVTYEAGPTGFGLYRYLSEASIRCVVAAPSKLHKPAGDRVKTDARDALHLARLLRLDEVTSVSIPSVEQEAARDLVRAREDCRGDLMRARHRLSKLLLRHGIVYYGGQAWTGAHDRWLRTEAAPQLTSPATRMAFDADYDHVLTMQARRRRLDAAIEEMATASEFTPVVRRMCCLRGVSTLTGFGLAVEIGDWTRFTGNTIGSFVGLVPSEYSSGSSRAQGSITKTGNTHARRLLVEAAWHHRARYHIGAGLRSRWDLAPAAARARGDEGNRRLHGRWVGFLERRKRPVVANAAIARELAGWCWSLAVMDC

SEQ ID NO: 435989 - protein, 357 aa, unidentified
MNTTQTISFANVHFFIGLDAHLRNWKVTIRLDGMELKTFSMNPSPLELLTYLQKRYPDGIYHIVYEAGFCGFWALRIFREHNIDCIIVNPADVPTTNKEKVNKSDPIDSRKLARELENKSLHGIYIPDTFHEELRMLMRLRYRIIQSQTRTKNRIKGLLYTQGIHIPLQFSGRARWSHAFILWLQQLHLNTDAGNFTLQNLIMQLKEIREHNKNVLKQLRKEATKDDIVPIMKALQGVPGVAFITAMYLYTEIMDMKRFSNDEHLVSFVGLVPSTQTSDENVYSNGISFRQNSFLRTMMIEAAWTAVREDPAMTLKFKELTKRMNSQNAIIRVAKKLVKRIRHVWLKQDEYVYGLVA

SEQ ID NO: 435990 - protein, 479 aa, unidentified
MKIIHPVCCGVDVHKDIIVATIATTRNIYDSSYITESFTTLNPDLIRFRTWLLDHNCFDVCMESTGKYWIPIFNILEEANIHVLLTHPKYVRAIKGQKTDKKDSKWIADLFKCDFVRSSFIPPKEFRAMREIGRYRFKAVAMRTSERNRYQNCMTVSNIGLASVLTDPFGKTAQNIMSYALKSEVFDNEQCKKLILGMAKKKESQICEAMQGFHIEPDQRFKMNEAGAHMQYLDNLILRTETELFVRVQPYWNIIERLSKQIPGISLLSAALIISEIGVDMSVFESAKHFTAWAGVVPTNNESAGKKKSVRISKAGQFLKPLLVSCALAAIKSKEEPYFANKYNAIKKRRGHKKAIIAIARMMLVCIYHMILKGEDFNPSDYAELNAPKPHRVVLTDAVAIAYLAARGYDVSSMTKPALEVTTVETPSEPELSVEIPSEAILSAEKLSMNKPTMEYVVKPTLKKQPVKKKQSVKKAEAG

SEQ ID NO: 435991 - protein, 329 aa, unidentified
MTKNSIVCAGIDTGKHKLDVAIKGVKGQLLELLVENTVDGHKVLSAWLREHKVKRVGIEASGGYEQAVVLYLRKKKFVVVVFQPKQVRAYATFNLQIAKNDKLDAALIADCTAAIKEINAPPDERMTAFAKRMTFIDQITEDVARIKTRCESCRDKQILHYWREEIARLERRKKAELKALAAAIREHDDLSKRLDLIESIDGVGLVTAVAILVRMPEIGTVTREEVAALAGLAPYDHESGNHVGERHIKGGRGRLRKSLYCAALPASMRWNHQLVSMYRRLIAAGKLHKVALVACARKLLIFVNTVVERGSPWEKSRAPGKFELGLRAA

SEQ ID NO: 435992 - protein, 392 aa, unidentified
MVVSVGIDVSKDKHDCFILSSEGEVLADVFTIPNTMDGFNCLLQRIQDCTGPQDKIKVGLEATGHYSYNLLGFLLDNGLTTYVLNPLRTNLYRKSLSLRKTKTDRVDARTIASMLLSDAGLKPYTDTAYHNEELKSLTRYRFDKVQERAKLKSSVSRLACILFPELEKLVPSVHIASVYALLEEFPGAKQVASAHLTRLKALLETASKGRYKRDMALAIRNAARNSIGSRMPAKSLELQHTIRLIRELDTEITEIEEQIQSIMDELHSPITTIPGLGFRMAAMILAEVGDFSRFDSPDKLLAYAGMSPSTYQSGQLKNCYPHMEKRGSRYLRYALFNATKYVCHWDTNFAAYLAKKRAEGKHYNVAISHAAKKLVRLIFAMEKSGIPYHLTV

SEQ ID NO: 435993 - protein, 389 aa, unidentified
MLCVGIDVAKRKHDCCIIDSDALKTVESFTFPNSREGFDMLLSKISELGIPKDKIRVGLEATGHYSSNLAHFISEHDLPLNIFNPLLTNRYKQGFSLRKTKTDKVDACAIAQMIVSGKASQTYSPLLYHNEELKSLSRYRSQTIQKCSKLKISVSRLVTILFPELEDLTSSIHLASIYALLKTYPGHEQIAHCSMKRLTRLLSDASQGRFDKSKALEIHQAACRSIGTVSLSASMELVHAITDIEVLKQHVAEIDEKIKEMVDQEESSIIDIPGIGYTLCASILGEIGDFKRFPDVDKLLAYAGMSPSKYESGGFHSNHNKMEKRGSPYLRKTLFVAARLVAQNVPKFKEYLEKKLSEHKPYKVALSHVAKKLIRLIYRLGVSRCPYLA

SEQ ID NO: 435994 - protein, 390 aa, unidentified
MRIGLGLDIHDEKCAAFAVYAGGGRPKKNQQEFLDEFNVLFRRVKTNPEDMAKMIEYLDGHEVHVLIENSTIAHRVYRMLTELGCNVLVAQSADLDRIVNSVKKNDDNDARELAAYMRRRLHGEYEFAVCHIPSPDCMARKELVRAVYIDKIELANTKKRVRARIKIHGADLRNYQDVSCPASLKQLKATRDPYLCYQARVMSDAKSRIEEATRLIDYYFGKEEDYTLLMTIPGIGPVMAGYLTTIIDGIDRFDRSSELEAYFGLVPKQHASANSDPDCRTTHRGDRYAREFLGYAVMAHIKHAPDSVVTHMWHRLKSRGKNHKKVLRACSRKLLKVVWSVLKHRRPFTTDTNLLRLARGSAAEIESRLSELEDAEVDEVCDSMEVSAKE

SEQ ID NO: 435995 - protein, 388 aa, unidentified
MGKFSKYVGLDTHKETIAVSIADAGGGKARYFGEVANRPAAIKKLLDELSREGEVVSFCYEAGPCGYGLYRQITESGHDCTVVAPSLIPRRPGDRVKTDRRDSEALARLHRAGELTAVWVPDEEQEAMRDLTRAREDMKQLERRSKQRLNAFLLRHGRHYTSGKSRWTQAHWRWLEKVTFSQPVQQIVMQEYIDSVQQLRCRVTDLEEEMARAVGQWTLAPVVEGLMALRGCRLITAMTVVAELGDISRFDTPRQLMAFLGLVPSESSSGPKRRRGGITKTGNGHVRRLLIESAWCYRFPARKTAPLQRRAEKTSAAVQAIAWKAQKRLCTRFRALNDRGLMRVKISTAIARELSGFMWAIACEVMAQQPSLAGVAAVNASTAVNHRH

SEQ ID NO: 435996 - protein, 341 aa, unidentified
MTELTRIAIDTSKSVFTLHGVDASGRAVLRRNLRRQQFEAFFEKQPAVEVVLEACGGSHHWGRWLTRLGHRVRLIPPQYVKPFVKRGKNDRNDAEAICVAASQPSIGEVPVKSAAAQARAMLLSARELLVRQRTQLANALRGHATELGLVAPIGDTGLTCLRGEIATAADELVPPEAKEALKLLGQEIDRIAARLAEIDARVKKQFLADPLARRLAAIPGIGPITALNLALRVDPGQFKSGRHFAAWLGLVPRERSTGGKQRLGGISRAGNERLRQLLVVGATSVIRHATPDRPGVSPWLVELLKRRPRKLAAVAWANKMARIVWAMMTSGEAYRPARATA

SEQ ID NO: 435997 - protein, 401 aa, unidentified
MSLHAGLDWGATGHAVCVIDEGGAIRARIECPHTRAGLADLLARLKRLGPPAELPVAIERPSGLVVETLVTAGHPVVPIHPNVVKACRPRYRAAGGKSDPGDAYMLADILRTDGHRFAPLTPASDDIKALRALVRGRDDLLATRVGLANQLRALLDSFWPGAAAVFAAVDSPVALAFLDRYPTPGSAGRLGPKRMRAFMAQHRYCGRRSAEDLIERLRAAPAGLAGDAEADAKGELVRALVRSLATLVGAIAELTSRIEHAVADLPDGRIVMSFPRAGRVNAAQILAEIGDVRARFQSEDQLAAEAGVSPVTHASGKSRGVVFRFACNHRLRAAVTCWADNSRHACAWAAERYAKARGRGCDHPHAVRILARAWLRVLWRAWTDRKPYDPALHGAAVRLAA

SEQ ID NO: 435998 - protein, 364 aa, unidentified
MASIPRRDLIHLGMDVHKDSISIATLRPDDSMDVEKIFHDEASVRRFLHRFPDRRSLSTCYEAGPTGYELHRLIEGMGIRCDVVAPSLIPKAPGDRVKTDRRDARKLARLHRAGELSAIRVPTPIEESVRDLCRARADMVADLDRARRRLGALLLRHGQVWRGGTRWTLKHHAWISSLSFDRPALQATLSHYRAVVEVRTAEVEAIERDLLAYSDLEPFADAVRRLCAYRGVARVGALTLASEVCDWARFPRASAFMGFAGLGVTEYSTGGKTRRGHITKTGSTHLRTQLVEAAWSYQHGPSVGPTLRRRQEACTPDTVARSWAAQRRLCARFRTLAARKNVKSVVAAAVARELGGFLWGEMTA

SEQ ID NO: 435999 - protein, 338 aa, unidentified
MSIVMGLDQHRAQITAEWIDTATGEIARARVMPAHRESVRRFLDRFGGRRLEVALEATTGWRFVVEELHAIGADAHLAEPAETSARRGNKKRAKTDRADARHLRELLMIGRLPESWIPPAHLLDLRARVRLRHTLCAQRGEWQQRIQAVLYHHGCPQRRSLITADGRAWLAQQPLPDTAREQVAVAIAMVDALEVQIAPLDTQLRAYARRQRGCRALMAHYGIGELTAVTILAELGDASRFSNSRDAVRYAGLDITVKQSDQRRAPGHLSRQGPPALRWALYEAAQVARHPRSPDRDYYLTAAERIGGNRACLAIARKLLKRSYHTLRELGEEALTPA

SEQ ID NO: 436000 - protein, 343 aa, unidentified
MYYIGLDVHKKTISYCVKDAAGHVHREGKIGSTRRELDCWLQTLPQPRTIAMEATIFTGWIYDHLLPHAEKVKVARPLMLRAIAAAKKKNDKIDAGKIADCLRCDFLPECHMASTAIRDRRRTLRYRNLVVRQMVQMKNRVSGLLMETGVSYNKQRLHKVGYFAELMSSNEEVQESIRPLLKLSREMIGRSQKLEYALVSSLERDPLLKERLRRLRTVPGVGPITALTWALEIGDITRFASIKQAISYCGLCGDENSSADKVMRMPLSKQRNKHIQRVLVEAAKLAPRECHELAAIHARELEKGNKNRATLAVARKMVCYMLAVERRKQDFVPAEEFNRTAAA

SEQ ID NO: 436001 - protein, 339 aa, unidentified
MQVTTIGVDLAKNVFQVHGITEADEVAFNRPLRRAQVLPFFARLEPCLIGMEACSTSHYWARELTRLGHEVRLIPPMYVKPYVKRGKSDAIDAEAICEAVTRPTMRFVETKSVEQQALLSLHRARNLMVRQRTQLVNALRSMLAEFGVYIARGLARAISFSQGVLAGTDLELPKIAQDVVQNLCGQLDVLHRQVRWYEVHLRLEAKRDPRVRLLQTIPGVGPVTASAIAASIGSGHQFKTGREFAAWLGLTPTNRSSGGKERLGRITKMGDQYLRQLLVVGMTSLVRQTKSHPERANKWLTALLERKPARLATVAMANKTARIVWAVLTKNEPYMPRRA

SEQ ID NO: 436002 - protein, 356 aa, unidentified
MRRLYAGIDLHSNNNVVVITDEADTVVYRKRRRNDLGAVLEALAPFGKQLEGVVVESTYNWYWLVDGLMAQGYQVHLANTNALQQYTGLKYADDESDAGWLAKLLRLGILREGYIYPRAERPVRDLLRKRAHLVRQRTANILSVQNLLARNTGQNISGAGVKHLDEASVEEMLPNQDLALAVHSSVAVMGCLDTQIARLEKVVLKRVRLREEFQGLLTVPGIGPILALTIVLEMGDIKRFPDVGDFASYARCVNGSRNSNNKRKGGVNTKNGNAHLAWAFMEAAHYAVQYDETIERYYQRKLSKVHVMVARKTVAHKLARACYHILRDHTTFDVTRAFGPSKGRKRLDETASSPRD

SEQ ID NO: 436003 - protein, 354 aa, unidentified
MKIRRVGVDLAKNVLHVHGVDRQEKVVWRRQLRRASWLTVLLEKVEPGCAIGMEACAGAHHWARKLQAHGMVVKLMAPQFVKPYVKSNKTDRNDAEAICEAMSRPTMRFVQVKTVEQQDIQAVHRIREELMSQRTAKANQIRGLVAEYGLVAPKNLSHLRAALPEWLEDADNGLTERFRRLLLGLWSDLMELDRRIGELDTEIETMAKSDPVARRLQQLRGVGPLIATALVAAVGNGEQFTKGRDLAVSLGLTPRQHSTGGKERLLGISKRGDSYLRQLLIHGARSVIYRSKDKDDGLSRWVQGLAARRHINVACVALANKTARMAWAMIRNGTDYQPQRAAQPLASTEEQTIT

SEQ ID NO: 436004 - protein, 367 aa, unidentified
MRKPAAREQDRPDAPEVRVTLGVDTHADVHVGVALDHLGRRLGTHTIPTTPAGYAELAAWAASFGPLDRVGLEGTGSYGAGLGRWLRERGFTVLEVERPNRQTRRRRGKSDPIDAEAAARAVLAGTATGRPKAGDGPVEMVRTLQVARRSAVRARTQAANQLHALVVTAPERLREQLRPLSLRRRVATAVAFRSGTPLVTPTAATKAALRCLARRYQQLSAEMEALDAQLSHLVSHTAPALLAVKGVGTDTAAVLLAAAGDNPDRLRSEAAFAHLCGVAPIPASSGKTTRHRLNRGGNRDANRALHLLAVRRLAWDPRTRAYAARRTAQGKTKPEILRCLKRYLARELYPLLAGPPIAAAHAPTLAA

SEQ ID NO: 436005 - protein, 339 aa, unidentified
MAIVGGLDLHRRQVTFDLVDTVTGVCQRGRIAPADRESFRGWLAGLGRQRVDLAVEGCTGWRFVVEECQTAGVRAHLAEPADVAGLKGRRQHAKTDRLDARHLRELLEAGKLPECWIPPGHLLEVRAKVRLYKDLLEERSGWQQRVHATLFHLGVPAQTRLFDGDPGGLARLEALSPATRQATAVALRMIDALDRELSALRAELVAFGRRQPGCRELQHEYGIGALTAVVIWSEFGDARRFRNSRNAVRHTGLDISVYSSDGKRSRGHLTRQGPPLLRWALYEAGRCAARQTSPDHAYYEQVARRVGKQRAALSVARKLARRCHHRLRALGEDALAPVE

SEQ ID NO: 436006 - protein, 416 aa, unidentified
MCLSEAKGMDIKMYNAVGIDVSKGKSTVTVLQPGGTVIRKPFDVSHTSQNLNELAAYLDSLDGDTRIVMECTGRYHEPMLKVLYEAGLFVSVVNPHLIKNFGNNSLRKVKSDPADARKIARYTLDNWAELRQYSGMDNTRTQLKTLNSQFSFFMKQKVAAKANLIALLDNTYPGVNKLFDSPPREDGSEKWVDYAYSFWHVDCVRRIGLKTFTERYRAFCRKHHYIFQPDKPEKLFHASKELVAVFPKEKTYKLLIQQSIQQLNLASGHVERLRQEMNALASTLPEYNTVMGIYGVGKTYGPQLIAEIGDVSRFTHREALTAFAGVDPGVDESGQHKSKSNRASKVGSARLRKTLFQIMTTLLQNAPEDDPVYRFLDKKRAQGKPYYVYMTAGANKFLRIYYGKVKECLRNLEQAE

SEQ ID NO: 436007 - protein, 429 aa, unidentified
MNSTQNKKIEQVKETTMIVGIDVGSEKHYFRAFNWRGIELTRKPVAFSNSMEGFNSFYNTIVELMQKSELEEALVGIEPTGHYWFDLGQFMGEKDIKFVMVNPHHVHKTKELDDNSPSKNDRKDPRVIAGLVRDGRYFYSYMPTGVYAELRNASNRRFVLVEEQTRAKNRLQKWIAVYFPEYKGIYTHIDAKGGMLVLKKAPTPEEIVRLGVEGIIKIWKDAKLRGNGHKKAMLILAAAMRSIGLKAGLTEARMEIQDLIEDYELQTKRLERVNDLIKELCQQIRYADKLLEIKGIGITTVAGFIAEVGDITRFDSTKELQKLAGLELVADSSGKHNGKTKISKRGRKRLRYLLFEAAISVVGKNEEFKEIHRYYTTREKNPLKKMQSLIAVACKLIRVFHVILTKGVSYDASKMLEGIRHPGEQLKAA

SEQ ID NO: 436008 - protein, 340 aa, unidentified
MEKRYIGIDLHRNRFTCCIRLENERTYVTEWELEDLGKFVKKLRPTDEVAVEITGNTRLFHDAVAPQVARVVVVNTNQFKVIRQSVKKTDPNDAKTLALFLSKNMLPEVRMKDKEHGQLASLTQTRDTLVKLRTALKNKINNILSARGLNLPKEALSSEKRLNEVLSLPFDEMVQIELRVIVTQIRSLNASIADLEKTIGEAGSKLEGHKSLSSIKGIGKITGAILLSVIGDVNDFADEGHLASYFGIVPRVSNSNETEHSGRIHKRGTKLGRTALVQSALIAANYSPYLKRFYEQVKARRGAGKAIIALAKKFLGVIYRTLKNKWVFEDFPNFVLAEES

SEQ ID NO: 436009 - protein, 342 aa, unidentified
MTMIGIDPHKATHTAVAVDDNEVVLDEFRVRASAVQAQRLREWAAGFEKREWAVESANGLGYLVAQQLIAAGETVFDVPPVLASRVRVLGSGHSQKNDPNDARSVAIAALRSDRLAQVRPDDHVRVLRLLAKRHRDMARLRNKHCTRLHALLLELEPGGISSEITVTKANQLLERVIVDGEVTRHRVLIAGELVDDIARLDSALKTSKKRIGVAVAASGTTLTDIVGIGPVCAAIIIGFTGDVTRFPTKGHFATYNATAPIEASSGDRPRHRLNPRGNRKLNHAIHIAAICQLRYPSEGRTYYDKKITEGKTSKEAVRALKRRISDRVYQHLIADIRRTSTT

SEQ ID NO: 436010 - protein, 344 aa, unidentified
MTIVEDARAITGGVDTHSEVHVAAALDPVGGLLGTREFPATRAGYAGLLGWLREFGDLAVVGIEGTGSYGAGLARHMAAAGVQVVEVDRAGRQDRRRKGKSDPLDAVSAARAAQSGRASGMPKGRDGAVEAVRALMVAKRSARNERTQAVNQARALILTGPDELRARFAGHCAAALAAGITALRPRPGDAADYSVRIALRELGRRVEFLDAQIERLDDLIVPLVTVRAPGLLSLYGVGPDTAAMLLIAAGDRPERLRSEAAWAHMCAVAPIPASSGKTRRHRLNRGGNREANHALWRIVITRMSAHPATRAYVKRRTAEGLSKKEIIRCLKRYVAREVYPHLRG

SEQ ID NO: 436011 - protein, 420 aa, unidentified
MNDSQQWQQHRAFGALDWASEKHSVVLVNQTGKVIEDFEIEHSALGWKKFREKLQPYGSIPFAIETSQGVAVEQLLEAGMLVYPLNPKSAQAYRERKAPSGVKDDRLDAWSFADALRMDGQNWKALRPEEPLIKELRLLCRDEVTLIEQRTAFVNQLRHALAEYYPAALEAFEDWTSLSAWMFLQRFATPESLAQAGKRQWQKFLHSRRLWGSDQGPRRMEIFAHATEFTGTPPTVKAKSLLAQSLVQMLFAIEKQLAVYRQRIEELFARHPDHDLFGSLPGAGPKIAPRLLSEIGDDRQRFGGDPQNLQCLAGSAPVTKRSGKQRKYWPVHQRWACDKHLRHALHLFSEQSLSRCVWAEIYYQHHRQKNQSHANALRRLSHRWLKIIYKMWIDRTPYNAELHHRNQLQHGSWIFQLQKS

SEQ ID NO: 436012 - protein, 342 aa, unidentified
MDHFAGLDVSVKETSVCIVDDTGRIVREVKVASEPEALLPVLKNPAYHFKRIGLEAGPLSQWLYSALAESGLPVICVETRHMRAVLKAQINKTDRNDARGIAQMMRVGLYRSVHVKTLRSQKLRMLLTHRKLLQSKAIAIDNDLRGTLRNFGLKVGVVGKVRFEARIRELVENLPDLAALVEPLLIVRRTLREQFCILHRRLLAIVRDDEVCRRLMTVPGVGPVVSLTYRATVDVPARFRKSKSVGAVFGLTCAKYQSGEVDWSGKISRCGDEMMRVMLYEAAQSMMRSKKWSWLKAWAMQIARRCGMKKAIVALARRLAVIMHRIWIDGTEFRWTREAAAA

SEQ ID NO: 436013 - protein, 408 aa, unidentified
MKRYYVGVDWADREHQLYVGDEQGGKIAEMKVQEIPEGMAQLGRWLDESRAAGIELWAAIEKPHGRIVDFLLDHTVVVYPVNPKALDRVRDRYRMSQSKSDPFDARVLSEFLRTDHAHLRPLRPSSEQAQELKLLTRDQHRVVRHNTRLLNQLKITLKEYYPRPLEVFGDLDTQIAQDFLKAYPTPAALSELKRKQWNRFATHDHHLGKARCDELWEKVNKPQLMVPQHVVRAKAQLVEVLLEQLKPSLRAVKTYNERVECFFASMPAAEIAQTLPAGKSGTLVPMIWAELGDAQDRWESFPHLQAEAGVVPVTRSSGKSHVVQFRFACNKHLRHAAYLFAFASLNRSEWANRYYRDQRAAGHSHPQALRALGAKWLKIIFVMWRDHKPYDENYHLANIARQRMRQAA

SEQ ID NO: 436014 - protein, 310 aa, unidentified
MKSQTVYIGIDVSKASLQIDPFDHKTLEVPNIKSSILRLIERLKAHGDCTVCCEASGGYEKTLVVELMAAQVPVCLLNPKRVRDFAKSKGILAKTDKIDAAVLTAFGNQNQPSPKQPNPEWIERLQSLLIRRGNLNEMIKAENSRLDPEPPRHICKQIRSHLRFLDKQKAAVEAELKDLVKDIDELRSLYARLSEVKALGPITVLHLIGFIPELGQITDKQAAAIVGLAPFNKDSGTMRGRRFIQGGRPRIRKPLYMAAIVAKKHNPILKTFYDRLINQGKPPKVALIAVMRKLVVLSNRIAANPDFILS

SEQ ID NO: 436015 - protein, 349 aa, unidentified
MAEHIETIGCDLGDKRSDLCILRPDGQLERPKPLRTTRQAFIKYFTRPPAHVVIEVGTHSRWVSELLGKLGHKVTVANPRRVKLISQSTRKGDKEDAEWLARLGKADEQLLAPVQHRGHEAQADLAVAKSRDALVRTRTKLVNHARGLVKSFGERLPTCTAESFHRKAWTAVPAALKPALEPIFRVLEQIELQIDALDSQIEQLAKKYPEVKVISQPKGVGILTSLVFMLTLEDKARFTKSRAVGAFIGFNPKRDQSGDCNKQLGIAKTGDAFMRRLAVGSANYILGPFGQDSELRRWGMELAKRGGRNAKKRATVAVARKLVVLMHRLWVTGEVYEPLGYKTQKSTAA

SEQ ID NO: 436016 - protein, 330 aa, unidentified
MQYLGIDISKNKFDCCIFLNNQKKKTKVFDNNHSGFIKLNEWLQKLEIEILELVAVMEATSIYHENLAYFLYSNNIKVCVANPARVRKFAAGISVLTKTDEVDAEVLVKYGELAPYNIWQPDSDQLRLLKQLILRRDAYTSELNREKNRLDQAYSNNTNSKLIEIIQLDIENIKNRIQYLDKLIDETIDDDISLKQDLCLLESIPAIGKRTALTLLTLFKGKSFTNAGQAAAFCGLVPLQRQSGSSIRGVSKISRSGSSKIRSKLYMAAVVAIRHNPHIKIVYDRLLRNGKAKMAALCAAMRKLIHIAFGVLKHQTPYNENLIGFAKIPC

SEQ ID NO: 436017 - protein, 438 aa, unidentified
MDNYAGVDWASDKHDVLVADERGERLLAAAFAHDEQGLRSLCRQLVRLEVKLVAIERPDGLLVERLLDAGLRVLALHPNQVAAARDRFRVSGGKSDRFDAFVLCELARTDHHRFRVLEPDSDATKALRALTRGREDLVGARTALCNQLRAELERFWPGPLGLFSDLYSGISLAFLERYPSPAEARGLGEARLAAFLARERYSGGQQPADLLAKLRRAPVAAVGELELATRRQLVRTLVAMLKQLGAQIKQLERQIASALRAHPDGQIFRSLFKAPGSVITAAEMLAEMGDCRARYPARDALAGDAGQAAVAIESGKRKTARFRWGCNKRLRQAFCKLADSTRHWHPWAQALYANALAKGHDHPRAIRTVGRAWCRIVWRCWQDRTPYDPARHRALQQQLTVIIPTTAGSVVDHAATARMAAGVVAAHSPDSNKVIAAQ

SEQ ID NO: 436018 - protein, 381 aa, unidentified
MTESSDYELVQVFIGVDVGKDTHHAVAVNRSGKRLFDKALPNDENKLRALISDLKQHSQILLVVDQPATIGALPVTVARSEGVLVGYLPGLAMRRIADLHAGEAKTDARDAAIIAETARTLPHALRTLKLADEQIAELSMLCGFDDDLAAQTTQSCNRIRGLLTQIHPALERVIGPRLDHPAVLDLLQRYPSPEKLASLGEKKLATQLSKLAPRLGKRLAADITRALTEQTVVVPGTNAAVIVLPRLALQLITLRKQRDEVALEVEQRVLAHPLYPVLTSMPGVGVRTAARLLTEVACRAFASAAHLAAYAGLAPVTRRSGSSIRGEHPSRRGNKTLKRALFLSAFAALRDPISRAYYTRKMSQGKRHNQALTALARRHIL

SEQ ID NO: 436019 - protein, 318 aa, unidentified
MRMAQEQVVVGIDVAKEKVDVAIRRGAEGSFANDPQGHRQLRAWLKEHAVGQAVMEASGGYEKSWTQLLRKAGIEVVIVDPKRVRHFAKSAGQLAKNDPIDARMIAWFGEAFEHRGKPEDAAREELDQLVTARRGLSRLKEKIDNWGEHEQPKAVQKVHQALLKEVARQQDRLEALIADRIEQSEHFAERAEIIQSVPGLAGNSAAALLAFLPELGQVDRQAVSALLGVAPFDDDSGKRRGPRHIQGGRRKLRCLLFTPILGAATQHNPVLKDYYRRLLAKGKEHKVALVACMRKLICILNTMLQRGEKWDPNRHALA

SEQ ID NO: 436020 - protein, 345 aa, unidentified
MSQPALYVGLDVSLETTSICVVDNDGATVWRGSCSTDAAMIADVIRFRAPGAVRVGLETGQMSNWLTLSLRGRGVPVVCLDARHAKAALKMQINKTDANDAWGLAQVVRTGWFREVAVKSMDAHKLRMLLVARSQVVGQRQSLANNIRGLMKTFGLVIPRGCKGVFSTRVREAGEGNAELMAIIEPLLTAWQSHREQIAVFDRQIIARAKTDPVARLLMTVPGVGVVVALTYIAVIDDPARFKHSSVVGAYLGLTPRRYQSGDIDVTGRISRCGDGLLRSYLFEAATVILQRNSRASELKAWGLALAKRIGMRRAKVALARKLAVILHRMWVDKTEFQDGERAAA

SEQ ID NO: 436021 - protein, 372 aa, unidentified
MQNDTTTTVHVALDVHKDSIIAAYSVGLGEVQNLGNVGVLERDITRLCTKMQSKGSRVSFVYEAGPTGYGLYRLLTKKGFACMVCAPSLTPRKPGDRVKTDRRDAIKLVKALRMNDLTRVHVPDVVDEAMGDLVRAWGAAKQDMRQARQRLKSFLLMHDVRYTGKANWGPKHRRWLSEFVFATPWSQIAFEEHRRAIDERVAQCDRLEKALREAAPQWHWYPVVEAIQAMRGVQFTVAITLIAEIGDLSRFEHPRQLMAWLGVTPSEHTSGRSRKLGGITKAGNSYARKVLVEAAWSYRFPAKVSRIIQVRHERLPKPIIDRAWDAQLRLCSRFRKLVARGKHKNVAVVSVARELAAFIWDIARMTAVQPMP

SEQ ID NO: 436022 - protein, 351 aa, unidentified
MIIVGVDYHPSVQQVAFLDTETGETGERRLNHSDGEAERFYRDLQRRQVKVRVGIEATGHARWFERLLAELNFELWIGDPARIKAARVRKQKTDRQDAQLLLRLLVENRFPQIWVPSPENRDLRQLIWHRHRLVQMRTRAMNQIQAAAMNEGVRRKKTLWSKTGRRQLEALPLAPWATRRRQDLLELVDRLNTTIDELTAAAEQEARKRPEVLRLMTHPGVGPITALAFVLVLGSPDRFGCGHQIGSYLGLIPCEDSSADRQRLGHITKQGSSLLRFLLVEAAQAAVRWDPDWRRRFVHLAMRRDRRIAKVAMARKLAVSLYWMWRKGFDYPQTLQFGSHAGEPGYVHGVK

SEQ ID NO: 436023 - protein, 327 aa, unidentified
MMFIGIDISKEKIDLSWLRDQLTNKIKTKVFKNKRQDFLAIEKWLLNTTKSAANELVITLEPTGVYHEALMYFLHERGFNIILANPGKAKKYADALNIIHKTDKSDATMLAHYGCAKHAVVNYWQPEALEVRELKALIRRLDALESNRQREANRLEASEFSNVSARVCQSIKVTIAFLDDEIKQLKSDIDNHIDNEPDLKRNRKLLESIPGIGPVLSRELTYLFAAKKFNKAKEAAAYCGLIPRHNESGKLKGRTSISKLGPARIRCKLYMAAIVAGQWNKTIKRHKLTLINNGKTPMQAVCANMRKLIHICFGVIKNQEAFKLQES

SEQ ID NO: 436024 - protein, 391 aa, unidentified
MIYIGIDVAKDKHDCFITNSDSEVLCKAFTILNNLDGFNDLYQKIESVMDDVTKVKVGLEATGHYSYNLLGYLIDKGLPTYVINPLHTNLYRKSLSLRQTKTDKVDARTIASMLMSDVNLKSYSDTSYHNEELKSLTRYRFDKVKERAKLKTSVSRLVCILFPELEKLVPTLHMASVYALLSEFPSAKHVATAHLTRLTNLLSESSKGRYGKDTAITFRDSARASIGSNMPAKSLELKHTIKLIQELDSEIDEIENEIKIIMDEINSPILSIPGINYRMGAMIIAEIGDFNRFDSPDKILAYAGFSPSTYQSGQLDGAHAHMEKRGSRYLRYALYNATKYVCHWDPTFAAYLAKKRAEGKHYNVAISHAVKKLVRVIYHLEKTKQQYIKAA

SEQ ID NO: 436025 - protein, 358 aa, unidentified
MKTHRVQDFVIKGKEIFVGLEDSKRTWKIAVRCERMLIHEVSMEARYPALIGYLRNKFPECAIHLIYEAGFKGFDLYDRLTGEGIDCVVIPPHMVTEPKVNRVKTDKRDAKRLAYVLENQDYKDACHVPDKERREDRQISRSLIAVQKDTIRTRNRIRGFLKYYGIEVPFAGKENWGRKEFRALREMPISEPLGIGLKVFLSQLEQLWDHQTTLRDYLRDLCRKERYSKAFGIAKSFPGIGWFTAIRLVLELGEDLSRFASGKKIASFVGLTSSEYSTGETERKGRITGMGSGFIRSFLIESSWAGIRKDPALLSKFMRVWRTSGMKKKAIVAVARVLIVRLRACILSGRPYMIGAVR

SEQ ID NO: 436026 - protein, 415 aa, unidentified
MSGLSLVEALLFVGIDWAAKAHAVCVLDPTGRKVASFTIAHTTAGFAQLLGRLGELGSDPEAVPIAIERPDGRLVDALLNAGHPVVPVKPTAIKAWRESEVPSGAKSDTGDAEVIAEYLRLKARRLRPAVPYSDETKALRTVSRTRTDLVAARVAATNQLAALLDAHWPGAKEVFADIASPIGVAFLTRYPTPASAANLGVKRMAAFCARHAYSGRRTPEALLERMRNAAGGSTGPVLTRAVREAVLAYVAVLAALNTAIKSLDRSVAAHLADHPDGKVFASFPRSGTINAAQILAEWGDSRDAYDGPDAVAALGGLVPVTRASGKYRGVNFRWACNKRLRVAVTTFADNSRHESLWAADIYRRARDSGKDHQHAVRILARAWVRVIWRCWRTGTPYDSALHNGAQEHLAAVDAA

SEQ ID NO: 436027 - protein, 341 aa, unidentified
MEHYVGIDVSLELSSVCIVDAGGKIAVEAKVESHPDAIVAFVRKAGVSIERIGLEAGPLSQWRHAGLTKGGFETVLLETRHVKAALSAKTDRRDARGIAQLLRMGWFRPVHCKSPGRQEVRALLVARKQLDIEFSIRGILRGFGLKMGVVTRTGFEARVPDLCAGQAMLEQIAEAMLAARTALLKEYSKLHKAMLALVRRDEICRRLMSAPGVGPLVAITFKTAIDDPVRIRKSKAVGALLGLTPRKCQSGETDVTGGVSCFGDEMARTALYEAANAVLSRVTRFSALKRWGMDVAKRRGTKRAKVPLARKPCVILHRMWMDGTSFRWTKEASQAPQVARV

SEQ ID NO: 436028 - protein, 349 aa, unidentified
MVAEGLDYVVGVDTHRDQHAFAIVEAGSGAVIAQAATAAGADGYRQAVRFADRHAPGARVWAIEGAGHYGAGLCRYLQRHGEAVHQVERTSRLERRLRGKDDRLDAARAARSALASRQRATPRAGQHQEALRLLLLARRSASDTRRVALVQLRSVIITAPDELRSELRRLPLGQLLNRCSRFRRSSSRTPAELATILVLRTLAHRIRAVSDEMTTLEQEILAHVRALVPELLDEPGVGPIVAAQLIVSWSHHHRIGSEACFARLAGVAPLPASSGLTTRHRLSRGGDRQLNRALHTIVLHRRHHDPATKDYIARRVADGKSTRDAVRLLKRYLARHLYRVMQNSTPLTT

SEQ ID NO: 436029 - protein, 422 aa, unidentified
MRLTYPICCGLDVHKNVIVATIVTTDRNGISEYNQKSFSTINSDIQKFHDWLIENDCYHVCMESTGKYWIPVFNYLENDINVCLTHPKYVKAIKGKKTDKKDSKWIADLYKFDLVRCSFIPPKDFRQLRELARYRFKLVCMKSSEKNRIQNCMTVSNIGLANVLSDPFGKTATEIMSYLLINTADSIDDKAVRKLIKKGAISKSNEIIEDIKGYNIETDQAKKLELARGHLDYLDDMITQTEVELYIRIKPYYEFVEYISSLPGITEISATIILAEIGVDMNIFDDAKHLCSWCGLSPSNNESAGKKKSVRIAKAGAYLKPMMVQCALAAIKSKKQPYFAIKYGRIKKRRGHKKAIIAIARMMMVCIHHMVSEKQHFNPTDYTELMDPHFNQQRVTLNKTNVFAYLEAQGYDTSLLVQCNDN

SEQ ID NO: 436030 - protein, 344 aa, unidentified
MQAIATIGLDIAKSVFQVHGVDAAGQVVVRRQLKRRHVLAFFAKLPPSLIGIEACASSHYWARELQAVGHTVRLIPPAYVKPYVKRQKNDAADAEAICEAVTRPNMRFVPIKTVEQQGCLVLHRTRHLLIRQQTATINSIRAHLAEFGIVAPVGRRGVEHLLEVIADANDTRVPEIARACVATLGVQLQQLKTQILELDRRILAWHRSSEASRRLNHIPGVGPLLATALVASIADPKAFRSGRDFSAWIGLVPKQNSSGGKDKLGNISKRGDRYLRSLFTAGALAVIRYAKIHGTKHRPWLVALLARRPTKVAAIALANKLARIAWALMTKGSRYRQPAALEVV

SEQ ID NO: 436031 - protein, 355 aa, unidentified
MRFYSQPHRFYCGVDLHARTLSLCLLDQAGHTLLEKTIPADGPTFLDAIAPFRDDLVVCCECLFCWYWLADLCHQEDIAFVLGHALYMKAIHGGKSKTDKIDAAKIARLLRGGNIPYSYVYPKGMRETRDLLRRRTYLVRKRAEVITHLQNTNSQYNLPPFGAKLGYAANRAELDVAERFTDPSVRKSVETDLALIDAYEPLIGDLELYLTRTAKVDDPQAYARLLSIPGVGKVLALVLLYEIHDIGRFASAGQFLSYSRLVRCGHESAGKKKGSGPAKIGNAHLRWAFAEAACLFVRQSPRAKVWLQRQEKKRGKGRGLAILAARLGRAVYHLLRKGEVFDEERFWGQRAAAAR

SEQ ID NO: 436032 - protein, 355 aa, unidentified
MQRKEISFKGQTIYVGIDVHKTTWVVTVMTAVGNYEKRISMPASPQRLFETLKKNYPDATYEAAYEAGFTGFSTYYHLKELGIRCSIVNAADIPTTDDERRNKTDAVDSAKLARCLRNGDLRGIYVMPKESLDARGVVRVRKIFLNQLSGYKVRIKHLLYNNGVEYPERFARSNTHWSRAFMKWLCEDVKLLSEDRVALNLLLEQVEHLRLSVLNATRKLRELSQLPFYRKNFNHLMTIPGIGVVTAMTILTEIADTGRFPNERAYTKYVGFIPDSHESGDHKVKGEMTGRGNNHLRKAYIEAAWVAIRRDAGLCAAYIKYCQRMEKNEAIVRIARSLAHISLALVKNDKDYISA

SEQ ID NO: 436033 - protein, 351 aa, unidentified
MSRQSTPSPIATIGIDIGKNTFHLVGLDHPGAIVLQLKTSREQLERRVANLPRCLIGMEACSGAHHIGRQLAALGHDVKLVPAQYVKPFLKGHKNDYRDAEAIAEAVQRPTMSFVTIKTPAQMDLLALHRVRSRLVSLRTGVINQIRGFLIERGIAVRQRPAPLRKALYDLLSSNPPSLSPRMVRLIADLFEDWRRLDDRIATVSAEVEALVEEDEPCQRLMTVPGIGPIISSAVVAAIGDGAGFKQGRDFGAWLGLVPRQESTGDRTILGKISKRGNKYLRTLFVQAAHVILARRPSAAMRGLWPWIAQTSKRLHRNMLAIALANKLARIAWAVLARGREYQPSITPHAA

SEQ ID NO: 436034 - protein, 358 aa, unidentified
MKPKRKKYKFFIGIDISRNELDFAVMENKILLFHKEIENKRDAITSFVKELKEVPGFKMPHALFCMEDTGFYSNHLLVSLKKARANIVLENAVRIKNSMGLIRGKYDKIDAIRIAQFAQKNKDEVRLWVPVRPVMAQLRMLSTLRDRLLNIKNILKTALDEQESFMPKDLQLLTTKCCQSSLEAVFLDLHRINSKIGLLMESDEHLQMLIRLITSVPAVGKVTATQIIICTNEFRDISDPRKFACYAGVAPFKKESGKITRPPRVSHFANKKMKALLHMCAMVSLQRGGELKLYFDRKAKFEGKAGMSVMNAVRNKLILRVFACVNQRRPYQKNYQPATVNKQIEEEQKEGVPEIVAV

SEQ ID NO: 436035 - protein, 349 aa, unidentified
MSQNLNSVVAVIGIDIGKNSFHVVGLDDRGAIVLRQKWSRGQIEARLANMPPCLIGMEACVGAHHLSRKLKALGHDARLMPAKYVRPYSKGQKNDFRDAEAIAEAVQRPTMKFVATKTADQLDLQALHRVRERLVSQRTGIINQIRAFLLERGVAVRQGLRFLRAELPRILATPPDVLSARMVQVISDLAEDWRRLDHRIDDLSNQIAVLARQDAGCERLMSVPGIGPIISSAMVAAIGTGDAFSKGRDFAAWLGLVPKQISTGDRTILGKISKRGNRYLRVLFVQAAWVVLIKPMSWDRHGLKHWIEAAKKRLHRNVLAIALANKLARIAWGVLSGSRTFEVSKLQAA

SEQ ID NO: 436036 - protein, 360 aa, unidentified
MTTDETAPPRRVIGGVDTHKDLHSAAVVDERDQLVASQSFATTRQGYRQMLAWMRSFGQLERVGVEATGTYGAGLLRHLQAAGVVVLEVTAPDKPDRRRRGKNDDLDAEAAAHAAFTGKRTVTPKSRDGMIEALRVLKACRKTAVAARRVALQMIHNTIVCAPEELRDTLRKMTRMELIRTLAAWRPDLTDYRTALSAYRIALKSLARRYLELHDEIADLDDMIGAIVDELAPDLVARNAIGHGSAAQLLLTAGDNPQRLGSEASFAALCGVSPIPASSGKTTRHRLNRGGDRAANSALHIIAIGRLRTDERTKAYVAKRIADGHSKLEAIRCLKRYIAREVFTLLSNRQRQINQAQFAA

SEQ ID NO: 436037 - protein, 418 aa, unidentified
MENLYAVCCGIDVHKKLIVACLRQEQSTQIKEFGASTRELLSLADWLLENHCQAVAMESTGSYWKPLYNVLESFDLNPIVVNAQHMRNVPGRKTDIKDAEWISDLLCHGLLIPSFIPNRSQRELRELVSYRKSLVKTQSAELNRLQKMLEGGNIKLSGTVSNINGKSARNLLDLILEGEKFDEAVYDQMIKDRKISRRLKASKTKLIEDMNGVLSPVQIKMIRELRKHIDELEKHIRELDQDINDAMSDPEKEAAKRLTQIPGIGEDSAKIIISVIGVDMSRFPTDRHICSWAGISPGNKESAKKKLSARTTKGNKLLRSTLVVCAHSAVMKKESYFSSLYNRIAAHRGKKRAIVAVGHSILKIAYHMLKNGESYKELGSNYYQTKTKESKIKSYLTKLENLGIEIPVEYRNQALQMS

SEQ ID NO: 436038 - protein, 452 aa, unidentified
MEQDVISMEIINPKAAGIDVGSRSHWAAVGQSEQDIKEYGVFNEDLFALADWFDLHGIKTIAMESTGTYWQSLYAVLLSRGFQVILCNGKFTKNIKGKKTDVKDCQWIQKLHSLGLLSGSFLPDGETEQLRTYCRHRSNLIHSSASTSKKMQKYLRLLNLRLDVVVKDVCGLTGLAIIEAICDGEKDPQKLASLRHGNCKRSEEEIAKALHSNNREDYLFALKQELDTYRYLQDKIAQCDLEIEKKLNEIIGGDDNKKQHYIDPKAHKRINKNTPKNIDLNLKSYQMFEGTDLLAIEGMSYSTVLALMSEVGIDGIKKFSTAKHFTSWLRLAPNNKVSGGKVLSSRVPKGSNRLKIALRNAANAIGNLKESTPLRDFFHRINFRKGRVSAISATARKLAVIIWNMVVKGTPYINPEGYLFLDQKRKLGLVKRIKKQIDKFALTNEDLGIEIN

SEQ ID NO: 436039 - protein, 344 aa, unidentified
MNEIITIGVDLAKNVFQVHGVDAEGTVIVGRQLRRSQVLPFFKKLAPCLVGMEACATSHHWARQLIGLGHEVKLMPPHYVKPYVKRSKNDAADAAAICEAVTRPTMRFVSVKSMEQQSVLMLHRTRELLVRQRTMLINAIRAHMAEFGIVAPVGVPQVKKLLGIIADTDDARLPPLARTCLESLVRQFLSLHEEIALAEKQIHAWHRSSAVSQRLETIPGIGPIIASALAASITDPEVFRSGRELAAWIGLVPRQNSTGGRERLGRISKQGDQYLRWLLVAGAMSVILHAKRRGTTNLPWLAKLIASKPTKVAAVALANKTARIVWALIRHGGTYQKPAAAPAT

SEQ ID NO: 436040 - protein, 408 aa, unidentified
MEQIHDRVAGLDVHRDSVTACFRQAGPRGGVVREKDRFATTTIGLRGLAGWLAERGVGLVAMEATGVYWKPVFYALEDQFTLWLCNARNVKKVPGRKTDLSDAEWLADVAAHGMVRPSFVPPPPIRELRELTRYRKTQIDARVSEIQRLEKVLQDAGIKLTSVASKVLTQSGRAMIEALIAGERDGAVLAELAKGKMRPKISELTEALTGHFGDHHAVAAHRILGHLDFLDTTISALSVEIDARTASFESVYNLLLPVPGFERSTIDVIIAETGADMGRFPSAGDLASWAGLCPGNYESAGKRRRVGTTQGNQWLRRALIQAAHAAARTKGSYFGAQYRQIAKRRGPNKAAVAVAHSLIDLIWHLLRTGETFQDLGDDYFRRRHDPERQARRLVSQLEELGFTVTIAA

SEQ ID NO: 436041 - protein, 354 aa, unidentified
MGQSKAYVAIDVHARNCVLGWRNGRGQWQGAERFETGEKELIARTEKISAAVKVVTVEESTLAAWVARTLHPHVAEVIVCDPRCNESVHRDAFKHDDRDVEELSRLLWLGSLKGVYHPQDDARAVFKALAQQYLDLRDTQVRVKQQLKAKYHMWGVTGVEGKLVYSAQERQRYLDTVADASVRHQLLRLYALMDAALKQEADAFRELVACGRRYPEIVEFTKIPGVGPVGAHVFDAFIQVPDRFPDKPTLWRYCRLAVTDRTSDGKPLGFRRLDNHGNPELKALSYWAWKGAMQTRARNEVQQFYRASLERTHDKAHARLNTQRKIVATMWAIWKKGEPYRPERFLSPADAAER

SEQ ID NO: 436042 - protein, 394 aa, unidentified
MQLVGIDIGKNSHHFCVMDKETGELNVTPSSFSNNKEGFDFLINSLKPYSKKSILLGMEDTGHYHVALLKFLLSNGYTVALINPKTTDFTRKMEGGITKNDKLDTITICNVLDTPERKKQYRITKVDRFDLYEQRQLTRHHHNLKEELNIYCNRLQKSIDLVFPEFNTLFGSKYGIVYMNLLKTFGSAEAIASTDIRTIRKCFEIKGRGGRISLTPEKLKECAKNSIGISSEVETIQIKHLVSQITLIKEQIAEIDKKIEEFSITNNSPILSIPGISHFSGTSILAELGDIGNYSKPSQIIKFAGVAPYHYESSQYTAQHTGITKKGSKYLRKTLYQIILPVINNNPVFKKYYRLKISQGKGHRCAQGHCIRKLLRIIYHLLETGQSFDPALLR

SEQ ID NO: 436043 - protein, 340 aa, unidentified
MQITTIGLDIAKNVFQVHGIDATEKVVVRKQLRRGQVLKFFAALPPCLVGMEACASAHYWARELTKLGHEVRLMPAKDVKAYVKRNKNDAADAEAICEAVRRPTMRFVQVKSAEQQGRLMQHRARDLLLRQQTQVTNALRAHLAELGIVAAQGREGLKELLTIIADEKDARLPVDARASLIVLAAQLQALHTMIGSIEKRLSVQHRANEASKRLQSIHGIGIIGASAIAATVTDPKAFRSGRDFAAWIGLVPRQDSTGGKHKLGPISKQGDRYLRRILVVGTHSVLRRAKHNPEKYPWLTQLLARRPFKVVAIALANKMARIAWVLLASGSHYRPRLAAA

SEQ ID NO: 436044 - protein, 377 aa, unidentified
MLADELDYVVGVDTHLDERVLAVVAASSGAVIARRSVRASARGYQEALRVASQYATGPRAWAVEGAGHYAAGLTRFLAGRGETVLECSRTPRAERRLRGKDDALDAVRTARAALASETLALPHSGEQREALRLLLVARGSAVDVRREALGQLRGVLVTAPEPLREQLRGLPAGRLLERCSRLRRSSTASPDELATKLVLRSLAQRIQAATIEADELEHEIVAHVRALAPGLLDEPGIGPIVAAQLIVAWSHRGRVRSEAAFARLAGVAPVPASSGKTTRQRLSRGGDRQLNRARTRSSSTAANTTPPPRTTSNDGSPKAKAAATPPACSSATSPATSTGYCKTRSRTRTWEAEAHEHTSTGLTWTLIADALCAIVAP

SEQ ID NO: 436045 - protein, 457 aa, unidentified
MQGKQKQARGRSAGQLLTLNEHAAGLDVGSTFHVVAVRSDQDEEPVRTFRSFSGDLHRMADWLGSVGIKTVAMESTGVYWIPVFEILEARGFEVLLVNARDVKNVPGRKTDVNDAQWLQQLHQHGLLRGSFRPRDEVVRLRAYLRHRERIVEYAASHVQHMQKALMQMNVQLHHVVSDITGVTGMRIIRAIVAGTRAPEELAQHRDVRCAASEETIRQALTGNYRPEHVFALKQALELWDVHQAKIAECDIEIETVLKSLNEKRAAPEAPLPPVRHVKARNEPKFDVRPALYTLLGADLSQIHGFGPYTVLKLVAECGDDMTKWPTAKHFTSWLSLAPGNKISGGRVLSSHTRRSSNRAAVLLRIAAVNIGKTQTALGAFYRRLAARTGKAKAVTATARKLAVLFYRALRFGMTYADPGAEYYEERYKRRVIDSLQRRAHGLGFTLVANVAATEGVS

SEQ ID NO: 436046 - protein, 411 aa, unidentified
MLTVGLDVHSQRSEICVLDQNGKTMLQRGVRGSPREVIKQLQELREPFRICYEASCNYGWLHDQLTPLASSVAVAHPGLLRLIYRSKKKNDRVDAAKLAKLLYLDEVPLVHVPKAQGRAWRGMIEFRVRLVNKRTRAKNTLRAILRSLAIDAPAGAGLWSKKGTAWLKELELPTPAQTLQRDLLVEEIAHFDQQIARVTRELDTLAEKHAGVILLKTIPGVGNRTAEAVAAYIDEPRRFTSIRAIGSYFGLVPSQDQSGGTNRLGHITREGPGTVRKLLVQAAWRGIRSSPSLRAFFDRIVGGDPDRRKIALIAVAHHLARVMLAMLRSGAAWEERLAPAAAEPEPEAKSESAKKPSVKSTRGRKKMKKKETGLMGGETRPLSPPKPTSLPPTSVLKKGAAKKSMARSVAA

SEQ ID NO: 436047 - protein, 408 aa, unidentified
MRIMYERCCGLDVHKKTLVACTITPEGQDTCTFSTMTKDLLKLASWLAEHGVTHVAMESTGVFWKPVYNLLEDDFAVMVVNAQHIKAVPGRKTDIKDAEWIADLLRHGLIRASFIPDRPQRELRELVRYRRCLIQQRAQVVNRIQKMLEGGNIKLSSVVSDVVGASGRAMLEAMVRGVEDPHALAEMAKGSLRDKRPALEEALRGLMSAHQRMMLQSQLRHLDFLDEEITRMDGEVSKCMHPFQEAIERIDEIPGVGRRVAEQVLAEIGLDMSRFPSAEHLASWARICPGNYESAGKNKGRRTGHANPWLRSALVEAAWAASHTRNSYLSAQYHRIAARRGGKRAIVAVAHTILVTIYHMLSNHSTYRDLGANYFDQLHRASTLSRTVHRIERLGYKVTLQPLQEAFS

SEQ ID NO: 436048 - protein, 414 aa, unidentified
MDIIFDNVAGLDVHHKTIMVCIRKIQPQGGKAEEVRTFGTMTRDLLQMSDWLASERVTHVAMESTGVLWKPVWNILEGLFQLLLVNPRELKQVPGRKSDVRDCQWIAHLLQCGLLRSSFVPPRAQRELRDLTRQRTQLLAEQGRAANRIHKTLEDANIKLGAVASDILGKSGRAMLRALVTGERDPAQLAELALGRLRGKIPDLKSALQGHFTEHHCFMLRSLLDHIEYLERQIALFSNRIEGCLRPFLDDDQMERLDAIPGVNRRTVENVVAEIGPDMSRFPDENHLSSWAGMSPGNEESAGKRMRNRTAKGNRWLRRALTEAAWAASHTKGSYLGARYRRLAARRGKKRALTAVGHTILTIFYHLLSKDVDYQDLGADYFDKLKPEQYRRYLVKRLETLGYDVTLTPKETAA

SEQ ID NO: 436049 - protein, 404 aa, unidentified
MIFVGVDWAEAHNDVAVMDEAGSVLGRGRFGVGVRGLAQLHGLIADHADEPGGVVVGIEIDRGLLVDSLVGAGYRVYGLNPLAVSRYRDRHTTSGAKSDGADAKLLADLVRTDRHNHRPRAGDSDQASAIRVLARAHQNLVWMRQRQLGGLRSALRDYFPGALSAFGTELGSADALAILAIAPTPQMARGLSRARISRALARAGRTRNLERRAAEIQQVLREEQPAGAAAVAEAFGAATGARVAVIVSLGQQIHELERSMAVHFERHPDAEILGSLAGLGPVLSARVLGEFGDDPNRFADARGRKAYAGTAPITKASGRSRIVLARVVRNRRLADSCDRWAFCSLTASPGARRYYDALRARGKSHSQATRQLANRWVGILHACLEQRALYREEVAWPQDTLLAA

SEQ ID NO: 436050 - protein, 416 aa, unidentified
MSRVVDIVHPVCCGIDVHKSFLVACIATTDERNHTTHQIRRFSTFKGDLQRLADWLLANNCKDVCMESTGKYWIPVFNVLEKTTNVCLTHPKYVKAIKGKKTDKKDAKWIAELFKCDLVRSSFIPPPLTRHLRELCRYHAKLTYMNSSEKNRGQNCLTVCNFKLDDVFSDVFGTSATRILDKLIELGHSDFDVAPLLHKRCKATPEQVKAAIDGELSPAQAQKLALVREHMKQLENLQSTLESSVTKLAAPYQSQIDLLMTVPGIGSEFTAIRILAEIGVDMSVFETAKQLTSWAGLTPQNNESANKKKTTRIARAGAFLKPLLVQCTLAAVSSYKYPWLKDKYQALKKRRGHKKAVIAIARKLLAAIWNMLAKNEPYNHELHQKSDPPPQNRVLTPEQAFALLRKHGFQIAEPAA

SEQ ID NO: 436051 - protein, 504 aa, unidentified
MVPDSVLKSVMTAALHQGTLISFRRVLNSARLGRLAGTNPIPREPMSRKRKSNPKSNQKTGASLLSCLNLNAAGVDIGATEIYIAVPGDRDPQPVRCFSTFTEDLHAAAAWLKACHIETVAMESTGVYWIPLFQILEARGFKVLLVNAHHVKNVPGRKSDVSDCQWLQYLHSVGLLRGSFRPEQAVCSMRSILRHRDSLVQMASSHVQHMQKALDQMNLQLHHVISDITGTTGIAILEAILAGERNPHTLAARRDRRIKASADTIAKALVGDYRREHVFTLRQSLAAFRHYQELIAACDLEIAQSLEEFESKVDPPVDPPPGSASPSHDGSKPKASEPSFNLQTHLHRIFGVDLTKIPGINVLTAQTLLAEIGPDFSRFPSGPELASWLGLCSDNRVSGGKVLSVKTRKVKNRAATALRMAALSLSRSQSFLGHFYRRMRAKLGAPKAITATAHKLARILYHMVTTGHAYDETICAHNEVQNRQQMEARLRKQARELGLQVVAL

SEQ ID NO: 436052 - protein, 348 aa, unidentified
MTTVADQFEHVVGIDTHARTHTYCLVETRTGGIIDTATFPTTTAGTNRAISWIARRAQGTTTLAAIEGTSSYGAGIAAALAASGFEVTEIRPIARPSCARTGKSDPIDAEAAARSVIREDLDKLAQPRRSGDRTALRVLLAARALVDQQRTANRNALTALVRSIDLSVDARKPLTDAQIATIAAWRTSRDDAVTRVFREEARRLARAVLEQTEVLRENHRQLGQLTEALAPGLQSVPGVGAVTGAILVAAYSHHGRVRSEAAFAALGGIAPLPASSGNTTRHRLSRSGDRQLNRAVDVVVRTRLRYDPATREYASRRRAEGLSNREIRRCLKRYVCRALYRELRTRMT

SEQ ID NO: 436053 - protein, 341 aa, unidentified
MQITTIGLDIAKNVFQVHGIDGDEKVVVRKQLRRNQVIGFFRDLPPCLVGLEACATSHYWARELARLGHEVRLMPAKDVKAYIKRNKNDAADAAAICEAVRRPTMRFVQVKSADQQAHLMQHRARDLLMHQRTQLINATRSHLAELGIIAPQGREGVKELLAIIANEADTQLPNDARASLIVLAAQLQALQTTIGAIEKRIVVQHRANKESKRIQTVPGIGVIGASAIVATVPNPKIFRSGRDFAAWIGLVPRQMSTGGKPKLGSISKQGDRYLRRILVVGAVSVLRRAKLNPEKFPWITRLLARRPFKVVAVALANKMARVAWALMMSGKTCRAAWFAAA

SEQ ID NO: 436054 - protein, 370 aa, unidentified
MSKVMKVKLVAEYQSLGIDVSKDKIDCCFSEMLPDRSIKVKCRKKLNNNQKGFEEIIRLIDKWFSKDMIVSLVMEATGVYYEGLAYYFANCSGVKVSVVLPNKVKSYATSLGTRTKTDKVDAQILAQMGLERNLEAWEIPNVMYRQLRNLGRERIGLVEEKTVVCNQLHAVNHSVEKVEKTVIRYSVRIDLLNKQIKEVEADMRALVARSQELKEAVDRLMSIDGVGFLTAAVVLGETGGFQLIKSRAQLTAYAGLDVVEFQSGSSVKKATRISKRGNSHLRKAVYFPAVCQLRQEKEFYKLYERVRNKSGQKKKGLVAVSRKILCLMYTLHKNKTNYNPKYREEKIAAKGLSAKIKVGSTDVSETAYTA

SEQ ID NO: 436055 - protein, 343 aa, unidentified
MEYGAIDLHTKESEIRILDAAGGIVLERRIATTRERLTAVFESRPRMRVLLESGTGSEWVARHLEGLGHEVVVADPNYTPMYGARTRRIKTDRRDVAALAEANRHGIYRPAHRVSAAQRDIRRRLRVRDQLVHVRRQAINLLRAQLRAEGVRVATGEAETFVVRFERSAVSPAARAAMAPLLDLLAAVAPLIKQAEQWTRSAAKVDPVAHRLMTAPGVGPVVALAFHATVDDVGRFATPGAVTSYLGLVPREDSSGERQRKGAITKAGPSRMRVLLIQSAWHLWRSPAGSATLHTWARRLGERRGRRIAVVALARRLARILWAMWRDGQIFEPARVGRRAVAV

SEQ ID NO: 436056 - protein, 392 aa, unidentified
MSQHCHFDASRSLTALEQDSTIIAVIEMSQTKWLVAALIPGVERQPLKKFDAHEETLLKLLHRWRREAGQAGRNIKRIVVAFEAGRDGFWLARWPRARDIEVYVIHPTSIAVSREHRRAKTDRLDTELLMRVFLGWLRGERRHCSMVAIPTIEEEDARRPNRERQTLVTEQTRIINQMKAIFTRFGIRTLRPTMRKVAEKLEDLRTAEGTPLPQNTLAELRRHLARLRIVRDQIRAVEQERLRKLAVAPAAEKKSPHAMVRLIARVLGVGVETADMLVNEIFSRHWRDRKAVARYAGLTGSPDESGSRRRERGLARAGNVRVRSGMIQLAWRFVRFQKNSALAQWFAARTADGRASTRKTMIVALARKLLIALWRLVTRGEVPQGVALRPAS

SEQ ID NO: 436057 - protein, 400 aa, unidentified
MDKDRIVAGLDVHKDTIYLCVVDNTEAVIFAKVYGTLTPDLELMCSEMVSHGVTEAAMESTSTYWVPVWNALCESMSLKLVNPYFIKQLPGRKSDVKDAQWIAECLLKNLIRGSFVPDKRVQDMRKYNRRIFDLNEDLTYNSNKQDAALQRCGFRLSNYVSRVNGKSYQKCVRAIITGITAPEELVKLIHGKTLRKYGRNIIKDAVTGDFHQADICLLKQYAELIEVIERQIEECRNALIAMCQEHFPKQFKRLQSIPGVKERAASAIIAETGADMKPFEKATNLVGWCGLKPRNDISNNKVKSNRTTHGNRFLRQILIEISWVASRTRNCFFSNFSYVQCTQRHKNKMKIQVAIARKLLVAVWHMLTKDEDFIDVYLKRLEKQAEWQNDIQALEPLLVG

SEQ ID NO: 436058 - protein, 288 aa, unidentified
MTQINTIGLDLAKQVFQIYGADAEGAPLFNRRLRRAEVLRFFEKQPPCLVGLEACGGAHYWAREIAALGHDVRLIPPAYVKPFVKRGKTDAADAEAISEAVTRKTMRFVPIKSAEQQAAAMVLRTRALLLRQRTQAINALRAHLSELGIIAAAGPAKVAALAAIVRDTTDARLPAAARFALTALADQIDTLTEQVERLEREIVTEAKRDEDMRRLTTIPGVGAITAATVKALVPDPNGFKSGRHFAAWLGLTPRPHSSGGKERLGGISKMGNTELRSRVERSLDLRRS

SEQ ID NO: 436059 - protein, 343 aa, unidentified
MTLKASFKWVNPQNINVLGLDVAKAKIDICFLSSNHSWFYQIANNSQAISQFSQELKALGLNATIPFILESTGGFHLLLATLLKNDGWNVKEINPIITHQYIKHTVRGTKTDTTDAQLLAKIGLIEGDNLKSFDRDLNIIKLRMLISFLAHLETLIQQSKASFNALEKGLATLRLWESQELEKMKEVIKVLEQRAKGLEREILDIQLSPEAQEQVDCLDSIVGISPFTAKVAYALFAHNTFSSKRAMLAYVGLDPRLRQSGTKTWALRMSKRGHPYMRKRLFQSAFCSLQHSSYFKSIYDKHIQRWKHHFIAVLAVAKKMVYIMRALLKNNTQFDHNYYKLTS

SEQ ID NO: 436060 - protein, 352 aa, unidentified
MGRYTKKVCEGMEIFVGIDMHKTSWHVTIMSDPGEVWHGNIPGEWEVLKKVLDHYPGCRIHAVYEAGCFGYWLYDRIVEYGATCIVTPPSLVPMEYGNRVKTDRRDSKKLACLLQKDLLKNVHVPTEEARSHRQVFRQRRQLIEDRVKAQHRIKSALLFFGIEIPEQTGAFSRSYMDRLRKIRFSNRIHDRSFRILLDEYDHFSDQLERHTGLIREIAALDTYRDRMALLTSIPGIGMLTAIEILVELQDVSRFQSPEQLAAYLGLTPSQYSTGEKVHMGHITKVGKSHLRATLIEASWRLVRHDAKARAFYEQLRARAGSKRAIVAVARRLIIQIRKMLLSNSPYSGKAAA

SEQ ID NO: 436061 - protein, 454 aa, unidentified
MQKQDSYDYYVGIDCAQNKHDFAMKNNQDKFLIKKGHFSNTLQGYEKFLNTVLSKCLDKDMILFGMEVTGIYGTNLYERLKSDGYHVVMIFPDSVKNYRDYKRLNKTDKIDSACIAELLLNGDAQIVHAEKNGYTDLKAYIRRRNALKVTCTQETNRFLAKVCLYFPDLLKVFPSGRATLKAIFSIYPTPYSIIEADFNELVSVLQKASKNKFGVDKANELIHAARNSIVVRKSISDGELYNIHSLIDSIDSLESEIRNLEKIIDSKAEEFPAYHVLLTLTGCGKITAATIVAEIGDISRFHKASQIVSLAGLYGDNSKSGSSVNKRGKISKKGSRYLRHAIYMVAEFARRNNPIFKAYFTKKKNGDRTKHILAVNAVANKLCKVIYSLMKNQSTYIIQYRDLAKLSESTQNEFFQNAETDFSAKTRRKKYLYEDEYGELHEFVFKSIKTALIE

SEQ ID NO: 436062 - protein, 386 aa, unidentified
MKKNTTAKKSPKTLAKGQKKQIHQLAAKQRLTIGLDLGDQTTRYCILDEAGEVVSEDQLPTTREGLASLFAKMPASRVALEVGTHSPWISRLLASMGHEVIVANSHNVKLITQSVRKNDRIDARQLARLARVDPKLLSPIRHRGEAAQLDLAVIRARAELMEARTQLINSARGLVKPMGERLKKCDADQVGEDLGASVREGARGVIGPLLKTVETISEQIAKYDEQIEGIAKRYPEVKLLQQVYGVGPLISLTYVLTLEDAERFEHSRDVGPYLGLTPKQHDSGESQPELGISKAGDGLLRSLLVQGAHCILRKGAPESDLRTWGMGKMGKGGKRAKKRAVVGVARKLAVLLHHLWATGEVYDPQYNRKAAEAAEAKAKGKGKIAS

SEQ ID NO: 436063 - protein, 348 aa, unidentified
MALTIVEDTRAVTGGVDTHADMHVAAALDPVGGLLGVGEFPATAAGYARLLGWLGGFGTVCLAGIEGTGSYGAGLARHVTAAGIRVVEVDRSDRQDRRRQGKSDPLDAVSAARAAQSGRARGEPKGRDGAVEAIRALMVAKRSARSERTQTINQARALIVTGPDDLRARFARHTAAGLVSELAALRPRPGATVGYATRIALRELGRRAEFLDGQLGRLDELIVPLVTARAPALLALHGVGPDTAALLLIAAGDHPHRLRSEAAWAHLCAVAPIPASSGKRTRHRLNPGGNREASHALWRIVITRMSSHAPTRAYVERRTKEGLSKKEIIRCLKRYAARQVYRHLRPAG

SEQ ID NO: 436064 - protein, 411 aa, unidentified
MEQIHDRVAGLDVHRDQVAACVRTPGPRGGVQAEKARFDTTAGGLAALAEWLAGHAVALAAMEATGVYWKPVYYALEGRFLVWLCNAHHVKNVPGRKTDMSDAGWLADVAAHEMVRPSFVPPPPIRELRELTRYRKTQIDVRAAEIARLEKVLQDAGIKLTSVASKVLTQSGRAMIEALIAGQRDPAALAGLAKGKLRPKIPQLTAALRGHFGAHHAIVAARILAHLDFLDETIGALDAEVAARVAERYQSAARLLAEVPGLERRSVEVIIAETGADMSRFPSPAHLASWAGLCPGNHESAGKRRRVATTPGNQWLRRALIESARAAARTRDSYFGAQYRQIARRRGPNKAAVAVAHSLLDVIWHMLSTGEVFTDLGADYFTSRQDKEHQTRRLVSQLEKLGYTVQLTAAA

SEQ ID NO: 436065 - protein, 345 aa, unidentified
MKKIIIGIDFSKETFDATLLDCRNSELSEAVQSAVHEKFTNNKEGFQAFVKWIKSSVKKITPDELLLCGEKTGKYSLPLSNFLYAKGYSIWLDSGLRIKRSLGISRGKSDKADSLKIALYAYRYQDMAVCYVPLSKNVSRLKELFLYRQHLVSQVKAMAVRKNVTDDFKKELGDVKFIVDSAAKIIQQIKATIKKCEEKMQELIEEDDELKTTHDSITSIKGISLINATAFIAYTNNFKDFGGNAKKIATYWGVAAFAQESGTSVHKVARVSKIASKMLKSLLTQAARITVRWEPKFRQYFEQLISRGKHQGVALNNVKNKLIHVITALAVSKEKYNREYEYIKR

SEQ ID NO: 436066 - protein, 369 aa, unidentified
MKKGTTYVGMDVHKRSIVVAVRWPGGGAAEVRTLPNEPRAVGRWVRRMKREASGPICCAYEAGPCGYSLQRQLWAEEIDCQVIAPSLIPRKPGERIKTDRRDARKLAEYLEGGLLTEVHPPTPEAEAVRDLCRAREDAKEDQMRARHRLSKFLLRRGLIYGKGKAWSLAHQRWLRGLRLDHRADQATFDAYCLALDQTQERVRTIEAQLDEWSKIEPYAKPVARLRCFHGIDTTTAMTLVTELHDFRRFRNPRQLMAYLGLVPSENSSGDRTQRGGITKAGNGHARRVLIESAWHYRHLPRVSVTLRKRREGQPARVIAIADRAHQRLSRRYRRLTEQGKPHNKVVVAVARELVGFLWATLAPEEPREA

SEQ ID NO: 436067 - protein, 346 aa, unidentified
MVIIGCDFHPGFQQIAIFDNWTGEYEERRLGHRAEAEQFYRELGAGARVGMEACGQYPWFEQLLEACGHELWLGDAAAIRSRAVRKQKTDRRDAQQILELLREERFPRIWVPSLEERDVRQLLVHRHKQVVWRTQVKNQLQAIALSQGLQRRTKLWSAAGRSQLEKLPLLPYAKERRSQLLRSLDQLDGEIEQLNRQVEEEVRQRPPAVKLMSHPGVGPVTALAMVLTLGPARRFASGKQVASYFGLIPSEHSSGGRQQLGRISKQGNSFLRFLLVEAGQSAARYDSELGRFYRRLAARKHRGLAKVAVARKLAMRLYLMLREDWTYAQLVRVVVQASPSHSVVES

SEQ ID NO: 436068 - protein, 323 aa, unidentified
MSVFVGVDVAKKSFDIATPLPNGKTRTKAKLSNDPGGFKQFCDWLERHAEPGAWILMEATGTYHEALAEHCHNQGYRVCILNPAVIAKFADVELRRVKTDKADAKVIAAYGQQKAASLRQWEPEPPAQRRLRALVRRLDDLKEMRQMEQNRLDVAQDAVQQSIQDVIGHITEELEKTRKAIEQTIDDDPDLRKRRDLITSIDGLGDTTATLLLAELGDPLKYQSPSAIVAFSGLNPVVQQSGEFIGQSTISRTGASRLRAGLWMSGTVSIRHNPVVKALAERLNSRHKAYKQIVCAAMRKLLHLVYGVVKSGIPFDPKIALAG

SEQ ID NO: 436069 - protein, 378 aa, unidentified
MSETTRSIQYTTDSVLYLAFELANAEWKLGFTVGLGQGPRRRKIDAGHLDALQEEIRAARKRFGLPEDAPVRSCYEAGRDGFWLHRYLAAEGIENLVVDSASIEVNRRARRAKTDRLDTGKLVTMLIRYHSGEKTVWSVVHVPSVEAEDQRHLHRQMSKFKTDRTRHINRIKGLLAGQGVRLPVDDNFLERVQRVRLWNRAPLPPGLRSRLEREYAGFQHTDERIKELEGERRELIRISDHPSDVKVRALLQLRGIGENSAWLFVKEFFGWRVFRNRREVGSLAGLAPTPYNSGGQSREQGISKAGNRPVRGMIIEIAWGWLRHQPDSELSLWYQDRFGHGSKRLRKIGIVALARKLLIALWRYVETGEIPAGAQLKP

SEQ ID NO: 436070 - protein, 348 aa, unidentified
MSIIGCDLHSRYQQIAMLDTETGEVVTRRLEHENGEARAFYTRLPKPSRIGIEATGYTQWFERLLAELGHELWVGDAAEIRARAVRRQKTDTRDAEHLLDLLSTQRFPRLWVPSPQERDGRQLLKHRNKLVRMQTSVRNQLHFLAMSQGVCRKQKLWSARGRAELEGLSLGPWASQRRKELLELLDQLGPRIAGLDQAVKTEAERRPEAVELMKHKGVGSVTALAFVLTVGPVERFRHSRQVVSYLGLNPRENSSGGRQRLGAISKQGNSMLRWLLVEAAQSAARFDPELRRQYQRLKFRRGGQIAKVAIARQLAVRLYWRLRSPETPPVRMPGSPSSGVVPSTGSRE

SEQ ID NO: 436071 - protein, 412 aa, unidentified
MEVLHACCCGLDVHKKGVTACVLWAEGKGKKRKEKRQFGTMTRDLLALADWLRACGVTHVAMESTGVYWKPVWNVLEGQFEILLVNAQHIKAVPGRKTDQNDAEWIADLLQHGLLRRSFVPPTAIRELRDLTRYRVSLVQECNRLANRIQKVLEDANIKLASVATDALGASGRAMLKAMIEGEGDAKKLAEMSRGLLRNKIPELQGALEGRMKSHHRFLLKELMEHLEFVESKIARLEQEIGEHLRPFEEEMEQLGTIPGVDWVTASGLIAEIGVNMNQFGDPEHLGSWAGVCPGSYESAGKRKSRKTRKGNAWLRRCLCQAAWAVSTKRNNYLSALYRRLAARRGTKRAILAVAHKLLQIAFYILRDGKCYRELGADYFDRLHPYRVKRHLVRRLESLGFQVNLVPASQAL

SEQ ID NO: 436072 - protein, 316 aa, unidentified
MSNNSYKFYIGIDVSKAKLDVAMGDGNTPLVVLNDSDGLKRLLKQLPAKEESLIILEASGGYEKYAADYLRRDGFKVAIVNPKRVRDFAKAAGKLAKTDCIDAQIIRNFGQSFNPLAQPPLTQAEAERLQTLNRREQVVRMITLEKQYLETSSEGYKKEIKKHIVFLEKKLELLENKLVEQFNQEPILKEKVERLDEIKGVGKITAMNILIHLPELGSLSNKEVAALAGVAPYNRDSGQMRGKRAVWGGRVTVRSALYMAILSAIQFNLAIKHFYQKLIAKGKLKKVAMVACMRKMIITMNAMMRNNMRWDSARIK

SEQ ID NO: 436073 - protein, 379 aa, unidentified
MSRHRNGAPVEAELAMVLLVFELSKATWKIGVMRPGSQKLSRYTVEGGDVAAVATLLEKIRQQIGSQVRIVSAYEAGYDGFWLHRWLEAQGVESRVLDSASIQVNRRARRAKTDKLDLDQLMRVLAALERGEPKVCSVVRVPSLEGEDLRRLTRERGRLLRERVAHTNRIKGLLFGQGVRDLEPLEKCFLDELGEARTGDGHALTPKLVAEIRREHQRLKLLVEQIADVEAETRSLAKAPEPASTPAKAVQLVRLKGVGPKSAWPLATEVFCRHFDNRRQVGGYFGLDGSPYNSGASRREQGISKAGNPRARALAIELAWLWLRHQPNSTLSRWFFERVGQVKGRIRKIAIVALARKLMVALWRYLETGVVPEGAVLSA

SEQ ID NO: 436074 - protein, 353 aa, unidentified
MKKIIIGIDISKEKLDATAIDVRSGQLQIIKLGYQTFENRPMGFRKMLVWSRHLLAEAGLEDVLFCCETTGGFDRGLCDYIYTKGLDIWRESALQIKQSSGIHRGKDDKADSLMIAEYAMRHLDKAVYYESPDKTVRELKALLLYRHKLTQEKTAKKVRMNQLKNTAARSHSMTFILRDSARGVRTLEKSIRECDRQIRELIKSEETFKRNYHHLTSIRGINIVNATAMIVYSNNFRNIKDANKMATYYGVASFRTKSGTSVDKRAEVGQYSNSTLRMYITQAASCAISENGIYREYFLRKTAEGKAYGIVINNVKNKLIHLAFSLVKNDMDYEQNHELMRVQNEKNVKSSHN

SEQ ID NO: 436075 - protein, 316 aa, unidentified
MASPGVVVGIDVAQAELVVAVRPTGDAWTNVNDDAGITALVRRLRPLQPTLIVLEATGGYERAVVGALATAGFPLVVANPRHVREFARATGQLAKTDQVDAQILALFAERVHPEPRPLPDAATQALEALLARRRQLLDMLTAERNRLGHAVPAVARDLRQHIRWLERRLGDLDRDLDAQIHASPVWRAKDDLLQSTPGVGPVLSRTLLGALPELGLLTHKQIAALAGVAPLARDSGTRRGHRRVYGGRAPVRAALYMGALVAARHNPIIRAFYQRLVAAGKPKKVALTACMHKLLTILNAMVRSNTVWRANVVQTT

SEQ ID NO: 436076 - protein, 360 aa, unidentified
MISNIKYIGMDVHTESISIAVRNAAGKIVMECVIETKASTILQFFDGLRGDLQVTFEEGTWAAWLYDLLRPHVGSLVVCDPRRNALLKDDNRNDRIDARKLSDLLYMNKLNPVYHGEHGLRALKELVRSYLTITRDLARVMTRVKAIYRSWGIPCTGKQVYAPRHREEWLAKISELGVRRRAEFYYQQLDALRVLRQQVRQDVLAESKKHRAWKRLCQIPSIGPIRAAVLLGILQTPHRFRTKRPLWKYSGFAIETHSSADHRSVNGQLQRKKKTSVRGLNENCNHDLKNLFKSAAVVASSKPGPFQEFYAALVAKGMRPEMARLTLARKIATIVLIVWKKGVCFDAQYLKPQTAFICRQ

SEQ ID NO: 436077 - protein, 413 aa, unidentified
MEWVACVGIDWGDKQHACMIQTRQGTKQASTFGNSPEKVHEWVRSLHERFPDGTIVVGVEQGQWSLIYALMAYEFLALVPINPRASKAYRTSLRLSGASDDPADAALICDFVLKHFAELRVWHPDDVRTRKMRLLCEQRRSLVDQRTALTHTLAATLKEYFPQVLEWFGETSRYLRAFLAHWPTLEQARQASADELTGMLKANRRRKPAAVAHELIEKIRVAVPLTHDSAIIEAHSLYALSLTTLIDPLDQQITKYDGAIAAAWASHPDRKIFSSLPGAGAVIAPRLAVAFGLDRSRYDEAREVQQYSGIAPVTEKSGKHIWIHARWGFPTFLHQTFHEFAQASLPKCEWARAFYQQQRNGGAGHHQAIRTLAFRWIRILFRLWKTGEEYDENRYIEALRQKQSPIVRRLAAA

SEQ ID NO: 436078 - protein, 354 aa, unidentified
MGVARPKLRARTVARVSSRITQDRACFRRPSPGGSPKSSEAPAFVGIDVAKAELVVAIRPSGERWTLANDGPGIQVLVQRVRHHAPTLVVLEATGGYERAVVAALAAAQLPLVVANPRQVRDFARATGQLAKTDRIDADILALFAERVRPAPRALPNDAAQALDALLTRRRQVLEMLIAERNRLEHAGPAVRRGITQHIRWLERQLHDVDRDLDDTIRTSPIWRAKDDLLRSAPGVGPILSRPLIGELPELGTLPRKQIAALVGVAPLARDSGTLKHQRLIWGGRAPVRAALFMAALVGTRCNPVLRAFYGRLLAAGKPKKVALTACMRKLLTILNAMMRTNTTWRHAHPSQTI

SEQ ID NO: 436079 - protein, 342 aa, unidentified
MAVVTVGIDLAKNLFAVHGVDKNGNTVLVKPKVTRAALPELIANLPPCTVGMEACSGAHYWARLFRQYGHDVKLMAPKFVSPYRLAGKAGKNDAADALAICEAVRQPHMRFVPVKDEEQQSMQCLHRTRQGFIEERTASYNRLRGLISEFGLIAPQSTEQLRRLAREHRKNLPGWVSQCVDDLLSHIDNIELKIAEYDRILAKIAARDSRSQNIMKLRGVGSITVSALIASIGSGHDFKNGRQLAAWLGLTPSQYCSGGKTRLGKITKAGDAYLRTLLVQGARSVMIGVEHKQDPFSRWVCSLINRRGYWRAAVAIAAKNARLCWASLNYGDDFKLYSSPNS

SEQ ID NO: 436080 - protein, 351 aa, unidentified
MTRKTDAVVASTIGIDTGKNTLHLIGLDDKGAIVLREKLARGRIAARLANVPKCLIGIEAGMATHCVARELIALGHKVKQVPPVYARPFRQGHKNDFRDAHAVAEAVQRPSTRCVPVKTDDQLDLQALHRVRSRLISERTAVINQIRGFLLEHGIPVRQGLRFLRQQLPDILAKRIDVLSSRIIRIIEDLSGDWRRLDERIENVTEEIEGLAHGTEGCRQLMTVPGIGPIIASAMVAAIGSGTAFARGRDFAAWLGLVPKQMSTGDRTILGRISKRGNRYLRTLFMQGARVILLRPANWAKHSFGPWLAAAAKRLHHNVLATAVANKLARIAWTVLVQARSYETRVTSEMA

SEQ ID NO: 436081 - protein, 343 aa, unidentified
MTIIRVGVDIAKSVFHVHGADRQGKTCWQGKYSRSKWLDAISNKAPAGAEIGMEACASSHHWARELQKRGYRVRLIAAQFVKPYVKSNKNDRVDAEAICEAMSRPNMRFVTPKSVEQQDIQAMHRIREELVAQRTAKANQIRGLVGEYGIIAPIGIHQLRLALPNWLEDAENGLTYPFRQLLSDLAEDLRYLDGRVQKLDEQIRESVQCDPVAKRLMTLRGVGPLIASALSGALGDGKAFKKGRDFAASLGLTPRQHSTGGSDRLLGISKRGDSYLRKLLVHGARAVLRHATNKEDGLSRWLKGLASRKHTNVAVVALANKTARIAWALIYKKVDYDEALAAA

SEQ ID NO: 436082 - protein, 412 aa, unidentified
MDVLVERCAGLDVHRDSVMATVRVPAGRRRQREQHTRRFGSTIGGLEALADWLAGFGVTLLGMEATGVYWKPVFYVLEPRFECWLLNAQHLHNVPGRKSDVIDSAWICQLVEHGLLRPSFIPPPLIRELRDLTRLRTAQIEERTRTLQRLEKVLQDVGIKLTSVASSGYSVSARAMLEALLAGATDPAELAELARGRLRAKIPRLQEALRNRFRVDHHGVLVAGLLAHVDSLELSLARLDARIEQHTAPYAEVVELLCTIPGVGKRTAQVLIAECGLDMSVFPTVGHLASWAGICPGTNQSGGKRRSGRTSHGNRWLRAALTEAAKAAARSKGTYLASHYWQIRGRRGDAKAIGATRHDILVAYYHIVRDRVPFRELGADWLARRYSPEHRARRLVRQLEALGYTTTIEAAA

SEQ ID NO: 436083 - protein, 313 aa, unidentified
MGGIGGINAAIDVGKHQLEVALGSNGELFAEPNQPRAIARLAKRLAHLGCERVLIEGGAYQNVLVGALRAAELPVVIINPRRVREFAKSMGQLAKTDHIDARVLADYGERIQPPVRELPDEQNQALRGRWVRREQLIEMLVMEENRLEHAPKALHRSLRAHIAYLRKQITQADHDLDRAVRNSALWDTYELLSSVPGVGRVLSVALLSDLPELGRLNRREIAALAGVAPFNCDSGTLRGQRKIQGGRKRLRRVLYSATLASVRCNPVLRPFYQRLRATGKPAKVALVAAMHKLLLILNAMLKTKTVWRPPCPA

SEQ ID NO: 436084 - protein, 421 aa, unidentified
MEFERVDYAAWIGLDWGSDKHALCLQAADRSPVECCTLEQKPEVLHHWFMSLQARFDGRKVAVAIEQTRGAVIHFLLGLDFVHIFRIHPKSLKNYRDALHPSGAKDDPTDAQLLLQFVLLHQDKLQPWVPDEPEIRLLLRLVEFRRKIVGKRVRLTNELTQMLKEYFPAALHCAGDLDIVMACDFLAKWPTLGKLQKSRPETIRKFYRMHGSRRSKVIENRLRQIRAALPLTTDAPVIESSVFMVKSLAPQLHLLIEAVTQFDQRIKEVFQKQRDAQIFSSFPGAGAALAPRLLAAMGSDRSRFSSSVEVAEYSGIAPVTERSGKSKWVHRRFACSHFVKQSFHEFAAQSILYCDWARGYYDRKRTEGKRHHAAVRALAYRWIRIIYRCWKDRISYDEDKYVKALRPRKPDLPHSSTPSVS

SEQ ID NO: 436085 - protein, 312 aa, unidentified
MTTTTEVYVGIDVGKTWLDVAQWGDAEVWRVSNDEDGVAKTMARVAAMEPQLIAVEATGGYEQMLVQTMLLNSLPVAVVNPTRVRALSKATGKLAKTDVIDARLIAEYAFKIQPAALEAKEANEIRLKALVTRREQLVEMRTAELNRLGTAQNNMQADIREHIEWISVRIQQLEAQIDELVDTLPEWRAQAQRLDSIPGVGMITAVTVLAEMPELGQLDRQKIAALAGLAPFNRDSGHKRGKRRIFGGRKGIRRVLYMACLSATKCNPVIRSLYQRLLKNGKLFKVAITACMRKMLTIMNAMTRDQLFWRAP

SEQ ID NO: 436086 - protein, 356 aa, unidentified
METAYDGRQVVGMDLHRRRSVLVRMTGDGRRLATARIINSPVELRSQIARAGKHPEVVLEATYGWYWAAGTLAAAGAEVHLAHPPGVKAFTYRRVKNDERDAADLADLLRMGRLAEAWIAPPEIRELRELTRYRIKLVHLRTSCKDQVHAVLAKLGVPVTCSDIFGKAGPAWLDALGLPQPYAGKVTSLRQIIGVLDAGITMLGEVIADLLAGHQGYQVIQQLPGIGPVLAAVIIAEIGEVTRFKNPAQLCAWAGLTPRHRESGTKITRGRVTKQGSRMLRWALIEAIQRAGSDSVTGAVKAAIIARRGKETRNIAKVAAARKLLTLIYYGLRDGQIRCLPAPAPEPPVTTPARAA

SEQ ID NO: 436087 - protein, 354 aa, unidentified
MLTSIRPQDYDVFVALDVDKKSYAISFKEYQHTKCYSIKMPAQTDSMIQFFQKRFPGKRLIYAYEAGPTGYALYDRVTSRNLDCMMVHPGNVEKAPKDRVKTNRLDSLKILDQLHGGSLKGIRVPSESYRQLRHLTMLRQQYVADQRRAKQRIEALVTFESVSVPLGDKSRWSSRHIQILKELELETTRRFRLDSLLEDLAYARQQLLKVHLQLREFCLQNESIHKNIQLLRTIPGFGFVIPAYLLGRIGDPAYLRTVREIGSFAGVVPSEHSTGDTVKKGPITHMGDAILRGLLVEGAWIAIRKDNELRLFYERIRSKNKGERGPRIAIVAIARKLACRAHRVLKDQKPYVIR

SEQ ID NO: 436088 - protein, 343 aa, unidentified
MYVGIDAHKKYCKSMVMDKKGVKKQKAVFNTTLDGMNSFSQTLDSNAKIVVEASTSGLYVYDYFHEKGFDVIMAHPYQVKAIANAKIKTDDISAEILAHLLRTDLIPEAYVPPLEIRKLRDIVRHRVALTRVQTSIKNRIHAILTKEGVRHGFSDLFGIAGRSFLESVELKEQDRMAVDNFLMILDTLNPRINEISRCIEREAKQKKCKEVEALTTNIKGLGLYTSLLITAEIGDIQRFSHYKKLCSWVGLIPSTHSSGGVTHHGKITKRGNKLMRWSLIQATWRIIRFDDALRDNYIRLQKRIGKQKAIVATARKLVKRIYFILQEVHENQTYELSGKLAPY

SEQ ID NO: 436089 - protein, 370 aa, unidentified
MVNWQNKTVSVGIDLHKTQFTVCAITSKREILFEAVYNTETEGYKSFISRCHSLEEEYGAHVSMAIEATSNARYFRNLMENENFFIVVINTLKFKVITQSAKKTDKRDAFTIAEFLLKDMLPESYLCDQETEELRKLICERLDLVSLIVRTKNRIHNMMLGYGIVTTAAQFQSKKKRLLLLNGLENHALITKRTVPTLKRLIQTLDILNEQVKQIEALIEEFTLEDEDTQLLQTIPGIGKITSTTIRAYVGDINRFETYKQFAAYCGLTPFVKFSNEKGFTGHITKNGPVELRTSMVQAVMGMLRLQKSLRYMSLINDYKRMKKNKGSGKSIIAFARKLSRVIYAILKNKTPFDIDRLTVDYIRRQTEVV

SEQ ID NO: 436090 - protein, 312 aa, unidentified
MYHIEEEVVYMGVDIAKAYLDAAMGNEKSRFSNDALGHRQLINWIKQMPAKVQVICEPSGGYERALVRALVGAQLKISLVPANRVRQFARAKGILAKTDRIDAKLLCAFGEAMQPGTISASQLEQQHLRELESQRRHLTHLLVMEQNRAARMSDLCVCKMNRCLITQIKKQIEQLDLLIQGQIKASPELSTKAEKLTAISGVGARTAALLLAQLPELAELNRREIAALVGVAPFNRDSGRMRGKRAIYGGRKPVRHGLYMAALVAAHHNPILRNFYLRLRAAGKPAKLALTATMRKLLIVLNSALKTDLNYA

SEQ ID NO: 436091 - protein, 411 aa, unidentified
MKQQFDVFVGIDWGSEQHRVCVVNPDGDIVDQKWIEHSGQSLAELVTWLRSKTSASPGKIAIAIELPRGPVVETLMEQGFAVFSINPKQLDRFRDRYSPAGAKDDSRDAFVLGDSLRTDMHCFHAVRLDEPAVIRLRELSRLDEDLRQEQNRLQNQLREQWHRYFPQLLKLSSAADEPWVWDLFQAAPLPAKAAKLPESRIQRILSKNRIRRIDAPKVHAILAATPLAVAPGAAEAASEHALLLLPRLRLLQQQRGGIAKKLDVVLEQLATPDQTSGEPVEHRDAEVLLSLPGVGRQIAATMLGEASQAIAERDYHGLRCYTGAAPITRQSGKKKIVLMRQGCNERLRNALYHWARVSVVCDPKSKAQYAEMRHKGQSHGRALRGIADRWLDVLISMLTHHTLYDPKRRAA

SEQ ID NO: 436092 - protein, 421 aa, unidentified
MALCPHHWKIGETICNDPQVCRIVDLPVYYELETNNGNRDYRIQIGGHYMNYNTVYVGMDVHKESFTLCSCKYEDEKASHYQRTPASYKNVLRYLAFLRTIYGEDTRFVCGYEAGCLGYSLYHQLENFNVECVILAPTTMLEQRSKRRIKTDKRDAEIIARSLAQHNYSPVHIPTETDNQTKEFIRMRDDHKAELKKIKQQILSFCLRQGYQYDGSGNWTAKHVKWLRSLKPAGLYKEILDEYLLTYTILTDKLNRLDQRIEELASKEEYKESVSKLTCFLGIKTHTALSVIVEVGDFQRFVSARKFAGYLGLVPGQHSSGDDRNGLGITKAGNTHVRRLLVESAQSYTRGKIGYKSRVLRSRQAGNSPQVINYADRANERLRRRYYKMVLKDGKKYNIAKTAIARELACFIWGMMTDNIY

SEQ ID NO: 436093 - protein, 428 aa, unidentified
METPTLNPELVAWIGLDWADQAHEIRLQAVGSRRVESLRVEQKPEALHAWVAQLRARFPQGKVAVALEQSRGAVIYALMNYDFLLLYPVPPKGLARYREAFFTSGAKSDPGDADLLLEMVHSHRDRLRLWQPDDARTRQLRLLVEHRRRTVDDRTALTNRLTDLLKTYFPQALEWAGDLRKLAACEFLSQWPSLKALQAAGRPTWRRFYRCHRRLSAEELDQLLQAIAQARPLTEDRALVEASVLMTQTLIEQLRAVIAALARLDQALEKLFEQHPDQGLFQGLPGAGEALAPRLAAAFGSNRHRYQSAEELQQFSGIAPVTESSGKTCWVHWRMACPKFLRQTFHEFADASRKKSRWAEAYYQRRRQDGVSHHAAIRALAYKWIRILYRCWKTSTPYDESVYLQALRRRHSPLWLAATALSIQEGHA

SEQ ID NO: 436094 - protein, 313 aa, unidentified
MIHDLPFVGIDVCKTRFDVFVHPAGTRFSCPASQDGIGALVQRLAGLGRCAIAVEASGGYERKLIAPLHAAGMTVYVVAPARVRQLAGALGQLAKTDAIDAAMIARYLAVAQENLTPWRPDAARQRLSAVLAHRRRLVAERSGLASLLDTEDEPLVRSLVQERLDAIARDIEQLDRAVRVLLVEHTHLRQRYDRLRDVKGVGPVLASTLLADLPELGFVSAKAIAALVGVAPHARQSGASNRSGRCSGGRKHLRDIAYMAVLSAIKAKDPVLAGFYQRLRGRGKPFKLAMVATIRKLMTILNAIARSQTALSQ

SEQ ID NO: 436095 - protein, 438 aa, unidentified
MRRKKNKTTKKVHFESLPLIHPNAAGIDVGSKEHLVAVPPDRDPQPVRTFEAFTPELHELAAWLKRCGIETVALESTGIYWLSLYEVLEQYGFEIRVVNARHVKNVPGRSKSDVLDCQWIRKLHSFGLLNGSFRPEAQVRKLRTYMRLKDNLVVEGTQAIHHMQKALFEMNVQLSNVISDITGESGLRIIEAILAGERDPEQLAAFCSTRIKAPRQTVAKSLHGNWDEALLFCLKTALDTYRFSQNKIQDCDQCIERQLATFEIKTPLPTSKQTLQTQLHQVCGVDLTKIPGIKEQTAQIIISEVGLDMSRWNTEKQFSSFLGLCPNNLITGGKIIRRSTRKVYNRAADALRLCAQSLTHSKSALGAKYRRLRARLGAPKAIVAMAHHLARLVYRMLRYGQNYVEKGIHQYELKFRLQRIKWLKKEARSLNMQLVAAQ

SEQ ID NO: 436096 - protein, 370 aa, unidentified
MAKNGILAKSNDLQTSFHANTATVITIGIDLGDRFSHCCVLGPDGEVLTEGRVRSTPEAMTRHFQQLPPCRIAIEVGGHSRWLSQLLTEWGHEVIVANPRNLRLISDGTRKSDQVDARILARLARVDPTLLSPIAHRSQKSYPDLAQLRARDLLVKSRTRLINAVRGILKAVGLRAPASGAFSFSSKVSACVPDELKPSLIPLLETIAHLNQQIGAFDRAIEHLATYKYPATIRLRQISGVGAITALQFVLTIDDPNRFLRSRAIGPYLGLAPRRHQSGNIDQQLRISKAGDKPLRSLLVQSAQYLLGRFGPDSDLKRWGVHLAKRGGKNGKKRAIVAVARKLAVLLHRLWVTGETYQPLRNSTLACAGS

SEQ ID NO: 436097 - protein, 389 aa, unidentified
MYLIGIDISKYKHDCFIATEAGEIIKDSFSFDNRSKGFSQLLDVLKSLDPSQTKRIGLEATGHYGYNLKVFLDHHGFDYMEFNPYLVRKLATGLSLRKTKTDKADSKLLSMILLSVDYKVYPVKSYHIQELKSLTRYYKTLVKKHSKELVVLTNILDLVFPEFKPFFGNRFSKTAYYMLDHYPTPKKISRISQSGYKKIYSLSRGRFSYARLMKLKDLARNTVGHSSQLLMLQLKSALNLIRSIDSEINSVKSALLDCAVKLDSPIFSINGVGPISALSIIAEYGNFISFDSPAAMLSFAGLEPSVIQSGTIDKQGHMVKRGSGYLRETLMNVSMFFMIHNPTIYEYYLKKRNEGKTHRVALSHVAKKLIRIIFHLVKRNTQFNYLKLR

SEQ ID NO: 436098 - protein, 363 aa, unidentified
MKAQVIKQNVGSDISKDDFKVNFHQLLSTQHIRIKGSRTFKNTLTGFRVFVAWVEKLRDLSVEVRITMEATGVYYEQLVHYLHHQTDYHISVVLANTTKAYFKSLNLKSKTDKIDAKALGQMGLERDIEKWEPLSDQIRILKQLTRDRVNLLNQKTALSNRLHALNYSYLPHKQVIKRLKQQIRLIQKQLKEVEKQIQQLINTDSIIKERIDKICQLKGLGLVTVATIIAETGGFVLFTSRAQLISYAGYDVVQKESGSSVKGKTRISKKGNKHIRRALHFPAMTAIKYDPGLKHLYDRVFDRSKIKMKALVAVQRKLLLLIYTLFKKNQAYDINYEKDSSKHNEDKAITKSCRQDTLPAYAG

SEQ ID NO: 436099 - protein, 352 aa, unidentified
MRTSQKTPETITTIGIDLGKNTFHLVRLDKRGAIVLQQKVSRSQLEHRLCNVPRCLIGMEACSGSHHIGRQLAAVGHNVRLIPAQYVKPFLKGHKNDYRDAEAIAEAVQRPTMHFVAIKTPEQMDLLALHRVRSRLVGQRTGVINQIRGFLIERGITVRQGAVPLRKALPDILSSNTDVLSPRMVRLIADLAQDWRRLDERIATVSAEIEALAQQDDGCQRLMTVPGVGTIISSATVAAIGNGAGFKQGRDFGAWLGLVPKQVSTGDRTILGKISKRGNKYLRTLFVQAAHVVLVRRPRTAMPGLWPWIERASKRLHRNMLAIALANKLARIAWAVLARGRGYQPRIATNVA

SEQ ID NO: 436100 - protein, 392 aa, unidentified
MPADRPVLPDWTTGKENAGFMVILGIDAHKRTHTVVAIDNNGRRLASKTFGTATADHLALLRWADQLDTNDHPTGSDLIVSDPRTATDKPRRWAVEDCRHLSRRLERDLLAAGEQLTRVPPKLMAHVRDSARTFGKSDPIDALAVARAVLREPDLPTARLDDPDRDVRLLGDHREALVAERTRVINRLRWHLHELDPGWDPAPRSLDRVSAYDKITVRLGDHDDNLAGSAMLVARLARRLVERARTLTVEIDELTAELTQHVQALAPTLLAVPGCGVLTAAKILGETAGIDRFTSKDAYARHNGTAPLPVWSSNKARHRLSRTGNRQLNAALHRIALTQARCHPEAKTMIARRRANGDGGMEALRVLKRRLSDVICRALHTDLQSKVINAAA

SEQ ID NO: 436101 - protein, 346 aa, unidentified
MMIIGCDFHPSWQQVSWLDTETGETGEQKLVQSAGDAERFYRQLPAPALIGMEATGNCHWLVDLLAELGHELWVGDAAQIRASCVRQQKTDRRDAEHIRILLQEGRFPRIWMPSSEVRDLRQLLLHRYKLVTIRARVKNELQHLCLNQGVQRKHKLWSQAGQKVLRELPLKPWAARRREDLLGLLAMLDQQIDPLDRAVKEEAQRDKMALLLQTQPGVGAVTALAYVLTMGDVSRFARGKQVASYLGLIPREHSSGGRQKLGAISKQGNRMLRMLLVEAAQTAVRLDPGLRKEYLHRCHQKPKAVAKVAAARKLAVRLYWMLRTRKPYPEVVRIESNPRVPLVGAS

SEQ ID NO: 436102 - protein, 416 aa, unidentified
MEVLHARCAGLDVHKDTVVAGIRIADGGPAKTEVRTFDTTTPGLLALSAWLAEAGCTHVAMEATGIYWRPVWHVLSDGEVTLILANAAHVKNVPGRKTDVADAIWLADLLAHGLIRPSFVPEAATQEMRALLRTRKQLVREQASHVQRLQKTLEDANIKLSSVLTNIMGKSGRAIIEALIEKQTNPEGLLALVQKGVKAPPEKIKAALTGRVTDRHRFLLRLHLRQIDALDAAMADIDAEVDRGLDPFRQAVTLLRSIPGVSDLTAQVIVSEIGTDMSRFPTAGHLVSWAGLCPRNDESAGKRRSNRLRKGAPWLKTTLVQCAWAGARKKACYLQAQFQRLRSRRGPKKAICAVAASILTAAYHMLRDGTFYHDLGPDHFRRTSPETHAKRLAQQITKLGFTCTIAPASTAEEVSI

SEQ ID NO: 436103 - protein, 366 aa, unidentified
MPSVTSAAGTIHLGMDTSKNTIVVGILMPGDEVPVIDRIWNEEGSVRHLVGRLGDPAALRACYEAGPCGFDLHRLLTSLGVACDVVAPSLIPRRAGDRVKTDKRDASRLARLHRAGELTPIRVPSDAEEAVRDLVRARAALLADRKRAQQRITAMLLRHGRVWRSGSYWTQAHEQWIAAQRFSEPALGAALAHYRAALDTRQAELDAIEAELAPWAGREPLAAAVARLGCYRGIAELTGLVLAAEVVDWRRFPSARAFMCFTGLVPAEYSSGERTRRGSITKAGSEPARTALIEAAWSYRFLPAIGVTLRRRQHEAAPQTLARSWRAQRRLHARYKAMTARGKPAAVAITAVARELAGFVWGEMTS

SEQ ID NO: 436104 - protein, 391 aa, unidentified
MSMYFVGIDISKYKHDCCIISAADQKVVSKFTFKNDKAGFEELLTVLNSLSNPEDIKIGFESTAHYALNLELFLENAHHSFMEVNPVLIKEYKKSTTLRRTKTDSVDCESIARWLMTVEYKPHSKGFYHSYSLKSLTRLRDRLIRQRSFYLVKITNVLDHTFPEFKPFFNERLSKTALYLLENYGSAEKMARMNSASYDKLRCISRGKFSIQQFLRLKELAANTVGVNNSIFDIELISLLTLYKSLVKEIDTLESEIHKLIEEVHPHYLTIPGIGPISAAVIYAEYGDISNFSNSGQMLAFAGIEPGINDSGTESHGGRMVKHGSSQLRYVLLNACLPLIRFDLTFATYYAKKRAEGKKHRVAITHVAKKLIRVIYALERQDIDFNTQKLR

SEQ ID NO: 436105 - protein, 412 aa, unidentified
MQVIIERCAGLDVHQETVVACVLAGTPGQRPTKEIRTFRTMTRDLEALRDWLKAAGVTHVGMESTGVYWRPVYAVLEGHFELIVGNARHIRNVPGRKTDVKDSEWIADLVRHGLIAKSFVPPKPLREMRELLRYRRKLVESQAAERNRLLKLLETANIKLASVASDVFGVSGRAMLKALILGTASSEEMAALAKGRLCRKHADLVLALDGRIEDYHRFLLTLQLRRLDAAEQDITALDKRIDEKLEPYRTQHALLMQIPGVDWLVAAVLIAEIGIDMSQFLSVFHLAAWAGVCPGSYESAGKQKSGRARKGNVHLRTILVGAAISASRTKGSYLRDKFHRLKARRGALRAALSIAHKILVAAYHMLAKGVPYKDLGEAYLDEIGQTRTLANLKRRIERLGYHVILEPKAAAA

SEQ ID NO: 436106 - protein, 425 aa, unidentified
MKIQTIHSKINSDNKLVVAFDVGKDKLDAYCEYGQHCFQDSFANNTLKIEQKLITFSGIAESTGYDGLQIVAEPTGVYHLKLFRTARRLGYQTALVNPESVHKFKVVESNDSGKTDNKDPRVINLLAKYGKTLIDRDIRDEYLLLRQLNTMIIDEEKAYTATRCKIHRVLIELFCDYSFNNEYLYTNVGRIFMKKYHANPYRIVQRGYAAFYQRMKEAASRIRKSTLQRLWRDAQSSVRHQLSADYVQVLESRLNYLWEELLLRENRMAEIEDAMIGVTDELREKDPNIPLPVKGVVTAFRIAQVLAETGSLNDFESIEELMRYAGLNIRERQSGYYRGNNKISKKGRSNLRRVLGYIVLSLVKKKSLYGTVYHAKKDTGMVGNKAMVAMMRKFLRMFYGWYKSGLPFNKNRVFTDEVNCVQITQ

SEQ ID NO: 436107 - protein, 331 aa, unidentified
MSVHVGLDVGSRTTAMGWRDKGRAAGSWDIAQTPKGRKAAVKKLLALKPLSVVMEATGIYYLDLALELSTAGLPVSVINPKSSRNFARLMLQHSKTDAIDAQLLAEYGERMTPRLWTPPSPAQLELRAIGRHINRLTCHCTRAKNELHALQATETTSAMLIEDEEEAIAMFGRRIERFRRAGRDIIASCPILQEQFDHMMAAPGMGEVSTFAVLAELTTLPVTLKSPQISRYAGLDVRLTQSGTSIDKPGRLSKGGNAYLRSAMFMPAMSAIRCDPYVKAFYDVLVGRGKRKMQAICAVMRKYLTGLWACIRAGEDFDTAKLFSEKHLLKA

SEQ ID NO: 436108 - protein, 355 aa, unidentified
MNVNVNHYIGFDVHKKSISYCVKLADGRIVEEGKLAARRVTLCQWASKRAEPWHGAMEATLFSGWIYDTLKPFAAKLEMGHPARMKAIGASKKKNDKLDARTICDLIRANLLPACWVAPSEMRELRRILRYRNLVLEQAVRMKNKISGLLMESGVEYNKKRLHGEKYFHELVENLAAEVPESVKDLLKLSRGWLESFQATQQQLLVKLQKHPILMERLKRLKSIRSVGEVTALTWALEIGDPHRFSSIGDAVSYCGLTSALVESADKQKRGPISKQRNAHLQTVLIEAAKLAPRWNPRLAELHQAEIDNGRHRNRATLEVARKLVAYLLAVDKSGKDFAVRTPSGKSEGEVKPAA

SEQ ID NO: 436109 - protein, 322 aa, unidentified
MNYPSIMGIDVSSQKLDVCLLLDDQVTNPAYFSLDYTAENLEQFLLDQPTVNPEHCLVGMESTGDYHLLAARFFLKAGFKVKILNPILTKQYTRTTIRGTKTDKTDSFLIAKLLLEGQGNFVNLKELANQRKESLRLASFLGKITLSLKQKLASLKRRDSQLSPAIVTKLEAIKAELKELEELIVKEAITKTTEQEVLIDTIPGFAEKLSAIVSVELGDISRFKNSKSLVAFAGLDPKIRQSGPKLNTQGRLTKRGSPHLRTALFLASNVARRYDKTLADYYQKKKSEGRSYKEIMCMISRKLLARIYAVLKEQKPYTKTPI

SEQ ID NO: 436110 - protein, 409 aa, unidentified
MHYARAFDWRGIELRMEAKKNKVETALGFTNDAEGFEKLITWISKQKRKHEKREVVVGLEPTGHYWFNLSEYLKKEKIKLVLVNPFHVKRSKELDDNLQSKTDLKDPKTIAKLVIEGRYLEPYVPEGIYAELRTLCNFRNKLQKEIITIKNHLNRWLNIYFPEYKKVFSDITAKSSIAVLKKTPLPCDMKESGAEGINQIWRELKLRAVGKKKAESLYEAAEQTVGVTEGLKSARLTLTMLLTEYEIKMSNLEIIEEQIIALCRKVPAVKRIEKIKGVGIMTIASFLAEVGDVNRFESSKQIQKLAGLALRECSSGKHKGKTTISKRGRPRLRQLLFQASMPLVAKNDEFAQLHKYYTTRESNPLKKKQSIIAISCKLIRILFTMFKKEIEYDPQKLVSDIKRTNLQVA

SEQ ID NO: 436111 - protein, 339 aa, unidentified
MYYGAIDLHKNNSVLGIINADGQRLCMRKIPNDLDLIKKALDPFAENMEGIVVESTYNWYWLVDGLQDAGYRVHLANPTAIQQYSGIKHTDDATDAWWLAELLRTRLLKEGFIYPRAERAVRDLLRKRAHLVKQRTQNILSIQNLICRNTGGRLSANKTKQLTEEAVQKFYDKEEERALAINCSLRVIQTLKREITIIEKQVKSKLKLSQPYQVLQSVPGIGELLAMVIMLEAGDMSRFPGVGNFSSYCRCVNSVRLSNGKKKGSGNRKNGNKYLSWAFMEAAHYAVRYYPVIRKFYQRKSAKKGMMVAQMAVAHKLARASYYVLRDQVLFEETKCFVH

SEQ ID NO: 436112 - protein, 311 aa, unidentified
MQQLFIGVDVAKDWLDVHHPLHGAMRIANTPAAAQSFAASCAKQAAWLVFEASGGYDRVLRETLETRGVRFSRVNPRQARDFARAMGVIGKTDRVDARMLAELGARLQPTATQPVTAARRALQAQATRRRQLVEIRKQEATRLHQTTDKQARADITSLIAVLDRRIAKVEAQMAALVDADPETQAIGRRLQTAPGVGPIVAATLIAEMPELGQLDRRRIAALAGLAPIARDSGKRVGPRNIGGGRPVVRTILYLAALQASRRSAVFRTFRERLSLAGKPTKAALIATARKLLVTLNAMLATGTDFDPATAF

SEQ ID NO: 436113 - protein, 356 aa, unidentified
MISTKYIGMDVHKESISIAIRNAAGKIVMECVIETKASMILQFFDGLRGDLHVTFEEGTWAAWLYDLLKPHVTKLVVCDPRRNALLQDGNQNDRVDARKLSDLLYMNKLNAVYHGDHGLRTLKELGRTYLTVTRDQSRVMTRVKAIYRSWAIPCSGKQVYGTRHRAEWLGKIQEPGVRRRVELYYQQMDALRTLRQEVRRDLLAESKKHKVWKRLCEIPSIGPIRAAELLGILQTPHRFRTKRQLWTYCGLGVVTSSSADHEVANGQLRRKKRKHVEIRGLNENYNHDLKNLFKGAAVVASIKRGPFAEFYAALVGNGMRPEMARLTLARKIATIVLIVWKKGVCFDAKHLKPQTV

SEQ ID NO: 436114 - protein, 401 aa, unidentified
MDPHLCVGVDVGYRAHRVGIAHPDGSILEQFDITHNDAGFQEFFQRIERRRTELGLPVAVAMEGYNGYARPLDRLVQERGYRLYNVNNLKLARFKEVFPGAAKTDPIDTRKILELFRLKEQLPLAKDAIQEVVMAPAVNEKLKRLSRRRRHLVGEKMRVLSRMQADLQAVCPELLAATHDADNLWFLRLPSFRDDLRQLARLRPSTILQIPSVGQKYAHRIRDWQAEARFSDEVEYVGPMIIQDAGRILELHEQIHVLDEAMTDLSAQSEIARRLSTIPGFGKTSIAELAGKIGTMERFASEASLALYLGMCPLTHQSGQLSVARVPRQVNIRCRAALMTTTARHIGCVPQSRAYYERKRAEGKAHNQAIRSLGRHVVRVIWAMLRDGRDYEIREDSHPLT

SEQ ID NO: 436115 - protein, 360 aa, unidentified
MKKRLSKKANWFKENSFTDEDELYVGVDVHKEQYHVAIWHNGHIGCVYSMLSDNTKLLRDLQKIRSSLKNVVYEAGPTGYSLVRLLRSASLPAEVVAASKTPRMTDSGAKTDRLDCQQLAEYAAKGLLTFVWVPTKQQEADRQVVRLRDQLMSKRKRVMQQIKSFLLQHGIAWPGGGWSKTVLKRLRQLNIGAELRFSLDQYLDEYEFFSKKMTVTKAKLCQVFSSERHSAAIAVFKSHPGVGDITAWEFRAEMFNITRFSQPKQVSKYIGFCPRISQSGNTCRHGPITKTGRRELRAILIQAAWAWHRKDPYARKIYNRLLRNTGNGKKAIVGLAKRIAIHLWRMLRDGCLYDIKVAKV

SEQ ID NO: 436116 - protein, 342 aa, unidentified
MEHYAGIDVSLECSSVCVVDANGKIVREAKVASEPQALIDWFGSLGFGLERIGLEAGPLSQWLFAGMKKAGLAVELLETRHVRKAFEAMPVKSDRNDARGIAQLMRLGWFRPVHCKSMSAQETRSLLTARKLVQSKLHDVENSLRGILRGFGLKVGKTTGQKFAGRIEELVAGHPHLQTIAKALLAVRAVLRAEFAAFEKQTRRMVRSDMQARLLTSVPAVGPIVALTYASAIDDPARFKSSKQAGAHFGLTPKKHQSGETNYTGRISKIGDASVRTALYEAANVMLTKPVKGCSQLKSWAMRIKRRAGTNKAKVALARRLAVIMHRMLADGTPFNAAAAAA

SEQ ID NO: 436117 - protein, 453 aa, unidentified
MAKRRRKARLMRVSGLPKELQHVNLNAAGIDIGSERHFVAVPEGRDEVAVREFGTFTTDLQQLVNWLKDCGITTVALESTGVYWIPVFELLERAGFEVRLVDARQVKNVPGRKSDVLDCQWLQQLHTYGLLAAAFRPPDEVCVLRGYLRQREMLVESSAMHIQHMQKALQQMNLLLHNVVSDITGVTGMKILKAIITGERDPQRLAANRDRRCRSSAETIANSLLGNYRAEHLFALKQAVELYEIYQAKIADCNEAIAAHLLQQPKSNTAEPPPTAGKQSDKKLGAEVDVRCQFFQMTGVDLFAVKGFGTDTLLMLAGEVGFDMSPWKTEKHFSSWLGLSSGTNKSGGKVLSSKTKRTNNRAAKAFRIAAASLSRSQSALGAFYRRIRARVGKPQALTATARKLAVIYYSMLKYGTEYVEMGQSEYEQRYQQRRLQAMQKQALSMGYHMVPIR

SEQ ID NO: 436118 - protein, 433 aa, unidentified
MNSSTTTPTTNFAAFIGIDWADKEHEIWLRPADGSPAKRSTLSQNPVAIQEWVSQLRQQFGGQLVAVSIELSHGPLLAALLGVEFLVIYPINPKSLARYRQAFRPSGAKDDRSDAELLSEFLRHHFAQLKPWQPEDAQTRLLGGLTQVRRHWVDEVTGAVERVRANLKHYYPVILELFTEGLAQPMVVDFLQRWPNLRSLQAASQSELRKFFYGHNSRSAQLLEERLQLILKAKALTEDDAVLGIYQTDTLVVAELLGVLLKKIKEIQKQISKLFAAHSDAFIFQSLPGAAEVLGPRLLTACGTQRERFAEAVALAQLSGIAPITVQSGQSEYQMFRFTAPHFMHQTFWEFAKCSIKYCLWAKAFVDQKIHKGMGFNAAVRALAFKWIRIIWRLWQNREVYDETKYLAGLCRAKPGGVQPLITSVSSLDSALL

SEQ ID NO: 436119 - protein, 417 aa, unidentified
MKNHKRKLYVGIDIHSREHKVALVPIALLECLDAPWRKVKPLNIRNHIADFERLDTAIRLHISSIEEVVIAVDHTGGHYSEPIVYFLQARGYTVYHLETKAVKAARERFLDQESKSDVIDATSAAYLLYLRDVHGLSFRISAMTPELGSKAAALNSLVLQRWQFNKLVSQATNRLHQFLLAVFPEGEAQYFKQLLKVTLWYPTPKDILASNGLETIEGLRLKDKENILKLANDTVGIPNQIYQWLIRDLSLQRIESLAKRDALTSIIRKEVTVHPYGDVLLSFPYLGEIAAATIIGIIKDIERWPDKKKFKKALGVYSSLTQSGGDPGRTRQGREGSKHGRRVLFQVCFGCIVTKASDNDFKDYYHRQVVRGKPRIKALVSTMGKLAEIIYHCLKVEEPYQYQGKYKIPKISGDEKS

SEQ ID NO: 436120 - protein, 373 aa, unidentified
MSFTSNNILVALELSNSLWLVGTRMPGAQKSHMHRIDAGDTAALLSLLSGLQSRQRAQVSRAPIAVCFEAGRDGFWLHRLLTAHNIPTYVVEPASILVNRRAKRAKTDRLDAEGMLRVLAAYLGGDNQICSMVHAPTPDEEDGKRVHREREYLVQERTRIENRISALLATQGIRSRPSLRSWERDMAALETGDGRKLPRHLAAELNRLRRRLVLVRDLICELDTERDEHLAATSGDTITTKVTALSGIYGIGDNFAAVLAREVFYRHFGNRKQLASYVGLAPTPHQSGNVDKDRRIGRAGNARARKTLVQAAWLWLRYQPGSELAAWFRQRVGELKGRTRRIAIVALARKLLIALWRYTETGEIPAGTIFRAA

SEQ ID NO: 436121 - protein, 295 aa, unidentified
MKSIIYVGMDVHKASFTLSCFSVTTQETFATVKISPDAKAIKKYLDGVSLSRSEECEFVCGYEAGCLGYTLYHQLTAMNIRCVIMAPTTILRNSKRVKTDRIDAENLARCLAYGGYKSVYIPTAQDEAVRDYLRMRDDHKLMLKKIKQQINAFCLKHNKIYPGNKSKWTQAHVKWLNALEFDGYLQDAFNEYMITYRELADKVERLESQIEQLAELEAYRDKVKKLICIKGIKTHTALSLIVETGDFSRFQSAKRYASYIGLVPGEHSSSEDQKRLGITKWYVISPKVSCKRFGL

SEQ ID NO: 436122 - protein, 321 aa, unidentified
MVYIGIDISKSSFVAAYPSATDYRVRTYPNTTAGVRKFIATLSAAEHHCVMEATGNYSFLLLYLLHQSGIAVSLVNPKKIKYFAKMMMEVTKTDEKDARLIAMYAEKMNPPIYKMPADTLLLLKQKKTVIRQLRKQLVASQNLRESLSVLPYQDKVSLRTLEKTIAFMTKQIDFLESELADIASDVFDKQFKALISIKGIGVTLATALILSTGGFSYFENAKQLSRFIGICPTYQQSGTSIKVKGHINKNGDKSLRSLLYIASWSALKYNAACRDCYLRLKAKGKPSKVALIAVANKLVRQAFAIATTDAKYIDGFVSTKK

SEQ ID NO: 436123 - protein, 340 aa, unidentified
MKLFGAIDLHSNNSVMVLIDEKDEVVYQKRLANDLRLILEQLAPYQSSLEGMVVESTYNWYWLVDGLMEQGYRVHLANTAAIQQYGGLKYTDDDSDARWLAHLLRLGVLPEGYIYPRETRPVRDLLRKRSQLVGQTTVHVLSIGNLYARNSAQSLSAKRIKGLEEREVDEDFPNGDLALAIKANLAVLRSSMEQVEILEQTVIKRVKLRGEFKLLKTAPGIGPILALTIMLESGEIERFASVGNFASYCRCVGSQKLSNGKRKGKGNSKNGNKYLSWAFIEAANFAIRYNSKIKSFYQRKKAKSHGVVAIKAVAHKLCRACYYIMRDGVAFNITKAFGPK

SEQ ID NO: 436124 - protein, 337 aa, unidentified
MNEIIRIGLDTSKHVFQVHGVNAAEQAVLRKTLRRGQVERFFASLPPTRVGLEACGASHHWARVLQGLGHEVGLLPAQYVRPYVKRGKNDAADAEAICEAMSRPSMRFVPMRTAENQAELMLLTTRDLLLKQRTMLINAIRGHAAEFGVTGRKGTDSIAGLRELIAHHEAMPELAREILAGLFKQVESLEGQIRELERRLVAWHRDNDCSRRLTTIPGIGPIGATALAMKVPDPSIFKSARHFAAWLGLTPKNHSTAGRYRLGVITRAGDEILRRLLVNGAMATIKYAKPGRAAPWLLKLLARKPKKLVAVALANKIARIAWALMMRGEVYRHSLAA

SEQ ID NO: 436125 - protein, 461 aa, unidentified
MSKGSGTTRGDRRRNARRERLRQVLPRDGAVIGIDLAEDKQAIAVIDHDLRVLARKTVRVKAFRLGEALDWAVAQARAKGFASVTVACEPTGPRWLQVQRLCGERGLPLVCIQPLMSHIAREQQDYTTHKTDEADCVLIARLAVELHCYLPEQLEETWAHLRHLGRRRAQLITAATASAQRIQDFMSVAWPTVTETCARPLESNTWLAAVQLVTSRCGGQPGKLAVMGPEAFTTLVRGAVPGWGGKKAWGTICGRIFAALTDTEGVVVSSRRGLLRRCADELGDLQRTRAQLRAVEADMVAVLDELGLSRLADIPALTAVGAAAILAETGDPRRYDSSSSLVKHAGMSPSDNASGAFYGQAHISRRGRPGLRLAVWRAVWPMLRFNPVMAAKYAAMTSAADDAAQADAGSRQATAAGAAARARRAKARVACAASLLRWIYSMIVHDAGWDPGAASCPAEAA

SEQ ID NO: 436126 - protein, 412 aa, unidentified
MKQQADRVGGLDVHRDSVVATTRINEPGGEVTVTKKRFPTTRRGISELAAFLTEAAVTRVAMEATGVYWKVVYYALEGLFDELWLCNAQHVKNVPGRKTDLSDAEWLADVAAHGMVRPSFVPPPEIRELRELTRYRKTQIDARAREIQRLEKTLQDAGIKLTSVASRVWSVSSRKVIEALIAGEANPAVLASLVVGKLRPKVAQLEEALDGHFGAHHAIVCRQVIEHIDFLDGSIAALTDEIAARLLPFEAAVTLVRSITGIGELTAQTIIAEIGVEMSRFPTAGHLCAWAGVAPASNESAGKRRPAGTRHGSTWLRRVLIEVARAAARTRGSYFSAQYSRIARRRGPNKAAVAVANSILAVIWYVLTNGCLYEDPGADYFERRHDPAVEAKRLQARIEALGFDVTLTPKAA

SEQ ID NO: 436127 - protein, 406 aa, unidentified
MIFVGDDWAEDHHDVHVMDEAGARLASRRLPEGLAGIRAFHELTAGLAGQAGEVVVGIETDRGLWVDALTGAGYQVYAINPLAVARYRDRHHLSGAKSDAADAKVLADLVRTDRHNHRPIAADSAQAEAVKVFARGHQNLIWARNRHTNALRSALREYYPAALEAFDDLHDRDTLAILGRAPEPAAGAALTLAAIRSALQRGGRRRNVEARARQIHAALHTGQLAAPGPVAAAFAATTRAAIGIIAELNRQIADLETQLAQDFEQHPDAGIYLSLPGLGDVLGARVLGEFGDSPDRYTTAKSRKNYAGTSPLTVASGRKRTVLARHIRNRRLYDAIDQWAFCALRASPGCRAFYDQRRAAGDLHHQALRALGNRLVGILHGCLHHRTLYDEHTAWAHRQQNQQTAA

SEQ ID NO: 436128 - protein, 432 aa, unidentified
MEKIRENAAGIDIGAKKVFVAIEGQEVRYFFTFTEDFEKLRDYLLGYKIKTVAMEATGVYWNILYEILEEAGIDVWLVDGRQTKQVPGRKTDVKDCQWIQQLHSYGLLNRCFVAEADIKELRAYQRLREDHIRSASMHINHMQKALTEMNIRLTEVLSQIHGVSGMAIIGAILKGERNKETLLKMCDRKIIKHKKEDVLKSLNGRYTKHGIFALKQAFDSYMFYQHQIEQCDQMLSEVIEKIGKGKPDQYPQGPRKPIRHNKPDINNLGISLLKIFDGKDATALSGITDYSWMQLMSETGTNLSRWPSEKAYTSWLGLAPGQHTSGKMKRTKRKNGHPKAGQIFRQIAQSIITSKHIALGAFGRRLRARKGSQIAIKSVARKLAVLYWRIMVKGMAFVEEGIKKYEQQLLVQKHKSLERLAKDLNIQIAYNV

SEQ ID NO: 436129 - protein, 336 aa, unidentified
MKNYVLFTGIDVSKDKLDICYVDKNGNVLGSKVIDYKPKNIKSIVKDLERLGYNLTQTLICFENTGVYSIKLGEVLSELNAYYSEVSALEINKSKGITRGKDDKTDAKMIALYALRNIDKIVLSKVTDEAIQELKLLFAEREKIQKSITSLKMTQENEGRVNSKAYESVQKINQQTRVALKNSLKAIENEIERVFKEHPELKKNRDLLKSIKGIGTIISAYLVMITHNFTKFKNSRKFACYSGIAPFEHSSGKSVRGKTQVNHFANKKVKALLSMAVQSAKKYNSQIKAYFEKKKEQGKHILLISNNIKFKLVNIAFAVIKRGTPYVDIYKYATIA

SEQ ID NO: 436130 - protein, 343 aa, unidentified
MEHFAGLDVSVKETSVCIVDDTGKIVREVKVASEPAALLKVLGNPSYRFKRIGLEAGPLSQWLFSALAEAELPVICVETRHMQAALKAQINKTDRNDARGIAQMMRAGLYRPVHVKTLRSQKLRMLLTHRKLLQSKAIAIENDLRATLRNFGLKVGGVGTVKFEARIKELVEKAPDLMMLVEPLLVVRRALREQIGILHRRLLAIVRDDDVCRRLMTVPGVGPVVALTYRATVDVPVRFRNSKAVGAVFGLTPSKYQSGEINRTGAISKCGDEMMRAMLYEAAHILLVRSAKWSWLKVWAMQIARRRGLKKAIVALARRLAVIMHRIWVDGTEFRWTREAAAA

SEQ ID NO: 436131 - protein, 425 aa, unidentified
MKSTRGMRRRTAKLARRSEIVTRSALVAGIDIARKESVVVFVRAADKARVGRLRVPTTPEGLAAIEGRGRQLAAQEGCDRLVLAMETTGHYWKILARTAGRLGVDYVTVQSFVVARARELDDLTRDKTDQRDAGLIADLAVELRFNEVQLETGPWAELRSLADARDRYRIDMRAALQEQRALLELTWPELLAQVPDLDGTHLQAMLRLGLSPVEIAALSRARFTARLRHEHVGRFLPWMAGRLWHAARCAIPADQSPAATLRLALAAGRNRAGTIAVTRLESELATTFEATGLAWMRGQIRGLGDTQLHVLLALSGDPRRLDDARCMVKLAGSNPTERSSGEQQTAGGIHRRGRPLLRLLAHQAAVGLVLHHPDFAARFIELTTRPHRPLHKKQAYLAVANKLLRTLWALAVTGVPYQRALPRAA

SEQ ID NO: 436132 - protein, 386 aa, unidentified
MGQKAFIPQDYDVFAGLDVDKRSISVTFSNHQQGFVRSVHMPYNVENLLKHVRKHFPDQKVAFVYEAGPTGYGLYDGLAAQGYNCLVAAPSMIPRAPGQRVKTNRLDSRALSENLRGGQLKSIHVPSPIYRELRHLTQLRDTLVSEVAGMKQRIQSLLLFEGIAFPSAPAGSRWSLKVKAQLGKLECSGSVRFKLDQLLDNVEFSEKQVVKVTKQIRKLCQDDPELAQCIKYMMSVCGIGWIVASQLLARIGDWRELKNVRQLAGFLGLVPRENSTGEKTDRGSITRTGHGRLRSKLIQASWSAIRQDAELRDFFASVCRRHPRQTGPRVAIVAVARKLSARIAAVLMEQRPYVVRQKVHSAPLTQEETSPQGTTRRLREPGEENS

SEQ ID NO: 436133 - protein, 408 aa, unidentified
MGRAAEVVAPSSSLRTDGGCPVAQINDLSRCLTAFDPISTLVVVVEMSKANWLVGGVVPGVERQPLKKLEPDATTLLRLIERWRNEAARAGRPISRIALAYEAGLDGFWPARWLIARGIESHVIHSASVAVSRERKRAKTDRLDVAMLMRVFLGWLRGERGHCGMVMIPTIEEEAARRPSRERENLVNERSRITNRMKSALTRLGIRGFKPHLRKAPERLAGLRTAEGTGLPANVIEEFRRDMARLALVREQIGSIEKARAERLERAPDTGPHAMVRLLARVVGIGIETADMLVREILSRKLRDRRAVARYAGLTGSPDESGLKRRERGLAKAGNARVRRGLIQLAWRFLMFQKDSALARWYRKRTDGPSGARKTTMIVALARKLLIALWRLVTIGEVPDGVELRLAA

SEQ ID NO: 436134 - protein, 347 aa, unidentified
MRFYNQRHRHYCGIDLHTRMMYLCIVDGEGQVLLHRNMPASPEAFLQAIAPFRDDLVVAVECIFTWYWLADLCAEQGIAFVLGHALYMKAIHGGKAKNDRIDSQKIAGLLRSGMIPMAHVYPAKMRATRDLLRRRMTLMRRRAELIAHIQITKFQYNRPDFQKKIIYRRNRDEVVDHFADPVVQKNVEADLAVSAELDRILNELELYIVRHAKEHDAFAFHLLRSIPGIGKILALVILYEVHDVERFPTVQQFASYARLVKCPKESAGKRCGYSGAKIGNAHLKWAFSEAAVLFLRNNPEGMHYKKRLETKHGKGKALSILAHRIGRTAYFVLKTRKPFEKERFLAA

SEQ ID NO: 436135 - protein, 418 aa, unidentified
MTKIYQLKTPPKEALGVETYLAPPPPSQGKIIALDCHPDTFTAAVFVGQTPHDARKLGSRENLGLQGLLQWAAKEFGPQDLFVLEAGSNSFELCTRLHALGLRAVVLESCHVGKHAKTYADNDKMAAARIALVYLAGNAPCVWVPDEGSRQRRELLHAYRKAVADHTAASNSLRAFLNGNAIRPAKANLELESTRQWILKQRDWSPMQRDILAEHFGDLDVCKERRKRLYRLIAAEMSAQPMMLRSMKVLGVGVVSAFALLAVIGNVRRFERPEKLVAYIGLNPGQRQSGMGKNIKLGVGKRGRGDIRHLLIQGAQAVLRMGRATALGQWGWKLFARKGNRNVAVAALARKLLVQVWHMLSGNPPTALETDKSFTLKLHKLAVVLGAPLRRQLQLGDTLPACIRTLRSRALQPANIAP

SEQ ID NO: 436136 - protein, 321 aa, unidentified
MSRVLIGIDVCKEFLDAHVRPAGACQRFDNTPAGIEQLVAWVRAFAPERVVFESTGPYQKAAVGALLAAGLPAVVVNARQVRDFAKGTGQLAKTDTIDAGVLAHFGEVVATVVRPLPPPEILEFRDLCDRRGQLVRMLAAEKNHRHAAAAATPRVRKNIDRHLAYLQQQIEDLENRMDRLVAESETFKAKDQILQSIVGIGPQVSRTLLVHLPELGQGHRQSIAALVGLAPFADDSGATKGIRHIRGGRAKVRIALYQAAVAAIRYCPVMKAFYAGLKARGKATKVALIAVARKLLVLANALLRNGSLYQPRTNSVSPQNA

SEQ ID NO: 436137 - protein, 501 aa, unidentified
MKAKQRKAKGNDHSSSMASKQRAKIAKAMQAPEQMEIVNRHAGGIDCGSEEHYAAVSPESVEEGEPFVRCFSAFTEGLDALVEWLKDCGVTTAAMESTGVYWVALYQKLEAAGIEVFLVNARHLRHVPGRKTDVKDCQWIQRLHSFGLLSASFRPEDMICRLRSLQRHRLNLVSAGAAEIQHMQKALQQMNLHLHHVVSDISGLSGLRIIEAILAGQRDPSQLAKLRDPRVRKSTVAQMEAALVGDYRPEHLFVLDQSLQAYRFYQARIEECDHEIEPLLQQLAERFECSSSPLAAESSQPEVIQDQAAQSQTARPIKPKRKRKPKANQPKIDLAGYLQRICGVDLTQVVGLDVLSVLLIVSEIGVDMSKWRNAKAFCSWLGLCPGNKISGAKVLDRRTCKVINRVATTLRLAAQAVGRSNTCLGIFYRRKKAHLGPAKATTATARKLACLVYHLLKYKDQYREPDPVTYQLKVQKTILNKLQKQAAALGYQLLPTALVPA

SEQ ID NO: 436138 - protein, 482 aa, unidentified
MKSKSREKTNKTTNPTQRYWHDMNRKQRREMMREIQSEDLSLEVIHPDAAGIDIGNESHYVAVPPSRDSQPVQRFGCTTGELKTMANWLKQCRIRTVAMQSTGVYWIAVFDILESAGLEVYLVNARDTKNLPGRKSDVQESQWLMKLHTYGLLRNSFRPSQEIRMMRTYWRQRNDLVQSASRHIQRMQKTLTQMNVQLANVLSDVSGVTGQAIIKAILAGERNPHKLAAFRDPRVKASELQIAQSLEGNWQQDLLFVLKQEQDGYEFCQKQMAECDRQLNQYLEQREDRSHGASLPEEKRKGRLTKKKGNKPQFDMRTGLFRLTGTDLTRIDSIDVITATTVLSETGYDMSKWETENHFVSWLRLCPDNRISGEKIIGKGRLPTNNRATIALKMAASTLRQSDTYLGAQFRRLRTKLGAPRAIKAMAAKLARLVYRMLRYGMKYVDNGADFYDAEHRQQQIKHLKRKAASLGFEVTPTSAAA

SEQ ID NO: 436139 - protein, 407 aa, unidentified
MANTCGIDWSERHHDVAIVNHDGAMVARTRIRHDITGFGQLVALLAEHAPEPTAIEVAIESDKGLLVAALRAAGFVVFAINPRAAARYRERYGQAGGKSDPGDAVVLANILRTDRHAHRRLPADSDLASAVKAAARQHQEAIWARQQTMSRLRSLLHDYYPQALVAFPNLAHRAAAAVLHAAPTPQAAQRLTPRRVVDLLKQAGRRNDEGLAERISTTLRAPALRHPSPVEHALGVAAAGLLEIIGAMSRAIDALEVELAALFDQHTQAAIITSMPGLGPVLGARVLGELGDDPVRFDDVRGVRSFAGTAPITRASGRSRVVSSRRICNRRLADACHWWAFAALTKSPGARAHYDRRRAAGDTHNAALRNLANKLLAKLWHCLRHNLTYEETTAWPGPITEPSQTAA

SEQ ID NO: 436140 - protein, 344 aa, unidentified
MKFIRFIGIDVSKKTLDASIFVADEVINKFPHIQVRNDRQGFKDLLRWSKEQGVKPKDALFGLEFTGYYSDGLELFLAKKQISYTMLPTTVVKHYQRGTHDKNDKIDSAKIADYLFRFNGTECIKLRVLPSKAMQELKALKSERKFLVQHRVACENRLQVAKSKSEEKHLQKLIDLCKEEIEQVEKQIEDVVTSDEEIYTTFRLLTSIPGIGFVNAVNTIANTQNFTAFETARQYAKYLAVAPSEHSSGTSVRWRGRPSPHADLQAKADLSMAALHAIELSAEMRQLYERKLGNRPKDKDMQKKALNAVKFKLIREMFAVVKQARNFELRGLDKAQAETHSTEK

SEQ ID NO: 436141 - protein, 314 aa, unidentified
MKALKSHVAGIDVHKEMLAITVLIGELDGEPKEYQFESSTFTDDLMALGLKLKEMGVTDVAMESSGIYWKPVFNVFNPLGLKVVVANAAHIKNVPGRKTDMNDSRWIAELHRFGLIRASFIPDGEFQRMRLLSRHRTNLTEDLARVKNRIQKVLEDGNIKLSIVVSDIFGVSGLKVLKQIAGGYTHPNILITEVTTKIKRMEEMKKALTNCLTTEHCFVINVLMKQYEELKNRIEEGENELCKKVEPYAHLVEELDKIPGIDAILAMGIIAEASANMSSFKDERAFAAWSAVASGNNESAGKKKRAKCRKGNLH

SEQ ID NO: 436142 - protein, 395 aa, unidentified
MKHILSFDIAKGKSVYCFIDEFKNIIINPSLIEHNKIDFDNLLNLIKDYPNLVVVMESTSIYHLPVENYFRSKAIDTIVMNPKLVKQFKDTLNKSKTDKLDCFKIARCYLGTIDNFYYKNDEYFMYNPLTRQYWSLVEGQTRLKNRYKQLIEIIFPEFNLIFDDVYSDLALNFIHDFPHPSLFINRRLDYLMNYLKEKNGTTKAYRFKNKVLKMKELASKSLCFVAFDSLQVQNLVQVIEMIQYHKSEINKIKNQLINEMRNKKIFKIINSIPGFGEFSTSLFLAEVGDITRFDDKHQFISFIGIDSVTLQSGISAYHGPISKTGCKFGRTILFNVVTTIIQISAHTDNSNPIYLFFRKKQSEGKHHYKCIIACETKLCKIIYKLCSSNCLYSNK

SEQ ID NO: 436143 - protein, 360 aa, unidentified
MMKYMIKTQTPCLTAFKTIVSVNFETPIAIGIDVAKNSLMICYRYADNHILTKNIGNNDSDIKKLIKELKLLNFSGKIVSESTGRFHMLSAVMLSEKNFLMYVINPLMSKKYNSASIRKVKSDKRDAEILAEIAIKEEKLPDVFTADRKKLMIKKKISLVATMDKQIQAMQATVKEYQETAKTLKIKLTKAEKGILGVVKNLKEEKEKLEKEIENIFNEQSSVDAINIRRQEIFSSIPGVSNYAATLATVFFLEDHCQNPKQWIAYSGLDISVKQSGQWIGKGKLTKRGNGYLRKRLFSAAWGTIMHDAKFKEYYNYLREKKHSYVESLLMIARKIIRIMFYLSKNNCMYNPNKIVFTTN

SEQ ID NO: 436144 - protein, 338 aa, unidentified
MNYMGIDYHKQYSHITLMDEKGKKLKSGRVANYRSEVERFLDGSGEAKAVIEAGRSSYTMVDVMDELGIEVTIAHPLQVKAIAKAKIKTDKRDSFMLAHLLRTDLIPEIYKRSGENRGYQRVLRQRAFYVGSITRVKNRIWALLAQQREEVRDKVSQKKNIFSRDGVKFLKTLNLPDTDKDLLSAVLKTFTHLEKMKEETNGLVEKLYQEIPEARLIRSVPGYGVFLSVLTAVEIADINRFSKVSKFLSYAGVIPSTHSSGERSYHGKIIKQGNRWLRWAAVEAVYPGMKADFDIKSFYNRLKKRKGPNPAKVATARRMLTIIYRMLKENRLYIPYKR

SEQ ID NO: 436145 - protein, 357 aa, unidentified
MEKQNNSISFNNQRFYIGVDVHKKQWTVTIRSNKLALKTFSMKPSAKELSEYMRKKYPEGEYRSVYEAGFCGYSAHRELESYGIKNIIAAPTEIPTSNKEKNKKRDSVDSRKLARELENGSLEGIYIPSQLQQELRSIVRQRFQVINKQTRLKNQIKGYLDFYGHKLPENYQLKYWSKNFIKHLGTLSFSYAIGKEQLAIYLDELTEMRKLLLRIIRQIKNYLKEHSLKEEVSLLCSVPGIGFTTAVTLYTEIIDPKRFLSFDRLSSYVGLVPSIRSTSERETVLGIKFHHNKLIRQLLVESAWIAVRKDPALTLSYNNYLKRMSKQEAIIRIAKKLLSRINYVWTNKKPYVSSVVK

SEQ ID NO: 436146 - protein, 463 aa, unidentified
MMPMQGLVETVHPPLVPADAFRHEDISWAWRRAFGAPRPACGERDTRQARKPEFGTVRGRVRESEHVETPPCMWISPTHLVGSFSDSLQSDWAPGTAAAVPGASGRDRMPPWEGAPSVSVVRPLLGSCPEQMMGSKSRMQGKDRSEQETKTKSTVGIDVCKLWLDIHILPSEEAFRVPNTKAGSNEIIRRLVHHDVQLIAIEATGKWHRDLHRHLADRGYPVRVVNPLRARLFAEAMGLLAKTDRLDARMLAIFAGSLTETRPPAPEIIEALKELVQARTTAVEEQTSLTNQFKSATTVFLRRQLKLRLTQIAKHIKALEKESLKRIKGEPGLARRYDILVSIPSFGDVVAMTLLARLSELGSCNDKQIATLCGLAPWPDESSDRVGARHIRGGRQLIRNILYLAAITAKSFNPPMKAFFTRLTANGKAKKQALVAVARKLIILANTLVRADRLWHSEAPKCA

SEQ ID NO: 436147 - protein, 383 aa, unidentified
MGAVARTQLRETPVKQNRTCVGLDVHARSVWACTVDDESGEMRTARISPKTAEIVKWAKALPGSVEVAYEAGPTGFGLARALIAAGVRCFVLAPSKMERPSGDRVKTDKRDCEWIARLVRLGELPVVVIPSEGQEAARDLVRAREDVRGDLMRSRHRLSKLLLRQGIVYEDTAWTVAHGKWLRAQSFPKPGVQFAFDEAYDTVLTTLARRDRLDKAILAMAAEPAWAPVVARLGCLRGVGTLTGFGLAVEIGDWHRFTGNSIGSFLGLTPSEHSSGGSRSVGSITKTGNGHARRLLVESSWHHRKPYRLSAEMIRRRDGQSPLVRARADQANRRLNQRWRTFDARSKRPTVAAVGVARELAGWCWSLAVMDGEKDHSATNRQR

SEQ ID NO: 436148 - protein, 358 aa, unidentified
MEKDTTYVALDDSKRKIVAGILRPNDTAPELREVANDPHHIRRLLTRLQRERPVSACYEAGVSGYDLYRQLRALGVACDVIAPALTPRRPGRRIKTDRRDAAKLVHLYRAGELTAIHVPDEVEEGGRDLIRCRDDIRRDVLRWRHRLLKLLTRHGRMYVAGRNWSQVHWRWIREQRFDVPPLQRAFEATLFTLEQALARQAELDKEIEALAATVPYREPVGWLRCFRGIDTLSAMILLAEVIDFQRFHRPRELMAYLGLVPSEYSSGETQRRGALTKAGNAHARRVLVEAAWHYRHRPTIGHALATRSQGQPPAIVAQAWRAQQRLHRRYRHLVGHGKRPPVAVAAIARELWDSSGRR

SEQ ID NO: 436149 - protein, 421 aa, unidentified
MGKLIERCAGIDMGKRFLVCCVMTGAAHEEPGSETRRFDTTVPGLKRLRNWLNEERVTDVVMESTGSYWIPVFNLLEGHVTVVLANPEEVKNRKGHKTDGKDAGHLADLLRHNHVKSSYIPAEPVRQLRDLTRRRVQLTQDATRERNRVQKLLEQVNVKIGSVLRDVFGVSGLHMLWALLDGRAAPEEIAGLARGSAKRKTPQLIEAIEGNRMSDHVRCLIRGCLRHLACLEEEVEELDTEILRRMQLSRFQKACTLLQTIPGVGQLSAATILAETGPDLDSFPTIEPMASWAGLCPGNRESAGIQKGPQTTHGNPYLCTALVQCAWAATRKRDSVFRSRFQRLAPRRGEKRAIIAVAHHMLIILYCMLKRGVPFLGAEHAPKQRRRERRAHHHLRCLRRLGFSVEIRLISESAPPDTISR

SEQ ID NO: 436150 - protein, 367 aa, unidentified
MKGKTVYWVGLDVHAASIQVAVYRGNEVTPFEEYKSLTDTRSIGRLLKRLKDLPGEARCVYEAGPCGYELQRFLAKNDVACEVTAPALIPRKAGDRVKTDKRDARNLGRLYRSGDLTMIHIPDAEQEAVRDLVRLREDALEDVRRKKHQLSKFLLRHGHRYHNGKQWTQAHRNWLNTIHFDITSLKLVFDEYVLSLEQAEERLKRLTQAVEETAKTPEQQKIVSALMTLRGVQTITAMTILSEIGDMRRFGKARDFMAALGLVPSEFSSGGKTSRGSITKTGNGHVRRVLVEAAWHYRHRLAAGPRILARRIGQPLDVLRVAQKADARLHKKYRRMIGRGKLPNITIVSLARELAGFIWAIGQTAYA

SEQ ID NO: 436151 - protein, 344 aa, unidentified
MDVTTVGIDLAKQVFQVHGVSNRGAVLIRKQLKRAEVAKFFATLPPCLVGMEACASAHHWARTIQAHGHTVKLMAPQFVKPYVKSHKNDAADAAAICEAVSRPSMRFVPIKNIEQQSVLALHRVRQGFIKARTAQANQIRGLLGEFGLVVPQGIGYITQRVPALLERAAGDLPGAFRQLIGRLLEHLRLLSLQVTDIDEQVKAWHRSTEASRRLEKIPGIGPITASALVATVGDAKNFDSGRQLAAWLGLVPRQHSSGGKPMLLGMSKRGDPYLRTMLIHGARSVIYRATQKANPQNWAFRVTARRNKNVAAVALANKNARIVWALLAHEREFQGGYSSAAAAM

SEQ ID NO: 436152 - protein, 340 aa, unidentified
MEQAYFVGIDIAAETFTAAAGTSPWKLLVPAMEFANGAEGFQAFDAWLQRHQLLPANTICCMEATGVYGEQLGYWLVTQKYHVAVEPPLKVKRAFKTSGPKTDAVDSQQIAEYACRYVDELRFWQPRPETLEQIRVLLATREQLVVQKTAQQNALHALQHKVVRTPVAEQVHRELIAQLKTQIQTLERELRRLLDQDPTFRRMLLLLLTVPGVGLLLAAHLLVLAYSRAQPLEARPLAAYIGIAPLAKSSGKRVPAHSHSRQYGPSMLRKLLRLAARSITTHNEAFRQYYLRKLAEGKLTQVALNNVANKLLKIICAVLRSQSAYIPNYKSVHPALLQAT

SEQ ID NO: 436153 - protein, 326 aa, unidentified
MSNDAQGSVFVGIDVSKAHLDVAEGATATAWRVANSPDGIRDLLARLRVSAPQLIVLESTGGYEVPVLAELATCGLPVALVHPGRVRAFAKSLGQLAKTDQLDAQLLARYAAAADPKKYRLPSGAEVLVGALLTRRRQLIEMTVAEQNRLERAPVSVQTRLRKHLEWLAQELADVDAEIHQHIQRSAQWEAQDELLQSVPGVGRVTSYTLLVDLPELGTLTRESIAALVGVAPMNADSGRWRGKRRVQGGRAGVRSTLYMATLSAIRWNEPIKAFYQHLVDQGKHKKVALVAAMRKLLTCLNAMLRDQQPWQPQRPRIRKKVLATP

SEQ ID NO: 436154 - protein, 309 aa, unidentified
MKEQLVYVGVDIAKSYLDAAMGNEKRRFSNDTIGHRELIKWVKQRKAPVQVICESSGGYERALVQRLARARVKISLVQANRVRQFARAAGILAKTDRIDAEVLCEFGRVMRPQTVTAARLEQEHLRELESQRRHLTRLLVMEQNRGARASDASVQRLNRSLINQIKKQIEQLDLLIKGHIDQSHELSAKAAKLTSISGVGARTAALLLAQLPELGQLNRREVAALVGVAPFNRDSGRMRGKRAIYGGRKPVRHGLYMAALVAARHNPILRPFYPPAHAAGKPAKLALTATMRKLLIVLNSALKPDLSYA

SEQ ID NO: 436155 - protein, 361 aa, unidentified
MYASTKSVSSGSAVTVAIDLAKDVFELAFGNADFRIVERKRLSRAAFAGCLSNRAPLDVVMEACGSAHHWARVFVRVGHRVRLLPAQYARAYVHRNKTDRADAAGLLEAARCGAIRPVPIKSALQQGTQGLHRVREFHKAQRTAAINLARGLLREFGIAIPLGAAKVRPAVLAALEAADNELPMALRHALAAVLDEIQSCEKAMAAIEQALTEIARNDIRCLRLMQAGGVGLLTATAMSAGLGDLARFPSGRHLASALGLTPREYSSGNTRKLGRIGKQGDVYVRTLLIHGARSNLLQAALRRKRGQPLDRTQQWALALAEKKGHNKAAVALANKTARRLWAAEHHGASFNPDHVSRRSAA

SEQ ID NO: 436156 - protein, 500 aa, unidentified
MTFPPWEPAFWLAIPLRKSVNPFGGDLCFGWLGSLRLYLYKPLGCVSTLWKWMPAGKDITMHYQKVLKMPESIPYLSVGFDVGADFTWMSIMLPNGILIGKPFKIIHSDPQSRELAISKIKEAQEMYSLESRCFLESTGIYHIPLLCFLRDKGFDCAVINPIITKNSTNINIRKVHNDRFDSKKAALVGLKPDLKVSLMPSDLALNCRNLCREYYDLMDNRSAYVNKLQGELRMAFPQYLGIFSKVTINTSLTLLETYTSPSAFLKADKQEIIDIIKSTARFGLTYAQNKYNAIIQAATDANQFGYIIDSNIKRIRLYISFIRKYDEEINSILESLHELVDANEDSDFVKQIHLIETFKGAGFLSAVSIMGEIGDFSAFSKPKQLFAYFGLDPSVKQSGKFEGTKVQMSKRGSAIARRVIHTLTLQSISISRNREAKNPVLREYYLKKCDSKPKLVAMGAVSHKVCNMIFAILRDNKPFKIIAPQEHIKQYNSAKCDIAA

SEQ ID NO: 436157 - protein, 364 aa, unidentified
MVYVGVDLHRKSSYVAVLADDGELLASRRIASQPDEFLRVFGELEAEPTGVAFEATYGWGWFADLLSDIGIPAHMAHPLATKAISSARVKNDRVDAKTLAHLLRTNLLPEAWAAPPEVRDARKLARTRVSLARISSRLKCQTHALLADQAIEVPVTDLFGLAGRAFLEEVLLRPVPQARLQANLRLIDLLAPEVAQADRELRELFHGDPRIERLTPIPGIGFTTAALIVAEVWDVSRFPSPEHLCSWAGLTPTERSSADHTRRGHISKQGSRWLRWAMVESASRPYLKDPTLRGFRDGIARRRGAKIAKVALARRLLTLCYYALRDEDGCRAFPVPPTRTKHPNRGRARSPQVMASSGTAAPSD

SEQ ID NO: 436158 - protein, 422 aa, unidentified
MKAFDVSNFAALIGIDWADRKHDICEVNPQTNEQHFSVISSQPKAINAWANEIKRKYNGQLVAVACELKKGPLIYALSKFSHIVLFTINPSSVAKYRKAFTHSGAKDDPTDAAIQVEILQLHMHKLNVITPDSESVRSLAQLVEYRRKLVQDRVNLTNRITTTLKNYYPHVLDWFKEKDTMIFCDFLLRWPSLEQAKRARKQTLVDFFNQHNSRYPAVNEKRINEIKLAEALTNDKAIIAPNLLLTECLIEQLKHLMLAIERFDVEIKALYKPHKDRFIFDSLPGAGPQIAPRLLAAIGSNRDRYHSCEEIQKYAGIAPVTERSGKKEWIHWRYSCTKFLRQTFVEWAGQSVRYSFWAKAYYRQQEAKGKPHNTIIRALAFKWIRILFKCWKTKTAYDESTYLEALKRKGSPLLKYAVESKF

SEQ ID NO: 436159 - protein, 403 aa, unidentified
MTVRPLVWVGIDVGKTSHHACAVDETGKVLWNQKVSNEQRAIEQLITRAHKGADEARWAIDLTSPMALMLITVLLGAEQSVVYVPGHVVNTMTGAFRGEGKTDAKDARVIAETARMRSDLSEVAMPDELVVELAQLTGYRTDVMADWVRGVNRLRSLLGSIFPGLEAAFDYSNRTPLILVAHLCTPAEIRAAGIKGVTAYLSDKGGWPTAIAKTAATAVAAAKQQPLALPGEAGTAALVKRLARKLLDLDHEIKDIDKTITERFRDHPFAHIIESLPGFGPGLGAEFVVVTGGDLASFATAGRLASYAGLVPVPRDSGRISGNLHRPKRYNRRLRRVFYMAALSSIRGDGPSRQFYDRKRGERLIHSQALLALARRLVDVLWALLRDGREFTPDKPTPATAAA

SEQ ID NO: 436160 - protein, 382 aa, unidentified
MDHYAGIDVSLEYSSVCIVDATGKIVREAKVLSEPAALIAWFGSLGLNVVRIGLEAGPLSQWLYAGMRGAALAVELLETRHVRNALEIMPVKTDRKDARGIAELMRLGWHRPVHCKSMAAQETRAMLTARDLVQSKLHDVEMSLRGTLRGFGLKVGRTTPRRFEARILELVAGHASLQVIAKALLTVRGVLLREFNALEKRVRTMARCDTRARLLMSVPGVGPIVALTTIAREDGRERPYASAIDDPARFKSSKSVGAHFGLTPKKYQSGETDITGRISKIGDRGVRTVTYQAAHVMLTRPLKGCTALKSWAMKLARRAGMKKAKVALARKLAVIMHRMLADGTTFRQPLSLAPCSAPSRPLRAACGGGQVASLDGACARRS

SEQ ID NO: 436161 - protein, 342 aa, unidentified
MYYIGLDVHKKTISYCVKDASGRVHQEGKLGATRRELDIWMRTLPQPWTVAMEATIFTGWIYDHLHPHATQIKVAHPLMLRAIAAAKKKNDRVDASKIADCLRCDFLPECYMAPTEIRDRRRTLRYRYLLVRQMVQTKNRISGLLMETGVTHNKQRLHKVGYFRELLASNEEVSESIRPLLRLSRDTIARLQKTERALVSSLQRDPLLTERIKHLRTVPGVGPITALTWALEMGEISRFRSIRQAISYCGLCGDERSSAEKSLRTPISKQRNKNIQFVLIEAAKLAPRQDHDLALLYEREKQKGNANRATLAVARKMVAYLLAVDRGQRDFVPAEDCRGAAA

SEQ ID NO: 436162 - protein, 348 aa, unidentified
MKQVTTIGLDISKSVFLVHGVDAAGQAVLRQKLSRSRVLEFFAKLPRCLVGIEACASSHYWARELMALGHEVKLMPAQYVKPYVKRGKNDVADAEAICEAVTRPTMRFVGVKTPEQQSIMMLHRVRLILTRQRTQLSNALRSHLAEFGIVSPIGREGLDRLLTIVADTDDGRVPAEARASLEMLVVQLEGVKAQILANDRRIIASARATEVGRRLLEVPGIGPVLASAFVASVADPAIFKSGRDLAAWIGLVPRQNSSGGKERLGGITKAGNGYLRQMLMVGAIAVIRYAQRNSARRPWLVQLMGRRPTKVAAIALANKTARTVWALMSSGERYRDPQAIQAAVSANA

SEQ ID NO: 436163 - protein, 320 aa, unidentified
MESVDWYQSAMGIDVCGERLDWHRLPQQSSGAHPNTPDGIKSLVADLKQSGVDIVVIEATGGLQRQAATALASAGMAVAVVNPRQVRDFARASGQLAKTDRIDAQVLARFGLRMQPQPRSLPDEAALELADKLARRSQLIEMRVAEKNRRYRASTVMKRSIDRHLAFLDQAIKSLERDLDDTLRGSPMWAEKVDLLEAVTGVGPQTLRRLLIDLPELGKLDRHAIAKLVGVAPLNRDSGSMRGKRMIWGGRVNVRNTMYMAALSASRFNVPLKAFFQRLKAAGKPHKVALVAVARKLLTILNAMLRDRSTWNPQRAATRA

SEQ ID NO: 436164 - protein, 371 aa, unidentified
MSQYSTDTVWVGMDVHQDSITAAVLFGNDSKPQVERLPGDLNAVRRMFRRLSNHGTPRSCYEASGAGYVLQRCLEHDGFHCEVIAPSLVPKKPGDRRKTDRLDAIHLANHYRAGNLVPVTVPSKEQEEIRQLVRSRLAVQSHVVRMKHRIVRVLATHGHRFTAGKSNWTQKHRAWLRKLHRELVGPLGTVLAHHLEHLEYLEGQKHSLEAEIDRYAKSEPFRAKVEALCCFRGVKTLTAMTILTELGDIRRFARPTGLMAFAGLVPSERSSGNVQRRGRITKSGSQELRRILVEASWHYRKRAAADLIMSRRRMGQNPEVVAIAIKAQHRLQKKYWKIAAKKHQCTAVTAVAREFCGFLWSALWVLENEAS

SEQ ID NO: 436165 - protein, 273 aa, unidentified
MQNITLIGIDLGKHSFHIHCQDKSGKALLRKKFTRTKLMQFLATCPPSVVVMEACAGAHFMARRISDFGHETKLISPQFVRPFVKSNKNDFVDAEAICEAASRPSMRFVQPKTEVQQAMRALHRVRESLIRDKVKTTNQIHGFLLEFGISLPIGEAVIKRLSLILAEHGIPEYLSRLLMKLHSHYLYLVEQITTLESELNQSIKADDTAQRIMTIPGVGPITASLLSSQLGDGKQFSCSRDFAASTGLVPRQYSTGGKSTLLGISKRGDKNLR

SEQ ID NO: 436166 - protein, 344 aa, unidentified
MTYYTGIDVSLRSVSICIVDDRGEVCLETKVEAEIDAIVDRLRRFSSEVKSVGFEAGTLTQYLTYGLQAAGFEVICLEARQVSVTLAAMRNKTDRNDARGLAQILRTGWYSRVHVKSLQSHQVRALLASRKAILKKCVDLENELRGLLKVFGIRLPSRVGHGSFDAELRETVSSDEMLACALVPLLDARTVLYKTYLKLDNAVKGLVRVDPICRRLMSIPGVGPVTALTFKAAVDDPNRFKSSRTVAAHFGLTPRRFQSGEVDNPGHISRAGDADVRSALYVAAHSLLTRNAQWSTLKAWGVRLAKTRGHRRAVIAVARKLAVILHRMWIDGSEFRWGAAEAAA

SEQ ID NO: 436167 - protein, 394 aa, unidentified
MLYSVGIDIGKREHHMVILDDTGERVGKSQTISNTRSGFDGCLKVLRALEGTLQLALEATGPYWLALYEYLTHAAFQVSVFNPLQVHAYRKTGVRRTKTDRLDAFWIADLLRVGGAQATSQPDKLLLQLRELSRFRWQLIDQIGDNKRKVLNVLDRVFPEYETLFSDVFLASSRALLKQATNADAFATFDLGELTELLRTHSRGRFGAAKAQTIVDAARTSIGVSFLADAAQLEVACLVTQIEFLQAQVEQVDATIAALMSQVPQHLTTIPGLGPVTAATILSEIGDINRFATVEKLVAYAGIDATVHQSGQFNATQMHMSKRGSPYLRRALWLAAFIASQHDSELNTYYERKRTEGKHHNTVIGAICRKLLARIFVVLKQQRPYEIRSGSQTA

SEQ ID NO: 436168 - protein, 344 aa, unidentified
MLYVGLDLSRKRLDWQALDREGERVAIGAVPPDRDGLAKLAQQLGDASALAVIESMSGARFVHDQLELAGWEVRIADAVKARGLAPLACKTDKIDCWVLAELARLNLVPEIWLPDPAVRAERERARFRLHLVKHRVSLKNRVHSILFQHGVPSPGSDLFGAGGRRLLERLQLPEPWASTLQASLALIDSLDEQIHGCERELRQLGADHHYIPLLVTCPGIAWILGFTIASEIGDISRFPTPRKLVGYTGLCPRVEQSGERDRRGPLRKNGPDYLRWALLEAAHTAGRDPRYRPIVERMRARHGKKRGSKIAAIEIARRLTEAIRQMLSHNRPFAPAGATAPLAA

SEQ ID NO: 436169 - protein, 401 aa, unidentified
MPTLRDNGQRVKRFRELKATLRTNRSRLLVGLDIAEATHVAHLRHAHTRVVVPSCTLPNSTRGFAQLWARIQQAQRATGCREVVCGLEPTGTYHEAVAQFLEAQGADVVLISTSVAYWNRRTQDGTYDKNDPKDAANCADLLEQGKVLFYSQPDGPLAELRRLVKVLRRARGELAACKARWRTTLRPALGPMAEPLPQRLWAELPAGLQAWTPAAPGRPAVPKGRLPLGLATACTDLGAQVTAVQARIATIEQALTPLAERLPAYALLRTIPGVGPTVAAILLAEIGDVAWFTQFSQLRKLAGLDIIRVQSGQYAGQQRISKAGRSLLRWALYHAAMGQARTRVGRARLAAFKAKRRGDRYAGFKAITELAAKQLRVVWGVWRSGTPYDPRRAGGLRRQAR

SEQ ID NO: 436170 - protein, 361 aa, unidentified
MITVGIDAHKDSYTLVAIDEVGKRVAALTVPARKAGHIRILEWLDEFGMVKVAVEDCRHLTRALEASLLLAGHQVLRVHTRLMAGMRRSSREPGKSDPIDAEAVARVALREDNLPTAHLAGPDRDLKLFSDHRKRLVEHRTGLQAKLRWFLHELVPDLEVPSRGIRRATVFDQIANAIAGIDGAVAEIARDLLADIITLTQRITAIERQLTAIVRAEYPTLLAVPGMGVLGAAAIVGETAGVSRFKSRDAFARFNGTAPIPVWSGNNVKVRLSRGGNRRINTSLHMAAVTQQRLGGEGAVYFAKQVGAGKTRVEALRLLRRRISDRVFTALRQDEAARATSDHRTRITLNTTLKSILATAA

SEQ ID NO: 436171 - protein, 423 aa, unidentified
MSIDHARTETAAIRTQINAVFASLELSRSKWVVTSISPGAGERMSRHVVKGGDLTALYQRLEAVEAKARTRTGSQEPYEIIVMQEAGLDGFWLHRALQARGYVSHVVDAASIAAPRRKRKKKTDRLDGEALLRALLAWARGEPRVCSMVRVPSPQDEDVRRACRERKEMVKERIVHVNRIKGLLFSQGVGDYEPLRRDRRRRLEQLRTGDGRALEPNLKKQLNRILDRLELLIDHLAEVEQARDQRVGVVRKPKAAKKAEPTLQPACAASQGATNEGMAAPAAETTRAVVVAQKLIKLGGIGAEISSALSTEGLARDFQNRRQAGSYSGLTPTPWISGQLDHEQGVAKSGNPRLRTTMIQLAWLWPTHQPDTKLARWYKDRLAHTSGRGAKQKLVVALARKLFVALWKYVAFGELIEGAVMEA

SEQ ID NO: 436172 - protein, 313 aa, unidentified
MAKEGVVVGIDVGKARLDVATVDPQERFWVTNDEAGWAELRRRLKGRRVAAIGVEASGGYERGVVQDLARAKLPVRRVNPRRLRAYARALGVLAKNDQLDAELIARFVKEMPTRPVRPNRKLEAIASLVMARTGLTEEKVRLVNRAEHPCEALVQRLTERRLRQIEREIQLLERRIAELIASDPQLAAKDRLIRTMPGAGPVLSFTLIACLPELGELDRRQIAALAGVAPYDRDSGKLKGRRRIFGGRREVRCVAYMAALSASRFNAPLKAFHQRLVSAGKPPKLALVAVARKILAILGAMLRTQSAWNPALT

SEQ ID NO: 436173 - protein, 429 aa, unidentified
MNYNTQNAKIASITEKTLIIGIDVGSETHYARAFSWRNYEYSKKPFAFSNDEAGFAAFKEWMDDIAEKHEMEVIIPGMEPTGHYWLNLGAYLQEQGMKPVHVNPHHVKKSKELDDNNPSKNDRKDPKTIASLVNEGRFSYPYIPTGIYAEIRNLSNLRIQTQEEITRIKNRMARWFSIYFPEIKDVYRNPDAVSGLMVIKQAPLPCDIRELGVEGVNKIWRDARLKGAGIKRATTLVTAAEHSIGNTEAPRSARKEIRNLLEDYEGYKKRMDELMEEIEKTLSEIPYIDKLMKINGIGIKTVSCFIAEVGDIGRFDNPKQVQKLAGYAIVADSSGKHNGESRISHRGRKRLRYALYEAAISVIGKNKEFKEIHSYYRTREKNPLKKMQSVIAVACKLIRIFYTILTKGVDYDGQKMLNDIVRPEIQPAA

SEQ ID NO: 436174 - protein, 414 aa, unidentified
MGGFPVFTLLPFQGGVALSALYIGIDVSKDFSTAQAIDEKGNKCFYLELAMTADGFDKLLKAITTHGKDNAQVTVAMESTGCYHINLFSFLTHKGIRCVIINPLLIANFTRLSLRKTKTDKKDALTIAQFLLVHKDALLKTELSPGRQDLKDLAREHESLTNLIAGMKNDIRRMLQITFPELESLCNIFSETILDLLRQFPSARLIKIAKPNTIVKALLHEDKRKKISVSAEDIIRAAKASVASHGAAKEIILPEKISTLQHLIGKKVRMKKALVEACEGMMVEDIEIITSIRGISEITASRLLAEIGDYRAFSTYKHIIAFAGLDPSVHQSGKFEGISRISKRGNRHLRYIIYLMTTCVVRGDNIFRTYYQKRRAEGQPFKKAIMATAHKLIRVLFTMLSKRTTYQALEVNAI

SEQ ID NO: 436175 - protein, 386 aa, unidentified
MQTPNDLSQSRIVLKQDSTLIAVIEMSLSSWLVAGIVPGVERQPLKKLAVDESALLKLLNRWREEAEKAGRKIERIAVAFEAGRDGFWLARWLRARGIEAHVIHASSVAVSREHRRAKTDRLDTELLKRAFLGWLRGERDHCKMVAIPTIEDEDAKRPNRERESLVGEQTRIVNRMKAALSRLGIRGFNPKLKKAAERLKDLRTPEDEPIPPNTLAELRRDMERRRLVSDQIRQIEDARLERIEHAPSDGPHAMVRLLARVIGVGIETADMLVQEVLSRNMRDRRAVARYAGLTGSPDESGTRRREKGLARSGNARVRRGMIQLAWRFLMFQKDSALAQWFRARTENARGTRKTMIVALARKLLIALWRLVREGVVPDGVVLRPAQ

SEQ ID NO: 436176 - protein, 339 aa, unidentified
MNITTVGLDLAKNVFHVVCLNKHNKEVKKRMLRRNQVRQFFAQLPACTVAMEACATSHYWGRELIALGHNVKLIPPQHVKPMVQGNKNDYNDACAIAETVNRPKITFVAVKTIEENDMQAIHRMRTQCIRDRTALSNSTRGLLGEYGISFSKGLATLRRKIPELLEDAENGLSMRFRNLLARRYEQLVELDEHIAFYTKELELLSQQDEACQRLQTIPGFGPIVASAFRSTIGDGSAYTRGRNAAASLGLVPRQYSSGGKNVLLGISKRGDRYLRKLLVHGARTVVLHAANRDDPLSRWINRIRERRGYNRAAVAMANKMARMGWAILRNNTSYGPTLA

SEQ ID NO: 436177 - protein, 309 aa, unidentified
MKEELVYLGVDIAKSYLDGAIGGEKRRFSNDTIGHRELIKWVKQLSAAVQVICESSGGYERGLVRALVDARVKISLVQANRVRQFARAAGILAKTDCIDAQVLCEFGKVMRPPMVTAATLEQEHLRELESQRRHLTHLLVMEQNRGARVSDVCVRRLNRSLINQIKKQIEQLDLLIKNHIERSKELSAKAAKLTAISGVGARTAALLLAQMPELGELNRRQVAALVGVAPFNRDSGKMRGKRAIYGGRRRVRHGLYMAALVAARHNPILRNFYQRLRATGKPAKVALTATMRKLLIVLNSALKPDLIYA

SEQ ID NO: 436178 - protein, 347 aa, unidentified
MRFYTQTHKHYCGIDLHARCLYVCILDQDGTIQVHQNIKAEPGALMRLVTPYRDDLVIGVECMFSWYWVADLCRDQQITFILGHALYMKAIHGGKAKNDKIDSRKIAMLMRGGMFPQAYVYPREMRGTRDLMRRRIRLMRQRSELFAHIHNTNSQYNLPPINKDLRHIGNREGIVERFSDPGVQKSIELDLNLMGFYDQQLSKVERAIQIHASKCDQHSLILLQTVPGIGRILSLVILYEIHIIERFPTVQDFASYCRLIKCQKESAGKSYGTSGKKIGNAYLKWAFGEAAVMFLRNNPEAQAWLKKMANKHNKARALTILAHKLGRAVYFMLKRKTVFDQERFLNS

SEQ ID NO: 436179 - protein, 383 aa, unidentified
MKAVCGLDVHKDSVYLCILSEFGELIEKVFGVLTYQLEEMRDLMLHHHVVEVSMESTSVYWIPIWRVLSPHFKLNLANPYFIKQLPGRKSDVKDAQWIAECTMKELIRGSFVPPETIQQLRQYDRRIFDLNEEIVRKLSKLDAVLQRCNIRLSNYVSNVGSKSYKAVVRAISQGITAPEELVKLIHGRIINHHGIDVITASLKGVVSLAEIDMISQLRDELDMAEAHKEKCQAKMLEICEREFPEELKRLQTIPGIKERAATSLIAEIGTDMNKFETANHLASWSGLKPRNDESNKKIKSRSITHGNVYLRKTIIECAWAAGRTKDCFFSRFSYHQTQVRKKNKMKVLVAVARKMLIAVWHVLHDNTIYIDFTTDRKTSRTKG

SEQ ID NO: 436180 - protein, 346 aa, unidentified
MRFYDGQNQFYCGVDLHTKRMYLCILDRDGNKRLHRNVRAKPYEFLKAIEGFRDNLVVGVECMFTWYWLSDLCQEESIEFLLGHALYMRAIHGGKKKDDKIDSEKIARLMRGGTFPMSYVYPREMRATRDLVRRRMFLVRRRSELLQHVQLINQQYNHDPFEKMIKFAANRNVLDRFEEDSARLSVAADLEMVGHYDQLLRQLETNLLRQATRHDPQACSLLRTIPGIGRILSLVLLYEIHTIDRFPNVGDFLSYSRLVTPKQTSDGKVTGQGGSKIGNAHLKWAFAEAVLMMLRYSDEAKAFLKRKEKKHGKSRAMTMLGRKIARAVYYMLKRKEPFDTLTFFAS

SEQ ID NO: 436181 - protein, 351 aa, unidentified
MMIIGVDYHPSFQQIAFLDQETGECGERRLNHAGSEAERFYRELQQRGICVRVGMEATGFARWFERLLAELGFELWIGDSAEIKTRRVKKQKTDRKDAELLLKLMREDRFPRIWIPPPENRDLRQLLWHRHRLVQMRTRIVNQLWALAMNEGQRRKKKLWSEQGRAELEKLSLAPWAGRRRRELLELLDRLNPAIEELTAAAEQEAKKRPDVLRLMTHPGVGPLTALAYVLIIGTPSRFARGKQIGTYAGMIPSEESSGDKQRLGHISKQGNSLLRFLLVEAAQAATRVNPEWRRRYIHLAMRRHKSIAKVAMGRRLAVRLYWMWRNGCEYSPSLEFGSYAGQPGTGHGGK

SEQ ID NO: 436182 - protein, 369 aa, unidentified
MFDYTKTVVGLDVHKESIVAAVLSPDSDRIALTLKLENTPAALKVFIGRLRSRGPLTFIYEAGPCGYQVHRDLTAQGQECVVIAPGLIPQRPGDKVKTDRRDAEKLAQLYRAGQLATVHVPTREDEADRDLVRAREDVLSERLRVRNRMFQFLLRHGLVWRETRPWSIKHRAWLKALRFDLGSQTRTFESYLRGHDEVEARLAALESEVLSLAEKDAWKAVVANLRCLKGMDTLGAVTLAVEVRDFRRFPSAREFMGYTGLVSREHSSAESVRRGRITKVGNAHVRRMLVESAWSYGQTDRTGPTLIKRREGGAPEAVSAARRAQERLCRKFRKMVGRGKSRQTAVTAIARELAGFVWHIGRISQEVNG

SEQ ID NO: 436183 - protein, 415 aa, unidentified
MIPAVLECCAGIDVGKKFVMVCVLKGPANGEAQSQIRRFGTTNEELNRLREWVKSCGCTHVVMESTGEYWRPIFNVLEEEESLQVILANSKQVKALRGHKTDPEDAHWLAYLLRHGLIRPSFIPPKPIRELRDLTRRRRQLVRTGAQERNRVQKVLEGANIKLGNVLSDVFGLSGQLMLEALMEGQANAEQIAQLAQKSAKKKIPQIRASLEGHRMSDIHRELISLSLNHMAFLEEQITELDGRIAEHIRASGLEREQQILQTVPGIKQEAASSILAELGPDMRVFGNAEHCSSWSGVAPGNNITGGKRKRAPAMHGNPWARSLLTECAWSASRKNGSEFQRQYEQKKVRLGHKRAIVAVAHSLVIAVFEVLRTGQPYTKPGANPMPDTKAAKLIRHHSRRIKTLRKRLTHQTKT

SEQ ID NO: 436184 - protein, 417 aa, unidentified
MWNKVTRVKCPVDPASNKYAGGIIMICVGIDVAKDKHDCFILSSEGEVLADVFTIPNNAEGFDTLLQTIHRCACPEDKIKVGLEATGHYSYNILGFLLDKGLHTFVINPLHTNLYRKSLSLRKTKTDRVDARTIAAMLMSDVDLKSYTDTAYHNEELKSLTRYRFDKVKERAKLKQSVSRLVTILFPELEKLVPTLHMASVYALLSEFPGAKQIARAHLTHLKALLNDASKGRYGRDMATELRDAARCSVGSVMPAKSLELQHTIRLIRELNTEIEDIESAIQTIMEEMQSPITTIPGIGFRMGAMILAEIGDFSRFDSPDKILAYAGMSPSTYQSGQLSLSGAYSHMEKRGSRYLRYALYNATKYVCLWDPTFEAYLAKKRAEGKHYNVALSHAAKKLVRLIYAMEKSRQPYNSVA

SEQ ID NO: 436185 - protein, 347 aa, unidentified
MRFYTTQHPFYCGIDLHARTMYVCILNQAGETLVHRNMPATPEALLKAIAPYREQIVLAAECMFTWYWLADLCAEHGIPFILGHALYMKAIHGGKAKNDKIDAHKIAVLLRGGMLPQAYVYPAEMRATRDLLRRRMHLARKRGELLAHVQNTNSQYNLPAIGKKIAYKANRDGVAERFADPAVQKSIEVDLALIGYYDALLRDVELSIVKTAKHHDANTLYLLQTVPGIGKILSLVLLYEIHDIERFPRVQDFASYCRLVKCARESAGKRSGTSGNKIGNAHLKWAFSEAAVLFLRDNPAAQKFLARLEHKHSKGKALTILAHKLARAIYYMLKRQTAFDLDTFLRG

SEQ ID NO: 436186 - protein, 412 aa, unidentified
MKVVHEICAGIDVHAKMLVACLLLANGEKEIRTFSTMTDELLRLRDWLVAARCTHVAIESTGVYWKPVFNILEDALTVILINPEHAHALRGRKTDVKDAEWLADLLRHGLLKASFIPPPEIRELRELTRYRESLVREQSAVANRIQKLIESGNIKLAQVASDALGVSGRTILWALARGETDPVKLAALAQRQLKEKRVQLERALHGRLTVNQRFVLRELLGRWEELEAADRRVTKEIDHYLQDRPKLARARDNLDTIPGLGPRAAEIIIAEIGVEMNANFASDAHLASWAGICPGNKATGGKRLSGRTRKGNTYLRSALVQAAWGASLKKNCYLSSQFFRLVKRLGRKKALVAVAHSLLVIIFHVLQNDQTYTELGGDYFDRQHVEQQRDYYLRRLQMLGLKVTVEELSVAA

SEQ ID NO: 436187 - protein, 349 aa, unidentified
MRFYNQQHRFYAGVDLHARTLYLCVLDQAGTVVFHQNLKADPATFLQAVAPFRDGLAVACECMFAWYWLADLCADQGIPFVLGHALYMKAIHGGKAKTDTIDAHKIATLLRGGMLPQAYVYPKGMRETRDLLRRRMFLVHKRAEAITHVQNTNSQYNLPAFGKKLAYAGNRAELAVAERFTDPSVRKSVEVDLAFIEHLDSSIGELELYLTRSAKVDDVHTYQRLRTVPGVGPVLALVLLYEIHDIRRFPAVGDFLSYARLVRPERESAGKKQGFGNRKIGNAHLRWAFAEAVCLFLRGNDTAKNWLAKKEKKHGKGKALAILAAKLGRAVYHLLRKGQPFDAQRFWAS

SEQ ID NO: 436188 - protein, 313 aa, unidentified
MDKSFVGIDVSQDRLDVYVRPLGNRWWVPNTTQGRNLLVKRLGVLKLELVVLESTGGLERAVARTLQEAGIPTAVVNPRQIRDFAKATGRLAKTDALDAEVLAWFAEVIRPDPRPLADEGTAQLRELVVRRQQLIKMATAERNRLKRASPKMKPRIRRHLEWLEQEIARLDGEIEEMKLNHEEWANRDRLLQSVPGVGPVLSATLIGCLPELGELRGKEIAALVGVAPFNRDSGQWCGKRGIWGGRATVRAVLYMAAVAATRWNPVIREFYLRLTGAGKPAKVALVACMRKLLVILNAIVRDRQPWRYSPAST

SEQ ID NO: 436189 - protein, 335 aa, unidentified
MSSLVCGLDVHKDSVYATVMNYGGEIVDKRKLTNDEVVSYLGRYPIDKVAMESSTSIVPVYRALRGKGYEILVSHPKKTRLIAESRIKTDRVDSWALTELARLDALPLSYMPPDDIAALREKVRRRAFLVRMRSKLKVKIRSQLAMNGFAPPSEYGLFTSKGLEWLRSLQLDAVDCYLPVISTLDIQVGKLSRELRGLASGDEDVRLLMTIPGIGYYSALLVKSEIGTVDRFPDGEKVCSYAGLAPSVSISGRYRRYGSITKEGSRWLRWIMVECVHTHLKYDTSITRAYHAIAERKGAQIAKVAAARRLLMCCYSVLRNREPYHDPSGHYQASS

SEQ ID NO: 436190 - protein, 360 aa, unidentified
MSKYITIGMDLGNKKHTVCALGQAGKVLWRKDVANTPEALKPFFEENAGETVAMETGLCCRWISALAKSCGCDVLVGNARKLEAIWKSKRKNDSRDALLIAQIAQANRELFHPVELRDDERHEMVQIIELREVSVSQRTQAVNSVRGLCKAMGVFIPKCDASCFHKVAKEAIPAGMAWKFEPMLRHLKEIAATVKRYDAMLEKYARDHFKEEVELLQTIPSVGPITSCAFVALIADPGRFGSARDAGAYFGLTPGQDQSSETDAPKRITKTGNTLMRRLLVTAANYVLRASSPDTALKRHGERICARGGKVARRKAKTAIARKLAVVMLAMLKSGKAYDDGLAAGKATAGNAAGTAELIA

SEQ ID NO: 436191 - protein, 423 aa, unidentified
MKQNVPVAGVDVSKRFSDMCILAPNNEILTRMKIYHDLTSMERAATELQRVGKKCGAAPVIVMESTSHYHLILFQFFRDAGYEVIVVNPIQSGALKNINVRKVKNDKVDAYKIAMLYRLKVLRTSQVPVDSLRGLRLLCRQRAELMNDVTRYKNRLTAYLDQIFPGYDKVFSDVGGVASRAILRECPTPQILLLKDENELARMICVAAYKHFAFGKKKVEKLRLAAKDAERIGLYAPGNAAVVVSVIDMLDALLKSIWEIDQDIKALVTQEPFIQKNLALLQTIPGIGPHSSVALLAEIGDFTLFQKPKQFAAYFGLDPTQRQSGTFTGSKNKLSKRGSAYVRAILHMAAVTSVIPQKKRPAANPVLLAYYEEKCKSKPHKVVMCAVMHKICNIIFAVLRDQEPFELRQPEQHAQRLALTSAA

SEQ ID NO: 436192 - protein, 346 aa, unidentified
MVLIGCDFHPSWQQVSWLNQETGETGDVKLVHTPGEVDKFYRQFPAGTIIGMEATGNSQWFLELMASLGHEVRVGDAAKIRASDARQQKHDKRDAQLLLKLLREGRFPQIWTPSSEQKDLRQLLIHRYKLVCIRAQVKNGLQHLAMNQGVLKKRKLWSKTGENVLRELPLRPWASRRREDLFKVREMLDEQIILLDRAVVEAAEKNEKARLLMTQPGIGPITSLAFVLTMGDVRRFPRGKQVASYLGLIPREYSSGGHQRLGSISKQGNTFLRMLLVEAAQIAVRYDPGFRNEYLHRCHTKAKGVAKVAAARKLAIRLYWMLRTNTGYPEVVRVESSSRVALVSAS

SEQ ID NO: 436193 - protein, 425 aa, unidentified
MKATKLPVVAQLDQVLDICVDVGKSTLNVYFEVGDQGIDDEWPNTTRQIERKLGEYHRLANEHGLKSLRVVCEPTGGYQDKLMRTARRLGHLTAYVSGEAVAKFRVVETNDSGKTDLKDPHIINTLARLNKTLRHRELPEQYQLLRKCGILYDQADRALVGVRCRLHRALVELFCDYSFKGDFLYTTSGRALMDQYGCNPYRIVRAGRSRFERAMRKRAPRIRQRSLDRLWDNANTSAHHQLTAEYAALLEFQTRQLWDEFLLHEQRKTTFGDRLTALLQRLRQTEPGIPEPTPGVISAKNLARLIGETGPLSDFTHWRMLLRYAGLNIRMRQSGQYKGQDRISKKGRPLLRKILGQIVLPLVKREALYGEFFHRKRVAMPGQKAMVVVMRLFLRKLLGWYRSGQAFDAERHFHATATATERQAA

SEQ ID NO: 436194 - protein, 354 aa, unidentified
MSSFIRPKKGIFIMKKNLFFIGLDIAAVDFAASIYQTPGQPIVTKEAIPNNPEGFDLLLLWLKKHHIDKTNSHICMESTGVYSQAIAYYLLSRGFPVSIEPPLKVKRAFDPVGHKTDPVDSKQIAEYAYRFQDELTSWQPRDEILEKIRQLLSVREQFTKQKVALKNAIQAYAKQRVQVTLIKKAHQETLAQIEKQITRIDQELAKLIKQDPEIFQRANNLDSIPGYGMLLAAHLLVITENFTKIQKPKRLAAFIGIVPYQHQSGTSVFKRAKIRHFGPGPSRKLLRLAAQSVATHDVIFRRYYLRKLAQGKAKALVLNNIANKLLKVACAMIQNNTRYIKDYRSIHPMYLKSA

SEQ ID NO: 436195 - protein, 314 aa, unidentified
MKAPVFVGIDVSKAQLDIAVHLGDRFSVPNDESGMVTVVERLRSCAPEVIVLEATGGLEIPVTSALASAALPVVVVNPRQVRDFAKAAGQLAKTDALDAQILARFAEALRPAPRLLPDEQTQALAALLTRRRQLVEMLTAEKNRLSTAPKPIRKSVRAHITWLERELMHTDTDLAQTIRESPVWREKDELLRSVPGVGPVLTTTLLANLPELGTLTSKQIAALVGVAPLNRDSGTLRGKRTVWGGRAHVRATLYMATIVAARFNPVIRTFYQRLRTAGKAKKVALTACMRKLVIILNAMLKHRTPWCAKGAQYT

SEQ ID NO: 436196 - protein, 423 aa, unidentified
MTQFAAYLGIDWADKKHDLCLVDAATGHKTKLVLAHTPQAIAAYFTNLRAQYPGQLIAVALEQSRGPLLFALLQYDFLVLYPLNPTTLAKYREAFTPSRAKDDPTDADYAAELLMKHNDRLKAWHPDDPQTRTLRYLVEHRRRLGGDRTRLTNRMTSLLKCYFPQVLSRFPDLATVLVADFLLRWPALEQLRGVKRTTLLNFFRAHHSVRTDTLEKRLAAIKGSVPLTTDRAIIDSSVLMISALAAQLKTTIAALQQFDDEIAKLCVAHPDFPLFASLPGAGAVYASRLLAVMGTQRDRWTTAAELACLSGIAPVMERSGQSVWIRWRYFCPKFMRQSFHEYAGESVKHSFWARAYYEQQIGKGKSRQAAVRALAYKWIRIIWKCWQTRSPYNEVKYLEALRRKGSPLLAHAVKNTACVNKSS

SEQ ID NO: 436197 - protein, 290 aa, unidentified
MNECTHIGLDVHKDTIVVAVLRPGTTEVDERVIPNTPEAIRRLLAHHDPLVTHACYEAGPTGYDTQRTIAALGFGCDVIAPSMIPRRSGPRVKTDRIDARNLARLHRAGELTSVCVPGAAEEAVRDLIRVREEVKCDRRIARQRIRSFLMRYGKRYPGPRDAWSHRFEVWARSVTFDEPLATEAFKNLLSACFIRDAHLAEMGRRVEEIAATEPFAESVARLSALRGISTLSAMTILAETCGFSRFADAGSYMGFTGLTPSEHSSGASRHQGSTTKTGDRHIRRVLVESA

SEQ ID NO: 436198 - protein, 341 aa, unidentified
MNHYAGIDVSLECSSVCVVDAGGEIVREDVVASEPEALIAWFGLLGFEVTRIGLEAGPLSQWLYAAMRDAGLPVELLETRHVRDAFKAMPVKTDRKDAQGIAQLMRLRWFRPVHCKSIEAQETRAILSARKLVQSKLHDIEMSLRGTLRGFGLKVGRTTPNRFAARIDELVAGHPTLQVIATSLLAVHAVLLREFKGFEKRVRITARNDERARLLMSAPGVGALVALTYASAIDDPGRFKSSKQAGAHFGMTPKKYQSGQTDITGRISKIGDQSVRTALYEAAHIILTKPVKGSTLKSWAARLAKRVGMKKAKVALARKLAVIMHRMLVDKTPFNPAAAAA

SEQ ID NO: 436199 - protein, 386 aa, unidentified
MHHATTLAVPEETCIRGDCATLFVSLELSRSTWVATSLAPGSRKMSKHTLVGGDGRKLLDLLARLKTRAEQRIAAPVKVVTIHEVGLDGFWIHRLLEANRVESHVVDPASIAVPRRHRRAKTDAIDGETLLRTLMAWQRGEPRVCAMTVPPSPSEEDRRRVSRERATLLRERIQHTNRIRGLLFGQGITNYNPLHKNRRECLEELRTGDGRSLPAHLKAEVLREIDRLELVLRQISEVEAERDEMLRPAKASSPAALLMRLKGIGAEFAAVLYLEGLFRHFQNRRQLAAYAGLAPSSWKSGSIDHEQGISKAGNPRLRTTMVELAWMWVRYQPDSALSGWFRQRVGSERGRTRRIAIVALARKLLIALSRYVTHGEIPAGAVTKPV

SEQ ID NO: 436200 - protein, 386 aa, unidentified
MQASNVCTPTVGDIGTIFVAIELSQKSWLMTIHSPDRDRISRHKLTGGDHAGLLGLLETIRTRASHKLGSAPAIVSCYEAGYDGFWLHRLLTAAGIRSHVFDPASIAVEQRGRRAKTDRIDGELLLRTLMAYCRGEPRVVRIVRPPSPEQEDVRRETRERDRLVQEQGGHTNRIKALLRLLGMAVGNPRRRDWLAWLMRQRDWQGQAVAPQIKAEIEREHARLMLVREQLAALEQRSAQAQPTPAAAEMARRRGILFQLKGLGPAFSGTLAAEVFYKDFDNHRQVGAYVGLAPSPWKSGGIDREQGISKAGNPRARLAAVELAWLWLRHQPNSALTHWFLARTANASKRVKRIAIVALARKLMVALWRYLTTGLVPDGAVLKPVEA

SEQ ID NO: 436201 - protein, 346 aa, unidentified
MLYAGLDLSRKRLDFHLLDSDGATVEVGAAPPDADGLLGLTRRLDRHREPIRAAIESMNGARFVHDRLELAGWQVEIADAQKVKGLAPLACKTDRIDAWVLAELTRRDLVPAIWLPDPRVRAGRERARWRLHLVRHRSSLKQRVHAVLLTHGQPCPVSDLFGVRGRQLLARLELPEPWQATIEASLRLIDELEREIGDCERELRRLGADHRYVPRLLTVPGIGWVLAYTIAAEIGDINRFASPRKLAGYTGLCPRVYQSGERDLRGPLAKQGPKYLRWALVEAATHACTAAIYRDRYQHTKARIGKQRGAKVAQIDLARRLSEAIWHMLTREQPFAPKGATDPLAA

SEQ ID NO: 436202 - protein, 420 aa, unidentified
MISIGIDWADDKHDICIRDMEERRILAIVTIRHDAAGVAELDELVATLGYQPGECLVAIERPDGLLVGYLLQQGYQVYAIHPQVVERYRDRHHAAGNKTDPIDAATLADILCIDLEYHRPIPADSPLAQEIKLVSRHRQRLVVERTSLKNQLTACLKAYYPVALQLFTDLDLAIAWAFLRAYPNAQLALQASLADLQSFFAEQGYSCKRKIPAIFKLLQAPSIPVSTWQVRVYQRQMLALVDLLAALQPQILAYERELSNLLDKHEDAFIFRSLPNAGVITAAWLLGEIGDCRDKFQNSTGLQALAGTCPVTRQSSKLRFVKFRTACCKPFRNGVQQFARLSTHPTRGAAWATGYIRGQLDRGHNLNRARRALANRWLSIIFRLWKDRIAYDENVHLRNRALKSCLPAVVPISLPISQEA

SEQ ID NO: 436203 - protein, 344 aa, unidentified
MADNTLVAVDLAKTVFQVAFSNHPGQVSKNRRLSRTQFAEFLAQLPEATIVMEACGSAHFWARRMQALRHTPVLLPAHTVRPYVGRSKTDRADTKGMLEAHRNEAIRPVPVKTVAQQALCSLHRIRAGWIAERTARINTLRGLLREFGIIIPVGAQHAVPNAWLHIEDAESEIPDSLRPALAEICTEIRELERRIKMIETQLAALAAQTPAVARLMTIPGIGLITATALVAFIGDIHRFPSARHFASYLGLTPKEHSTGSRRRLGAISKQGDVFLRTLLIHGARSVLNAAQRKKSPDRLHAWALSRHAARGHNRAATAVANKLARIVWAVWKRDQPFLSAPLVA

SEQ ID NO: 436204 - protein, 338 aa, unidentified
MDNFIGLDISKSTVSVFIPKGGVEIEIANTAKGFTQLFSKLKKLYKKDYDSLVFVYEPTSSYSSTLELFCAHKQIRVFKINPKASHNFAKALSIRNKTDKVDARMLCQAGMLAREEEIHIPVINVVVEQINDLMSYYQLLVKQRVQTSNHLEKLQHKESTATLKKALEKEVHAFKQKEQHAIDEIKRLITKDSQLSLKYQSIQTIKGIGDIATIALIHLFLKYPNANQKQIISLAGLDPIERTSGTSVRGKTRISKAGNKLYRRALFMGTMVAIRFNEEMKCFYDRLKEKGKHTTVVQVAVMKKLIIIARALFQSNQGYSREIYQAHCGRVAQKTNVA

SEQ ID NO: 436205 - protein, 400 aa, unidentified
MLSIGIDVSKGKSTVCGMKPGGEIVYAPFEVQHTREGMSELVSLLRSSGEEVRAVLESTGSYHCPVVAALLENGIFVSVVNSLRMKRFCSQSIRKVKTDRIDAMQIALYGLAYWQELQPARLPEDTYRELQLLARQYYQMTSMLIKAKVDFNAICDQVLPGMQELMNDHAGRHKLSDFVLRYRHTTHILEMGETRFRKDYCKWAEKKGYRNCERMAVLIFATAQNGIPVLPNAPSTQIVITEAIRVLHTVEASRDAILTQMQALAKTLPEYSLVREMPCIGDTLAPRLIAEIGDVRRFHSKRALIAYAGIDAPPYQSGKFCANNRHISKRGNRYLRKTGYEVMQSYVMHKPANDPIFTFIEKKRGEGKSGKLAMVAGLNKFLRIYYGKVTELYRSLPAIE

SEQ ID NO: 436206 - protein, 368 aa, unidentified
MNEHITVVGLDVHKETVVAALLPPAAARPTETVTIQNCPKAIERLVRRVAAVERVVFVHEAGPCGYQVHRQITAMGMKCVVIAPGLTPVRPGDRVKTDRRDAEKLARLYRAGELTEIYVPTCVEEAARDLVRAREDALEDRLRARHRVSKFLLRQGRVYRETKAWGVAHRAWLRRQQFEWPPLQQTFEGNLRALEEAQARLESLEQQVLEFAQSGPYRTAVGYFRSLKGLDTLGALTLAVETLDFRRFERAPAYMSLTGLVSSERSSGPMERRGGITKAGNAHLRRILVEAAWSYRLKNTVSPQLAERRRGCPPEVVQIARKAQDRLHRKFWRLVSRGKPSQVAAVAVARELAGFVWAIAQRVPPAAA

SEQ ID NO: 436207 - protein, 445 aa, unidentified
MHYKRLLTLIDSVSSYLSVGLDVGADFTWMSIALPNGSFIGKPFKIVHSDPRSRDLAVAKIKEAQETYSLKSRCFLESTGIYHIPLLCFLRDKGFDCSVINPIITKNSTNINIRKLHNDKFDSKKAALVGLNVSLKTSILPDDSVVDLRNLVRDYYYFKDLQSAVALKLTAELKVSFPAYAKVFSKVTTQSSLKLLSSYPLPADMLAASKDDIVEIIRSTARFGEAYALRKYNAIIAAAQDAAVFGRALPSNAVRIRLYIDTYQEYQKHLDALLKALHETVNRLQDTLIYDQICLLQSLRGIGFLSAVVLIAEMGDFKLFSSPKKLYAYFGLDPAVKQSGKLNGDKVHMSKRGSSLARRVLHMAALNNVKVDKGSGTPVNPVVYDYYTRKCSGKKKPVAMGAVMHKICNIIFAMLRDNKPFEIITPEEHCRRFATEHPDKIRKAA

SEQ ID NO: 436208 - protein, 436 aa, unidentified
MNTLQKRIERITPATLIVGIDVAKEIHWARITDYRGVELSKPIKVHNSIDGFENLLARIAKLREKHVSDHVIIGTEPSGHYWRALGWYLKVHDSNPDLVGVNPYHTKQAKELNDNSQTKSDPKDALVIANLIRNGNYFDTYLPEGGYAELRLLNTERQRIMKELNRANNTLVAMLDEFFPEYATVWSNETCPTSLMLLRTYAFPSDVLSASRKKLSDDIRDASNGTEGAKLMCKMQRAAVRSIGVKEGLQTARLRINNLLDDLEHYEKKRVAVESEMEAVMETLELGELLQSIPGVGPIISAAFIGEIGDISRFDNWKQIRSLAGLNLVENSSGKHKGKTKVSRRGRPYLRHMLFLAGECGCRCNKEMNSFYQYLRKRNSNQLSGYQAFVATGLKIMRIMFHLAKTGERYNPEKALGTVRLQQISTLEQRIAPAGA

SEQ ID NO: 436209 - protein, 403 aa, unidentified
MTSKAILGLDAAQAGVAFHLQDLAGQTLALGPAAKTATGWNHLQTTLTKCGVKPADCLVAVEATGHHHLPWCEALSAAGATVLALNPLVAKRTTPVRNAIRDHKADPIDAEGIAQTAAREGDALSRFTYRSNSALFRLRKLLAAAAAVRTALTNLKKHTGALQELCFPELAKLKLSALRQCRLLQAAPTPVRVLGLSGEELRRLVGDKAPAVLAAARISFAPATLAEAAAPALQSLLRVIEQLTADLREFDRQIAQHAPAAVPAERLDLARTLPAFGPKTTPIILACVPAELWTRAQSRKKKVSRVQALFGIDPRLRESGRWKGKVKLSKRGIRPARTALYQIALCSIIHDPAMRAYYQRLTKQEKKPHKVALFDLARKHLRRLVAVLESGRAYEPHPLPIAA

SEQ ID NO: 436210 - protein, 353 aa, unidentified
MIHIGIDLHSRNMTLVAINDNGKLMAEEKLTNTPANLEPFIEQFNQPLQAVVECTSYWYWVADWCSEHKVPLTLAHAKMLKAISYAKVKTDSVDARTLAELLRVGLIPEAHQCQRGQRDLRELTRGRLRMIERRSSLQSSLWQLAAKYNVIVQDVGWRYLGKLGDFLQQQLPEVAWIEAQLLLDQIRLSQDHIIVLEKSIEEQTDFHGDVEQLKVLPGFGLVCAWTVVAEIGDITRFPTAKQFTSYCRLVPGSKDSGGKHRHRSKNKDGNRYLRIAFNQAAIIAYRNYPVVKEFYKKITRRSGKHVARTVVGKELAKIVWHMLSKNEEFKGFKGRMTRVTTQNYWPQPISPGA

SEQ ID NO: 436211 - protein, 341 aa, unidentified
MTLYIGVDIHARQQTVSYLDTEDGTLGQQELHHERDDVRAFYSQFSGEVTIGIEACGYTNWFEELVEGLGHKLLVGDAAEIRRLARRRQKNDRRDADLLLDLLLHHEFPALYRYPPESRELLRQLRYRHKLVKLRTMVANTLHALAINCGLSLRAQLLTRQGRKQLAGLRLSAIGQQQREELVSLADELTNRILKVEQWLKEQAKSDARVQRLQTHPGVGLLTSLCLVHTLGDLGRFPSTRKVAAYVGFDPVEHSSAERKVYGGISKAGSRLLRYLLVEAGQTACKHDEQLQQFYRRLVPRRGKARAKVAVARKLLIRCFIMGRAEIDYAEFLRRGKRAAE

SEQ ID NO: 436212 - protein, 429 aa, unidentified
MNYNTQNAKIASITEKTLIIGIDVGSETHYARAFSWRNYEYSKKPFAFSNDETGFAAFKEWMNDIAEKHGMEVIIPGMEPTGHYWLNLGAYLQEQGMKPVHVNPHHVKKSKELDDNNPSKNDRKDPKTIASLVNEGRFSYPYIPTGIYAEIRNLSNLRIQTQEEITRIKNRMARWFSIYFPEIKDVYRNPDAVSGLMVIKQAPLPCDIRELGVEGVNKIWRDARLKGAGIKRATTLVTAAEHSIGNTEAPRSARKEIRNLLNDYEIYKNRMDELMEEIEKTLSEIPYIDKLMEINGIGIKTLSCFIAEVGDIGRFDNPKQVQKLAGYAIVADSSGKHNGESRISHRGRKRLRYALYEAAISVIGKNREFKEIHSYYRTREKNPLKKMQSVIAVACKLIRIFYTILTKGVDYDGQKMLNDIVRPEIQPAA

SEQ ID NO: 436213 - protein, 348 aa, unidentified
MNNLHYIGFDVHKKTISFCVKTAAGEIVEEGSMPARRAEVRQWAGARSQPWRGAMEATLFSGWIYDTLQPYGEQLEMAHPAKMKAISAGKKKSDTIDARTIADLVRCNLLPACYVAAPRIRELRRLLRYRSLVVSEAVRMKNKMAGLLMETGALYVKEKLHRKKYFATLLEELEEVPPSVIDLLRLSRSALEMFESTQKRLVRELLADPELTQRVERLMTIPAVGEITALTWALEVGDPQRFRCNSDAMSYCGLTAALKSSAGKQQRGPISKQRNRWLQTTLIEAAKLAPRWNPQLAALHARELECGHRNRATLAVARKLVAYLLAVDKTGQPFQVRAAAEAPTQKAA

SEQ ID NO: 436214 - protein, 395 aa, unidentified
MMYLGIDIGKNNHEAGIITEGGKKVGKSLRFSNDREGFTALLNFIGRFVPAGDDLSIGMEATGHYWIPLYSFLHEKGFKVHVINPIQSDSLRNFHIRQAKTDSIDCFLIAETLRFGNFTETQLADEDIMSLQKLARFRESLKDRCGDCKRQVIAVLDQVFPEYDTLFTDMFGESSKAFLKSCGTPEQTLEVDVKSLAALLSKASRGRHGTEKAGEIKDLAANSVGVTLCANTFAFQIRLLIEQIEFTEKQIEKIDKLLARLLKKLNSVIMTIPGVGPVTGAIILGEIKDINRFDNPKKLVAFAGIDPTVRQSGNYSGTNNRLSKRGSPYLRRAIWMSAVVAARFDPVFKAFYEKKRSEGKAYGTAIGAVARKLIYTIFAILKENKPYEVRLNPPG

SEQ ID NO: 436215 - protein, 343 aa, unidentified
MAIVAGFDVHRNQITFDALDSETGELARGRIESTPAAVRAWVDRFHGHRVEVAVEACTGWLFVCESLAEAGAIPHLAEPAETSARRGKKRHAKTDRADARHLRELLCAGRLPEAWLPPAHVVEWRTRTRLRKTLVDERTQWLQRIRATLFHHGVSPADVPERLLSRRGRTFLEHVELPEAARERIAVALAMIEAIDVQLAPIERRLRRLARHQPGCQALMRESGIGELIAPTILCELGDVSRLSSSRKAVRAVGLDVGVYRSDRRSRLGKLTKQGSPAARWALYEAAQSACRRTSPNHGAYLELKARGLSHTRASLTLARKLTRRCFHTLRELGPAALEPVSD

SEQ ID NO: 436216 - protein, 326 aa, unidentified
MSKKKLDLCLRSNGKDILYDVIPNDLSSIKSWLTRTFEKFFLSEDSLVVCAEHTGQYTYPLVYATKSIGVYLCLEDAAKIKYCHGIPRGKNDKIDACRIAMYAERYNDCLQPYTASELIIQKLKNLSTERSMLVADRAKYQSQLKDQVDYMEHSIYIAKCNRVEGIINTFTDYIAQIDLEIKELINQAPVIAHQMDLLMSVDGVGERVALKMIMETDAFTSFTDPRKFCCHAGVVPFVYVSGSSQRSKNRVSNRADKSIKHLLHMAALSVSQVKNSPLKKYYDRKVEEGKNKMSVLNAVRAKLVTIMFAVIRTDAFFSRNYQNSLA

SEQ ID NO: 436217 - protein, 389 aa, unidentified
MKIFVGIDIAKLNHFAAAISSDDEILLEPFKFTNDADGFQLLVSKLESFDKNSIIIGLESTAHCGDNLVRYLVTELYQVCVLNPIKTCQMRKNNVRKTKTDKVDTYVIAKTLMMQDDLRFITFFDLDMMDLKALGRFRQKTIKQRTRLKIQLTTYVDQVFPEIQYFFKSGLHQHAVYALLKEAPSPKEIASMHMTHLANLLKVNSHGHFTKELAKELRVLAQKSVGANDSAISIQITQTIQQIELLDSQLEKIEAEMTDIMKFNDSVIMTIPGIGYINGGMILGEIGDIHRFSNPNKLLAFAGLDPSVYQSGNFQAKTTRMSKRGSRVLRYALVNAAWNVVRNNATFKAYYDAKRAEGRSHYNALGHCAGKLVRVIWKMLTDEVEFNLE

SEQ ID NO: 436218 - protein, 456 aa, unidentified
MRITKDREFKVVNMNAAGIDVSPKELQVCVPSDRDEKCNRTFGVYTQDLSDISAWLKKCGIDTVVMESTGVYWLPLFRVLKADGFDVILVNPKDAKNYAGKKTDEADAHWLMVLHTYGLLRPCFQPENLTREIRNLTRHRDNLIKSCSREVLHLQKEMEQMNLKLDNAFSDILGKSGQAIIHAILDGERDPKKLAALADSRCKKSREEIEKSLQATWDEDHLFVMKQSDELYRYYKKLIRETEGKIEELVTKYAAKVDAKGAELIRSKKQKQLHNEVSFDIERQAYDLWGVNVMRMPGMSKNSLLRLVSELGPDFMEKFPDARHFASWANLVPDNKISGGQLLSSKVPKRKNPVGQVFRQCANALWRSKEPLGDYFRHIKARSGHLQAMVATGKKLATIFYTMVLKKEEYDVSVFSRHREKQLDRSIERLQAKILRLQNERASCGHGATSDTKLVI

SEQ ID NO: 436219 - protein, 340 aa, unidentified
MHKLSAEVFLGCGIDVGASQLVVALEGEGSRRLQRSFLNSSSGHQALILWLQKSGTPVRVCLEATGLYSLDLALALHAATGIEVAVLNPKLVNRFAATLCRSKTDPADAQVLAEYARRMPFQAWHPPQAVALELRTLTRHIAALTQQHTQQSNRLHAASASITGSRYVQQDLKHSLRDLKRRMAKMRNQALALIEQEGDLRSRFTLLLSIPGIGEISALNLLGELALLAPGLTVRQWVAHSGLDPAHHVSGTSVHQRSRISRAGNRYLRRALYMPALVAVRHDPCLRAFYQVLLARHKAKLQAIIAVARKMLHAIFGMFRCRTGYDGSRLFPTLELTSAA

SEQ ID NO: 436220 - protein, 364 aa, unidentified
MPSMPEPVSDDQDDNSAAEEIVLGVDTHKDIHVAAVITSLGVLRESTPFPATAAGYQALLAWAGTFGVLRRAGVECTGSYGAALARHLRAAGVEVIEVNQPDKATRRRQGKTDTLDAASAARAVLSGRASGSAKAGDGPVEMLRMFKLAKSSAIKARTQTINQLKAVLVAADPQLRETLAGLSNLRLIRRCAQLNIDTPQDATSAAAYTLRLLARRILTLTDEIRELEHQITTAITSHTPQLLTRRGIGPDNAAALLIAAGDNPDRLRSEASFAALCGVSPLEASSGKTSRRRLNRGGDRQANSALYRIALSRLRWDARTRDYLTRRITEGKTRREAIRCLKRYIAREIYQIITSPPETQPSAA

SEQ ID NO: 436221 - protein, 352 aa, unidentified
MQTQSKQIDFSGQNFYCGLDTHNKNWAVTIETDNLALKTFTQNADPEALVKHLRKNYPGGNFTAGYEAGYFGYSIQRKLESLGVHCLVIHPADIPTTNKDKDQKRDPRDSRKIARALKNEEVSAIWVPPVELEEDRQLLRTRRTLAKDQTRTKNRIKAFLQIYGIKYPEVFSQKGSHWSARFIKWLQEIRLNETSGTEALQSYIRQLQFIRSEILAVSRKIKVLTNDNRYEKTYHRLIKIQGIGMITAMTFLTEIGDIHRFKKPDYFRSFIGLVPSSKSSGEKDYQNRITKRANSHLRYLFVEATWIAIRSDPQYLHFYKQYRKRMKENNALIRTAVKLANQVYYCMKNEAE

SEQ ID NO: 436222 - protein, 349 aa, unidentified
MTYVGIDVSKVTFVVAYSSVKTNKTRTFKNTVNGVHEFVQTISASEHNCVLEATGNYSALLVYLLSEAGITISLENPLKIKNFARVMLTVTKTDEIDARLIALYGEKMQPAPYKLRSDAILVLKQKRTVLRQLKKQLVATRNLKGSMEVLPFFDPKCKKTIEKTITFLEKQIKEMEEELASLAQGEYKKQMDLLTSIKGIGVTLAAALIVATGRFSYFDNAKQLTRYLGLSPTYQQSGTSVNVKGHINRNGDSSLRSQLYVAAFSSLRCNTECKACFDRLRSNGKPGKVVVRSGYCGRQQTCEASLRCRHARETLCRWIQIRKAITAPAEGTPCGKGLSTQPRRAFHAR

SEQ ID NO: 436223 - protein, 418 aa, unidentified
MEKIEPKKLRAVNSKTMVVALDIGKETNTGYCRCPDRSEVKSFVFRNNRCGFDKLWECVVRTQQAKGLEQVVVGYESTGCYAEPLLHFLKDKGVRLVQVNPLHTKRLKELQGNSPAKTDHKDPKVIADIIELGHGLTVIIPEGAAAELRRLSQARERSIRRRTALFNQLQDLVFISFPEFLQVMGDIKSKSAQYLLHHYPAPQDLLAQGLEALSAALRRVSRGKFGPMRARALYEAAQRSVGIREGRTSIALEIRETLCAIRACDDLIGLLEHEMSRHLDDIPYSGLILSMKGIGKITAAGLIGEVGDFRKFHRAQELLKHAGLDLFEISSGKHKGVKRISKRGRSQLRRLLFFAALNTVRKGGIMHEPYQRHLQKGMKRIKALVAIARKLLCVLFALVREQCAYCADYREERQLQAA

SEQ ID NO: 436224 - protein, 442 aa, unidentified
MARKPSKQRFTVVHPDCAAIDVGGREHFVAVDPRHDNAVQSFTSFTDDLYKLADWLQSLAIKVVAMESTGVYWIPIYEILSERGFEVYLVNARATRQITGRKSDVLDCQWIWQLMTHGLLRGAFRPDDLTCCVRSLVRQRASKVKDQAQTLNRMQKAMSQMNIQLANVISDISGVTGMRILRAICAGERDPVQLAELTDRRIKAGKEAVARSLHGNWRREHLHALTQELAAYDFLEQQIADCDDAIKTALEQLPVLQNEPEPAKKALRSPHRSGAQQTELHQTLWKVLGVDLTAIPTIGVDTALVLAGEIGTDLSRFPSSQHFCSWLGLAPPTRISGGHRLAGGGPKIVNRAAQALKQAASNARNDKGFIGASHRARLTRMDTSCAIKATAHQLARLVYNLLTKKQAYVEQGLEEFESRSQDRQVRALLRKARKLGYQLVAA

SEQ ID NO: 436225 - protein, 317 aa, unidentified
MKDSSSISLTGIDVSKDTLDVYFTKNGRQQKIDYRNESLKLLARQIIKLKATVVMEATGGYEMKLVRYLQGQGIACAVVNPKLVRDFARACGKLEKNDAIDARIIAAFGQTMQPRTTERIDKNREKLKVLTTRREQVQSMINQESNRRQQVEDRQMRAFIQRAIQFYESQLKELDSEMLKIIEADQTMKQKSKILLSAKGVGPTVTANLIAGLPELGQLNRQQIAKLVGLAPLVRDSGKFKGQRRTCAGRGHIRRVLYMAALVATRWNSRIRAFYLSLLERGKPKKLALTACMRKLLTILNSMVKNNQTWEQNLYSA

SEQ ID NO: 436226 - protein, 343 aa, unidentified
MKILKQSVGIDVSKSDFKVCLGKLDEQLSVAFSFQKAYDNNLKGVTLFLKEVSRLFTAEVTVQFILEASGVYHELLAHKIYQHGYEVSIILPSKSKAFFKSITQKVKTDKVDARLLSQLALERQLDNWVPADPIYTQMRSLTRERESLIKEQTVIMNKIHAQQSAYQIAKSTLRRSKQRLKLLQKQITSIDLELKTLVESSEMLCSKVNRITKVKGLSLLTVATVIAETNGFGIIRNRRQLVGYAGLDVIINQSGQKSSKGRLSKKGNPHIRKALFMPALSSSRSNELMKIIYQQLNQRQAAKKQGIMVVAKKLLLLIYALWKNSTEYDPQKNIQSRLLLTTV

SEQ ID NO: 436227 - protein, 317 aa, unidentified
MSFVGIDVSKLQLDIAVRPANKRWSTANIEADIARVVEAIKELSPQVIVVEATGGMEMPLVAALSQACLPVAVVNPRQVRDFAKAVGRMAKTDRIDAEVLAHFGEAVKPEVRLLKDEDTQVLTALVARRRQVIEMLTAEKNRLGISPKVVHKDIRKHIDWLQARLEDIDRHLASAIRKSPVWREKDDLLRSVPGVGHVLSVSLITGLPELGTLSRRQIAALVGVAPLNRDSGLFRGKRTTWGGRAHLRAVLYMAALSASRVNPALSRFYRRLIEAGKKPKVALTACMRKLLGILNAIVKNRIPWQAGYSTCSTPNTP

SEQ ID NO: 436228 - protein, 399 aa, unidentified
MRYVGIDIASERHVVAAVDAGGELVLKPTAFGEDAGGYQKLLRLLGAPEDVLLVMEATGHYWKNLFAALSAHGFSVALVNPLRTRRFAEEDLQRTKTDAIDAAGLAHFAREKRPLPMRLPDSATEELRELVRHRDRLVQEMGDKTRQLHRLVDLGFPEFTRHVHRLDSELATALLGEYPTAQAFAAARPRTLAHLKYDGRHFVGLELARTLIAAAEASVGAHHAHAYRLQVKHACQDLDVLRRRIRELDREIESTLDTHEVGSLLTTIDGVGTQTAAKLVAELGDITRFDSASALTAYVGLAPGLRQSGKRTSANASLSPIGHAALRAALWMPVLTAVRKNVWLKAHYERLLARGKPPKVALTACMHKLLLAIYSVAKHRRPFIPLLPAAALAAAGGAA

SEQ ID NO: 436229 - protein, 352 aa, unidentified
MSNNIHFSCICGIDIAKKVMQVFKVTSDGVVTNTSVSRKDFLEHFRNIPPALIGMEACATSQHWGRELQGLGHTVKLLSPKAVKPYVKGLKNDRNDAEGIYRALIMGVREVSIKSTAVRDLSLLQTMRAKRQRDKVATINHIRGILAEYGLVMGKSVRAFLSNAGGNREEGSAVTREQKESETTSQLVISELEKLLKEVKEIVSRIEELESSIKKIASENKNYDLFRSAPGVGPITAAMMVVLLCNPTVFKNGRDFAAYLGLAPMSFGSGGRNQVTGIPSKYRCHNEARSLLVQCAHSITRLKYKSDWVASILSRKPKKVAIIAIANKLARQLWVMAKKGDKFEKRLVLAAV

SEQ ID NO: 436230 - protein, 306 aa, unidentified
MEQVTTIGLDLAKAVFQVHGVDAAGAVMVRRSLRRKQVLAFFAKLPRCLVGMEACATAHYWARELAKLGHDVRLIPPAYAKAYVRRNKNEAADAAAICEAVSRPSMRFVAIKTEAQQASAGIHKVREMLVKQRTMLINTLRGLMAEFGIVVAEGPRHVGELVAILADPADARIPAPLHDGLMAIVESLRGLEQRIARVEKQIVGGGRDNATCRHLITIPGYGPILSSAMAAMIVNPAAFTSARHFAASLGLVPRQDGTGGKSLPLRRRGSSSVRSANAAMATCVGCWSMARCRCCAVNAPKTIPGW

SEQ ID NO: 436231 - protein, 356 aa, unidentified
MSQKLNSAIAAIGIDIGKNSFHLVGQDRRGALVLRQKWSRGQVEARLANLPPCLIGMEACVGAHHLSRKLQALGHDARLMPAKYVRPYSKGEKNDYRDAEAIAEAVQRPTMKFVATKTADQLDLQALHRVRERLVGQRTGVINQIRAFLLERGIAVRQGLHFLRAELPSILAKRTDVLSPRMLRVIEDLAGDWRRLDERIENLSDEIAALARQDKGCERLMTVPGIGPIISSAIVAAIGGGDAFSKGRDFGAWLGLVPKQMSTGDRTILGSISRRGNRYLRWLFVQAAWVVLVKITPEGWERYGLRSWIEAAKQRLHRNVLAIALANKLARIAWAVLHKGRAFECVKTNATASQAA

SEQ ID NO: 436232 - protein, 382 aa, unidentified
MRHGGILLEANDSEGESMKKNTTTNQYVPTDVSKCTVIAVDLAKRVFQVAGQDAAGLTVYEERINSRESFHAFLRKLPTSVTVLVETGPGAQAWAQLLKSQGNLVRILPAQHVANHRSGPKNDRNDALAILRAGRDTSISSVPIKSAAALAMQALHRVRQGYVRRRTAMSNQMRGLLLEHGLAMAQGDCAFSQGIPRILEDATQPLPDMLRELIDELLGEWSQLGERINVLTGRLETAAKNDETAKRLMTVRGIGPIISTAVIAKQTEPERFANARQFAAYFGLVPKQNSSGEKVRLGKMSKHGDAYLRSLAIQGAHAVLRQVRADSEDPDDRRLQRWVSRLGRKEAAVRLANRNLRIIWVLLQSDQTYRRQVNNDLEKAMS

SEQ ID NO: 436233 - protein, 338 aa, unidentified
MKTYAGIDLHSSNNYIGVIDAKDKRLYSKRHDNRLEDVLKVLGKFKANLQGVVVESTYNWYWLVDGLMDQGYTVHLANPNAIQAYDGLKHTDDKWDSFWLAHMLRLGILPVGYIYPKQQRSIRDLLRRRLMFVRQRTSQILSLQSMITRNRGLNFSGAQIKRFRDEFIDKLFSDPHLVFTAKRNMATIRFLDHIVSEIEVEVQSQVKLKKEFIPLLTTPGIGKILGLTIMLEIGDIGRFFKAGNYSSYCRCVESKKTSNGKKKGENNKKNGNRYLAWAYVEAANHAMRCCPKAQKFFQRKMAKSQRVLATKALANKLTKATYFIMRDQVAFDENKLFQ

SEQ ID NO: 436234 - protein, 361 aa, unidentified
MSESMALVGLDVHQAQTVAAVLDPLSGELRVERLRGEPDRVVPVFLAELDRPVRAVYEAGPTGFTLARVAMERGLDVRVVAPGSIPRAPGDRVKTDRRDAKRLVRLFAAGELSFAFVPSETDERFRDLVRCVEDARKDLMRARHRLSKFLLRRGVRFPCRAWTQQHESWLGSLSFDDPLSQATFIDYAAAVQGLTQRRRALICVLEGAVAQSSHAQAVERLRCFRGIDTLTAAGLCAEVGDFRRFAKPSLLSGFLGVVPREYTSDSKRVQGQITKAGPTHARRLLVEAAHHYRHRPALGTGLKARQEGQDPRAVQIAWRAQRRLHQRWLHLGQRRGKASGTVAVACARELAAFCWEAAILD

SEQ ID NO: 436235 - protein, 358 aa, unidentified
MEQRRFVGIDLGKRTYEIKIIGSNGRVTGTNGLTSPKGRKELYKRLLSTDRIAIEVCSLSMVMAKEIHKEVGCEVVLLNPSQIALIYRSVKKNDKEDALKLARLVQKFTDEELPKVELPSEHEENIRHILTEFRQLRHDRTKEINRLHALFLEGGITEIKKKDLARDSSRKESVKMLKGLFLMQAERIIKRLEIIDGQTEEIEKLLDREIDGDKNIERLTEIPGVGKQLASAYVAFIGDGSRYSNVSAIGAATGLVPRLDMSSTVCRLGHITKCGNRHLRSLLILAAWSHIRYSGESALKEKYLYMTKVLSKGKKIAIVATARKLAELMYTILKNDTPYEKRISPAFSTRKLADEALA

SEQ ID NO: 436236 - protein, 416 aa, unidentified
MDEQVPTWKEHLIFVGFDWASDHHDVVAVDQDGQIVLDLRIEDSKEGWQSLRSQLRAYGSPPVAIETSSGATVERLLDAGFPVYPINPKAAKRYRERKAPSGNKTDFVDAWSMADALRTDGHGWRRLTPNDPLIGELRLLCRDEMTLIEQRTALVCQLRAALKEYYPTALEAFDDWMQPSALKFLEQFPTPQKLAAAGKRKWEKFLHANKLVRAQTYEKRMALFARADSFPGSQAATNAKSMLALALVAQLRALQKHLDMFRKSIEKLFADLPDHDVFGSLPGAGTKTTSRLLAELGDDRDRFDSAEALQCYAGTAPVPSQSGFRKKAKLRRACNKTLRFVVHHWANVSRRRCQWAETYYQKKRSEGQTHAAALRCLGQRWLKILWKMWQEKKPYDAERHYRNQVRHGSWVISLNQ

SEQ ID NO: 436237 - protein, 351 aa, unidentified
MIIIGVDYHPSFQQIAFVDKETGECNEQQLNHSEGEAEKFYRDLKLRGGNVRVGMEATGHARWFERLLAELGFELWIGDPAEIKTRRVRKQKTDRKDAQLLLKLMLEDRFPRIWVPSPENRDLRQLLWHRHRLVQMRTRIMNQLQALAMNEGKHWKKKLWGERRRAEFEKLPLAPWASRRRQELLELLDRMNPTIEELTAAVGQEANKRPEVLRLMTHPGVGPLTALTYVLIIGTPTRFHCGKQISSYVGMIPSEDSSAGKQRLGHISKQGNSLLRFLLVEAAQAAVRHDPEWRRRYLHLALRRESRIAKVAMARKLGVRLYWMWRKEWSYQQVLQFGSHAGQLAAAHGVK

SEQ ID NO: 436238 - protein, 472 aa, unidentified
MIRSVGIDLHQGQHRARCLDDRAQPCDSFSFQTTPEGLATLEERVFREGANPIIVLEPAGLPWLMVAVYLRSRHPDCRLVKARTQKVAALRRYLRGPVKSDRLDALTLAKMPFIDPEQLGEIYLPPAEIHALQRLTRQRKRIESDVSGRKIRISAIVDGFLPGVRQAFEDAWSSPFRAFLRSRISPFVVVRDGEDALHACLSKAGNRSKWSRAQTREVFLACQSVASVCDLPRSASTVNEDFFIDLQDEIARELRMLESDEVESEALARRIAELYQKLHPSDNLCTIPGVGEHTAPIFLAVVGNPARFRNQSAFANWEGVVPGAKQSSDVQAKGLRMTKAGPSIMRMALYQAGDIGRRWDPQLAAVYHREMVYHGKNHRQAMGAVMNHLGARVLRVLKEDSPYELRDIEGNLISKNEARRLVLSKYHVSEDIRRERRRRNRKVGKDRETATYRTNEAAKAPQPVPVQAISRK

SEQ ID NO: 436239 - protein, 376 aa, unidentified
MREKLRFLGMDVHAETIAVAIAEPDGEIRSLGTIANREDSIRKFIRKLGTPEQLRACYEAGPTGFVLYWQLTQLGVDCAVIAPTLVPKKPGDRVKTDRRDALKLARSHRSGDLTAVWVPDEDSEALRDLVRQREAAKQDQLRARHRLTKFLLRTGQRPPLGLKAWTERYMRWLAQVRYTQPAQEVTRLDCMNEVEHMSARVKRLEEAILEVVKLAPQPMQDVIRGLQALRGVAHISAVTIASELGNISSRFQSARKLMGYCGVFPSEDSSGNRVRRGGITKAGNAHLRRIVVESAWCYRHLPRVGEKLRKRHEGVPPAIIEIAWKAQNRLHKRYMKLSMAGKDQRKIMTAVARELLGFIWAIAIKAEASCRQPIAA

SEQ ID NO: 436240 - protein, 335 aa, unidentified
MSQGRVATRPFCWEGSMSHEPMYVGLDVAKATLDVALRPTGEGWRVVNAEAGIAELVARLRAMQPALLVCEATGGFERPVIAALAAAGVPVVVANPRQVRDFAKATGQLAKTDRIDAGILALFAERVRPTPRPLGDATTQLLDALLTRRRQLLEMLVAEKNRLGFAPRPLHRGIQQHIRWLEHQLDDVTRELAAQIEASPVWRAQDDLLQSVPGIGPIVSAVLLGELPELGSLSHKQIATLVGVAPLARDSGTLRGKRMIWGGRAPVRTALYLAALCGRRWNPQLKVFYERLVGAGKPKKVALIACARKLLTILNAMVRDHARWVLPEVRLQHSC

SEQ ID NO: 436241 - protein, 378 aa, unidentified
MMVVGVDPHKQTHTAVAADELGRKKAQKTVRARRDGHRELIRWARELAPAGRLWAVEDVRHVAGGLIRELLAAGEQVVFVPPKLMAGERRGGRERGKSDPIDALAIARLALREEGQLPAARLDEQVLEVRRLTDYRDGLVAERTRFVNRLRWLVHDLDPELAPPPRSLGSGRARAKLEAGLRALPAGAGRAVALSQLARVTALSAEITGLEKDLAGLVTVLVPELLAIPGVAVITAAKIIGEAGDIRRFRSPAAFARHNGTAPVPASSGTGTGGPQRLNRGGNRQLNAALHRIAVVQARCHPGAAALLGRRGQDKHETRKASLRVLRRHLSDVIYRALNADAWRLDQPAPHAASGFPSKRGHFDLTDRACPRFVIAAM

SEQ ID NO: 436242 - protein, 430 aa, unidentified
MNSSDGIRLQEFCQFKKEIRGSTDYLIVGLDIGKERHNAFFGTATGRTLHKGMFFENTYEGFQKLLIQTEALKMQHGLRKLIFGLEPTANYHKPLGEYLIKGGQMVVLVAAAATAKNRELLDGRWDKHDTKDAANVADLIAQGKCLYYDCPGEELRSLRGLLSLKRRLKKEEHGLRVRIRNQLLAQYFPEMDQHFGSIASLNVVSRCLDPSLISLMEYDEFCRAVSPGKVNLAQQRRLTQIWRIAKQSIGCSVGGAVSVEAQIMVTALHRVRETIKTVDDKIEDICLKFPEYSFLLTIPGFGPDVSSKVLAAIGAPERFTSGKQVLKMAGFDLCASRSGKTSQSATPVISKHGKADLRFALYQAAIISSLNYKEFIVYHTNKIRGREREKGIGTKMRVKLAAKLLIIAWTLMKKREPFDPGHLSRSDKAA

SEQ ID NO: 436243 - protein, 410 aa, unidentified
MRYYLGVDWADQTHAIWVVDEHGTKVAGRTVPHTAAGFSEWGRELDEWRAQGIELWAAIERPEGRVVDFLLDHGVVVYPVNPKALDRARDRFRPSAAKSDPFDARVLADFLRTDHGHLQALQPSSEVAQELKYLTEDYRRHVRQQTRLVNQLTATLKAYYPRALEVSELTTALARQFLPAYPTPAAVVALTEKQWQRWARAHRLSEARTQELWAVLQRPQLPVPDHVVRAKARLMLTLVEELTPVVAAVDQYREAIDAFFAGLPEGQWIRTLPIGKHGVTAPTLWALLGDTAGRWESFQHLQGHAGAVPVTIRSGQQRVVRFRFACNKAMRDIIDQVAFLSLRKCEWARAYYDQQRARGHDHHPALRALGAKWLKIIFVMWDRHIPYDEQHHLATMARHQLRQGAQKKIA

SEQ ID NO: 436244 - protein, 348 aa, unidentified
MAVAAELEEQIVVGGVDTHKDNHVAAALDRVGRLLGTAEFPTTPTGYRALLAWLGSFGTVERVGVEGTGAWGAGLARFLRATGIRVIEVDRPNRQRRRRRGKSDPADAEAAGRAVLAGDVSGVPKDQDGPVEAMRALRVAQRSAERARTQATNQYRSLLDTAPAQLREQLRGLGLRQMVDRASRFRPGKDLSDPMAATKAALRSLARRWLALAAEIEALERQLAALVQVAAPPALLAEFGVGPDVAGALLVAAGDNPDRLRTEAAFAALCGASPLDASSGRQRRHRLNRGGNREANSALWRIVMVRLRWDHPETRAYVDRRVAEGKTRPEAIRCLKHFLACRVWRLLT

SEQ ID NO: 436245 - protein, 487 aa, unidentified
MHPRTTNISTQTSDVRGFSFESVGALALDNEYSGVAVLPAHYIAFAERKRARPWRSIYHFGSYDVKPLATHRFSAYVGIDWADTKHDVCVQAAGNESREFDCIAHRVAAIDQWAHSLRQRFGSPIAVAVELAKGPIVYALQKYDFLVLFPINPSTLAKYREAFKPSRAKDDPTDAELALDLLMRHPERFAPLQAQSASMRALLSLTEQRRELVADKTRFTNRLTHTLKQYYPQALDWFDQRDTVLFCDFLSRWPTLTQVKRARPSSLKAFFYTHNGRRAQLISARLDAIKAATALTQDLGVIAPCRLQALVLVEQLRTTLQAIERFDREIAELAPRLPDYHLFRDLPGAGPHLAPRLLAAFGEDRRRFQRADQLQKYAGIAPVTERSGKKSWVHWRWQCPTFVRQTFVEWAGQTINKSFWAAAYYRQQRDKGSSYQAAVRSLAFKWIRILYRCWQTNTPYDESRYLNALRKRRSPLLKNLDLDAQNA

SEQ ID NO: 436246 - protein, 343 aa, unidentified
MITIGIDPHKSSLTAVAVQPSGEVSATIRLEVNRDTVALLRAWAQQWPPRQWAVEGAAGLGRGVTQGLSAADEPVVDVPAQLAARARLLNTGHARKSDPIDAAAVAMVAQHHRRLHPVRAEDDTLVLRLLSERRDDLAAERTRTVNRLHALLRDLIPGGAKRNLSAEQAAALLRGVQPMTAVDTQRQQLSRELVADLRRLDAALGRNGEDIATAVSASGTSITQIHGVGPVLAAKIIGHSGSIMRFPSRHHYASYCGTAPIEASSGEQRRHRLSRAGNRQLNRALHLIAVCQIRTKGPGREFYQRKLAEAKTPAEARRALKRRLCDTIYRHLTRDQQAENLIT

SEQ ID NO: 436247 - protein, 334 aa, unidentified
MKSGIVHIGVDVSKEKLDVFVPAHKEGMRPTAKELDNSVAGFRELRNLARKAKATVCVEPTGGYELELIAFLHRFEVPVAYADAMRVRQFARAEGCMSKNDSIDAALISRFADKIGVRVLEAQEVEAVELKRKAKFRQTMMDSRTAMINRLETEVDPEMKALLKEQVKNMDKVIGKAERLCLETVEKDERMNALRERFTQVGGVGDLTAISILAGLPEIGRLPDAKLNRLVGIAPEERQSGTKEWQRRIWGGRKDVRNALYMAAVASIIWNSTLGTYYRKKRSEGHPHKWAMVPTMRKLLSLLNRIARDPDFTPRAEPESTKRNANVGRRKKSA

SEQ ID NO: 436248 - protein, 322 aa, unidentified
MNPKNYGGIDVAKKNFVIGIYGQDKTKTEANTPKGHAKAVEYLQKHNVDLVVLESTGGLEVPLANALHAADIRVVIANPQRTHQYAASFSLGKTDHLDAKMLADYAQALDSRKMADDMCYAPPSEEALALEALVKRRSQLVEMRKMEKNRLEQTHASQKASVVAMIKHLGELIAALDKEIDQSNRGGFNGKGEILSEMKGVGRITCATLLSMLPELGKVPHKRAALLVGVVPPPRQSGEKERKSGCVGGRMVVRNALYMAALAATRSEPKIKAFYEKLMSRGKAFKVALNACMHKLLRILNARMRDYLASLKETEESESQSA

SEQ ID NO: 436249 - protein, 350 aa, unidentified
MDTITRIGVDLAKNIIQVHGVDSMERVVVGKAISRQKFLEWFANLEACLVAMEACSAAHYWARKLRALGHEVRLIAPQFAAPYRKGGKHVKNDRLDAEAICEAAGRPHMRFVAVKMTDQQNVPVLHRMRDGFVEERTALANRLRGELVEFGVFLPQGIDAFRAHFVEALEDGATELNGIARTALLRGWEHLQALDQQIAWCDAQVATHVKHDNNAQRVMAVIGIGPLTASAAVATVGDAHLFKNGRQFADWLGTVPKQASSGGKTRLGRVTKQGNTYLRTLLFQGARSAVTSAHRRTDRLSRWIVQLQARVGWYRTLVATFLPGDKPVPGFCLEINPYSGFRIVGRVKFP

SEQ ID NO: 436250 - protein, 440 aa, unidentified
MVRIYFYARSAIPREKGKEMPYRVAAIDIHKKVHMVVVASMAEEVEDTAAAAVEFECRKFGAGASEREHLVAWLGERQVQEVVMESTAQYWKSVWLELEPHFGKLHLAQAQSNRAPRGRKTDFRDAKRLGRRLLASELMLSYVPEPEQRRWRLMTRGRLQLVRDRVRLQNQMEGLLEEARIKLSSVISDLLGVSGRRILEALAEGTRSPAQLAELGDRSLKCTKQELTDALTGAPDPCHIELLKLDLQRLQLLDEQIEKLSRMAAEALRVHQAVVLRVAKMPGWGAESAQQIIAEVGVDAEAFQSPGAFASWAGVCPGSNVSAEENHSSRCPKGNRYVRRLLTEAAQAAVKKKGSRFQNLFRRFLPKLGWNGAIALVRHRMARVLWKVLHDGVEYVECGQDTTPKARKRRAQKLTQALRKLGYQVTLTDVQIQTEPAATA

SEQ ID NO: 436251 - protein, 388 aa, unidentified
MQVIADRPEAPSAIRTNLGAIFASLELSHSTWLITSLLPGSGEKMSKHVVHGGDIAGLLQRFAQLREKAVAQTGRKFPIIVIHEAGLDGFWIDRVLKNEGIESHVVDPASVATSRRRRRAKTDKIDGEALVRTLLAYKRGEPRVCAMVKAPTPEEEDRRRLCRERNVLITERVRHVNRLKGLLFSQGVCGYEPLHRNRRRRLDELRTGDGRPLPKHLKAQISRELDRLELLLEQIKAVETERDALLAAQQIAAPPSAAMLLAIKGIGPEFAAILWSEGLFRHFDNRRQIASYAGLAPTPWKSGSIDREQGVSKAGNPRLRTTLIQLAWLWLRHQPQSALALWFKERVVHNGGRLKKAAIVALARKLLVALWKYVAAGVVIEGAIMKAA

SEQ ID NO: 436252 - protein, 346 aa, unidentified
MTIVEAARAVTGGIDTHGEVHVAAVLDEVGGLLGTQSFRADPDGYSDLLAWLEAFGEVSKVGVEGTGSYGAGIARFLVRAGVHVVEVDRQNRQARHHSGKSDPLDAVEAARAVLSGRAHGTAKSRDGSVEAIRVLVVAKRSARGARIKALTQMRQLTFSAPDQLQGRLKGLPIAAFVAAAQGLRPTRSPDAVTAATKASLSSLGHRVAELEAEIAELDAMITPLLETTAPKLLAIYGVGIDTAAALLVAAGDNPERLRSEAAWAHLCGVSPLEASSGKVTRHRLNRGGDRQANRALWHIVITRLASDPRTQAYMERRVKDGRSKREAIRMLKRYVAREVYRYLPRP

SEQ ID NO: 436253 - protein, 338 aa, unidentified
MTIVMGLDQHRAQITADWLDSSTGEVSRARVTPADRAGVRAFVERFHDRELEVALEATTGWRFVVEELHRAGAVVHLAEPAETAARRGNKKRAKSDRADARHLRELVMIGRLPESWIAPEHILDLRARVRLRHTLSAQRGEWQQRIQAVLYHHGCPQRRNLMTAEGQHWLAAQPLPTGAREQVTVALAMIEAVDAQLTPLTRELRAYARRQAGCRALMGHFGIGALVAVTILAELGDARRFTSSRDAIRYSGLDITVHQSDVRRAPGHLSRQGPPALRWALFEAAQSAARAGSPDRDYYRQTAERLGANRACLSIARKLLKRSYHTLRELGEEALQPA

SEQ ID NO: 436254 - protein, 408 aa, unidentified
MNPLFVGIDVSSKNNVAYIMKPDGSKHSSFSVQNNLGGAKLLTERIVSALGSMQLSDVVIGLEATSIYGDSLVYALREDGGLGHYQRKIHVLNPKQVRKFKDAYPDLPKNDWVDAFVIADHLRFGRIAREVYMDDYRYKALQTLTRARFDVIQNLTREKQRFANYLFLKCSGMAQDKSIQNTSATTIALMERFETVDELANAELEELTAFISEIGRGRFADPSATAKAIQSAARGSYRLPKTVNDTVNQAMSVSIASMRALKEQVKVLDKAIEQQFEIIPNTLTSIPGIGKVYSAGIIAEIGNIHRFDAQASVAKYAGLVWTQHQSGDFEAEHTHLIKSGNRYLRYYLLEAANSVRRCDSEFRRYYDLKFHEVNQFQHKRALALTARKLVRLVFRLLKDNRLYIPPEG

SEQ ID NO: 436255 - protein, 341 aa, unidentified
MEQYVGLDVSMRETSIAVRQNGKRVWRGKCPSDPRALADVIRQRAPDAVRVVLETGPLSTWLYHALKAEALPVVCIDARHAKAALDMAPNKTDANDADGLAQIAEVGFYREVRVKGYAPMLARALVGARGQLLRISIQLSNQIRGVMKTFGLIVPKGAGRVFETHARALLGTNEAVARVVLPLLEAWRAVRARAAELDRQLIAAARTSPACRRLMTIPGVGAVTAASFVAAVEAPENFRTSRAVGAWLGLTPRRHQSGEADYDGHISRRGDGHLRALVYEAAAAVLTRTRTDSALRSWGLELKEKVGFKRAAVAVARKLAVIMHAMLKTGATFDPAPNTTA

SEQ ID NO: 436256 - protein, 315 aa, unidentified
MTFLQEAPSRVLGFDVAQDTIAVFDSAQGKVLTLTNSPSALRKFIAGLEGSCLAVCEPTGGHEGLLIRELTAAGVPCHRADTLKTKAFLRSFGTLAKTDAIDARALALYGLERWKGLALFTPAAREQAHLTALVLRRQDLVALQVAETNRLKAPGAQVLKASCKAMLRALKTQLQLLDHAIEELIATCQSLKRRVEVSLSLPGVGPRTAIALAAIMPELGTLGRRQAAALAGTAPHPRDSGTLRGYRRMRGGRPQVRTVLFMAALAASRASGPLRETYQRLVASGKKPIVAISALMRKIIVILNARIRDDLAKQS

SEQ ID NO: 436257 - protein, 397 aa, unidentified
MIAVGIDISKAKSTVAVIDSDGTVLASPFTMAHTQPEMEAFVSYLKGLGEPTTILMEYTGHYHYPVLKKLQDEGFPVCIVNPYQMKKYGDVEIHKAKTDKKDALRIAAYALEKSYKLVPYSSMEQKYEDLKFLSRQYSQRITYVAKLKVQLIALLDQTMPGITRILPLNSRNPEKCALLLFIKRFKSFDEIQRIGKARFLASYDVLAKKASERSASSNGLSIYELAVDSITTRGENPYIWLSQNQCVDLLSATQNAADEIISQMRNIAETIPEYKVLRAMRGVGDRLGPIILAEIGDIRRFHSGKALNSYAGNDAPPYQSGQFESRNRHISKRGSSALRKACYEVMQALKLTKPQDDPVYLFMLKKEQEGKPFNVAKMAGVNKFLRIYYARAMELYK

SEQ ID NO: 436258 - protein, 357 aa, unidentified
MLSSNVKYIGLDVHKEAIAIAVLNGAGKLVMESIVETKSSTLLDFLHGLRGGLHVTLEEGTWAAWLYDVLKPHVAEIVVCNPRRNALLKEGSKSDKIDARKLAELLRAGLLRAVYHGENGLRTLRELARSYLTISKDLKRVKNRLKALYHSWGICCAGQQVYAARHREQWLSKIAQVGVRRRAELFYQELDGLLVLRNTVRGELLAESRKHQAAKILRQVPSIGPLRAALLLALMQTPHRFRSKRQLWTYSGLAVVTHDSAQHRYVDGQLQRSKKPQQIRGLNQNHNHAMKEIFKSTALNASRCAGPLQDFYVGLLAKGMKPDMARLTLARKIAAITLALWKKGGSFDAEHLKSQAA

SEQ ID NO: 436259 - protein, 434 aa, unidentified
MEEAGDEPLFCERAAGIDIGKKTVMVTVRVPSESRRGGRQQETREYGTTRRQLLEMTDWLRCWGVQRAGMEATSDYWKPVFFLLEQQGLECVLYPASQVKALPGRPKTDKLDSAWLAKVTERGALAGSFVPPEPIRRLRTHTRYRRRLVQARTAEKERCEKLLEDAHLKLSSVISDIHGVSGRAMLRAIINGERNPAALAELAQGRMRGKLSRLAEALDCSFFTPEHAFILSMMLRNIDHLTGQIGLLDVRIAALCEPWERQMAQLDAIPGFGVTTAQDLIAEIGVDMTVFPTAAHLCSWARVAPRVKESAGRRKGNSTTGHGNSYACGAIGEAAVNVGRTQSFLGAKYRRLCRRMPKKKAQGAIMRTQLVIAHALLSDPEADYRDLGTDYYEQRADIERHTRAHVHGLERLGYKVTIEPIDPDTGELIARTAS

SEQ ID NO: 436260 - protein, 342 aa, unidentified
MQITTIGLDIAKNVFQVHGIDAAEKVIVRKRLRRSQVLTFFKALLPCLIGMEACATAHYWARELTKLGHKVRLMPAKDVKAYVKRNKNDAADAEAICEAVRRPTMRFVQVKSAEQQGQLMQHRTRDLLMRQRTQVINALRAHLAELGIVAAKGDKGVKELLTILADEKDTRLPIDARASVIVLAAQLQALQTLIGSIEKRIKAQHRSNQASKRLETIPGIGVIGATAIAATVADPTVFRSGRDFAAWIGLVPRQNSTGGKQKLGPISKQGDRYVRRILVVGAHSVLRRAKENPEKYPWLTQLLARRPFKVVAVALANKMARMAWALLAHGGTYRAPELAAAA

SEQ ID NO: 436261 - protein, 423 aa, unidentified
MTVVYPICCGVDVHKEFFVATLITTEGIQPKYQKRRFSTFNNRILAFKAWLLENNCRDICMESTGKYWVPVFNLLEDSINVTIANPKWVKAIKGNKDDAKDSKWIGDLFRIGLVPGSFIPSKDIRILREYTRYRFKLVSCKSSEKNRYQNVFTVCNVALDAVVSDMFGKSASSITDYIVNSDTFDPEYCVSLLQKSLKKKADEVVESIEGFQMSAPQKERAKMVREHYDYLLGQIKKIDAAIDVLAKPFDSAIDLLCTIPGIQRDSAITVISEIGTDMSQFDSSKRLCRWAGLTPGNNESAGKKKSVRITRAGVYLKPALVEIAHAAVKSKKTPYYKTKYERIAKRRGKKRAIIAIARMILTAVYHMLSTGEVWNPVDLDQIDMPPELKEKELHKSLLRAAKLLVAHGLISPDAVKIPDTVPA

SEQ ID NO: 436262 - protein, 347 aa, unidentified
MKHYAGIDVSLNSSNVCVVDESGKVVREVKVPSEPVALIRCIKSLGVRVERIGLEAGPLSQWLYGALRESGLPVELLETRHVKAALSAMPVKTDRNDARGLAQLMRLGWFRPVHCKSMAAQEVRALLTARKLVQSKLYDIEMSLRGILRGFGLKVGPTTSRSFAARINHLTADHPSLEMVAEALLSTHAAALCAFKNLEKNVRQISRADTRVRLLMSTPGVGPVVALTYVSAIDDPKRFTSSKPVGAHFGLTPKKYQSGETDINGRISKVGDSSVRAVLYEAAHIILTRPIHGGALKSWAMKLARRAGMMKAKVALARKLAVVMHRMWIDAIKFDTDKASGCVRVAA

SEQ ID NO: 436263 - protein, 388 aa, unidentified
MVEAIQQGIIPRQFEIFAGLDVDKSRIAVTFTDHESLLKSLQMPYSSEHLLNCLGKHLGGRKIALAYEVGPTGFGLYDDLTAAGHRCLVVAPSMVPTAPGKRVKTNRLDSRKLSEGLRGAQLKSIHVPSEIYRQLRHLVQLRDSHVRQMTAAKLRIKALLLYEGLPFPEAPKSRSGQWSARVLREVGTLPCNSSVRFKLDSLIASLQFHQLQAAAAQKQMRRFCQQDPELKQSIGWLLTVPGLGWITASHLVARLGDWRQLRDVRQIASFLGLVSSEHSTGDDIQRGAITRSGDSRLRNKLIQVAWTAIRKDPELREFYRRIYQRHPRKVAARKAIVAVARKLTTRIYSVLKQQRPFQLRPPMLSAPLTPEETAGPRGRLDAAQKAQE

SEQ ID NO: 436264 - protein, 347 aa, unidentified
MKILALDLGKFKSVSCCFDTEQLTTEYWTLSTDRCYLTKVLRNYQPQLVVIEACSIAAWVHDLCRELGFEILVCNPNQEAWRWRNVKRKTDRDDALKLAKLAALGQLAPVHIPDVAIREHRWLVKYRKTIVGRMNRTQNILRALYLQHGLSLPVGARCWTIANLDAMQQQSRPLAECAPEELWRGELAQELATYQRLQEELKQLETKLTDLAARHERIRLLEGIPGVGRVTAEIIATHLDRPERFKSARQVSSYAGLVPRRYQSGLMDRQGGITRRGSGLLRSALVECAWAMLRYNPWARDTYVRLVRGQKNRRKKAIVALARKLLVRCWCMLRDRQPWQAACVAAS

SEQ ID NO: 436265 - protein, 391 aa, unidentified
MVCVGIDVAKDKHDCCILDSDGTIRADCITIPNNMDGFKQLLQTIRDCTKKSDKIKVGLEATGHYSYNILGFLLDKDLAVYVMNPLHTNLYRKSLSLRKTKTDRVDARTIATMLLSDVDLKSYTDTAYHNEELKSLTRYRFDKVRERAKLKQSVSRLVTILFPELEKLVPSLHIASVYALLSEYPGAKQISEIHLTKLTNLLATASKGRYGKDKAIQIRDAARTSIGSVMPAKFLELKHTIKLIRELTSEIDEIEVSIQKIMDELNPPILSIPGVGIQSAAMILAEIGDFSNFESPDKILAYAGCSPSTYQSGKLTNCYAHMEKRGSRYLRYALYNATKYVCHWNPVFAEYLAKKRAEGKHYNVALSHATKKLVRLIYALQKSGKAYLVAA

SEQ ID NO: 436266 - protein, 413 aa, unidentified
MDILYTSCAGLDVHKETVVATVRRLDAKGKVRLETRTFGTMTSAILELADWLAAEEVTHVAMESTGVYWKPVWNLLEGQFEMLLVNAQHIKHVPGRKTDVKDSEWIAQLLQCGLLRGSFVPCTPQRELRELTRQRRQLVQAKASVSNRIQKVLEDANVKLASVATDILGVSGRDMLRAIIAGRTDPQALAELARRKLRAKIPQLRQALQGRVTEHHRFLLKLLLDEVTHLEDLIARLSERIVSVLPPPFVEGVQLLATIPGIDERAAENILAEIGVNMDQFPTDGHLSSWSGMCSGNRESAGKRQSGRSRKGDQWLRATLVQSAWAASHTKKTYLSAQYRRLAGRRGKKRALFAVGHTILVIIYHMLKKTKNYQELGGDYFDRLETGRLTRGLVRRLERLGHEVILKPKEPAA

SEQ ID NO: 436267 - protein, 370 aa, unidentified
MSESSTIFVGLDQHKESITVSYVGADRSLEPICLGPIGTRTSDVDAMVRKLQSKGKKLVFAYEAGPCGYGLYRHLTRKGHTCLVVAPAKIPRKPGDRVKNDKRDATNLCRLLRSNDLKSVYVPQIADEAIRDLCRAREDAVSDLKAAKHRIKSFLLRHDIRFNGKADWKTPHLRWLGEVKCATSAQQVVFQEYVRAMAQGFERVERLEIELTQHVKSWRLSPVVESLQALRGVRFTVAVTAIAELGDLTRFEKPRQLMAFLGLHPSEHTSGERRRLGGITKTGNTHARRALVEGAWAYRFPARVSKQIQARQEKLPEAVRDIAWRAQVRLCKRFQKIVARGKNANVVVTAIARELAAFMWAIAKQVPVAA

SEQ ID NO: 436268 - protein, 340 aa, unidentified
MKITTLWIDLAKSVFQLHGVGADGTIVLQKKLRRSAMLDVLGKLEPCLIGMEACATSHHWAREIAALGHEVRLIPPAYVKPYVKRQKNDATDAEAICEAVTRPNMRFVPVKTKDQQGVLVLHRSRDLLMRQRTMILNAIRAHFAEFGIVAAQGSRKVAELVMRLREDDSLGLPEIARSALLALAGQLANLAAEVRNIERQMMAWHRQNAASQRLETIPGVGLITATALAASVPDPTAFKSGRQFAAYLGLVPRQNSSGGKDRLGHISKMGNGYLRRLLVVGATSVTRRAPTTNTRTGVWVRSLLERKPTRVVTVAIANKTARTAWALLAKGESYRVAPTI

SEQ ID NO: 436269 - protein, 355 aa, unidentified
MKSKTLGDTDEITVIGVDIGKETFHLVGFDHAGERVLRKKIKRLALKATFEKLPRCVVGMEACMSAHFVSRMLRELGFEPRIIPAIYVKPFNKGQKNDYNDAEAIAEAAMRPNLRTVAEKSQDQLDLQALHRVRSRLVARRTATINQIRAFLIEQGITVRAGRHALQSSFEAILENRRAEISPRMRTTLLGLYGDWLWVDERIKAISSEIEEIGRSEENSANIMTIPGIGPLISTAIVAAIGQGDVFDRGRDFAAWVGLVPRQFSTGGRTILGRISKRGNGYLRMLLVQAANVILMRPHRWDALGFEPWLRGAVDRMPHNKAAVALANKLARTAWSVLHYGSTYEPNRNKPLGAI

SEQ ID NO: 436270 - protein, 308 aa, unidentified
MPQPVIGCDLSRAFLDLCRSPSGVTQRVANTPDAIATWVDTLERDVLVVFEATSGCDGDLIAALAERGQPFSRVNPRQAREFARAVGVLAKTDRVDARVLAQMGAALPLPITVPVSASRARLSDFLRRRRQLVEMRKAEKLHLYSAGQDEIGAGIEAMIELLGKQIADFDRKIAALIAEDQTLAAQARLLSAVPGVGPTVLATLLGELPELGTLCRRRIASLAGLAPHARESGTWRGARRIWGGRRKVREALYIAALTASRRVPALTAMRDRMRQKGKAPKTILIAVARQLLVILNAMLRTGTPMKEA

SEQ ID NO: 436271 - protein, 333 aa, unidentified
MNKFTHFLGIDISKEYFDAVIILEGKKELNNHNQFANNAKGIRELRKWLKEFNATSVNTLVCLEHTGMYGKLVIKHLISYEFSLWVEMSLKIIRSIGLQRGKNDKVDAFRIAYYAMKNQEEAVIYKAPRKVVEKIKTLLSVRDKLIQYRGSLSRHTNELKSFEPELYKLAVKHQNNTIKGIATDLKSIEKQLDLFIKEDEILNTIYTQVSSVPGVGKITTLTLICFTNEFSMYATPRQLACYTGVAPFEYTSGKSIKGKPRVNNMANKKLKKLLHMCALTAATYDPELKVYYQRKVEESKNKLLVLNNVRNKLIHRICACIKENRVYKIREVA

SEQ ID NO: 436272 - protein, 375 aa, unidentified
MRPHRSVPPAGHPEVTPVKYVGIDVHKKMCQAAILDDEGELLDETRFMNTPEGIEEFARSLTATRGEVKAVLESTGNLWIQVHDRLEEHGIPVALSSPSNSRLIKDSRLKTDRTDARALARLHRAGVLSTCYVPGALERDQRELLRHRLRLVKMQNMVKNRIQSLLDKHGVRIPYKTRFSKKAVEWMKDLSLGFIDDAILRSDLALLEVLDGQVSSVEEKLAALAVDDPGVRLLMTMTGVGYFSAMMILAEVVTVDRFRGDKQFCSWMGVTPRVWQSGEKTWVGGIGGPGNRRMRWLLVQCAHTARRYDPRMVRLYGRIERRKGGKCAVAAVAHEMARVMYHMLKNDEPYRGVKVELWERKLKRMEKNALIGLRN

SEQ ID NO: 436273 - protein, 242 aa, unidentified
MLSNGPDVARQLLEWLAVRKVALSELQVILEPTGTYHEHLAYGLHEKGLRVVVASPVRVRSFATGMGILTKNDHVDAHVLALYGALRQPEAWVPPPPAIRELKALLKRRDALREDLQREQNRLEKLHVTRFSTRVEASVTKMIAALDAELLSVQQQIDDHIDNHPDLKQDMKYLTSVKGIGKQVGSNMLAVLRGNAFSSPEQAAAWLGLVPREKRSGSSVNGRSRLTKTGPADLRLNCISAP

SEQ ID NO: 436274 - protein, 344 aa, unidentified
MKNYAGLDVSLEETAIAIVDETGRTVREAKIASEIEAIDAWLRKTGIAIVRLGLEAGPLSSWLHAGLKERGWPAICIETRRLRAVTRAMPVKSDRKDAEAIARVMRTGWYRAVHVKSLASQQLRVLLRHRKILQAKRQDLENELRGTLKNFGLKLGRVGRAKFAQRVGELVTGEPWLERLALPMLAARAALLKSFGELHALVLRIVKADAVCRQLMTIPSIGAVNALAYKTGIDDPTRFRHSADVGPHFGLTPRRYQSGETEIVGSISKCGDAMVRGLLFEAAMTLLFRVKAASALKRWARALAKKIGTRKAAVALARRLAVIMHRMWLDGTDFNPNLIRAAAG

SEQ ID NO: 436275 - protein, 355 aa, unidentified
MDDTKYIGMDVHKETISIAVLNSSGKLVMQSVIETKATTIVENVRGLRGDLHVTLEEGTWAAWLYDLLRPHVNEVLVCDPRKNALLKAGNKSDQIDARKLAELLYLNKLTPVYHGEHGVRALKELSRSYLTISGDVVRVMTRLKAVYRSWAIACAGKQVYAPRYRAQWLGKIREAGVRRRAEFYYQQLDELRSLRQQVRRELLAESAKHQASKLLCQIPSIGPIRAAQLIAILQPPHRFRTKRQLWAYGGLAIETHSSADHRYVDGQLRPSKKQVSLRGLNRNHNHELKNIFKGAAIIAATKAGPFQEFYAALVAKGIRPEMARLTLARKIAAITLIVCKKGVRFDAQHLNPQTA

SEQ ID NO: 436276 - protein, 459 aa, unidentified
MSKRKHKNRGWCGSERPVLEPDAAGIDVGAREMYVAVPPDRAAEPVRVFGTFTSELQGLVKWLQECRITTVAMESTGVYWIPLFQLLEEAGIRSCLVNARGLKNVPGRRTDWHDCQWLQYLHAVGLLRAAFRPTQEICAVRSIWRQRCELVGMAAQHVQHMQKALTQMNLQIHHVISDITGVTGLAIVDAILAGERNPDKLALLREPSIQASPETIRQSLLGDWRREHLFVLQQSRTLYQSYREQIAGCDREIEALLGQLPPRADPNHLPPADKTTRQKKRTAGAISFDYRSEAYRLFGVDLTRIPGMQGTAMGLFSEIGNDLSRFPSAAHFASWLGLCPDNDKSGGQVLWRGVRKIQQRAGQLFRLSAHSLHRSQTRLGHFLRRMKAKLGPKAATTAAAHKLAVIFYTLVTKQIEYDESIWAVHEQENRQRMENRLKRQASRLGFQLLPLSLSVEVPR

SEQ ID NO: 436277 - protein, 327 aa, unidentified
MNVTLDRLFVGLDVAKGKADVCLLQPDGRRLEESFENARSGYEKLLAWLDRHRADRPIHAGLESTGPYSRPWCELLHASGHGVSLLNPARPKAYGQACGQRNKTDRVDARLLAQFVAEQQPARWVPPAPEMEELKELTRRREDLLGLIQAEKNRVESALCKSVRDSLARSIKALEKELARVEDELEELMGRHPVLRAKEKLLCSIPGIAKVTARKILAELPDVRCFDSARQAAAYAGLSPRRHESGKTVHKKGRLSKVGNGALRKALYMPALVAIKHNLVIREFAQRLRANGKSEGVIVGAAMRKLLHIAFGVLKHNKPFDPAYANT

SEQ ID NO: 436278 - protein, 385 aa, unidentified
MRSVGLDLGARHIAWCEVVDGVVTRRGSVGRLSELEAILGPDTAPAQVAFEASREGWHVHDVLLGWGKKPWMLDTARIRRIGVGHHGRKNDAIDAEAIAMALDAGRFPVAHVLSPERRALRAKLSVRSELVDTRARQVTVLRGLARAAGVLIGTSSTDGFVQKLADTPLDDATRALMAPLVATLTVVQEQLAAMDVEIGQIAKTDDIIKLLATAPGVALIVAATFVSVIDEANRFRNAHAVSAYLGLVPGETTTGGKQRLGSITKHGNTHARKMLVQSAWQILRAGKPEDPLHRWASDLVKTRGKKIAAVALARKLAGVLWAMWRDGTFYDPGSHAQESTRGLRASAQSQALRAEAMKRVAKKIKRRESTPSRATRAKTSRALPV

SEQ ID NO: 436279 - protein, 387 aa, unidentified
MVQINDLSRSLAAFDPISTLVVVVEMSKASWLVSGVVPGVERQPLKKLEPDATALLRLIERWRNEAVRAGRPIRRIALAYEAGRDGFWLARWLIARGIEAHVIHSASVAVSRERKRAKTDRLDAAMLMRVFLGWLRGERGHCGMVAIPTMEEEDARRPNRERESLVNERSRIVNRMKSALARLGIRGFKPHLRKAPERLAGLRTAEGTGLPANIIEEFRRDMARLALVREQISSIEKTRAERLERAPDTGPHAMMVRLLARVIGIGIETDMLVREILSRNLRDRRALARYAGLTGSPDESGLKSREKGLAKAGNARVRRGLIQLAWRFLMFQKDSALARWYRTRTEGPSGARKTTMIVALARKLLIALWRLVTTGEVPDGVELRPAA

SEQ ID NO: 436280 - protein, 373 aa, unidentified
MLIKIVRVAVITAFATFKQPYKDMKKFIIGIDFSKETVDASIVQKEQPETLIAYKKFRNNLKGVDGLIAWAKSKVAQDGEIIFCGENTGTYSTLFSDELTDRGFIIWIEHSMNIVRGMGDVRGKDDKTDSLRIASYAARFYDKMKPYVRPKDETRVLKTLLAKRDRLKSFLKAEITNTKENPLMLQDSNIASSINEFFKRLEESLRKELKELERMILDVVMSSSEYAKNFNILTSMKGIGLINAVALIVYTDNFTKFNFNHRKIATYWGVVPFKNESGTSVRRGTHVSPKCNSWLKALLTEATLCAIRYNSRIKAYHDRLMARGKAIGIVLNNCKNKMLKILVAMVRDSKIYSDMDVSKDPHTTTTTSSIVVC

SEQ ID NO: 436281 - protein, 444 aa, unidentified
MSDSLPTVTTEREWAAFAAIDWADQKHFWRLVPAGSQHAEQGELENTPEAVEAWATTLQQRFGGRPIALCLEQKRGAIVYMLTKYAHLVLFPVHPTTAARYRETFCTSGAKDDPSDTASLLDLLLRHPERLTPLQPDTTETRLLQFLVERRRQIVDEKTRQNNRLIDCLKLYFPQLLRWFDDVSGPLVGALLERWPGLEQLQRSHPGTLRKFFHQQNCRGEELIEERISAIYQAIPATRDAAVLEAGAITARGLVALLTTLRGNIAELDRRIAQLVAAHPDAALFDSLPGAGPALVPRLIVAFGTRRERYDNAYQMQCYSGIAPVKAASGNTQRVHIRRACPKFLRQTFHEFASHSIGQSEWARDYYQFQRDNHKSHQAAVRALAYKWIRIIFRCWKDGKPYDEQVYLQSLRRRRSLLGPALAGVTGPGWKTVAGFQKFSENPS

SEQ ID NO: 436282 - protein, 364 aa, unidentified
MLYVGLDVHTAATTLTIRNAEGDIIARDVIATTREAFRARFSRLRGRMRVVCEAGPLAGWVSVVLTTRAREVVICDPRQNALILRGAKTDRVDADKLSELLRLNALRRVFLGDEATRELRRLVWYFLSTQNDRRRNIHRLHSIFRSLGIGFKASAGRPEQVPLRRLRNRWSRFIVHALLEEIARLKVVIEAAREQLLEHAAQHPAFHLLQTIPYVGKMRAAELIAIVGVPHRFTSLRKFWAYAGLAVVRRSSSEHWLRRGRPVRKQVARGLHLNRNRHLRLKRIFHDIALFASFGRGEFRALYDKHIARGKEPSIARIALARKVASIVRAVWCSGCEYDPSRLQVGQQFGPSIDAAVRSRVARS

SEQ ID NO: 436283 - protein, 368 aa, unidentified
MIVPIMTYERSTLVNSEKYIGLDVHQATISVAVMDSKGKVVMESILETKAATILEFFAGLRGTLLVTFEEGTWAAWLYDLLKPHVAKLVVCNPRKNALLKHGNKSDRIDARKLADLLRLNDLEPVYHGETGVRMLRELARSYLTIVKDLSRVMNRLKALYRSWAIPGAGRDVYYTRHRSEWLGKIPEAGTRRRAEQLYLQLDMLQHLRQQARRELLAESRKHAITAKLRKIPSLGPIRSALAVALIQTPHRFRTKRQLWAYSGLALETRTSGEHRYVRGQLQRSKKQISIRGLNKDHNHDLKGLFKAAATRASVQPGPFQDFYQRSLAKGIKPTMVRLTLARKIAAITLTLWKKGENFDVEKLKSQAA

SEQ ID NO: 436284 - protein, 309 aa, unidentified
MEITVGIDVSKDRLDVHVLPSGEAFSISNDHVGMEELAQRLVAFCATAIGLEATGGYEQLAVATLAGAGLPIVVVNPAQVRAYANALGKRAKTDPIDAAVIAAFIAATKPELRPLRDAEARTLADLVTRRRQIVQMIVAEENRARTIGARQAQKSIKRLLAALRRELESLDADLDDHIRKSPLWRVREKLLSSVPGIGPTVARTMIAEMPELGSLDRRQIAALAGLAPWTRQSGTWRGKSFIGGGRSRVRAVLFMAALVAIRHNPVLKAFRDRLVQAGKPKIVAVVAVMRKLLTILNAIIRDQKPWQTA

SEQ ID NO: 436285 - protein, 318 aa, unidentified
MSSTCYVGVDVAKDSLEVAVAQGTTCRFPNSPRGVAQLVQYLQQQPASDYLVVVEATGGYERELLLQLQGAGVPVVQVNPRQARRFAQGVGYQAKTDRLDAQLLRLMGERLPLSVRPLPDEKRMQLQELLARRDQLAKALTAEANRLQQARCRQVQQSIRRVHTYLQKELQRVERQLDQALQQCPEYQEKLRLLRSVPGVGPQLARRLVVSCPELGQTTRREAASLVGVAPVARDSGRQRGKRCVAGGRASVRRVLYMAALVGARYNPVLRRLYQRLRSRGKPAKVALVACMRKLLVILNAILRDGQPWRSRLEPQNA

SEQ ID NO: 436286 - protein, 457 aa, unidentified
MSKRRKKAQSQSFNLQSLPKQLQHINLKAAGIDIGSERHMVAVPEGRDEVSVREFGAFTADLIALADWLQQCGVTTVAMESTGVYWIPLFELLERRGFEVKLVDARHVKNVTGRKSDILDCQWIQQLHTYGLLAGAFRPADELCVLRSYLRQREMLTQTASMHIQHMQKALQQMNLLLHNVVSDITGVTGMKIIKALLAGERDPQVLASHRDNKCHHDRATIAKSLVGNYRAEHLFALGQAVDLYEIYQTKISDCDEAIVKQVSTQPDVTDEPPPAEQKRTSARDRQRGGVNVRDLLFQKSGVDLFAIPGLAADTLLVLASEVGFDLSPWKTEKHFSSWLSLCPGTKISGGKVLSRRVKRNPNRAAQAFRMAAATLSRSQSALGAFYRRIKARSGGKQAITATAHKIARIYYALLTQGTTYVELGQQAYEQKYAARRLKHLMAQAKSLGFQLVPSQT

SEQ ID NO: 436287 - protein, 338 aa, unidentified
MAIVKIFVGLDYHQDSVQVCIMDELGKQLCNRSLRNDAPTILRVVECFGQVQAAAIEACCGAADLAQELVEMGWSISLAHPGFVARMKQNPDKTDYADAQLLADLLRVGYLPKVWLAPEPLRRLRRLVRHRQQLVDQRRGIKLRIRALLRENRLKSPQGVNAWTKAWMGWLRNEAALKEEDRWLMDEHLELLDFSTQKIDRTAKQLEQWADQDAMIQKLLSMPGVGLVTAVTMRAEIGQFDRFKNGKQLSRFCGVTPRNASSGQRQADAGLIRAGNPQLRRVLIELAHRLVCRIEGRWSKLAARMLATGKKKNIVVAAVANRYVRWLYHQMQPEALVV

SEQ ID NO: 436288 - protein, 332 aa, unidentified
MLVVGEWSRRRGGDLRRFYTKQHKMYCGIDLQARTLSICILSQEGEGMVHQHFTATPETFLKVLAPSRDDVVVAGACLFTWYWLADLCAREGIPFVLGPALSMQAIHGGTATNDRSEAQKVAVLLRGGMLPQASVSPAAMRATRDLLRRRLQLMRTRAEWLTPIQHTKRQDHLPEIGKKLADKANRAGGAARFPDPAVQKSLAVALALLDHDDRLRRDTALTSLKTAQPHDANPLYRLRTVPGLGESLRLGLLYEMHDLARFPRGQDCVSSCRLVKCAKEAAGQRSGTSGTTIGQASLKWAVSAAAVLCLRANPVGQKSLTRLENKHGQGKA

SEQ ID NO: 436289 - protein, 420 aa, unidentified
MHGERRWFVGIDWASQEHVVSLCDGQGKKIGQRNFAHGGTGLSDMIAWLLKMSGGEPSEIHVAIETPHGPIVEALLERGFNVYSINPKQLDRFRDRFTVAGAKDDSLDAYVLADSLRTDMHLFRKLTIAEPLIVELREWSRIDEELKVERVRLANRLRDQLWRYYPQMLELGDLDEDWMLDLWEAAPTPEKAARASKAAIERVLKKHRIRRFDAAQVLSALRRPALSVAQGTIEAAIAHIKVTIERLRLVNRQLADAELQLDRLCKKLAEPVANDGENVPGQRQEHRDATILDSLPGVGRTVLVTMLAEAPHALQRRDYHALRNLCGSAPVTRRSGKSCLVTRRRACNRRLSNATFYWAQTATQCDPTSKAKYQGLRARGHSLARALRSVVDRLFYVACAILEKGTLFDPSFADKNNAAA

SEQ ID NO: 436290 - protein, 462 aa, unidentified
MKLYLGGDVSKGYADWVVLSEKKQAVLDNFQLDDTYAGHCKLYAILEAYFGKHRDLEIYAAVESTGGYENNWFSTLKSYQKVFNLKVARVNPAGVNFNRRAGLKRNVTDAISALSIAEYLINHSGNIKYDQDDQWKSLCRHWNFVEMQKQQRVQTINQLETILYSANPTLMQYKKDNLPNWLLELIIQCPTAETLAKVRPEKLAKIPYLSLARAKTLVAEAKQSIASSTDKNAEILVSQIARQIKSFDQNIKTQMQLIERDLTCPEMELLKTFKGIDTISAIGLLLEIETIERFPTVKGFSCNFGLHPKFKQSGDKVIGVRMSKQGSKNMRKILFNIAKGAITYNPLITAVYEKKLSEGMSKMAAIGVCMHKILRIIYGMLKNKQAYNPLIDKQNCERSQDKQMEKQQQENANIDKSRRYQKFDIKAPISRKQTKKRREHDLSQCEITSQSTGSSCSSETKL

SEQ ID NO: 436291 - protein, 389 aa, unidentified
MHIQVVGIDVSKRFHVAWTDGRSFTFSHTLTGFKDLIQWLVESEGSAVYQFGMEPTGRFSKTLSKWLTDHGHQVVFVPGAYTKRAKWFLSNGSNKTDLVDAKVIAELVQQGRYLKTMGKDLAFTELRTLSDLHFRLVKMSVESQNRLHSLIDTVFPELSRFVCVKSKVALRILNAYHQPCEIVAAGWESFRKVAIICHGMNITEEKAQQIFHAAEESVGTGSETLSFELGVQLRLFSDIEQARADIEKQMVNWLHQVDYAEALMSVPGISALAAGLLLGQLGDLCKYPSAKHLVKAVGLNLVEQSSGKFLSRPRISKAGKGQLRNHLYRAALAVFANPKGPLHDWYKERTEKKKPGKIVLVAACRKLLRIAHAVARDNAEYKKLKGRIA

SEQ ID NO: 436292 - protein, 338 aa, unidentified
MKAYAGIDLHASNNYIGVINDQDRRLYSKRVPNRLDAILSAFEPFEDQLVGIVVESTYNWYWLVDGLQGAGYRVHLANPSAIKQYEGLKHTDDRWDSFWLAHMLRLNILPEGYIYPKEQRPVRDLLRRRLLFVKHRTAHILSLQSMVTRNVGSRMSCRAIKRLAESDADSLFDSANLVFAAKNNIAVISYLAEIIKSIEKQVMSEVKLRDEFKLLLTIPGVGNILALTIMLEVGDIGRFAKVGNYSSYCRCVRSERLSNGKKKDENNRKNGNKYLSWAYVEAANFAIRFCPKAKRFYQRKKAKTNGIVAVKALSNKLARASYYVMRDQVPYDASKLFD

SEQ ID NO: 436293 - protein, 422 aa, unidentified
MLAESHDEEQIIARVAALDIAKAELVCCVRVPSPAGGKRRLQEVATYSTMTQALTELANRLVEMRVQRVVMEATSSYWKPVFYLLEAHGLDPWLVNARDVKHLPGRPKTDVLDAVWLCKVAERQMLRPSFVPPWPIRRLPDLTRYRTDLVAARTAEKNRVEKLLEDACIKLSVVASDIFGVSGRAMLAALVAGERDPKVLAQLARARMRGKIDRLEQAFDGHFDDHHRFLLSRMLARIEGLDADIAAVDAQIDVQLAPFAEAAARLDEIPGIGPVAAAAIIAEIGVDMSRFPTAGHLCSWAKFAPGINSSAGKSKGSASSGHGNPYLARILGEAAVGTTKTNTFLAARYRRIARRRGQPRAVVAIGRSILVIIWHLLHDPDTRYHDLGSDHYARHVGPTAKKRSHIRQLEALGYTVTLTPAA

SEQ ID NO: 436294 - protein, 310 aa, unidentified
MEIIAVGIDVSKDRLDVAVRPSGEVFWVERNAAGIDGLVVRLRELAPHIIALEATGGFETVVTAGLASAGLPVVVVNPGQVRAFAKALGQRAKTDPIDAAVIAHFAEATKPEVRPLPDEATQMLADLVARRRQLIEMIVAERQRERRTTRPHLKKSMARLIKTLEKELSSLDNDIDDAVCGSPAWREKEDLLRTVPSVGPAIARTLIAELPELGRLNRKEIAALAGLAPFTRQSGQWRGKSFIGGGRTVVRTVLFMGALVAKRHNPVLKVFFDRLVAAGKPKMVALIAVARKLLVILNAIIRDNRPWQNA

SEQ ID NO: 436295 - protein, 358 aa, unidentified
MGVMEGRERRIVGGVDTHKDLHVAAVVDEQDQVIETRCFATTRQGYRQMLTWMRSFGELQRIGIESTGSYGAGLLRFMPQAKVPVLEVTTPDRQDRRRRGKNDDLDAQNAAHAAFAGQRTVTPRSRDGMIESLRVLMACRKTAVSARRVALQMIHNTIVCAPDDLRDQLRSLTRMQLVRTLAAWRPDLTAYRDLDAYRISLKSLARRYLELHDEITDLDAMITAIVDELAPNLVARNSIGHIGAAQLLLTAGDNPERLQSEASFASLCGVSPVPASSGKIVRHRLNRGGDRAANSALHIIAIGRLRTDQRTRDYIARRMAEGHSKLDAIRALKRYLAREVFTLITQRRREINATRIAA

SEQ ID NO: 436296 - protein, 333 aa, unidentified
MTNYSNRDGKVHVGIDVSKRTLDVCILREDALKGESFVVTNDQEGVEEILSRLAEKPGASVELVVMEATGRYERLAATMLAASSISVAIVNPRQARDFAKAIGQLAKTDKIDAQILSRFARAVEPKASVIPDEQAIALQGILARRRQLIEMLVSEGNRLKMTSLKALAKRIRAHVQWLEKEIERVDGDLDRAIEDNAAFKANEALLRSVPGVSRVLSRTLLAELPELGTISHRRLCALVGVAPFNRDSGRGRGKREVWGGRAPVRAPVRATLYMAALVATRHNPHIKEFYGRLLDAGKPKKVALVACMRKLLSIPGALMRDGAIWRCPHALTP

SEQ ID NO: 436297 - protein, 338 aa, unidentified
MDHYVGIDLHSTNSYTAIIDHDNRRVFKKKTKNDLGLVIEALKPYQEQIKGIVVESTYNWYWLVDGLIEEGYTVHLANPSAIKQYEGLKHADDVTDAFHLANLLRLGILPEGYIYPKEERPVRDLLRKRLQLVQQRTAQILSFQNLVARHLGKSLNVNAVKRLSEDDVAHLFHKEHVVVSGKVSIATILFLSARIQQLEKMVHRVAKLKDEYKLLMTVPGIWRILALTIMYETGPIERFAKVGNYASYCRCVGSKRISNEKLKGKGNRKNGNKHLSRAYMEAANAALQHYDYVKRYYQRKMARTNIVVARKAIAHKLARACYYIIRDQKEFDPTRVFV

SEQ ID NO: 436298 - protein, 341 aa, unidentified
MNHYAGIDVSLECSSMCVVDASGKIVREDVGASEPEALIAWFGSLGFEIARIGLEAGPTSQWLYAAMRDAGLPVELLETRHVRDAFKAMPVKTDRKDAQGIAQLMRLGWFRPVHCKSIAAQETRAILTARKLVQSKLHDLEMSLRGTLRGFGLKVGRTTPNRFAARINELVEGHPTLQFIATSLLAAHAVLLREFKGFEKRVRMMARNNERTRLLMSTPGVGAIVAVTYASAIDDPGRFTSSKQVGAHFGMTPKRYQSGQTDITGRISKIGDRSVRTALYEAAHVILTKPVKGSALKSWAARLAKRVGMNKAKVALARKLAVIMHRMLVDRTPFNPAAAAA

SEQ ID NO: 436299 - protein, 350 aa, unidentified
MVMIGTDSHKRTHTVVAVDDVGRRLATKTVRTNSDGHLDLVRWSTQFGQVVFALEDCRHLTRRLEADLLTAGCRVVRVPTRLMAAERRGSREPGKSDPIDAEAVAFAALRYLDLPVAELDGPAREVKLLSDHRRDLVVQRTRIASQVRWFLHELDPDLVVPSRGLRRHCVVAELQMKLASFDGVVARLAGELLIRCAELNRQISLLEAELRSLVQTLAPRLLAIPGCGVLSAAVIIGETAGVHRFRDKDTYARFTGTAPVPVWSGASAGKVRLNRGGNRAMNCALHMIAVTQARGIGPGHAYLARQAARGKDKTAALRLLRRRLSDVVFSALRADRPAAAADPISVAKAA

SEQ ID NO: 436300 - protein, 311 aa, unidentified
MTMARNCIGVDVSKDWMDVHDPADGRTARIASQRRDLRRFARQAAGSLVVFEASGGYERALIDALAAAGVDHVRVNPRRAREFARASGRLAKTDRIDAAMLAEMGRALELEPDAPPDPVRARLAELVARRDALDAQIKAERQRLAQARDAFVRRDIAGLLKVLMRRRTRLEDEIAAQIRSDPELSRTERRVRTMTGLAAKSASGLIARLPELGRLDRRAIASLAGLAPHARDSGLFRGRRKIWGGRPQPRRILFIAAWIASRHDQRLRDFRTRLTRAGKPFKVAITAVARKMLTILNAMIRDHADYRKLRA

SEQ ID NO: 436301 - protein, 340 aa, unidentified
METKGKKQVWVGVDVSKETFFAAVDVLDEDGSKRPVNSLSANEFELTETGSGSFLKWLSQSFAEYNFSIVMESTGCYSKKLKGFLREKQNDLPISILNGRLSSNFVKSLGLPHKTDKSDAQALARFGTERSPKAALADDPDRESLKELSRERSALLKARAALANRSDSLFDAFTKEINDRAIAALSLQVKAIEKEMERCIKANAEMRHEAELMKTVPGVASTSAYGFLAELGSLKQYSSRKLSSMSGLLPHIFISGTSVNKTCLSKRGSARVRQLLYLDCMTAVNKIPELNSQYQNLVSRGKTKMTARCACTRKLLLIVRAVVVEDRPYEKNPKKVAKTA

SEQ ID NO: 436302 - protein, 341 aa, unidentified
MGIVGALDLHRSQITFHWQDLATGEVHRGRIVPGAREPLRAWLAGFHGADAHFALEATTGWRFVVEELERVGCTPHLGDPAEISARRGPKRRAKTDRADCEHMTALLLEARLPECWIPPPDILEARTLSRLRKALVDERRQWMQRIHAQLYHQGAPAAKSIATAAGRARIIDTELSSAGRRVLAVGLAALEHIEAEVSTLDRDLAIFARRHPGCRALRTLYGIGPITSVAILTELGDCRRFSSSDHAVRYAGLDVTVYESNDRRAPGHLSRQGPAVLRWALYEAAQCAARPASPDHAYFAALAGRLGHNRACLSMARKLCRRAHHLLRELGDDVFLPARAA

SEQ ID NO: 436303 - protein, 362 aa, unidentified
MEMTIAKVGLDVHAAQTQAAVLDPATGEVALRRLRVPPLGVLEFLAGLGPRVCAVYEAGPSGFALARGAAERGLDVRVVAPGLIPRKAGDRVKTDRRDAVRLARLLAAGELTFVRVPSVEEERFRDLVRAREDLRGDLMRARHRLSNFLRRRELRFPGPAGAWTREHRRWLAKLRFDDLASETTFLDYLGAVETLPHRCAALEATLAELATACPFATTIARLRCFRGIDTLSAAGICAEVGDFRRFEHPRLLSGYLGLVPSERTSDQQRRQGAITKAGPPHARRLLVEAAHHYRHQPRLDERLARRQAGQDGRVCAISWRAQRRLHSRWRALALTRGKPRGIVAVACARELATFLWEAAVLE

SEQ ID NO: 436304 - protein, 482 aa, unidentified
MKAKPPEKIQKTTNPSTRGHWNEMNRKQRREMMRKIQSEDISLEVVHPDAAGIDIGNESHYVAVAPSRDKQPVRCFGCTTGELKAMADWLKQCGIRTVAMQSTGVYWIAVYDILEQAGLEVYLVNARETKNLPGRKSDVQESQWLMKLHTYGLLRNSFRPSQEIRTMRTYWRQRNDLVQSAGRHVQRMQKALTQMNIQLANVLSDVSGVTGQAIIKAILGGQRDPHKLAEFRNPRVRASEEEIARSLEGHWEEDLLFVLQQEQDGYEFCQKQMAECDRQLNHYLEQREDRSQGAPLPEEKRKGRRKKKSGNKPQFDLRTGLFRMSGTDLTRIDSIDVMTATTILSEAGWDMSKWETEDHFVSWLRLCPDNRISGNRVIGKGRLPTNNRMTIALKMAASALRLSDTYLGAQFRRFRTRLGAPVAIKAMAAKLARLVYRMLRYGMQYVDKGAATYQEQHRQLQIKQLKWKAATLGYQLIGVPAA

SEQ ID NO: 436305 - protein, 326 aa, unidentified
MNLPAVVLGVDIAKLKFDVCLIKENQKVKHKVFANTRYGFEQLAAWLNSHQVGSLHICLEATGSYGEALALFLHEAGNRVSVVNPAAVKAFAASRLTRTKTDKVDAELIARFCLAQQPEAWRPPAPEVQQLQALVRRLESLIEMRVAEENRLSSGITVNAVRQSLEEHIKYLVEQIKQTEQMIREHINNHPDLKEQIALLDSIPGIGQTTAALLLAEIVNIKQYKSARQVAAYAGLVPRERRSGSSVRGRVQLSKIGNARLRKALYFPAITALRCSDFFKAWADGLQARGKCKMAIIGAAMRKLIHLAFGVLKTGKPFDPNWAKTA

SEQ ID NO: 436306 - protein, 331 aa, unidentified
MFPVGIDVSKNTLDLCMLYDGIKGRIKTRNIQNNRHSVENILRWLRLQHCGPEDVHVVMEATGVYHELLATELHDAGFRVSLANPHRSREFARGMGIMTKTDKVDAYMLACYAFLKKPHRWEPPAPEIRYLGALLRRRDVLLGDALREENRLEKHLSTDTPADIISSCRRMAQLLREEVSNIERQIKAHIKASPALRRDYTLLTSIKSVGPQLGMHMLVVLRSHNFASAEQAAAFLGVVPIEKRSGTSVRSRPRMSKIGPPQLRAKLYMSALCGKIYNKRMRNIYDEMCLRGKPKMVAIGALMRKLVHWCYGVLKTGTVFNDEGLKQVLST

SEQ ID NO: 436307 - protein, 347 aa, unidentified
MQFYTHQRQFYCGIDLHATCMFVCVLDDRGNILLHKNFLCKDANLFLQAIEPYKQGLVVGCESTFNWYWLADLLEEKNIEFILGHALYMKSIYIAKVKSDSIDSEKIARLIRGGTFPLAHAYPKEYRASRDLLRRRAYLVRRRAEALTHIQQIHHQHNQGVTTNIRYKSNRQGLGESLPSEHAKLMVSIDLEMIDAYTIQIKRIEDELVRSVKLTHFQSYYRLTTIPGVGAMISLTMIHEIETIQRFAGVGKFLSYCRLVKGSHSSAGKKLGAPGGKIGNPYLRWAFGEAIQLLKRESKEVLEYARRLEKKHGKARATNILAVKLGRSVYYMLRDDRAFDLNKFLQH

SEQ ID NO: 436308 - protein, 322 aa, unidentified
MNIYTDYLGIDISKETFDVLDKSGKHSQYSNDPKGFSKFKKKIKKGSLCVMEVTGIYHLRLATFLHSKDIAVSVVNPLRIKRFSQMHLRRNKTDKADAQIICKFGQEQNLDLWKPAPQEIEQAKDMVQIIEQYIEFRAGLKNKADALKSKSAESILIDLVNEQIDNITESINNLQKELDGLIKIYNPVLLRNLTSIVGIGQRTASLLIIATEGFTSFDNAKQVSSYFGLAPTELSSGTSINGKRKISKMGNPLVRKKLYMCSLQASRYNKTCMDLYQRLLAKGKSKKLALIAVANKLVKIIFAIAKSGQPYDREYKSYIALN

SEQ ID NO: 436309 - protein, 370 aa, unidentified
MGEYSGAFVGFDTSKTKHAVAIAEGGRGGEVRFLGEIASSPARVERLVGKLASRYDKLHFCYEAGPTGYGLYRQIRELGHDCTVVAPSLIPKRPGERIKTNRRDAVTLARLLRAGELTAVWVPDAVHEAVRDLVRARAAAAQDLRGKRQQLLSFLLRHGRIFSGRQHWTLAHRRWLAEQSFAHPAQQVVFQDAVEAIAEALARLQRLEQQLVAIVPSWSMAPVVEAYQAMRGASFLMAVTFAAEIGDVRRFDNPRQLMAFLGLVPGERSTGETIRRAGLTLAGNRHARRVLVEAAWSYRHPARVSPTLRARLEGLPKPVRDTAWKAQVRLCARYRRLSAAGKKLPVVIAAIAREMAAFLWAIVRHVAPAV

SEQ ID NO: 436310 - protein, 329 aa, unidentified
MSDQPQASDIIGADVSSREVVAAWARSNKPQQTIANNRKAILAWLKQLPANAVIGMEATGHYHHLLADLAVMRGHTVYVINPKHLAAYAKGVGQRGKTDPLDAQVIARYVDRERDQLHPYVVPSPLQRTLRNLLSQRAGMVRHSVAIRQNLEATAAKGDASLKRARQKVLHSLAGLIAEIDAELKRAVAAHTALETKRKQLQTITGIGFLNSMALTHRFDRTPFANSDAVVAAYGMDPRPKDSGKHVGKRRLTKQGNPEDRRLIYLAAQSASKTKLFKPLYKSLLAKGFATTEAILILARKLLRIAFAVWTSGKPFDPTKIGINGCKKP

SEQ ID NO: 436311 - protein, 333 aa, unidentified
MEGTSLQSAATPAAARPLAFIGIDLAKQSFQAAVDADSPAARFNASFTYNAAGIAALLERLKSLEVQLIVMEATGGLERKLAAELSEAGYAVAVINPRQARDFAKAIGKLAKTDKVDADVLAQLARILKPAARPLPDAEQIRLKELVARRRQLVHMRTAELNRQQQASLKEVGNSIKTHLKMLDREIAKIEKRIADLIDSNSDWKKKADLMDSVKGIGPDTAHAILADMPEIGTISKRQVASLAGLSPFAFESGAFKGQSKIWGGRAAVRCALYMGTLSATQCNPAIKKFYNDLVARGKKPMVALTACMRKLLTILNAVVRTGVKWNPEMAHV

SEQ ID NO: 436312 - protein, 356 aa, unidentified
MKYYIGVDLHRQFSQFAVLDEIGQTVGQFRAQNDKIELSDKLRIYPPQDTKVVVEASRGTLWFVDFLESLGYQWLVGHPLKIKAIASARIKNDKIDAKVLAHLLRTDLVPAAYIPPAPYREWRDIIRYRISLNHSRKRLKNKIHAVLIKYNVIHGFSNLFGKQGRLFLKNNLENKMPGYSRIIILNYLALIENFDQKMKEAEQRIVAIAKDIPEAKLLITIPGIKHFTALLILGEVGDIRRFPSPKKLCSYAGITPSVHQSANIQRYGSITKQGSSHLRWALIEAAQKISRYPKFKKLAYRLKIKKGWNTAKVAIARKLLTTIYYMLKYQQPYFPDGLDCIRFRKESIKGFINRHR

SEQ ID NO: 436313 - protein, 355 aa, unidentified
MKLKNPENVGEVFVIGVDIGKDTFHLVGFDDAGQRVLRKKIKRLALQSTFEKFPRCVVGMEACMSAHFVSRMLRKLGFEPRIIPAIYVKPFNKGQKNDYNDAEAIAEAAMRPNLRTVTEKSQDQLDLQAMHRVRSRLVARRTATINQIRAFLIEQGITVRSGRHRLQSSFEAILENRRDEISPRMRSTLLGLYGDWLWVDERIKVISSEIEEISKSEESSANIMTIPGIGPLISTAIVAAIGKGEVFDRGRDFAAWLGLVPRQFSTGGRTILGRISKRGNGYLRMLLVQAANVILMRPHRWDALGLGPWLRGVKARMPHNKAAVALANKLARTAWSILRHGTTYTVQGDEALGGI

SEQ ID NO: 436314 - protein, 436 aa, unidentified
MLQSIPYLSVGLDAGADFTWMSIMLPNGILTGKPFKIIHSDPASRELAVTKIKEAQEAYSLESRCFLESTGIYHIPLLCFLRDKGFDCSVINPIITKNSTNMNVRKLHNDKFDSKKAAKVGLDASLKTSIIPDDEVIDLRNLVRDYYYFKDLQSAIVLKLHAELKVSFPAYQKVFSKITTQTSLKLLEAYPLAADMLAAPKDRIVETIRKTARFGEKYALAKYDAICTAAKDAAVFGRALPSNALRIRLYIKTYREYQEHLDGILEELHKAVDKLEGTPAYDRIALLQSLRGVGFLSAVVLIAEMGSFDLFSSPKKLYAYFGLDPAVKQSGKFNGDKVHMSKRGSSLARRILHMVALNNLKIDKGTKTPVNPVIHSYYANKCKSKKKNVAVGAVMHKICNIIFAMLRDHKPFKIITPQEHCEQYLAAHPGKTHNAA

SEQ ID NO: 436315 - protein, 417 aa, unidentified
MKKHNNSAKKSEPTSKRAKSRGPVQRDTKEVLAELVGKLREKLDPKVGAASAGEKNQRGELRPNLDRLTVGVDLGDQWSHYCILGLEGETLAEGQLRTTQPDVAEFFRALNAARVAMEVGTHSAWVREVICSYGHEVLVANPRLMEGSKRRKRKNDRIDANKLARLGRVDPESLHPIEHRSAEVRQDLVMLRARDALVAARTELINATRGLVKSMGARLPKCSSPSFAQKVEEAVPAQVGEALLPLVRMTAALSDYINGYDEKIEKLASEKYGHTALLRQVKGVGPITALAYVLTLENPERFVKSRDVGPYLGLVPKQEDSGESQPQLGISKSGDTMLRKLLVGSAHYILGPFGPDTDLRRYGLRLCERGGKNAKKRAAVAVARKLAVLLHCLWVSGEVYEPLRQGMSARIAPAVAA

SEQ ID NO: 436316 - protein, 401 aa, unidentified
MIRKLFAGIDISSNDAVLCCLDQDGQQLGPSRKYSNDFEGANELFEAISAFEAEEVHVGFEATSVYGTHLRDFLLSTSGWSIYEINPSLVAGFKQSFPKRPKTDHFDSWLIAERVRFGRLEPYSHQRKLTEPLLQLTRHRQHLTELVTAEQNRAGNLIFLKFSNYRKDNPFSNKFGKASLALLREFSPDELASMDIQDLVMFIANNGNNRLKDIENIAQELKSMAKKAYRLNPKMKDSIDITLTMTLHNIDFFKSQIKKLDKAIAQEFKAIPQTLTTVRGIGPVWGAGIIAEIGDISRFRNEAALAQYAGLTWSRYQSGDFDAEDTRLTKNGNRYLRYYLVEAANSLRVHNEEYKAYYQNKYKEVTKHQHKRALVLTARKFVRLVYALLSKGQIYKPGVMN

SEQ ID NO: 436317 - protein, 338 aa, unidentified
MNITTIGLDIAKSVFHFYAINQTGKFVNKKQFKRHQLLDAMANIPPCEIVMEACGGANYWARQFIKLGHQVKLIAPQYVKPYVKGNKNDYNDAEAIAEASQRSNMRFVPIKSVEQQDIQNFHRQRELIKKSRNALVNQVRGLLAEYGIVINKGVAAVRQSLPEILEDADNGLSDLSRECFSELLDALRVLDLDFKRCDQRIKSLTKNNEVCQRLNDILGIGSLTASATYAAVGEGKDFVNGRHFSAWLGLVPRQHSSGGKTVLLGISKRGNDYLRTLYIHGARAVLRHSATKTDRFSLWAQAVLARRGHNKACVAVANKMARMAWVIMAKGETYRLAV

SEQ ID NO: 436318 - protein, 392 aa, unidentified
MRERITEMQMMIEGQSHFQPFGLSYWGFEDLNKGVGSMTASYEYHIGVDYRKSYSHLVVQDSSGKTLRSGRVKNDRQSLGGFLERYRENSHAVVEATRNWMVMYDWLDDICDDVVLAHPLKVKAIADAKIKTDKIDATVLAHLLRADLVPEAWAPSERSRDLRVALRERMFYVRLRTMTKNRIVTVFDRYPEQTAQLKKLGDLFGKAGRVQLAQVNVSEIDRIQIDRGLAFIGDIDMRIKQSEATIRAMTKANANVKLLKTIPGIGEFFARLIDAEIDDISRFRHSKKLAAYAGLVPSTYSSGGKTFHGKIIKQGNKWLRWAFVEAVTPAIASDPQLRAQYEHLKIKGINKARVAIARKLLTITFQILRDQRAYEPRGTATMEGASTISRLS

SEQ ID NO: 436319 - protein, 316 aa, unidentified
MSDQSAEVFVGIDVSKHSLDVCIEPAGQGFHVEYDDAGLGKVLERLGAAGPALIVIEATGGFETRLASELAARNLPVAVINPRQARDFAKASGQLAKTDRVDAAVLCAFARAIRPEARPPKNADTRELEDLVNRRRQLVGMRVQERLRMNSTASRAVRKDINEHILWIEQRIGEVDSGLKSRLRGSPLWCPKVALLETIPGIGPITTVTLMAKCPELGTLNRRQIAKLVGLAPLANDSGLHRGRRFVWGGRGEIREVLYMATVTAIRCNPVIKAFAQKLRQTHKPAKVVIVACMRKLLTIMNIMIKNMTPWNPQVA

SEQ ID NO: 436320 - protein, 349 aa, unidentified
MDATTVAVDLAKDVFQVALANRAGRIIGRQRLTRRQFERFLNEVVVDTEIIMESCGTAHYWGRRAQARGLRVRLLPVQYVRPYVRRNKTDRTDSEALLEAARCAEIHPVPVKTVEQQTVQALHRVRTQWQTGRVARINTLRGLLREHGHSIPVGARTVLRRVTAILEDPATDLPEVLRHALALLVDEVRALEARIADVDRQLKHIAAAHPVASRLQTIPGVGVLTATGLIGAVGHIHAFRRGREFASWLGLTPRESSTGGRRYLGRISKRGDVHLRSLLAHGARAVLRTALRRAPDQLTRLHEWAVTTAARRGRNKATIAVANKLARIVWAVWRTEDIFHARPRLTAAA

SEQ ID NO: 436321 - protein, 384 aa, unidentified
MNPDHADAPAACEYATVFVAFELSKSKWKLGVIVPGSRKMSRYTVAGGDLTALAHFFAAVRAKVARAGKPVRLLSCYEAGFDGHWLHRWLADRGVINHEIDPSSIAVNRRMRRVKTDRIDLDLLMRAFLAHLRGEPRALSVVRVPTAEDEDRKRRTRERERLIKERTAHTNRIKGLLHAQGIRDVMPLKPGFIAALDGLYTGDGRALPPQLKDEIRREHERLSLVCQQIKRVEAQNQAVHRTPAPASVEAKVVQLATLKGIGPVFAQVLGNEVFYRRFANRREVGSYLGLTGTPFDSGNSRREQGISKAGNSRARATAIELAWLWLRHQPQSELSRWFHARVGDLIGRMRRISIVALARKLMVALWRYLETGLIPAGAVLRPSL

SEQ ID NO: 436322 - protein, 352 aa, unidentified
MKCKSPEDIAVIGVDIGKETFHLVGFDHAGERVLRKKIKRLALKPTFEKFPRCVIGMEACMSAQFVSRMLRRLGFEPRIIPAIYVKPFNKGQKNDYNDAEAIAEAAMRPNLRTVTEKSQEQLDLQALHRVRSRLVARRTATINQIRAFLIEQGITVRSGRHALQSSFEAILENRRDEISSRMRAILMGLYGDWLWVDERIKAISSEIEEISRSEENSANIMTIPGIGPLISTAIVAAIGKGEVFDRGRDFAAWVGLVPRQFSTGGRTILGRISKRGNGYLRILLVQAANVILMRPHRWDSLGFGPWLRGVVARMSHNKAAVALANKLARTAWSVLRYGSKYEAERDEALAAI

SEQ ID NO: 436323 - protein, 341 aa, unidentified
MYYVGLDVHMRKTSVCILDDNGKRVKQFEVRGPRREVIPRLMELDGPFAVCFEASCGYGYLHGLLWKIAKRVVVAHPGQLRLIFRSKRKNDRLDAEKLAKLLFLGEVPTVYVPSANVRAWRALIEYRSRLIAKRTRTKNTLRALLRGLGIEVPAKLGLWTKLGRTWLASLQFDNELHTLQRDMLLDELLMFNDQIRRLERQLHVYSQHNPAIILLRSIPGVGPRTSEAIAAYIDDPDRFHSSKSIGGYLGLVPSQDQSGSVNRLGHITREGPATVRRLLTEAAWQAVRRSPRVRAYFERIAKGAPDRRKIALVATAHYLARVMLAMLKRGEFWQEELTMAA

SEQ ID NO: 436324 - protein, 376 aa, unidentified
MKEKLRFLGLDVHAETIAVAVAEPNGEVRSLGMIANREDSIRKFIRKLDSPEHLRACYEAGPTGFVLYWQLTQLGVKCDVVAPSLVPKKPGDRVKTDRRDALKLARSHRSDDLTAVWVPDEGSEALRDLVRAREAAKQDQLRAKHRLTKFLLRTGQRPPLGVKAWTEKYVEWVQQVRYTHPAQEATLLDCLNEVQHMEERVKRLEQSIVEVIQLAPAPMQQVVRGLQALRGIAHISAVTIVVELGNITSRFESARDLMGYSGAFPSEDSTGKRIRRGGITKSGNAHLRRIVVESAWSYRHRPAIGARLRRRQEGLPAEITEIAWKAQNRLHKRYMTLMARGKDQRKTMTAVARELLGFIWAIGIKAEAACKQQMAA

SEQ ID NO: 436325 - protein, 363 aa, unidentified
MTIAMREQRNEISFRGQKIYVGIDVHLKSWSVTVLSETSVLKKFSQRPSPEALHGFLTRSYPGAEYRSVYEAGFCGFWIHERLTALGIDNIVVNPADVPTKSSEKLRKSDAVDSGKLARGLRANELKGIYTPDSVSLEMRSLIRLKNSITKDTTRQKNRIKSQLRYLGIGIPQEFLEPFSNWSKRFFAWLKEVETLTPSGRQALDIQIRHWEELRRQKLEMTRALRTLAKTDRFREPLRLIMSIPGFGQATGMAFLSEICDITRFRNAEQLAAYIGMIPMCHSSGEKDGTGDITLRKHAVMRCNLIEAAWVAVRQDPAMNLFFTEQCKRMPKSKAIVKVARKLVNRLYFVLKHQTEYVNSVVS

SEQ ID NO: 436326 - protein, 354 aa, unidentified
MTVYVGVDFHARQQTVRYCDSADGEVHQCELQHKGDQVREFYAQFQGEVIVGLEASGYSAWFEELLESMGYEVWLGNPAEIRRKAPRRQKNDRRDADLILDLMLKGDFPRLHRFSAESRMVLRQLRYRHKLVKVRTIAKNSLQAISLGAGGGSQPRNLLSQRGQERLRGLALPPVLGQQREEWLQMVTQLDKRIATLEATLEKTAASDEQIKLLRTHPGIGLLTGLVVRHTIMPVPRFSTTRKAVAYAGLDPVEDSSGSRTRLGSISKEGSRLLRFLLNEAGQTACRRDPDLKRFYQRLVHRRNRQKAKVAVARKLLVRSFIMLRDQIDYAEFVRRGVAARSARKTHRPSMPDL

SEQ ID NO: 436327 - protein, 263 aa, unidentified
MTLYAGIDLHSTNSFLAIRDQDGKRIFQKKLKNCPEVILSTLEPYKNDLDQIAVESTYNWYWLVDLLMDEQYDVKLANPSAIQQYEGLKHSDDKHDAFWLAEMLRLGILPTGFIYQKETRPIRDLLRKRSHLVRLRTSLILSLQNILLRSQGNSLSVQKIKQKTHNHVVDRLQEEPEDLALSGQVSKDSIDFLSQQINQIELTVKNTLKSDMAYKFLHTVPGIGSILALTVTLETGPVSRFPKVGDFTSYCRKAPSKWSSNPS

SEQ ID NO: 436328 - protein, 328 aa, unidentified
MNNLHFCVGIDVGKDELVVSVEQGKPRVFGTSMSEIKRLENWVLKQAGERQVHIGMEATGVYSRGVAITLSGCEQFTVSVINPAQIKAFGRAMLKRTKTDQVDAGVIREFVRSQSPSAWTPPQPVREQLAALVAQSDAIQQEIQQWKNRQHAQQHHGNIPSTLTRSTATIIRSLERERQRLDQAIHQLCETDTALTKDMALLTTISGVATRSAAQILAYGGDSLISRSRRQLDAHAGLVPAERQSGTSVRGKSHLAKQGNARLRRALYMPTLVAVQFNPLLKRFYQRLLEKGKVKKVALTACMRKLLNIIRAMLIKRTPFNPNYQPLT

SEQ ID NO: 436329 - protein, 341 aa, unidentified
MSDYSYFCGIDLAKNHFSLHAVDQNGKVILHKSVTRSKLLTTIANMPLMRIGVEACGGAHYWARALNKLGHDARIMAVKYVIPYRTKGKNDLNDAVAICEAVQRPSTRFVPVKSPEQQAILSVHRMREHWVRERTALMNRMRALLSEFGLIIPVGRSSLMKHVPLILEDAENELPHLARTVIADAYHHLGELNQRIADTEQVFDSFAKVSTNVQRVMKVRGIGPQTATAILASIGNGSQFDKSRDFSAWLGLVPKQYSTGGKPRLGRITKHGDKYLRTLLVHGARTVIANLGDKQDKLSQWCRGVLQRRGMNRAIVALAAKNARIIWSLLHNQTEYENYAA

SEQ ID NO: 436330 - protein, 470 aa, unidentified
MSSKKPIETKVNERIPRRKKRGLRQQDRPVVEPNAAGIDVGAREMYVAIPPDRDSEPVRVFKTFTADLECLVDWLVARGITTVAMESTGVYWIPLYQMLEDRGVRACLVNARHMKNVPGRRTDWHECQWLQYLHAAGLLRAAFRPEQEVCGVRTLLRHRNELVRMAVQHVQHMQKALTQMNVHIHHVISDLTGLTGLAIVDAILSGERDAAKLAELRHRSIQADEETIRKSLEGDWREEHLFTLKQSRQMYIAYRNHIEACDKKIAKLIGGFEPQVDIELQPPPAHAGPSRKRRTKRTGDFRFEVRTEAYKLFGLDVTRIPGLNELAIPIFSEVGRDLAARFPTAGHFASWLGLCPDNDKSGGQVLWTGVRRINNRAAQMFRMAASSLHHNRSPLGDFLRRMKAKLGPAAGITATAHKIAIIFYTLVTKQIEYDDSIWATRDEHRQKRFEQKLKRQARQLGYELVPVQPV

SEQ ID NO: 436331 - protein, 365 aa, unidentified
MASVAQLAPIHLGLDVHRDTISVGILAPGREVPVVERIAHDEASIRRLVGRLGDPRRLRACYEAGPTGYELARLLDRMGIGCEVIAPSLIPTAPGDRIKTDTRDCRRLARLHRAGELVAIRIPTPAEEAVRDLCRTRADMVEDLTRARNRLGKFLLRHGRVWRGGSAWTHRHEAWLGGQRFDEPALGTTYVHYRAVVATRHAQLDAVEVDLATWLDRPPFADQVARLAAYRGVTRLGGLTLAAEVGDWRRFARAAQFMGFCGLVPSEYSSGHSVHRGRLTKAGNAHLRAQLVESAWTYRHRPYVGRAIAGRQLGLDPEVVARAWAAQLRLSARFRALAARKNTKSIVAAAIARELAGFLWAEMVA

SEQ ID NO: 436332 - protein, 390 aa, unidentified
MYIVGIDIAKRFHEAAIIDSSGKIVVKRIRFANSHAGFLKLMDAVRKLDAPAEFGMEATGHYWLPLYAHLRQDGQTVHVINPLQSDALRSMFIRQTKNDTIDALIVAEVIRFGRYCETQVAPENIVALREICRQRFFIVDTASDFKRKIIALLDQTFPEYEKLFSDTFGKSSVELLANYTTPEEILAVDTQTLADLLSKASCGRFGLDKATEIQQSAKNSFGIVLASSSFALIIRQYLEQLKSLETSIVAFDEEIARIMATFDTKLETITGIGKTLAAVIFSEIGGDIKRFSSVPKLVAYAGLYPKSRQSGESKTDGRMSKRGSPYLRRAVWLAANVAAFKDPAISTFYQKKRSEGKDHLTAIGHVCHKILAIIFAVLRDNKSYVPASAS

SEQ ID NO: 436333 - protein, 369 aa, unidentified
MENRSMFVGLDVHKDTIDVSIADGGRAGEVRHYGVIASDVEPLEKVRRALRAPGRVLHFVYEAGPCGFGIYRHLTGRGEDCVVVSPSMIPKRSGDRVKTDRRDSQMLARLHRAGELRAIYVPDDTDEAMRDLVRAREDAVAVGIQAKYRVKAFLLRQGRRYPGRDGWTLAYRRWLADLSFPSTPQHVALQEYRDTIDETERRLERLTEQLRQLVPTWRWAPVVAALQALRGISFITAVGLVAELGDLRRFRQPRELMAYLGLVPSEHSSGPSVRRGGITKAGNPHVRRLLAEAAWAYQGIPRIGRQHLYRQEALPKVVCDIAWTAQLRLTARFRRLVARGKAKPKVATAVARELTGFIWAIACEVTPAP

SEQ ID NO: 436334 - protein, 413 aa, unidentified
MLKIVYPICCGMDVHKSFVVACIASTNDHGVTTYKSRRFSTFTGDLHRCAAWLVENNCKDVCMESTGKYWIPIYNILEHTCNIVLAHPKYVKAIRGKKTDKRDAKWIADIFKHDLVAGSFIPPADIRQLRDLVRYRWKLTNFTTGEKNRAQNCLTVSNFKLDDVFSDVFGKAASAITTRILENPTEKITDVSGFRTKGMKATNEQVLAAVDGEMCEEQAEKLRIIRSHMDSLELCKANLESLILTTAEKYLPQLNLVMTVPGIQSFAAIGIISEIGVDMSVFPTSKHLCSWAGLTPQNNESAGKKKTTRISRAGAYIKPLLVQCALCAIRAKRFPEVRNRYLALKKRRGHKKAIVAIARMLLTAIYNILKKNEPYNAELYRCCNTPPEHRAVSVEEAIFILQRQGYLVTPSAT

SEQ ID NO: 436335 - protein, 343 aa, unidentified
MRSTKKSVMQVYGIDLSKEKFEANFIDKKGQERSKEVKNKVVAISKFLSSVPEGAILCAEYTGVYGDLLVYLSNQEQIPIALVPGYTIKHSLGLVRGKSDPLDSRRIREYGERFKDKLVFTEYDSELISELKQLYTSREQLVKTRKMLVTSEKGREHLPMQSISVHTRLQKVLESLDSEIAGLEQEMEDLIKSDQELFENYLLVTSIIGYGPVIAIDLLVKTGNFKKITTARKAASFAGVCPFPNYSGEMKAKSRTSPFADKKLKSLLYMGARSAVTHNMEYRLYYQRKQLEGKPHYLIMNNISNKMLRTVYSVVQNKIPFDPNYVCTDPRERNINSSTKKVA

SEQ ID NO: 436336 - protein, 407 aa, unidentified
MDVLMTRCAGLDVHAETIVACVMIGEQDDELFIETETFPTLTKDLFRLLKWLENHGITHIAMESTGVYWKPVYNILEDYFDITLANAQRIKNVPGRKTDVSDAEWIAKLLRYGLIEKSFVPPEDIRNLRDLTRLRKKWIGHLTSEKNRILKVLECSNVKLNSVISDVFGVSGRKLLSKLIQNGYVDSIDVENSIHGRMKHKKQMITDSLFGTLNDHQIFLIKQSWQHIVYLESLISQIEERIDEILKNYKEEVELLLTIPGIKKDSAAIIIAEIGVNMEQFPTSQHLASWAGVAPGNHESAGKRKSTKTTKGNPHIKTVLCEVAWAISRSRNRWLAAKYWSIAARRGKKKALVAISHRMLRIIYSMLINKEPYKELDLRQVFGHKKIKFFCTTTIHGLFHIPCRLSK

SEQ ID NO: 436337 - protein, 337 aa, unidentified
MNIVFLGIELAKNVFQLCGLSQASKPVYTKRTGRKELLQTLANIPACLIGIEAPTGAFYWQREFEKLGHKVKVISPQYVNPFVRGQKNDGNDAQAIAVALMQPTMQFVPPKSPEQQNIQALHRARQRIVNHRTATVCQIRGLLLDRGIPIGSAVSRARRAIPLILEDAENGLSSRMRRTIAELYDLFNDLGRRIHFFDKEIETVFRQSEACQRIAKIKGIGPKTATAVVAIGKGTEFKNGRHFAARLGLVPRQHSSGDRQVLMNMTKKGDKHLRTLFIHGARAVVRVATNNNDGHMNQWVNQLKERRGFNKTTMAVANKNARIIWSMLTNETGYQVV

SEQ ID NO: 436338 - protein, 417 aa, unidentified
MKSKTKKIQSINGKTLIVAVDIGKTVHYGYFRSPNGEDFKPFRFYNFKKSFEQFWAKICRFQRQQGLEDIVIGFESTGPYAEPLFHFLRKRPAKLIQVNPMHTKRLKELTGNSPNKTDKKDPRVIADVISLGHALTLVVPEGAVAQLRRLTQARERAMKSRTATVNQLQHLVFVIFPEFFSVMKTLTKSAMYLIKNHTTHESIFAMGFKSLTEVLKKVSRGKLGQDRAKELFGAARASIGIYEGKESIILEIDHLVSKIENEDRFIDNLKKQMADHLRQIPYSGSLLSIKGIGTITAAGLIGEVGDFRKFRTISEMMKLAGLDLYEVSSGQHKGQRHISKRGRSLMRKLLFFAAINAVKSNGIMHEPYQQMLDRGMPKVKALIAISRKLLRIIFALARDNVEYVKDYNQIHHYKLAA

SEQ ID NO: 436339 - protein, 338 aa, unidentified
MTIVTVGIDLAKNVFAVHGVDATGKPVLLKPSVPRAKLAPLIASLPPCLIGMEACSGAHYWARLFATFGHTVRLMAPKFVAPYRLSGKRGKNDAADASAVCEAVTRANMRFVPIKTVDQQGQLMVHRARQGFVEQPNATINRIRGLLSEFGVVLPLKAAVVRQQALQHLEDLPGWANTVVGDLLSEVSHFDERITQYDHHIATLAKADPAARQLMQLPGVGPTTATALISTIGHGHDFSNGRQLSAWLGLVPGQYSSGGKQRLGHITKAGDSYLRSLLVLGARAVLVAAKNKTYPISRWATSLAERRGYWRAIVAIAAKNARMCWAVLHRGDAFKLPV

SEQ ID NO: 436340 - protein, 342 aa, unidentified
MEHVAIDLGGRESQVCIRSEDGTVLFERKVATTSLGALLKKRPTSRVVVETCAESFHVADRAIELGHEVRVVAATLVRALGVGARGVKTDELDARVLSEVSTRINLPSVHVPSHTSRERKTLCGMRDALVSSRTQQINTVRGWMRGQMIKVRQGKTETFSERVRRGVGESALPSYVARQLQSIDDVTAHILAADKELEGLAEKDPTCPRLMSVPGVGPVTAIRFVAALDEIARFSSVAQVQSYLGLTPGENSSSERKRRTGITKAGPPALRASLVQAAWAARRARGTHPMLVWALEVEKRRGKHVAIVALARKLAAILFAIWRDGTFYSPVNGRRDEEAMTS

SEQ ID NO: 436341 - protein, 337 aa, unidentified
MVLKGVPMALKIVYQICCGIDVHKTFVVACIASTNKQGVTTYKRHRFSTFTQGLKELLQWLLDNHCKDVCMESTGKYWIPIYNVLKKDCNIVLAHPKYVKAIRGKKTDKKDAKWIADLFKHDLVAGSFMPPADIRQLRDLMRYRFKLTCFKSSEKNRLQNCLTVSNIQLGNVVSDTFGKSAQAILDKILENPADTSFDLEPLVFKSLKKKLPELRDAIDGYITTEQAGKLKVIKAHYENLESRKAELEELILALAAPYQQELAILQTAPGISSDFTAIGIISEIGTNMEAFPSAKHVCSWAGLTPTNNESAGKKKSVRVSKAGCYIKPLLVYCIVDI

SEQ ID NO: 436342 - protein, 311 aa, unidentified
MTQITIGVDISKDTLDVYRLPDGERGQFGNDPAGHKALMAFIGKEAARVVFEPTGPYHRTFETALSKKGLALIKVNPRQARRFAQAAGKLAKTDRIDAANLARMGAVLELEARQPKPENLNELKELYVAREALVKDRTAAKNRQKQLTLPLLKRHNAQRLAQVERQIEAVEASIEAKLKADPALARKFEILTSVPGLSTITAFALLIEMPELGNLDGKQAASLAGLAPMTRQSGRWTGRAFMSGGRASVRKALYMPALVAARFNHDLKAKYQQLIEAGKPPKLAIAAIMRKLLVLANALLKGDRYWTEKPA

SEQ ID NO: 436343 - protein, 358 aa, unidentified
MDLLALETETPVILGVDTHADVHAVVALDGLGRRLGSKTVAATQAGYAELLAWAGGFGILDRVGVEGSGSFGVGLARFLRSKGVAVVEVNRPNRQHRRRFGKSDPADAEAAARAVLADTASGEPKTADGPVEMARVLRVARRSALKARTQAANQLRALLSTAPEGLRTELRDLSRDKLVATAARLRPGDRPNDLVAASKLAMRCVARRHLQLSEEIAALDEQLDRLVAEAAPALVALRGVGTDTAASLLIAAGDNPERLKSEAAFAHLCGAAPVAASSGKTRRHRLNRGGNRDANRALYVIALGRMSWDERTRAYVARRTAEGKSKREIARCLKRFIAREVYRVLTSPPMPLSSLSGP

SEQ ID NO: 436344 - protein, 445 aa, unidentified
MFIQSQDDSQCCYSLFIKVVILMMKLKYSICCGLDVHKNVIVATIVTTNKDGISEYLQKSFSTINSDIQRFHNWLIENNCYHVCMESTGKYWIPIFNYLENDIDICLTHPKYVKAIKGKKTDKKDSKWIADLYKFDLVRCSFIPPKDFRQLRELARYRFKLVCMKSSEKNRIQNCMTISNVGIASVLSDPFGKTATEIMSYLLEHTADSMDEKAVRKLIKKGAKAKSDEIIEAIKGYNIETDQAKKLELAQGHLEYLDDMITQTEVELYVRIKPYYEFVEFVSTMPGMTELSSTIVLAETGVDMDIFDDAKHLCSWCGLSPANNESAGKKKSVRIAKAGDYLKPMMVQCALAAIKSKKQPYFAIKYGRIKKRRGHKKAIIAIARMMMVCIYHMVSEKKPFTPTDYEELMNPQNHVERVVLNENNVFAYLESLGYDSSKLVKRNDN

SEQ ID NO: 436345 - protein, 337 aa, unidentified
MKYSGIDLHSNNCVVTVTDDEDRVVAEKRVPNDLPKILALLVPWKEELAGVVVESTYNWYWLVDGLQAAGFTVHLANTAAIKKYDGLKHSGDESDARYLAHLLRLGILPTGTILPPEARAIRDLARKRMQLVRSRTMHILAVENITARQRGARISSNQVKRLTPEAIDQMLVSDDVAFAIKANSAVVTTLSAQIELVEKRLQERMAERTDYILLTSVPGIGRVLATMILLETGPIDRFPSVGNFASYARCVGSERTSNGKKKGEGNTKNGNKYLSWAFIEAAAHALQSCAQAKRFYERKKTKTNGVVAMKSLAHKLARACFHILKEHKPFDVTRCFA

SEQ ID NO: 436346 - protein, 366 aa, unidentified
MQNTIVQNEGAASLEAARTKVKLSRSIIKIGLDMHARLYVAVAQYDQLLPKPARRLAPLEFVPWVRQLLRAGHTVHVVYEACGFGFNLHRELKALGAQCYVIAPRKLDEQCTRVKTDPRDGLTLCQRLSRYVEGNTRELAVIRVPSEEEEQARHVSRQREQLVHHRQKLEAQGRSLLINHSLPAPAHWWKQQTWSRLGKLLPAWITLRLEVARPALLCLQKQINALTSELEAAAPSDIPAGLGKLTTVVMTREICSWERFSNRRAISSYTGLCPGEHTSGTKRIPGSVTKRGNPRLRAALVECAWRMVRFQPNYPPVKKRLGILAKGARATGAQRKKAIVAVARRLAVDLWRVHTGRCIAAQLFNH

SEQ ID NO: 436347 - protein, 280 aa, unidentified
MDYFVGLDVSLRSCALCIVDTKGNVVLERELACEVDDIAECLSEFEFPIERVGLEAGTMSQHLYFGLQAAGFDVVCMESRQVNAALSAMRNKTDKNDAKGIAHVLRTGWFSPVHMKSREAHGLRALLSTRKALLKKTMDLANEARGLLKIFGIRLPKTVSHGSFDGIVRPIIEMDDVLAHALVPLLDARVALYQHYLELDRRVKRAASHDEDCLRLLTVPGVGPIAALTFKAAVDDPTRFKRSRTVGAHFGLAPRRFQSGEHDNPGRISKAGDSDVRAAL

SEQ ID NO: 436348 - protein, 345 aa, unidentified
MDHFAGLDVSVKQTSICIVDDTGRIVREAKVTSEPEALLAVLKNLAFHFKRIGLEAGPLSQWLYSALAEAGLPVICVETRHMRAVLKAQINKTDRNDARGIAQMMRVGLYRPVHVKTLRSQKLRMLLTHRKLLQSKAIAIDNDLRGTLRNFGLKVGMVGTVRFEARIRELVENVPDLAALIEPLLIVRRTLREQFCILHRRLLAIVRDDEVCRRLMTTPGVGPVVSLTYRATVDVPARFRKSKSVGAVFGLTCSKYQSGEVDWSGRISRCGDEMMRTTLYEAAQSMLHSKKWSWLKAWALQIARRRGMKKAIVALARRLAVIMHRMWIDGTEFRWTREQAAAAAA

SEQ ID NO: 436349 - protein, 340 aa, unidentified
MKLYSAIDLHSSSNHLAIMNEEMKRVLVKKLANNTQLILDTLAPHREAITGIVVESTYNWYWLVDALMEAGYQVHLANPSAIQRYKGLKYTDDTHDACWLARLLSLGILPEGYIYPKQDRPVRDLLRKRGHLVRLRTSLLISLQNIITRSSNVKVASKDLKKLTEDCVSAHMCGHDALELCGTVSKETIDVLTRQIHRIESSVLKKLKPTVSYRDLITIPGVGPVLALTIALETGPISRFSTVGSYASYCRKVASIWLSNDKRKGTGNRKNGNRYLAWAFSEAAEHARQSHRPSKRFYDRKRSQSNLWVAHNALAHKLSRAAYYIMRDNVPFAEHKLYCS

SEQ ID NO: 436350 - protein, 417 aa, unidentified
MQMKLSAFTAVIGIDWADKKHDVCVQALGSDKRQFSKIPHQVDKIDEWAQAMYVRHGGQMAVAVELAKGPIVSALQKYNFFVIYPINPTTLAKYRQAFNPSGAKDDPTDAELALDLLLKHPDRFEALNPQSVEMRTLMTLVEQRRRLMNDRVRITNRLRNALKQYYPQALDWFEHIDTSLFCAFIRQWPSLTQAKRARRATLEKFFHQHNLYRKPVLERRIQAIKSAMPLTTDDAVIMPHRLQTLVLVSQLEVALQSIGMYDDEIAVRAPRHPDYALFSCLPGAGPHLAPRLLVAFGEQRERFASAAEMQKYAGIAPVTERSGQKSWIHWRWQCPTFLRQTFVEWAAQTINKSYWAGLYYYQQRAKGCSYQAAVRSLAFKWIRILYRCWITRTPYDEAKYLKALKERGSPLLSVKTT

SEQ ID NO: 436351 - protein, 345 aa, unidentified
MTQYKRIAIDTSKSVFTIHCIDVQDRPVLRTNLRRGQLLPFFRKLAATEIAIESCSGSHHWARELTALGHTPRLVPPQYVKPYVKRGKNDRNDAEAICEAAGRPGMHFVPVKSLTQQAQGMVLKVRDTLIGHRTALGNTIRGHAAEFGIVVGKGIRAVVPLLSAIEQEAAVPPEAKEMFALLGRQIEEIGARIKEIDAKLNVAHKASEVSTRLATIPGVGRVIALTLATEIDPAAFESGRHLAAWVGLTPKEHSTGGKQRMGKISRAGNERLRALFVSGATSIINAAMKPGSRQMTEWLRALLLRKPRKLVAVALANKIARTAWAMMTSGETYRCRSAAAEAVAA

SEQ ID NO: 436352 - protein, 355 aa, unidentified
MQKYKISFKGQNIYVGIDVHLKTWHVTTLTESGCKYSFAQHADAKELFDRLNKKFPEAHFKSAYEAGFCGFSVHYALTDLGFENIVVHAADIPTTGKEKAMKTDAVDSEKIAWALKRGELKGIYVKDKRYMDDANLMRLRQRFIADLSRQKSRTKHLLYTQGVTFPERFRTSRTHWSRNFMKWLREEVELLSEQKLSLLLLCDQVENTRNAILKVTREIRRLSTTERYKENYDLLTSVPGFGMIVSMSMLTELDNDIMRFPNERRFVSMLGLIPTCHDSGEKKVSGEKINRGNKHLGPLIVEASWVAIQRDLELGAYYSNCCQSMKPHKAIIKVTRKLACRAYAVLKTKTRYELP

SEQ ID NO: 436353 - protein, 351 aa, unidentified
MSHKTAATAAQTIGIDTGKNTLHLIGLDAKGAIVLREKIARGRIAARFANVPRCLIGIEAGMATHYVARELIALGHDVKQVPPAYAKPFRQGHKNDFRDAHAIAEAVQRPSTRCVPVKTDDQLDLQALHRVRSRLVGQRTAVINQIRGFLLEHGIAVRQGLRFLRQQLPDILAKRGDVLSPRMTRIIEDLSADWRRLDERIKHITEEIEVLAHSSESCRQLMTAPGIGPLIASAMVAAIGNGAAFAKGRDFAAWLGLVPKQMSTGDRTILGRISKRGNRYLRTLIMQGARVILLRPANWAKHSFGLWLTAAAQRLHHNVLATALANKLARIAWTVLAQGRSYEARVEPKVA

SEQ ID NO: 436354 - protein, 413 aa, unidentified
MEVLYSRCCGLDVHKASVTACCRWKDQAGQAQKELRRFATYTADLRELAQWLREQGVQQVAMESTGSYWRPVWNVLEAQGLPLLLANAQHIKNVPGRKSDIQDPDWISDLLMHGLIKPSFVPHQGMRDLRDLTRMRSKVVQDHTRVVNRIQAILEDANIKLGNVVSDILGVSSRAMLQGLIEGRKPGELAELAQGRLRSKLDELEKALDGNFRREHGFLLKRMLMQTRFLEQQEQALRREVIRHLDGPAQQAIALWDTIPGVNAATGWVMVAEMGTRVEQFADAHHAASWTAICPGNNESGGKRRSGRTRKGNPWLRAALSEAAWAASRAKGTYLSALFRRIAARKGNKRAIVAVAHAILIIAFQMLKNNQPYYELGENYFDKVKPERTADRLVRRLQKMGYQVAITKSAASR

SEQ ID NO: 436355 - protein, 353 aa, unidentified
MNKQIVSTRRPALSVDKLSNPQQASVFCGIDVSAETLAVAVIAPDRPLEQHEFANSVGGHKALVGWLSKMNALVRVSLEATGIYSMDLALALDAAERVEVAVLNPKLVNRFAQTLRRSKTDPADAQVLAEFSLRMPFEPWQRPSRNALALRAISRHIEALGVQRTQATNRLHAAQGSMATPRCVVEDLKRSLVGLERRILKLRREARALIDSDERLRDKFQLLIGVPGIAEISALQLLGELMLLAPDMKVRQWVASSGLDPVHRESGTSVHKPAHISRAGSRHLRRALYMPALAAVRWDPHLKSFYEALLARHKSKLQALMAVARKLLHAIYGIFKSRMPYDGRKLFPQLCPA

SEQ ID NO: 436356 - protein, 449 aa, unidentified
MNNGNGVSRGDRNRNARLARLRELVPVRNAIVGIDLADKKQMVVVTDHDSKVLARKTFRCRAWDLGVALDWAAERASAKGWAGVTISCEPTGHRWRVLGQLAAERSLPVVCVQPMKTSWARRAEDLTFDKTDEKDAVIIARLTAELRCYVPEPVDETWGRLRHLGTRRGQLITEASSQIQQMRDLIECVWPAALDTSKRPFRSRTWVAAMSVILGRDGGDLARTRRLGLARFEQAVRREITRRGGQKPCLRILRKLFAVLADPAGVIAHRSGALERVQLLLEDWEINAQRLVETEARMLCVLDELELTELVTSITGLSAIGAAAILAETGDPRRFLTARALVKHAGLAPREKLSGNFTGRTKLTGQGRPGLRLAAWRAVWGAQRANTVYGARYRHLTTREDNKLTVTQAQTVIAAAILRHLHAVITTGQAWDPEIATHGTRSKVGDLAA

SEQ ID NO: 436357 - protein, 344 aa, unidentified
MHIASVGIDLGKNTFHLVALGERSKILLRKKFSRAQLLAYTANLPSSLIGLEAGAGAHGLASVLREQGHQVRLIPAQFVKPYRKSNKNDFLDAEAIAEAVTKENMRFVPIKTEEQLDVQAMHRVRDRLVQRRTALINEIRGFLLERGITFAVRPIHLRKNLLAVIEDAEQNLSSRLRWLLERLWQEWKQLESDIQAISDGIERISKENALCRRLCQIPGFGPLVSTATVAAIGNGAAFRRGRDFAAWVGVVPRQYSTGGKQKLLGIGKRGNIYLRRMLIHGARAVLFRVKYDTGGFGQWVHRLMQRAPRNKVVVAIANKLARMAWAVLSSGKDYQHQGLQMNAA

SEQ ID NO: 436358 - protein, 458 aa, unidentified
MGRNRSTDKSRRAMPMVHPNAAAIDIGATMHMAAVSADRTPEPVRSFGTFTTDLHRLVDWFAECGVDTVVMESTSVYWIPIFELLDARGFAVFLVNARDAKHVPGRKTDVSDAQWLQRLHSFGLLRASFRPKGQIAELRAYLRQRERLLEYGASHIQHMQKALTEMNVQLHHVVTDITGATGLRIIRAILGGERNPAVLARMRDRRCHATVETIEKALAGNYRAEHLFALEQALALYDTYQQKASACDARIEAVLKELSARRGHEVGPLPSPRQNRSRQQNSLLFDVRTALFALLGKDLTQINGLGPYLALKLIAECGDDLSAWPSAKHFTSWLCLAPSNKISGGKVLSSRTRRSRSRAAALLRLAAVTVGRTDTALGAFYRRLSARIGKAKAVTATARKIAVLFYNAVRHGMDYVDPGASSYEIRYRARVIDNLHRRAKAFGFMLQPMAPTPGMAVS

SEQ ID NO: 436359 - protein, 316 aa, unidentified
MNTQVFVGLDVSKQHLDVAVRPQNRHFVTPNDDRGIRQLVKRLAALKPQLIVLEASGGYEFLATAALAEAQLPVALINPQAVRKFAGATGKLAKTDKIDAQVLAHFAEALRPEPRPLPDQEHQVLKAALQRRLQVVKMIGQEKNRLEKTYLPALRQDIQAHLAWLQQRLEQLDRDLNDQIRRSPLWRDRDRLLQGIPGIGPAVSRAIIAQLPEAGMLPGKKAVALAGVAPYNRDSGRWRGKRMIRGGRSYLRHMLYMAAVVASRFNPVIRAFYQRLLAAGKPKKVALTACMRKLVLIINAMLKNNQPWNQFIAQVP

SEQ ID NO: 436360 - protein, 348 aa, unidentified
MKNVVRQIVGIDVAQDELVVCLSRMDEDLHQECYIRKVFTNNVKGFGFLTQWVSKHTDAVVELRYVMEATGVYHERLAYYLEEKGCLLSIVLPNKISNFFRTLDVKTVTDKTAAETIAFFGLTRKLTDWKKPRPIFQQLRQLTRERGQIIDERTVLKNQIHAQKAGAKCSESSIARSKKRIDLLNKQEKEVRVELDQALKGDEEVKKLVKIICTIPGVGVLTAMTVLAETNGFDLIRSKKQLTSYAGLDVREKQSGTSVKGKPRISKRGNKYLRKSMHLPALTAIRHDERYKAIFARLVGRHGIKMKAVVAVQRKLLEMIYTVFKKNEAYDKNYFLHQKEKNEAAIKN

SEQ ID NO: 436361 - protein, 357 aa, unidentified
MEKCLKQSLGIDVSKLNLSLSLGFLSEGLVKDFKSHPDVSNDVSGYKALLQWLGKSVDSNVELLVVMEATGVYHQGIAHYLHKQGYAVSVMQSGRVKRYAQSLDQRSKTDALDSKMLSMLGLERSIRLWQPPSKELEQLKALSRERSSLLKDRTIENNRQGAIESSVYSNSKALKRHKNRLKLFNSQIELIEQEMQELTSKNDVLKRKIGFMVSIPGISYISAATVIGETLGFESIVNAKQLTSYAGYDVVLRESGNFKGKTRISKKGNSHIRAALHMPSMTCVRCNPTLKQFYDRLKPNKAKPLVALVAVQRKLLILMYTLWKNEENYDAEFEIKKQQKHEAFAAQDNNLINQPVS

SEQ ID NO: 436362 - protein, 281 aa, unidentified
MEVRIGDYPVCIGLDIHKKHSYAAVVDESGKIVEETRIKNTKETLEQFASKYRGAKAVIEATSNYRYIYDVLENYMEVKLAHPYKTRIIAEARIKNDRLDAKMLAHLLRANLIAESYVPPKEVRELRDLTRMRKALIEDRTRIKNRVHAILARNGIFDYPSPFTKKGMDYLKRIDISETDRKLLEINLSVIERINEEIKEIDRIIQEKAKVDGDALLLTTIPGISYYSALLIKAEIGDVNRFPNKFKLISYAGLCPSIKQSGNKEIKGHITKQVQECSDGS

SEQ ID NO: 436363 - protein, 347 aa, unidentified
MNVTTIGIDLAKNVFQIHGVNERGKAVVRKPLKRSQVLEFFVNLPACLVGMEACGSAHFWARKLMGFGHTVKLMAPQFVKPYVKTNKNDAADAEAICEAVTRPNMRFVPIKNPEQQALLGLHRARQGFVIARTAQANQIRGLLAELGIVIPKGIHCIPQRIPEILEDAENGLPGASRALFSRLLEHYLELERQVNELQAQIKAWHRENADSQRLEAIPGIGPLTASALVATVGDAKQFKNGRQLSAWLGLVPRQHSSGGKERLLGISKRGDTYLRTLLIHGARAVLQRHRRQSEQAAGWLARLVARRNCNIAAVALANKNARVIWALLARGRDYEPNYCKLRAVAVA

SEQ ID NO: 436364 - protein, 350 aa, unidentified
MAGGDVPNTERGFAQLVDMFTAHHVQRVGIEGSGSFGRAVAVHLALCWQSGQPVAVVEVPTLMTSRERHGQLGKGKTDPVDALAIARITTREQQLPPVRLTVGAAADLRALLDYREDLVRERGALVNRAHAELGGLRPGYQQQIPIMTTRARVRAAVDLLGDDSSIRATLCRRRLERVIAIDAETAELKQQITRLVAAADTTLTDLYGVGPLVAARFLAEVVDIRRYPNRNAFAAANGTAPLPASSGRTVRHRFNPGGNRQPNRSLYTIALTQIRGDTEGRAYYERKRAAGKSKREALRCLKRRLSDIVFTTMRHDAAGADASPDQASPPAWPVLVGVGAVDANEARLTA

SEQ ID NO: 436365 - protein, 457 aa, unidentified
MEDTLAQRNRISPPRSGKTRAALSLTHPNAAGIDIGSASHYVAVPADRDDEPVREFQSFTADLHRLADWLAACGVDTVAMESTGVYWIPLFELLDARGFTVLLVNARHVKNVSGRKSDVLDCQWLQQLMSFGLLRGAFRPADEVCALRALSRQREMLLRSQSRHVQHMQKALTQMNLQLANVISDIVGATGQKILRAIVAGERDGRTLAALKDARIKASTNEIAQSLQGSWRAEHLFALKQALALFDFYATQLAECDAAIEAQLQVLAAHSADPQPGKKRSRSRNAPKFDLRSRLFRMCGVDLTRIDGIDVTTALVVVSEIGTDMSRFPTVKHFTSWLGLCPGTKITGGKLLSGKTKRCANRAAQALRLAAAALRSSKSALGAYFRRMCSHMDKPKAVTAAAHKLARLIYTLLTKGEEYTDQGQDYFEERYRERVIRQISQRAAKLGLSVVPTPQVA

SEQ ID NO: 436366 - protein, 420 aa, unidentified
MTVMIGIDPHKGSLTAVAISAGEEPLGKLRIRACATQAEKLVGWAAAWPERTWAVEGAGGLGHLLAQQLVAAGERVLDVQPKLAARVRLLEAGDTNRNDPNDALSVAIAALRSRVQRPVMADDYAAVLKVWSKRHRDLSRARNQVACRLHAVLCELVPGGFSKEISAGQAARVLDAVTPAGVIAQARFELAGQFLDDLRNLDAQLRDTKKKLAAAVKTSGTTLTETSGVGPVIAGTVIGDAGDVSRFASRDHFAAYNGTAPVEVSSGGRITHRLSLRGNRRINHAIHMAAITQIRNRHSDGRACYDRKIAEGKTHKEALRSLKRRISNAIYARLLADARQAAAASASGPGGQPGNDSDSSAAGLHPGHRLFGQATPGARNQPTTRHPAQACPAIETEPQEHPAKPLTAKRTRSARLSVRG

SEQ ID NO: 436367 - protein, 408 aa, unidentified
MQVLYPRCAGLDVHKDTVVACVRCVSEPEHHETRSFATTTRELLALGEWIASHGCSHVALEATGVYWRPVWHVLEGQVELVLANAHHIKNVPGRKTDFNDAMWIADLLAHGLIRSSFVPPQPIQELRDLTRTRKQVVREISQHSLRIQKVLEDANIKLGSVLSEVLGVSGRAMLGAIIEGERDPHKLADLAHGTARRKHDALVEALHGHIRPHHCTLLKLHLNLIIALEHTVAEVDAAVGKCLDPIHQRARLLTTMPGVRDTVAEVIVAEIGIDMTRFPTPGHLLSWATMCPRNDESAGKRRSTRLLKGNNWLKTALVTAAWAAVRTKTSYLRAQFLRLKARRGAKKAIIAVAASMLTAAYFILRDGVPYRDLGPNHFDRQQRGKTVRRLLRRLHDLGYNLPPQHQPV

SEQ ID NO: 436368 - protein, 341 aa, unidentified
MDKELYFGVDVSKKTLDLAYYDGETIDWKNAHIKVSNDDAGFKKIGSWVAKVGKDFDTFLFCMEYTGLYNQNFRLWLESKEYIYGMVEPRKMHRFEPDLDDDQRSLDRIKTDELDAFRIAIYCEQNHKKILRNPSKLPSPVYFKLKRLLAERKQNTKQSTLYKQQLHDICAYDTDLSVERKKLLLKNMQENQKAIDKEIDSYMNEDTSIRKNYNLLTSIPGIGRIIALETIVLTENFTAISNPRKYACYIGIAPFKKESGTSVRKKTGVSKKGFSEAKADLSIAVLSAIKNNPSIRDYWIRKRKEKCGGIVLNAVKFKLVLRMFAVIKRGTPYVETDAYKN

SEQ ID NO: 436369 - protein, 342 aa, unidentified
MDIVGGLDVHRKQITFDCVQTQTGELFRGEIRPATRENLRCWLSGFSNDKRTAFALEATTGWRFVVEELQRAGIEAHLAEPAETKALRGPKKRAKTDRLDARHLRELLLIGRLPESWIPPEHIQELRTLVRLRKSLFEDRTAWQQRIHAQLFHNGYPQERNLLARESRERLERLEVPPSARKMVDHALSMIDHINEELAPIEKDLRSYARRQAGCRALMEHYGIGELTSVAMLSELGDSRRFSSSRKAVRYAGLDVTVSESDDKRAPGKLSRQGAPVLRWAAFEAAQVARRTGSPDHDYYVHTKERLGSSRACLAIARKLIRRAHHTLRELGEEALSKPLAC

SEQ ID NO: 436370 - protein, 391 aa, unidentified
MSMYFVGIDISKYKHDCCIISAADQQIVSKFTITNDKDGFEQLLISLNSLSNSEDIKIGFESTAHYALNLELFLENANHSFMEVNPVLIKEYKKSTTLRRTKTDSVDCESIARWLMTVEYKPHSKGFYHAYSLKSLTRLRDRLIRQRSFYLVKITNVLDHTFPEFKPFFNERLSKTAIYLLENYGSAEKMAHMNSVSYDKLRCISRGKFSIQQFLRLKELAANTVGVNNSIFDIELNSLLTLYNSLCKEIKNLEAEITRLIEEVHPHYMSIPGIGPISAAVIYAEYGDISNFSNPSQMLAFAGIEPGINDSGTESHGGRMVKHGSSQLRYVLLNACLPLIRFDLTFATYYAKKRAEGKKHRVAITHVAKKLIRVIYALERQDIDFNAQKLR

SEQ ID NO: 436371 - protein, 368 aa, unidentified
MATYYVGLDVHSKQSTFVIEDVEGKVMAQGEVPTTRPAFERLFAAQHLPAGTGVALETGTVAFFVARQIAALGLEPVVVDAHEVRLKAYRPNQKSDRRDALELCEGLRRGIYRSIVHVPGQEVLVLRETLSRRRHFVRLQSAQVSAVKALLRAAGLGQLSRSLATELGWAKLLAAVVGQGELRAYVEQHRALWRCAREQVTTLEASLARQQKESFAEKIRRLQTIPGVGPIVASTAVAVFSDISRFPDAKHAASYAGLVPSTYQSGERDAHGRITKRGSAELRAMLCEAAHHASRTHHPLNPYFARLCARRGYKMAVVAVAHRLCRIIFAMLRHESDFDVGKLGVERGPFERTVVRAYRLKATAVASK

SEQ ID NO: 436372 - protein, 451 aa, unidentified
MEQEVISMEIVNPQAAGIDVGSRSHWVAVGQSEQDIREYGVFNEDLFAMADWLEQQKIRTIAMESTGTYWQNLYAVLLSRGFHVILCNGKFTKNIKGKKTDVKDCQWIQKLHSLGLLSSSFLPDEQTEILRTYSRQRANLIHSSAATSKKMQKYLRLLNLRLDVVVKDICGLTGLAIIDAICKGENNPQKLASLRHGNCRKSEEEIAKALHSNNRKDYLFALKQELDTYEYLQKKIVECDLEIDKQLNKIIGDDDNKKQHYIDPKPHKRINKNTPKNIDLNLKSYQMFEGSDLLAIEGMSYSTVLALMSEVGIEGIRKFRTAKHFASWLRLAPNNKVSGGKVLSSRVPRGSNRLKIALRNAANAIGNLKESTPLRDFFHRINFRKGRVSAISATARKLAVIIWNMVVKGVPYVNPEGYLFLDQKRKLGLVKRIKKQIDKFALTNKDLGLST

SEQ ID NO: 436373 - protein, 364 aa, unidentified
MKKKFVRLACGLDIGKDKFRACFGRIDQSGHFTVKSGRFFDNTSSGIKAFLVWTKKHLTKLNPDNELPFQVLMETTGVYHESVCLAAYEAGLPVCLEVAKRVKRYLQSIGQYSKTDKLDAKGICQMGCERKFKLWKPCSPNILKLRTSLRHRKSLVNNKTRLSNQLHAMIYSAYTDKEVQSSIKRLIKQMEREIEKMEDLCMELYQADEILYKKLNPIINALKGVGVITALTVIAETNGFAQITSLKQLASYVGYDIIENQSGNSNKPTKISKQGNTRIRSQMYMAAVALIRTKEGPIYQFFLRIQQRNPKFYKVANVAVQRKLLLLIYTLYKNETQYDPLYHLKNKKKNSPELSPELYEIEQV

SEQ ID NO: 436374 - protein, 339 aa, unidentified
MRPRQHELRAGIDVSASNLAVAWRTSKGEVETCEVANDPDGHAKLVSIFKSRSAGARVVLEATGNYSVDLALTLVAANIPVMVANPLATRRFADAKLRRAKTDRIDALDLLDFAERMEFVPWTPPSPAVMQLRDFSRRISALGDDAVAEQNRMHAAQAKQGVPQAVLADISDSIATLKRRIESLTSAAVSLMQAEPDLSVALTVITSVRGIAERSAVRILGELLPLSPDMTPRQVVSHAGLDPQPFESGTSVRRRTRISRKGNRALRAALFMPTMVAVQHETPVREAYERLLAAGKPKLVALTAMSRRLLQAIWVMLRTKTTFQADKFGRRQCAPSQVA

SEQ ID NO: 436375 - protein, 336 aa, unidentified
MKTGQPEPTYELFVGIDIAATTAAVSTQRPGAKASRSFTVDQTPESYSRLVNKLQAAGYVPSCILVVMEATGSYWMSLATRLVREGFRVSVINPAQAHHFAKALLKRAKTDAIAAQTLAQLAMVLQPEPWIPPPPIYYELQQRLAQRDDLLNLRQQVRNQLHALEQHPVVMTQVSTRRKDLLATLQSQIDEVEAEIAAALNQDSAWATAAERLQSIKGVGWVTAAWTLVTTLNFTTCDTVDSLTTYAGLVPMPRQSGSSIWHRPSIGHSGNGRLRTAFYMATLTAARFNPVIKRFYNRLREAGKPEKVARCAAARKLLHIAWAVVKKNQPFDPNYA

SEQ ID NO: 436376 - protein, 402 aa, unidentified
MEKYAGIDIAKRTHWMCVTDGEGHFLMEPRPYDNDAEGLFRMVSDLDLCGGDIAVGMESTGCYWRSCYKVLAEGGYPVSVINPVKTCAERKQGNLGRAKTDRVDCLVIADTLRKQGIPPTPTPDADAAQLRDLCRFRRTVSESLSRAKIQTVALLDQVWPEYGKLFSDKFGDSSRAVLRRFALDEMDADGLTDDLRGASRNRFGAAKASDVLQSLRFTCGVSATDALRLQLRLLLDQLDFCAAQLAEIDAEADSLLDVVAPTLPTVPGVGRATAAQIAAEVGDVTRFRDAKALVAYAGLDPTRRQSGGFDPDRNRISKRGSAHLRRSLYIAAQASLRADCEFRDFYDRLRAKGYSHRYAVCAVARKMLCVCWALMRSGEEYSRDRHRARGKAPEGASPVDAG

SEQ ID NO: 436377 - protein, 297 aa, unidentified
MEITTIGLDLAKSVFQLHAVDADGAVVWRKKVRRGALLETLAQVPACLVGMEACATAHHWAREISALGHEVRLMPPVYVKAYLRRQKNDAADAEAICEAVRRPTMRFVPAKGAERQAVLVLHRSRELLVRQRTMLINAIRGHCAEFGLVAAQGVSGSRDLVERIRQADSAVLPDMAKDAMVLLVEQLHALVRQIQALNRRLLVWHRQDQASQRLATIPGVGVISATALAASVTDPNRFRSGREFSASLGLVPRQNSSGGKERLGRISKMGNRYLCGRRDIGGATGANRGYESGQLGP

SEQ ID NO: 436378 - protein, 320 aa, unidentified
MSVSSVTVGIDVAKVHVDVWVLGAKSDAQRFANDAEGHSALAATLQPLGVGLVVLEATGGYEAALACALQAAGLPVAVVNPRQARDFAKSMGRLAKTDAVDARMLAELGSVLVRREDLARLLRPLADERQQWLAALVTRRRQLLTMMHSERQRLQITPKRLHASIEAIVAAIKTQLDEIEAQMITHVREHFEQLDSLLQSTAGIGPVASATMIAELPELGKLNRREIAALVGVAPMANDSGSSTGRRRVQGGRFEIRRVLYMATLTATRYNPAIRAFYERLRAAGKCPKVALVACMRKLLTILNAMVRNGKPWDPSLYSA

SEQ ID NO: 436379 - protein, 359 aa, unidentified
MNNTIVGADLAKEVIQVCIYTNKKVHSNKEMTHKEFLAWLFKTKPTSIVFEACGTSNYWKQKATEAGHKAQLISAKLVATVRQNQKTDKNDALAIIQASQLPEIQFIKGKSVEQQQLQSMLRLRELAIKQKTASSNQIKALLLEFNIRVSPRNGGLKGVVQSTLEDGENCLSFAFREALDAAWNHYTNLLESIRIYDECLESSISEHADCKRLLKLEGVGTVNSINLYIALACGELGTFTKGKDASACIGLTPLQYSSGGKTTLGSIGKYVKNSILRSQLITGALSAVSQAMKRTAVTKKDVWIQGLVERRGKKCAAVALANKTVRTAYAMLTNGTEYKAELLPVVKKELLPELKIECA

SEQ ID NO: 436380 - protein, 318 aa, unidentified
MAEITNPTNIGIDVSKDWLDIVVIPSGETWRTENTESEMGVLVKKLESLKPERIVIEATGGYERLVTTKLYLAKLPVCRVNPRRVRYFARSIGQLAKTDKLDAKVLARFGEVIKPALTQLPSEQEQLLSILLTRREQLLGILVAEKNRLGIAPAKIRPSLKEHITWLKDQLKELDKEMDAFINDTPDLKEKDDFLQEVEGVGKRTSAKLIADVPELGACDRKQIAALIGTAPYNHDSGYKKGQRAISGGRPDVRSVLYMAALTATRCNPVIKVFYQRLLKAGKKKKVAIVACMRKLLTILNAILRDRKHWNPALSSSS

SEQ ID NO: 436381 - protein, 338 aa, unidentified
MAIVNVGIDLAKNVFALHGVNEIGQVDLRRPSVPRAKLHELVAALPPCTIGMEACSGAHHWARLFAQSGHTVKLMAPKLVTPYRMSGKRGKTDAADAAAICEAVQRPNMRFVPVKTVEQQSRLMVHRTRQGFVEARTAIINRIRGLLAEFGIVLPQKAQVVRREAARHMDGLPGFGKIVIEDLLDEIRHLDERTKAYDAHVRSMARDCAAAQQLMQIIGIGEVTATAIVAMVGNAREFSSSRQFAAWLGLVPGQYSSGGKTRLGRITKAGDAYLRGLLVMGARAVLNAAGAKDDNVSRWAKNIALRRGYWKAVVAVAAKNARLAWAALTKGESFTMPA

SEQ ID NO: 436382 - protein, 464 aa, unidentified
MNGDSKAGSGQEGGRKEEGIAALGRRVAGVDVGSKEHWVCAPVREGEGGEVGVFGATTAQLEKMATWLIERRVESVALESTGVYWVAVYEVLEARGLKVRLVDSRALARVPGRPKTDRRDCQWIQRLHSCGLLQGAFRPPEQICMLRTLVRDKGNLVAEQGDWVRRMQKSLEQMNVRVHRAVADLTGATGMALVRAIVKGEREARELAKLRDPRCHKSEEEIAEQLTGHWREDHLFSLGQALKMYEAIQERMQDYERAILEKLKAMEREECRQQEPPELKNKKKAQTILHRGQEPLRQALYRASGADLTAIDGLGVETVQAVTSEYGTDLSAFPQEKQFVKHVLLAPNRPTSGGKPVKKKQKHGTASSRVAAALRMAALTLRHSQTALGAYYRQIARHKGDDVAVFATARKLATLIYRMLRWGKDYVDEGAEAYQNRYREGRLRRLTSLARELGYQLAPLPANP

SEQ ID NO: 436383 - protein, 311 aa, unidentified
MRTEHVLTMDAHCRSSDVCIKTAKGKLIRRDRVSTGIPQLQALIESVPRPRRVAFEEGAIAGWLYRNLKNSADEMVVCDPRRNAYVAKDGDKDDPIDAEKLNDLYRGGFLKAVHQPNSSEKAGIKQLVGIDHERVVHRVGEGCRLLALGRRCGVLLKRSMLLGTQGRRLPESRLEQGAVPARIRSVAEGLRESFDAAVKQEEQLDEQVCELAREDKMMRRAAVLPGYGPVRAATLISYLDAPWRFKSKSALWKYVGIGLRRQSSGEGLDVVLVEQACNHLLRNVVIGAAQSAMDQKENVFAERYARWMKAE

SEQ ID NO: 436384 - protein, 344 aa, unidentified
MQHYVGLDVSVKETSVCIVDKAGKVMREVKVATKPVAILAVLTEEGLAIERIGLEAGPLSQWLYSALAEAGLPVICVETRHMKAALSAQINKSDRNDARGIAQMMRVGLYRPVHVKTLASQKRRMLLTSRQLLQAKALDIENDLRGTLRNFGLKVGMVGTVKFEARIRELVADHPDLAAIVEPLLIARRVLREQLGVLHRQLLEIVRHDEVCRRLMTTPGVGPVVALTFRATVDVPSRFASSKAVGAAFGLTPRRQQSGEIDRMGGISKCGDGMMREMLFEAALVLMTHSRKWSWLKAWGLKIARHRGMKRAIVAVARRLAVIMHRMWVDGTEFRWTREEAAAT

SEQ ID NO: 436385 - protein, 350 aa, unidentified
MMIIGCDLHTRYQQIAMVDTETGEFVERRLEHESGEARTFYAGLRGAVRVGIEATGHTAWFEAMLAEFGHELWMGDAAKIRAAVVRKQKTDARDAAHLLDMLCTNRFPTIWRPSLAERDLRQLLWHRQKLVWMWGAVKNQMHALAMGEGVCRKKKLFTAKGRTELEGLTLGRWASYRRQELLRLFDELQSSVKKLDQAVELAAKNEPLAARLMTHPGVGPITSLAFVLIIGPVERFDRSKQVVSYLGLNPQEHSSGGRQRLGSISKQGNPMMRSLLVEAGHTAARLDPQLQRVYQRLKFRRGAAVAKVAIARKLAVRLYWMLRSTADYAQLVRMRGSSWATLVEDSPSLG

SEQ ID NO: 436386 - protein, 348 aa, unidentified
MNQEKYIGMDVHQATISVAIMDSSGKLIVESILETKAATILEFIQGLRGSLSVTFEEGTSAAWLHDLLKPHVTDLVVCDPRKNALLKDGSKSDRIDARKLAELLRGGQLKPVYHGEHGLRTLKESGRSYLTLTKDVSRVMTRIKALYRSWAIPCSGATVYAPRHRAEWLAKISEPGVRLRAERFYQQLDLLEPVRQEARRDLLNESRKHPAVKLLRQIPSIGPIRAALLVALLQTPHRFRTKRQLWAYSGFAVETHDSGEYRYVRGKLRRNRERITVRGLSDNHNHDLKNLFKSAAISASTRPGPLRDFYAALVQKGMRPTMARLTLARKMASITLTMWKKGVDFDAK

SEQ ID NO: 436387 - protein, 363 aa, unidentified
MRFYREQRRFCRGIDLHASKMYVCVLDDQGNVVLHRNMRAEPEPLKRALAPYRASLVVGAECMFSWYWLADWCREEGIEFVLGHALYMKAIHGGKAKNDRIDSEKIARLLRGGTFPLAHVYPREMRGTRDLLRRRNLFVRRRAELLAHVQNTHTQYNVPTASGKGRDRLREGIAATAFADPSVRTMLDADSEVIAQLDKTITTLETHVLKHAKVHDPVRLSMLQTITGVGKVLSLVMLYEIQNVDRFENIGQFVSYARLVSCAKESAGKKQGTGGRKIGNAHLKWAFSEAAALMIRSSPEAKAFMEKMTRQRGKARAVALVAAKIGRAVYWMMKRQQPFDARRFWKSSLPKGIRTLEGAAMEG

SEQ ID NO: 436388 - protein, 419 aa, unidentified
MTKTPSTDPPAFVAWIGLDWGHDSHAFALDDRSGQTQEGTLTHSAEALHGWLEQLAQRFAGQPVALAIEASRGPVIAALLNYPWLTLYPINPVTSARYRQAFTPSGAKDDQPDARVLLELVRDHSAKLRPLELQDTDTQKLDGLVQARRDMVDRRTQVLNQLTALLKTYYPQAFELVGNLNTELAADFLRRWPELLTLKAARPSTIKRFYYAHNLRRPELLEQRLAFIRQALALTTSEVTLQVAVLQLRFLLDQWRVFHRHLPKLDEQIKQVFRQHPEANLFRDLPGAGPALGPRLCAAFGTLRTLHPSPASLQKLVGVAPVREKSGHQLWTHWRWQAPRFLRQTFVEWAGQTVVYCPWARAYYQHMIAKGKTHQVILRALAFKWIRVLWKGWQTRTPYDDARYFQQLLKRKSPHALTT

SEQ ID NO: 436389 - protein, 420 aa, unidentified
MVYLERGYNLKELPWSKIVSNSFLFKEACMILVGVDVAKDKHDCYIMTSEGEVLFKSFTIANNMEGFNQLYEKILSVIDNFDNVKIGLEATGHYSYNILGYLLDKGLTPYVINPLHSNLYRKSLSLRKTKTDKVDSRIIASMLMSDVSLKPYSNTLYHNEELKSLTRYRFTKVQERAKLKISISRLVTILFPELEKLVPTLQMNSIYALLYEFPSAHAISKAHLTRLTNLLNTTSKGHYTKDKAVLIREAAKNSIGSNMPAKSLELKHTIKLIKELTSEINKIEEEIKIIMNKINSPILTIPGIGLSTGAQILAEIGDFKNFSSPDKLLAFAGLSPSTYQSGNMYSSNAKMEKRGSKYLRFALFNAAIYVSYWEPTFSQYLKKKRVEGKHYYVAISHVVKKLVRLIFHLEKTNERYSTVV

SEQ ID NO: 436390 - protein, 312 aa, unidentified
MSESVFVGIDIAKAQLDVAVRPGDEVFTVINDEESVKKLAQRLYKLNVERVVLEASGGWEVPVVAVLASGGLPVVVVNPRQVRDFARATGTLAKSDPIDARILAWFGEALRPEVRALKDEETQALEALLKRRRQLLGMVTAEKTRLGTALKPIRRDIKSHIRWLERLLKDIDHDLNGAVKSSPIWRVRDDLLQSAAGVGPTLSLSLMASLPELGQLSGRKISALVGVAPFNRDSGTLRGRRCVWGGRGELRAVLYMATLAATRCNPVIRTFYQRLRAEGKPHKVAMTACMRKLLVILNAMVRDQTPWQVKHI

SEQ ID NO: 436391 - protein, 412 aa, unidentified
MLVGIDWADAEHTYCLMDDTGATLATRTIDHTAEGLERFMTLVRARAQDPQDILVALETSQGPLVGALLDQQFTVYAINPKAVDRHRDRFRVAGAKSDLRDAWVLANLLRTDRMLYRPLLPDSEVAQELRALTRDRAELVQTRTMLSNQLTSCLKAYFPEFLTLFADPDRPVALALLQAFPTREALQAVSPTRLEAFLRRRHCPHSHDRAVEIHTQMQARGFHIAPPLVRAKARLAGTLVSQLQTLAEHLEAYDREIQRVLRLHPDGELYHSLPGAGDFLAARMVGELGDNRDRYRDASSAQCEAGTAPVTRKSATVRTVHVRRACSQPLRSTMWQFAFASKRHCEWAQAYYLRARKRGKKHAEAVRMLGNVWLRIIIAMRRNRRPYDEALFLSRSSHPSLALCPSMRVKVA

SEQ ID NO: 436392 - protein, 405 aa, unidentified
MRLDEGGGIDVHKETFKVAACHENEAPQERTFGTFTKDIYAMRDFLLEQKIKHVVAESTGVYWKPMYRILSAAGIEVSIVNPTRVKQMPMEKTDKKDARWLAKLLMNDMIKKSFVPDEQQEQLREFSRMHTKYIRQMTRVKNQVVRLLESCNFKIRSIVSDISTQTAQKLINAISNGQTDTDLLIALCHHSVRKRQGDERLKLALEGRFTKYMQQQLRMLLDDLHYFEKQKMQTENVLKELFTNEQMEKIKKLDEVEGVSQQQAEIIMAEIGAGIDSFSQADQAAKYAGLTAGQRETADQQKPVRAVPGNKHLRVVMVQIAWSAVKVKNGYWKAEYQHLKKRIGAKKAILAIARKMFKAIYKVLTTEHRYEKWDAKKFYDNRIKTIEFKKRCQLPDKTFKGPTLL

SEQ ID NO: 436393 - protein, 355 aa, unidentified
MSSEKYIGLDVHQATISVAVMDSQGKVVMESILETKASTILEFFAGLRGSLFVTFEEGTWVAWLYDLLKPHVTEVLVCNPRKIPLLKQGNKSDKIDARKLAERLRLHDLKPVYHGETGIRRLRELARSYLTVVKDLSRMMNRLKALYRSWAISCAGRDVYYRRHRSQWLEKIPEAGTRWRAEQLYQQLDLLRHLRQQARRELLAESRKHAITAKLRQIPSLGPIRSALALALIQTPHRFRSKRQLWTYSGLGLETRDSGEYQFVKGQPQRRKKQATIGGLNKDYNHDLKGLFKGAATRASVKPGPLQEFYQRSLAKGIKPTMVRLTLARKIAAITLTLWKKGEDFDINKLNSQAA

SEQ ID NO: 436394 - protein, 309 aa, unidentified
MKEEVVYCGVDVAKAYLDAAMGSEKRRLANDGTGHRQLINWIKQMEAQVQVICEPSGGYERMLIQALVGAQVKVSLVQANRVRQFARAAGILAKTDSIDAEVLRAFGQAMRPQTLTASKPQQEQLRELESQRRHLSRLLVMEQNRGARLGDSSVRILNRSLNKQIQKQIERIDLLINEHIAGSQELSAKAHKLTAISGVGPRTAALLLAQMPELGQLNRREVAALVGVAPFNRDSGKWSGKRTIFGGRRHVRHGLYMAALVAARHNPILRAFYQRLRTAGKPAKLALTATMRKLLIVLNSALKPDPIYT

SEQ ID NO: 436395 - protein, 418 aa, unidentified
MEDENNWFVGVDWASQTHHVRLSDAKGAKIGERAFVHGGEGLKEMADWILKSTGAAPEAVMVAIEVPHGPVVESLMERGFQVYAINPKQLDRFRDRFSPAGAKDDSRDAEALADALRTDRRCFRLLAPLDPVVVELREWSRIADDLRVERNRLSNRVRELLWRYYPQFLELSDDFAADWFLDLWRLLPTPDKAKRVRETTVERLLKRHRIRRITAAEALERLKAPSIPVAAGTVSAATGHLEAVARRLALVNRQISEANCKIDRLTARLEGGDERAEAQREAQRDVTILRSLPGVGRIVLATLLAEAQDALHRRDYHALRCLSGVAPITKRSGKSKIVLMRQAAHVRLRNAVYHWARTAVQHDPRSRAKYAALRARGHGHGRALRSVADRLLAVACAMLESRTLFIASHSTKISSPSA

SEQ ID NO: 436396 - protein, 320 aa, unidentified
MSATSIVVGIDVAKAHVDVAAVGAELGAHRFANDAEGQSALAAMLAALGVALVVMEATGGYEAPLACALQAAGLAVAVINPRQARDFAKSMGRLAKTDRIDAQMLAELAAVLVRREDLVRFLRPLPDEQQQLLAALVTRRRQLQTMLTAERQRLQIALPKLRASIEAMIQAIRAQLDDVEGQMLTHLREHFAELDTLLRSTTGIGPIASATLIADLPELGRLNRQQVCALVGVAPMTNDSGNARGRRRIQGGRFEVRRVLYMAALTAARRNPVIKAFYERLVAAGKLPKVALVACMRKLLTILNAMVRTRKSWNASHHHP

SEQ ID NO: 436397 - protein, 336 aa, unidentified
MDDSTVFVGLDYHQDSVQVCVLSRDGQVIRNGSFENDAATIGTVVENHGKRVHAAIESCTGAADLADELTARSGWSVDLAHPGFVSRMKQNPDKTDFTDARLLADLERVGYLPRVWLAPQEVRELRRLVRFRQQLVDERRAVKLRISALLRDQRVRCSYASGTKNWLSWLKTTTQVSVESQWILKRYVRRLESLVTEIRAVETRLARVTKKDSLVAALQKQKGIGVVTAWTIRAEIGRFDRFRNGKQLSRFCGLSPRNASSGTRVADAGLIKAGNRQLRATLMEAAHRLIRYDDPWKDFARNLMGRGKPKCVVVAAAANRWMRRLFHEMQPNKLAA

SEQ ID NO: 436398 - protein, 396 aa, unidentified
MPATTRHARVPALPESTTGQARLLYLALDLGERHWTLALTVGRGQRPRVRTIPAGDLERLTTELAAARRRFGLPPEARVVSCYEAGRDGFWLHRAFLVSGVTNVVVDAASIEVPRRARRAKTDRLDARKLVTMLVRYIEGERPVWHVVHVPSEADEDRRHLERERETLVADQTGLVNRIQGLLATQGVRLVLRGDVPAQLAAVRRWDGTPLPPELRARLEREWMRVEAVRTALRALTTARHRRVTTPTPPAADTAAVHLTRRLAALGAVGETTAWLLATEMFSWREFRNRRQVGGFVGLTGTPDQSGDRIREQGLTRNGSVELRARVIELAWGWLRYQPASALSQWYRQRYGGGNARLRRIGIVAVARRLLIALWRYAMGGPPPAGAHLKDDAVAA

SEQ ID NO: 436399 - protein, 348 aa, unidentified
MSISMMGIDTAKSVFQLHGVDAQGKVQLKRKLRRDELIAFLEQQPRCTVAMEACGAAHHWARVLSGLGYEVRLIASEAVKPFVKRGKKNDPADAAAICAAASRPDAKFVVVKSLEQQGVLALHSVRSLLVKQETMLANAMRGLATEFGLVVPKGMAKLQELVALVEEDKGIPEQARGVFAELREHCRVTTERIEELERQIVVHARHNGTARRLATVPGIGPITASLIAATVGDSIGTFKSARHFAAWLGLVPRQHSSGGKTRLGKITKAGDRQIRTLLVLGATSMVHRAEQWNSAVGAWVRGLLERHPVRHVTVALANKMARIAWALMTRNEVYRAKGGVAPAAAATA

SEQ ID NO: 436400 - protein, 342 aa, unidentified
MTWYAAIDLHSSNNVTVVIDDHDRVVFQKRLANDLAVILKELAGYQADLHGIAVESTYNWYWLVDGLMEHGYPVHLVNTAAIHQYEGLKYTDDQSDARWLAHLLRLGVLPEGYIYPRADRPVRDLLRKRSQMVRQRTTNLLSIQSLLTRNTGRSLNANRVKALDGPQVDALLPNGDLALAVKANLSMMSSADAQTELLERTILTRVKLRPPFSLLKSVPGIGDVLALTIMLETGDIGRFTRVGHFASYCRCVGSAKISNGKKKGQGNTKNGNKYLSWAFIEAAHFAVRYNATIKRFYERKKAKTQMVVALKAVAHKLCRACYHMMRNQVAFDLSKAFGTNAV

SEQ ID NO: 436401 - protein, 346 aa, unidentified
MNEITLIGIDLAKNIFRINCVDKKGKRILNQSLHRNNLLRFLTTLPQCTIAMEACASSHFWGRAAASLGHTVKLIHPHYVTPYRLGDKNDANDAAAICAAAQRPDMRFVRLRSQRQSDIQFLHRVRSGLVQERTATINRVRALLAENGIIIKQGPSAVFALLPGILDDEGNELSVIMRRILRSQYDHLLHLRGQVKELEKTLSTLIAEDDDCKRLMHIPGIGPLTATMLASEIGNGAGFARGRSFAAYIGLVPKQHSSGGKNLLLGISKRGNSYLRTLLVHCARAALRTIALGKTPFGGSIDRWIRQLMERRGKQKAMVALAAKLARIAWSMLSRGTSFQQAASAC

SEQ ID NO: 436402 - protein, 400 aa, unidentified
MRSIGMDVHRSFAQVAILDSGKFTGNIRIDLEHDAVVAFGKSLRSEDEVILESTGNTAAIVRLLKPFVKRVVIANPLQVKAIAHARVKTDKVDAKILAQLHSAGFLPEVWSADDETQGLRRLVSERAALVRTIRRVKSRVQAVLHANLVPKYAGHLFGKGGKRWLAEVPLPKLERDILFRHLDELEWLNNKLEKMDRDLARISLDDQRSRKLMSIAGISSTIATAIIAAIGDISRFRSPENLASYFGLTPRIRQSGDRGAIHGRISKQGNGLARTMLVEAAWSAASVPGPLRAFFLRIKDRKGLNVAAVATARKIAELIWQLLTKDEPYRWARPAFVAMKMRKLELRAGAPRAHGAAGPGRDYWIKEIRHREMELVAQAEAAYAQMVDSWFEKPKKPKGC

SEQ ID NO: 436403 - protein, 503 aa, unidentified
MAGFMPSTNVASAPMFGAMKRKNIFRNESQKLDAAFIEAGLPERVLLVPLDFAKITHYACFCDGHGTYIRKAFTVQNTKEGIDYLVDQIERTRAARSIKSKRHVIIGGEDSASYTCNFMDRLFELGYLTVRLDSKEVHRQADSVDSSTDKTAVRAIAKTLLNRDALHTGGTDLYAQMRGLTRQRRRVVHLSTAVKNRIHTHADRLFPGFLSKESAVSAFTQASLELMANKFSAATLARKSEKTLTRMLARQGVRGAPEVAAKLKEQASNSICANDASVRLSSQLIESELSLFQTLQSNLNDLNIECARILLQLPEAFTVSIKGIGITLAASIFAETGSLRQIQRSDQINAYAGIAPKVKQTGGPESPARIGGKRRQFNRILKDYTLQAGNHLYLHGPTELLHDATRRKLAGKAVDTAMARRFLRIARALAKSHCIYSPSDLRAGQHGTDAESQARAQYIVQIWPDLLLKWKRLGLHEEAFAPETPLGDWRIIVQEIYEIDLPF

SEQ ID NO: 436404 - protein, 335 aa, unidentified
MSQDRVATRPCSEEGTMSSQAIFVGLDVGKATLDVAVRPTGECWQVPNDEAGGAELTARMRGLKPALLVCEATGGFERSVVAALAAAGVPIVVANPRQVRDFAKSTGQLAKTDRLDAGILALFAERVRPTPRPLEDAATQLLDALLTRRRQVLEMLVAEKNRLGFAPRPLHRGIRQHIRWLERQLDDVTGEVARMIEASPVWRAKDDLLQSAPGVGPVVSATLLGELPELGTLTHKQVAALVGIAPLARDSGQWRGKRMVYGGRASVRTALFLAALCGRRWNPQLKVFYERLIATGKPKKVALIACARKLLTILNAMVRDNAAWRAPDLTAQHSC

SEQ ID NO: 436405 - protein, 411 aa, unidentified
MLSVGIDVSKGESMVCALNQFGKVVLTPRRYKHVKSALGSLVERLRSFGDNDIRIIMEATGIYSLPVAKYFKEQGFFVAVINPYAMSRFRIGGQGSLRNVKTDKADSMTIAGYGRQCWDTLMEYNPAAETYWKLDYLLRLYQKILAYRVSILQELYGIIEQTMPGIKEIGIKSPQVSTAKDILLDFAKTFWHYDQITGMSEKKFISRYLVWAKKKGHRPDVGKAAAIYAMAKDGIPCLPADPIVKQSIHTNIEALERVGTTLRDILSQMSGLAKTLPEYDIVRAMGGVGDVLVIKLIAVIGDIKRFRKAKSLVAYAGIDPPPYSSGKFEGNKRRISKRGSTLLRKIGYEIMKSLTRNKRPEDGAVYDFIRKKEEEGKAKKQAKIAGLNKFLQIYYARVKSIYKKTTEGKAA

SEQ ID NO: 436406 - protein, 410 aa, unidentified
MDAIRETCAGLDVHQASVVACILTGALDKKPTSVIKTFGTTTKELLQLQDWLSEYQCVELAMESTGVLWKPVWNILESTCKITLANPQRIKNVPGRKTDVKDAQWIAQLHRCGLIEPSMVPNREIRDLRDLTRYRRKLVQQTTSEKNRVHKILQDCNIKLTTYISDLFGVSGRALLEKLINGETLDEQTIRQTVKTRLKQKVPQLVDALNGKLLKHHREMINYHFEHIQFLEKQIGRLEQEIERMLQPYQEELNLIKTIPGFSVDSTSALLAEISPQAAEMFPSDAQMASWLGVCPGNNESAGVKKSARSKKGNKNAKAVLCQVVWANSRSQNRIGIYFRKIRKRRGEKKAVVATAHLLIRIVYAILRDRKPYSEQGEYHEQYTKEKAVNHFVKQLKNMGYEIELKEIAS

SEQ ID NO: 436407 - protein, 453 aa, unidentified
MEREERRLEQFRQLRKEIRGSQDYLVVGIDISKDTHNALMRNTSGKILYRRLTFNNTGEGFETLLLQVEAVRVRHGLKEVVFGMEPTANYHKPLGEFLINQEKQVVLISPEAAKQNRPLLDGRWNKHDGKDCANIADLMCQGKCLYYEYPSPDLRDLRNLLSLNRKLKKLEQGLRLRIRNHLVAQYFPELDQYCHWGANEGLALVRWCLDPAVMSVLSDEELGKRLGTQGRTIAQRKRLSALKDKAQSSIGCDFGSSVEFEGQSVVKLLKEVRQTLASTQEQIEQVCLKFKEYSYLLSIPGFGPTLSAMVLGAIGNPWRFQNAAQVIKMVGLDLSASQSGKSQGAPIVSKKGKAEIRYALYQAAMVASSRDKHFVAYFTDQLRGREKEKGIKTKKRVKLAAKMLMIAWTLMKKQERFDPKYLSGQTPPMAAHNAVKTDNGRIPRVQPERDRGL

SEQ ID NO: 436408 - protein, 389 aa, unidentified
MSQPFDASRSLTALEQDSTIIAAIEIAQSKWLVAAVVPGIKRQPLKKLDADEESLLKLLYRWRKEADQAGHPIKRVVVAYEAGRDGFWLARWLRTRGVEAYVIHPNSIAVSREHRRAKTDRLDTELLLRALLGWLRGEKRHCSMVAIPTIEEEDAKRPNRERDSLVTEQTRIGNQIKAILIRFGIRRFRLKLRKAEQQLKELHTGEGSLLPENTRAELFRHLARLHMVREQIRAIEKARLQKLEANRDRKKSPYAIVHLIARVVGIGVETADMLVTEVFSRQFRDRKAVARYAGLTGSPDESGKRRREKGLARAGNARVRTGMIRLAWRVLRFQGGSALAQWFQTRTADGRGNTRKTMIVALARKLLIALWRLVTTGEMSDGIVLRPTS

SEQ ID NO: 436409 - protein, 452 aa, unidentified
MARKPKQASKSNNAVLPVMRPDAAGIDIGATEIFVAVPADRAEENVRSFPTFTQDLYALADWLQQCGIRTVAMESTGVYWIPLFQILEERQFEVCLVNARHVKNVPGRRTDVSDCQWLQFLHSVGLLKASYRPEQEVCAVRSLLRHRESLVQMAATHVHHMQKALDQMNLQVHHVISDIVGRTGWAIVDAILDGERDPLTLAKLRNERIQASEEVIAKSLVGDYRPEHLFRLRQSLAAYRSYQKMIDECDQEIRQRLRDFQPPHPPAETQEDEKRTNKARSPGSVLRSELKRVFGIDLTRIPGIRTGIAQTLFGEIGPDFTPFRSASAFASWMGLCPDNDISGGKVLWTGTRKVSCRAATALRMAAQSLHHSKSGLGDFYRRMRAKLGAPKAITAAAHKLARIIFHLISTRQEFDEAKFAADQLRFHKSQETKLRAKAKSMGYQLVPIQPAA

SEQ ID NO: 436410 - protein, 426 aa, unidentified
MQEKIQRITPTTIIVGIDVAKEIHWARIKDYRGIDLMKPVKVHNSIDGFESLLSRVEKLRVKHGGDQVIIGMEPSGHYWRSLGWYLKLHESKPALVGVNPYHTKQAKELDDNSQTKSDPKDAQVIAHLIRDGRYFDTYLPEGEYAELRLLNAERQRLMKQLNRANNILIALLDEFFPEYSTVWGNVTCPTSLALLKTYAFPSDILSSTREQLLEDIREASGGTEGVKLMGDMIKAASRSVGVKEGLRVARLRMLSLIEELAYFEEKKAEVEKELEAVMGSQQLGKALQSMLGVGPIISAAFLGEVGDITRFSNWKQVRSLAGLNLVENSSGKHKGKTKVSKRGRPYLRHMLYLAGECGCRCNPEMRKFYHYLRNRKNNPLNGPQAFVATGLKIMRILFHLAKTGESYSPSKALGAVREQQIASLAI

SEQ ID NO: 436411 - protein, 351 aa, unidentified
MSQKTHAVITRTIGVDTGKNTLHLVGLDDRGTIVLREKLGRSRIRTRLANIPPCLIGIEAGMATHYVARELIALGHDVRQVPPAYARPFRQAHKNDFRDAYAIAEAVQRPSTRFVPVKTDDQLDLQALHRVRSHLISERTAVINQIRSFLLERGIPVRQGLRFLRRQLPEILAKRVDVLSPRMIRIVADLGGDWRRLDERIDCVTEEIEQLAHGTESCRQLMTVPGIGPIIATAMVAAIGNGASFAKGRDFAAWLGLVPKQMSTGDRTILGRISKRGNRYLRTLFMQGSRVILLRPVNWAKHSFGPWLTAAAKRLHHNVLATALANKLARIAWTILAQRRNYEARVIADVA

SEQ ID NO: 436412 - protein, 408 aa, unidentified
MNTLYVGIDVSSKSNVVYLMLPNGDKHSNFSVANSHEGSTLLVKKIYSALTSHSLDTVLIGLEATSVYGDNLVYFLREDATLAPFNRKIHVLNPKQVKKFHDTYNDLPKNDYVDSFVIADCLRFGRINKEVYMGDYRYKALQNLTRARFFAVQNLVKEKQRFMNVLFKKYSTMTQEKVFSDTFSTTALAVYDEFESAEALADMDLHELTDFIIEKGKNRFPDPDAVAKAIQKAARSSYRLPKTVNDSVNQVLSISITSMKALESQIKEFDKAIKAQMELLPNVLISIPGIGPVYSAGIMAEIGDINRFNSQAALAKYAGLAWKQHQSGGFESEVTRLIPSGNRFLKYYLCEAAFSLVRCDKEYSDFYHLKYKEVNRCQHKRALALTARKFVRLVFRLLKDNRLYCPAK

SEQ ID NO: 436413 - protein, 507 aa, unidentified
MPAPARRKRTPTQAKAEARRPAQAKAKAPRQAPAQHAIDNLPPAYAESLPLIHRHAAGIDIAAETHWAGVGATRDGSDTVREFPAYTDGLTAIVAWLRDCGVTTVAMESTGIYWVPLYELLEAEGFEVLLVDPSYTKQVKGRPKTDRRDCQWIQRLHAHGLLAAAFRPDEPTCVLRSYLRLRANHVRYAGQHIQHMQKALEQMNLKLPEVVSDLTGVTGMSIIQAMLRGERDPGRLATYRDRRCKASAETIAQALSGSYRDEHLLALQQAVECWEFYQSKIAALDRVIEQQLQRMKKSQLLPTLPPKPRVRKRKPNEPRFDVRTALYYVTGTDLTEIEGIDELTALTVISEIGSDMTRWQTVKHFCSWLGLCPQHKSSGGKIKSSRTRPGMNRAAAALCLGASSLHRSQSAVGAYFRRMKSRLGTPKAVTATAHKMARIVYNTLRYGREYVKKTQDEYDALMRDRQLKSLKRKARMLGFEVVERVLPPSPHVAPADNNPAPATTARR

SEQ ID NO: 436414 - protein, 362 aa, unidentified
MQVPSLFLLKSEQFIRPAEPVFRMLGVSSLVLPKCIIMDKITNYYGIDISKDVFDVMDNFKVHHQFSNNKSGFTEFLKWLKPNGCCVMEATGVYHTQLADYLYEKDIFVSVVNPLVIKRFIQMNLRRIKTDKADAEMICKYAQLNELKAYKSEAVYIKESRVISENLSLLLKSRTMFKNRLHALLHKQSKHRNVLIKPVKDTIKNLCKQIEVLEVELQKLIIENESDLYYNIQTIPGVGKSTAMYMIVISDGFRKFESAKQFICYAGLSPVERRSGSSVHARSHISKQGNGKLRNLLFMCSFNACISNKSCKLMYERITAKGKSKKLALIAVANKLIKQSFAIARSGLVYDSEFVSVKPSVK

SEQ ID NO: 436415 - protein, 352 aa, unidentified
MVIIAMDAHKHYSQICVERENGSGVCERRVQHSRGAIRGFLSQWEDGTEVALETVGNWYWIVDEIEAAGMQPKLVHAHKAKLMLGAVNKTDKLDARGLNRLQRAGTLPTVWIPPGPLRDQRELPRTRMVFARHRTQLKNRIHSVIDKYGLQDQFGDVSDMFGRAGRARLEECIAVLPQETAYTVGCLLAELDQVELRLGALERRFKKVFAAVPAVQRLMTLPGVGYILAVVIWLELGDVERFPTAARLASYSGTTPRVHSSGGKTRYGPLRNDVNHYLKWAFSEAANSIVVNHKRCPGRHVSRLYSRLRQRCGHAKAVGAVARHLAEAAYWVLKKDEGYREPTGSSISSTQV

SEQ ID NO: 436416 - protein, 408 aa, unidentified
MEQQVERVAGLDVHRDKVVACARLGYSQPEVKKKTFLTTTKGVDQLARWLADLEVTRVVMESTGVYWKPVYYGLEGLFAELWLVNARHVKNVPGRKTDMADAEWLADVAAHGMVRPSLVPQPAARELRELTRYRKTQVTMRAQEVQRLDKLLQDAGIKISSVTSTVLGKSTRAMIDALIAGERDPVVLANKALGRMRPKMAALSEALVGRFAAHHAAVARAILGHIDFLDANITALDQEVAARMEPFRAAVDLLVTIPGVGQTTAQVFIAETGGDMSRFPSAEHLAAWSGLAPANHEPAGKHKPVGTRQGATWLRRALVESAKVASMSKANYLAAQYHQIAARRGPNKATVAVAHSILVAAWHMLSTGEVYDDLGDDWFRSRRDPERETRRLVARLQALGHKVSLTAA

SEQ ID NO: 436417 - protein, 429 aa, unidentified
MGAMSENEVLGQEPQFAALVGIDWADQKHAWCLQAAGTTQRESGEVEHTPEAVEDWVGQLCQRFGNRPIAVAVEQVKGALVFMLSKYEPLHLFPVPPAMSAKLRQALYPSGAKDDPRDADLLVDLLLQHRDKLRRLSPDSEATRRVQNLVEERRHLVEEKTAQSNRLTNHLKIYFPQMLEWFDRLDTELVCALLEQWPTLEELQKVPPARLRTFFRKQRCHYPELVERRLVGIRQAMPAIRDRAVIEAKSAVVKVSVQVIRSLIRGVAELDRKIEEAAAAHPDFFIFESLPGAGAVLAPRLLAALGSQRERYANAAEVQAYSGIAPVTEQSGKKKWVHFRWACPKFLRQSFHEWAGHSIAHSPWARSYYQQQRERGKGHHAAVRGLAFKWIRIVFRCWKDRVAYDESRYLAALAKRNSPLAAIAAGTIL

SEQ ID NO: 436418 - protein, 389 aa, unidentified
MIYVGIDIAKLDHYASAIDSDGVVLIEPFKFRNDADGFHTLSSKLESLPAGDKVIIGLESTAHYGNNLVRYLVCRSYDVCILNPIQTATLRKNNIRKTKTDKVDTFIICKALAMQQSYRFVSFDDLDLMDLKSLGRFRQKAIKQRTRLKIQLKASLDQTFPELQYFFKSGLHQKGVYALLREAPTAKDVSSMHLTHLAHLLDVASHGHFKKEQAKELRVLARNSVGYPDSAIAIQIVHAVEQIELLDSQIAHVEAEMTDIMKVRDSVIMTIPGIGYINGGMILGEIGDIHRFSSPKQLLAFAGLDPTVYQSGQFQAKKTKMSKRGSKVLRYALVNAAHNVVKNNVTFAAYYDAKMAQGRTHYNALGHCAGKLVRVIFKMLTDNKEFALD

SEQ ID NO: 436419 - protein, 342 aa, unidentified
MSISYVGVDLGSSNFHQVAISERGVITLNRELATSEANLVKAFSGMRGEIHVHLEAGELAPWASEIIRPLVTRVVCSHPQKNAWIARDRDKSDRVDAYKLASLLRLNEFQEVRYPQSQLRRDFKAVVQHYDELTQQQARLKTKIKARLRMQGVITRGQLVFSARGRKAGLQAVKSVLVRTAIQQLYEMLDQSLESQAEARLLMLRTAQALPEIKWFKTAPGVGPIGACRFSAYVHTPQRFSSTRKLWKYCRLSISHRSSNGKPLRRPRLDRSGCGRLKDVSRKAFEAALRTHGDNAFKRTYQRALETTHDRTHARLTVQRKIASTLRAMWINQTPYRDELMR

SEQ ID NO: 436420 - protein, 402 aa, unidentified
MNCVGIDVSKGKSMIAVMRPFGEVVVSPFEVRHTASELSELARLLKNLDGETRVVMESTGNYHAPVAWLLHGAGFYVSVVNAMLVHDYGNNSLRRGKTDKKDAVKLANYGLDHWLTLPRYVPEEDTRLMLKTCYRQYQQYSKVQTMLKNNLISLLDTAFPDANRLFTSPPRADGSEKWVDFVAAFWHCECVCGLSKKAFTTKYQKWCRKHSYNFSEDKALDIYVSACGRFGVMPKTKTAKLLVEQAISQLQATSAALAALKQEMQSLAASLPEYPVVMGMFGVGPTLGPQLIAEIGDVRRFHSKKALVAFAGIDAPPYQSGQIDVRSRSISKRGSASLRRTLFLVMGVLLQCAPMDEPVYQFMNKKRSEGKPYRVYMMASANKFLRIYYASVKAYLDSLEHD

SEQ ID NO: 436421 - protein, 343 aa, unidentified
MEAITTIGLDIAKSVFQVHGIDAEGNVIFRRQLKRRYVLTFFQKLPPCLVGIEACASSHHWSRELQALGYTVRLMPPAYVKPYVKRHKNDATDAEAICEAVTRPNMRFVATKTPEQQSCLTLHRTRHLFIRQQTSVINAIRAHLAEFGIVAPVGRQGVEQLLGVAADTNDKRLPEVARACVAALGAQLRMLKAQILQFDRMIRAWHRSNEESRRLDDIPGVGPALATALVASVADPKAFRSGRDFSAWIGLVPKQNSSGGKDKLGNISKRGDRYLRSLFTTGALAVIRYAKIHGTKHRPWLTALLTRRPTKVAAIALANKIARIAWAMMAKGERYKEPAALAA

SEQ ID NO: 436422 - protein, 412 aa, unidentified
MKVVYEICGGIDVHAKMLVACLLLANGEKEIRTFSTMTDDLLRLRDWLVAARCTHVAIESTGVYWKPVFNILEDALTVILINPEHAHALRGRKTDVKDAEWLAGLLRHGLLKASFIPPPEIRELRELTRYRESLVREQSAVANRIQKLIESGNIKLAQVASDALGASGRTILWALARGETDPVKLAALAQRQLKEKRVQLERALHGRLTVNQRFVLRELLQRWEELEAADRRVTKEIDRYLQERPKLARARHNLDTIPGLGPRAAENIIAEIGTEMKANFESDAHLASWAGICPGNKATGGKRLSGRTRKGNTYLRSALVQAAWGASLKKNCYLSSQFFRLVKRLGRKKALVAVAHSLLVIIFHVLQNDQTYTELGGDYFDRQHVGQQRDYYLRRLQMLGLKVTVEELSVAA

SEQ ID NO: 436423 - protein, 339 aa, unidentified
MKLYVGVDLHANNNFMAIVDGKGKRLGQKKLPNDLSVILEFLKPYRKEIVGLGVESTYNWYWLVDGLMEACYPVHLANPSAMEQYSGLKHTDDQHDAFWLAQLLRLEILPEGYIYPKEERPIRDLLRKRGHLVKLRTSLILSLQNIISRNCGVQFPVNEMKCLKEDRVSPLLEGNEDLTLAGKTSKETIDHLTLQIHKIERGVVERVALKEAYRYLLTLPGVGKILSLTIMLETGPIGRFAQVGDYASYCRKVPSRWTSNEKTKGKGNQKNGNKYLAWAFSEAAEFARRYDAQARSYYTRKMRKTNFMVAHSALAHKLSRAAYYVMRDQVPFEPEKLFT

SEQ ID NO: 436424 - protein, 275 aa, unidentified
MKKYLVTVGIDVSKLKLDVRFVFDINSKEHPHIIVANNEEGIRAIIAFLKTKKVQTCDALFCFENTGLYSMPLAIFFSKHQLDYWDIPAIEIKRSKGVARGKSDKIDAKDVAFYAITHSYQLKLCQVPEQDILKLQLLYSEREKLIKALHAMQASTEVASFLPKEIIKEVIAINKKTTAHLKASLKQIDERIAAIIKSNQSINTCFDLSVSVPGVGKQSAVYLIIKTRCFSRFDNWRKLACYAGIAPFEYSSGSSIRGKTKVSHLADKKMKSLLQ

SEQ ID NO: 436425 - protein, 340 aa, unidentified
MEQRYIGIDLHRNRFTCCIRLENERTYLTGWELEDLGKFVKKLRPTDEVAVEITGNTRLFHDAVAEHVARVVVVNTNQFRMIRQSVKKTDPNDARTLALYLSKNILPEVRMKDKEHGQLASLTQTRDTLVKLRTALKNKINNILSARGLNLPKEALSSEKRLNEVLALPFDEIVCIELRVIVEQIRSLNQSIAELEKTIGEEGSKLEGHKGLSSIKGIGKITGAILLSVIGDVNDFADEGHLASYFGIVPRVSNSNETEHSGRIHKRGTKLGRTALVQSALIAANYSPYLKRFYEQVKARRGAGKAIIALAKKFLGIIYRTLKNKWVFEDFPNFVLAEES

SEQ ID NO: 436426 - protein, 346 aa, unidentified
MNYYAGLDVSLKEISICVIDGTGTTVARGVSPADPEGVAGWFRARSLSPELIVHESGQLSIWLQRGLERLGLPVFCIDARRAHKSLSARPNKSDAADAEGLAQLARTGWFTPVHVRTEDADRLRALVSARAQLIDLRKDLEGHIRGILKTFGIRLTGIGKGRQRQGFRDQLAAAGERDPILRTIADGFISVHTTLCQAAAELDRAVKEKAETHPVTRRLMTIPGVGAIVALNFVALIDDPSRFRKAENVGAFLGLTPRRHQSGEIDWSGRVSKCGDGVMRSLLFEAATTLITRVQKFSALKSWAVRLAGRRGFAKAAVATARKLAVLMLTLWKNETEFTWKKEAVA

SEQ ID NO: 436427 - protein, 331 aa, unidentified
MTYIGIDVSKATFVVAYSSEKNSKTRTFKNTVKGIHAFVQTLSFKEDHCIMEATGNYSSLLVYLLNEAGVTTSLENPLKIKNFARVMLSTIKTDEVDARIIALYGERMQPRPYKLPSDAILTLKQKRTVIRQLKKQLIATRNLKGSMEVLPFFDPPCKKSVTQAITFLEKQIKTLEEDLSVLAHKEYKKQMDLLTSIKGIGVTLAAALIMATGGFTYFDNAKQLTRYLGLSPNYQQSGTLVNFKGHINRNGDISLRSQLYVAAFASLRCNKECRVCYDRLRSNGKPGKVAVIAVANKLVRQAFAVVTHEKPYVDGYVSTLGSAETSSSVEG

SEQ ID NO: 436428 - protein, 347 aa, unidentified
MRFYTKQHKFYCGIDLHAKKMYLCILDEAGEVRLHRNIKTDREVFLKVIEPYQEDVVVAVECMFTWYWIADLCTAEGIPFVLGHALYMKAIHGGKAKNDKIDSHKIAVLLKGGMIPMAYTYPATMRATRDLLRRRNHLMRKRAELYAHIQNTRSQYNLPDTLGCIAKPQNRNGIVERFEDPSVQKMINADLAVIEAYDPIIAKMERDIISMANHHDPVAYALLKSIPGVGRILGLVILYEIETIKRFPSVQDFVSYSRLVKCSKESNGKKSGTSGKKIGNAHLKWAFSEAAVLFLKGNDPGKRYLDRLTNKHGKGKALSILAHKLGRAVYFMLKQKKPFDQDTFLGL

SEQ ID NO: 436429 - protein, 344 aa, unidentified
MQPQEYVGIDLHRRRSVIVRRSSEGETLEVTKVDNDDLLAFERAVTAAGEHPEVVLEACYGWYWATDLLEELGCKVHLAHPLGNSWGNRRVKNDTRDAEDLADLLRLGRLAEAWIAPPKVRELRELVRYRAKLVSLRTNCKLQVYAVLAKEGVNVPMTDLFGVSGTELLESCHLATVYRTRVESLRDLIEVFDAEITKLEGDVRHELRGQVGYQAIQQIPGVGPLFASVFVAEIGDVTRFRSPAQLASWAGLTPKHHESDLTVRRGPITKQGSRLVRWAAVEAAQRQANRTKLRADFVRIAAHHGDSAGARKIARVAVARKIVTLVYYGLRDGTIRSKAISEAA

SEQ ID NO: 436430 - protein, 409 aa, unidentified
MLFVGDDWAEDHHDVEFVDEAGRRLAKARLGEGVQGITRLHELVAAHVPEDAEPGQVVVGIETDRGPWVQALLASGYQVYAINPMQAARYRERHSTSGAKSDAGDAHALAELVRLDRAAHRPIAGDSDLAEAIKLVARAHQTLIWDRHRHLLRLRGALREFFPAALDAFDDLTAPDALELLGAAPDPATAASLSHARIRGALHRARRRNPAGRAVQVQAALRAEQLGQPPVVTGAYAAIVRSLTAVITALNTQIKAMEVQVVTHFGRHPDAERYRSQPGLGDVLAARVLAEFGDDPTRYAGARSRKNYAGTSPITKASGKKKVVLARYARNDRLADALHQQAFCALTASPGARAYYDTLRARGIGHHAALRQLANRLVGILHGCLKTGTRYNEDTAWAHHSHQAQRAAA

SEQ ID NO: 436431 - protein, 352 aa, unidentified
MKQDKYMGLDVHQATTVAVVLDAEGKVILETMVVTQAASMVRLIESLNGPMHVTLEETTQAEWLYEVIRPHVQEVVVCDPRRNKLLSEGSKADKVDARKLADLLRTGMLRTVYHGYETRKLKELVRGYENLSSDMQRVMARIKAIYRGRGIATTGRGVYQPRQREQWLEKLTESGLRQRAELLHEQLDQVRLLRKKARQAMVSESRSHRAVNLLRTIPQLGPIRAAMIAAIVDTPYRFRTKRQFWSYVGLAVVTHMSAEYEMKEGKVVRRRKPVATRGLNRNCNRRLKEVFISAATGGYRHEPYKTYLEKLKHNGMRAEMARLTLARKIAAAALVVWKTGKEFDPEKLNMTT

SEQ ID NO: 436432 - protein, 429 aa, unidentified
MNTFAAGIDIGSRFHVVAVSSGLCDEPVQTFQAFAGDLQRMANWLVATGTKSVVMESTGVYWVAAHEILEARGLEVILANAREALALPGRKSDVNDAQWRQRLHACGLLRASFRSGRAVAKLRAYLRAREKHSDYAAAHIKHMQKALTFMNIQLQHVIASITGVTGMKIIRAIVAGERDPDKLAALRDVRCKENQETIRGALVGNYQPEHLFALKQALALYDFYQRCIDECDTEIERAVAALNIDRPIPEAPLPKAKHRSKLPSDPGFDVRRAQYQLTGTDLTQIHGIGPFLALRLVGECGTDLSRWPTAKHFASWLTLSPGCKISGGKVLSAHTRKTSNRVTVTLRLAAVTVGRSHTALGAFYRRLAARIGNAKAVTASARKIAVLFYNAMRFGMDYRDPGADYYEQLYRDRVIKQLHRRAAQFGITL

SEQ ID NO: 436433 - protein, 335 aa, unidentified
MKHYAGIDLSMETSHVCIVDADGRKIAAQCVNSTPEAIAALLEHHGPVERAVIETGRMTPWIARGLQELGVPIVCIDARQAHQSLKAMKANKTDPHDAAGLAQLARTGFFKEVHVKSPTAHGVRSVITARSHLVEARVRLDNTIRGLCATFGIRPGAGQGERFLARVQAAVAIPGLGEAIASLLRARIGLVDEIRRMDRELKAISAASPSCQALMSIPGVGVQTSAAFAAAVDEADRFKRSRTAGAYFGLVPRRHQSGELDWTGRITKQGDGTVRKLLYEAANSILTRTKQPFALKTWALKIAKRRGLKKARVALARRLAVIMHAMLRDGTLFEA

SEQ ID NO: 436434 - protein, 379 aa, unidentified
MGVNAEKCTVFGPHKIPNEQLENWIAKHLLLTDAVVMEMSTNTYLFYDTLLPHVGSVIAVHPPNVRLVTGVKVKTDKKAALTLAQLHAAGLLTGVWIPPVEVRELRAVIAQRSKMVRLQTQAKNRLTSLLHCTHRERPAQPFKPEQKAWWESLPLSTIEKYIVASNLETLAFAGKQIDAIGEVLRQEAAKDERVPLLTQLPGIAMLTALTILAAIGPIERFEDAKHLVGYAGLGASVHDSGQMHATGHITKAGRRDLRGAMVNAANAAVRHHPYWKKEFERLEYRLGRSKAIVAIARRLLVAVWHILTNEVVDRHADETGVAASLYKLAYEIKVNNLTKGTSARAFTRQQLDRLGIGQNLEVLPWGGKKVKLPPSQLKT

SEQ ID NO: 436435 - protein, 345 aa, unidentified
MEKFSLFIGIDLGKGEFYAAFRHQSQFVKERKYENTASGIARFIKDIKAFGLDPNQVLIALEHCGVYLEKLLMALYGEGLFTWLWNPLIAKHAPLDLTRHKDDPRDAKSMAILAQNYQAKARRYTPPSAREREIKALSLLRRQLIKQRTQLINQQKNNLDKALPLPLAEEVFQQLIDTLTAQIKQVEKQLQKTLLQSERFKRVYTILTSIPGIGPVTATQLIEISRGFTTFSSEIALAKYAGTLPLKHLSGSSIKRKPRSSKKANKQLKVNLTMGATSQIRKGMFFENFYRYKTEVQKMEHLKVINIIRNTLLKLAVKLVKLDQEFDPDIFRKNKKSWHVFLTLS

SEQ ID NO: 436436 - protein, 343 aa, unidentified
MKLMRIGVDLAKNVFQIHGVDCHELPVWRQRLPRDRWLQTVLEKIEPGCEIGMESCGGAHHWARQLQAHGFRVKLVAPQFVKPYVKSNKNDANDAEAICEAMSRPSMRFVAIKTIEQQDIQATHRIRAGLIEQRTAKANQIRGLVAEYGLVAPKELLMLRRAIPCWLGDADNGLTARFRRLLDGLWDDLRALDGRVCQLDGEITAIATNEPSAVRLQQLRGVGPMIATALVVALGDARQFANGRQFAASLGLTPRQHSSGGKDRLLGISKRGDTYLRTLMVHGARSALRTAKSKEDRLSQWAVRLAERSHPNVAAIALANKTARMAWAMLRHGTDYQPNQAAA

SEQ ID NO: 436437 - protein, 412 aa, unidentified
MTGKIAGIDVHKRVLMVAVEGENREGGKEQFVLRRFGTTVAELEHLKAWLQAQGVEEVVMESTAQYWKPVWFSLENHLRLFLAQAWSNRAPRGRKTDFKDAQRLVRRHRAGELTLSFVPDEVQRQMRSLARRRFQLTRDRVRIQNQVESLLEETRIKLSSVVSDLFGGSGLRILDALSQGQCDPHALASLADARLQCGEEVLREALAANLGSTHRSLLGQHLEMLRLVETQIEQTAGLMAESMRAHLSEIERLTAIPGIRVLAAQQLIAEIGPRASAFASAPQFCSWGGLAPGRNESAGHNASSRCPKGNSYLRRTLCQIAQAAVRTKNSAFEQKFRRLVPRLGYPKAIWAIARSIAVLVWKILHDGVQYIERGAPSTPGAIKRRIQRLRKELRTLGYSDDLKPLAPGVIAS

SEQ ID NO: 436438 - protein, 427 aa, unidentified
MSWMGVLVPYLSQGRIPVKACGKPLCNIFEKVVHPMYYIGIDIAKRAHEICFTNENGDVLDGNSFNIPNTVSGINKLQKQLDKYGLNPTNALVGMEATGHYWLVLYSWLMEQGFDVKVINPLVTDAYRHMLIRKVKNDRIDAEVVAAVLRLGEYQETAVTDHDTLALRQLCRFRLWQVGSASDLKRKVIALLDQIFPEYEHLFSDVLGMSSRELLKVYTTPEEIASIHTTKLTNILTKASRGRFGKEKALEIKAVAKHSLGMTIGVDAFAFQLRQIIEQIEFVEIQIAKLDQEIEAYMDSLQSPVTTLPGVGPVFGAIILAEIGDIKRFPSAKQIVSYAGLDATVNESGEFKGQRSSISKRGSPYLRRALWGAAFVASWSDPELKDYYQRLRKRGKHHSVAVGAVARKLCYLLFAVLSENRPYEVRR

SEQ ID NO: 436439 - protein, 412 aa, unidentified
MEVLYPRCCGLDVHKSSITACVLLAQAGKPLKHIRRFGSTTRELLELVAWLREFGVEHVAMESTGVYWKPVWNVLEGHFQIVLANAQHIKAVPGRKTDTKDCQWIAELLQHGLLRASYIPSVMIRDLRDLTRARTSLSQEHSRIASRIQKVLEDANIKLASVASHALGKSGRAMLEAIIGGEESPERLADLALGHLRLKIPQLQTALEGRVRDHHRFLLRSLLRQLQFLEAEIALLDARLDEIGREHLDLAEALDRWITVPGVDRVAAWSFIAEMGIDVTQFPTAAHLASWAGVCPGNNESAGKRISSKTRKGSPWLRRMACQSAWAAARTKNTYLSAQFKRLAARRGRKCAIIAVAHSILVIGYHLQRRNCTYTDLGNNYFDRLHADGLKRYLVKRLESLGLSVTLQTRTA

SEQ ID NO: 436440 - protein, 353 aa, unidentified
MTSEKYVGLDVHKATIVAAVQDASGKCLITSVIETKAETIRAFIKGLAGTVRVTLEEGTHASWLFDLIKPLVAEVVVCNPRQNALLQSGNKSDKIDANKLADLLRAGLLKPVYHEAHGTQTLKQLAQCYETFVSDNIRVMNRIKALYRGRGVDCSGTGVYCESQQKDWLAKLEGPGARSRAQLLYTQLESVKKLRRQARNELIKESRRHAASKLLTPVPGLGPVRVALILATVVTPFRFRTKRQLWTYVGLAVVTKDSAEYEIVGGRVRKRNKPRSTRGLNRNYNRRLKKVFKSAALDATRTEPFASYYRDLIKKGTSPEIARVNIARKLAAIVLSLWKRGEEYDRQRMKKSA

SEQ ID NO: 436441 - protein, 398 aa, unidentified
MVCVGIDVAKDKHDCFIMSSEGEILADVFTIPNNMDGFELLLERIRSCSPCNDKIKIGLEATGHYSLSILGFLINCGLPTYVINPLLTNQYRKVKSLRKTKTDRIDARTIAAMLLSDVGLTPYTDTSYHNEELKSLTRYRFDKVQERAKLKQSLSRLVTILFPELEKLVPTLHMATVYALLLEFPGAKQIAEANLTHLKNLLHHASRGRYGRERAIEIREAARRSVGSVIPAKSMELKHTIQLIRVFDAEIAEIEAEINRIMAEIGSPITTIPGIGNRMGAMILAEIGDISRFDSPDKLLAYSGISPSTYQSGKLRNAYAHMEKRGSRYLRYALFNAAKYVCNWDDSFAAYLARKRAEGKHYYVAVSHAVKKLVRVIFALLKSGEAYDPRKLSCSLGA

SEQ ID NO: 436442 - protein, 341 aa, unidentified
MNEISIIGLDLAKNVFQIHGSGSDGSVALRKKLNRGRLLEFFAQLPICVVAMEACASAHYWGREIGKFGHEVTLIDPSYVKPFIKRQKNDAADAEAIAEAASRPTMRFVSVKSAEKQASSMAFKVRDLLVRQRTQTINALRGHLMEYGLIIPQGIKHIPLLHEQITTNSDLPEVARVLCKGLLEQVVFLSEQIAVLEKELRTRARQDELASRLMTIPGVGPICATAIEALAPAAETFSRGRDFAAWIGLTPKQNSSGGKDRLGKVSKMGQRDLRRLLVLGATAVVRWARRYEAPAGSWLARMLLKKPPKLVAVALAKKLARTAWALMARGGVYQAPASGTV

SEQ ID NO: 436443 - protein, 373 aa, unidentified
MEEGIKFFVGVDAHKESLSVAACEAGSREAGRFVGTVRDLRGLLKVLGKAGKASELHVVYEAGPTGYGLYRELKRRGYRCEVIAPSKIARRSGERIKNDRRDCVNLAEQSRAGQLTAIWVPDEAHESIRNLWRAREDAVRMRLQSRQQLKAFLLRQGRVYSGKTSWTVTHRRWIASQAFEQAADQMALAEYQLAVEAAEQRVERLTQALSGLVAGWRFEPVVAALRALRGIDTVSAVGLIAEIGDIGRFPTARHLMGYLGLVPSEHSSGSRLRHGSITKTGNAHARRLLTEAAWNYRFGARIGKALRDRSAALPQPIREHAWKAQQRRCGGFARLDGRGVQRNKVGVAVARELAGFIWAIARMAQSSSAAPAR

SEQ ID NO: 436444 - protein, 348 aa, unidentified
MRGAIHVQITTIGLDIAKNVFQVHGIDVAEKVVVRKQLRRSQVLAFFKALPPCLIGMEACATAHYWARELTKLGHEVRLMPAKDVKAYVKRNKNDAADAEAICEAVRRPTMRFVQIKSPEQQARLMQHRARDLLMRQRTQVINALRAHLAEFGITAAQGNAGLKELLAIIASEEDERLPADAHAILIVLAAELQAMQTLIASIEKRIMAQHRASGESQRVETIPGIGVIGATAIAATVPDPKVFRSGRDFAAWIGIVPRQDSTGGKQKLGPISKQGDRYLRRILIVGAISVLRRAQENPGKYPWLTQLLARRPFKVVAVALANKMARTAWALLAKGGTYRAPALAAAA

SEQ ID NO: 436445 - protein, 390 aa, unidentified
MIYVGIDVAKDKHDCCILDDEGRKMYPIFTISNDKVGFDELFSRIEKVTSDKTEIKVGLEATGHYSNNLLASLVDKGFPTVVINPLHTNLYRKGLSLRKTKTDKVDASSIAMMLMADRTLKPYSETSYHNEELKSLTRYRFDKVHERSKLKSSLARLVNILFPELEKLVPSLHLNSVYTLLEELPGADYIAGCHLTHLKKLLESSSKGRYSRDKAIEIRNAAIDSIGTPMDAKSMELRHTIHLIWILSEEIEEIEASIKAIMDEMQSPIMTIPGISYRMGAMILAEVGDFERFDNADKILAYAGLSPSTYQSGQLDSSHSHMEKRGSRYLRYALFNATKFVCKWDESFGIYLGRKISEGKHYNVAVSHAAKKLIRTIYRMELTGQAYSPS

SEQ ID NO: 436446 - protein, 350 aa, unidentified
MIVGIDVHKHTHAAALIDERGGLIEALSIANSPKGYRQLIDWLVDQQAANAVIGIESPGSYGRCLVAALSGAGFEVLQVPPWRTHRERHRRGPGKTDPGDAVSIAKVVLIDRDELGPAEEPELVRALGMLELQRRRFVRDRTQAIQRLRSDWTQLDPVAEAATIRCDRQRELRKLKRIQLGESLAQRTAARCIRELARDVDDLNQRIHDLDIEIADLLAEHGSPLEDIHGVGSNLAATIVAQAGDVRRFRNAGAFARFCGAAPIPCGSGQTSGRHRLHRGGNRQLNAALYRIAIVQQRHHPQAKTFLARKIAEGKTAREARRALKRHLANVLYRQLIAWANSTPAMNHLT

SEQ ID NO: 436447 - protein, 370 aa, unidentified
MNSITYIGLDVHKTTIAVAVAEGGRLGDVRQLGTFPNRADVLRKMVERLARPGGQLSFCYEAGPCGYGLHRFLRGLGHACAVVAPSLIPIKAGDRIKTNRRDAVTLARLHRAGELTEVWVPDAAHEAMRDLVRARATAAKVLSKARQHLSGFLLRHGKIYSGVRTWTQAYRRWLTTVRFDHSAQQIVLQDYIDAVTDAEQRVGRLTRQITELIPDWPMAPVATAIQAMRGMALINAVTVVAEVGDFARFGNPRQLMAYLGLVPSEHSSGSRVRRGGITKAGNVQARRALIEGAWTYRMQARVSRKLHDRLEPLPQDIRDIAWKAQVRLCSRWRRLAAAGKPKVVVTTAIAREMAGFIWAIARQVQPQTIG

SEQ ID NO: 436448 - protein, 371 aa, unidentified
MSSTNNVCNVSEELKDIYVGIDVHKDSWSVTVRSKNLELKRFRMSKPTPEMLHKTLLTKFPGFRYHLVYEAGFSGYSLYEYFNERGIDIIVTPPNRIPKDFSKVKTDKLDSSKLAKYLASGLLKKVLVPSKDIQHYRLMFTMLDKLKSQRKQIINQFKSQLDLLDHPLKNRPWSTSLQCQLELTEFPYAQYNEVFHTHLKNLRTLEKHIAEMERTIKEVANDPKYRHIIQHLDSIKGISLLSAIRLTVFLFDRPDRFSSSESLCNYMGLTPSEHSSGEKENRGSITRIGNKQLRALLVQMTWIAVRYDGDLLMKFEELLSRGKNKKQAIIAITRRFLVKIYQSLKRGEAYEPHLGLNVSPEAKKQIAPTLP

SEQ ID NO: 436449 - protein, 442 aa, unidentified
MATSKKVCSPEPEVSFKPLAVFQDTDSPFSSAGSQRSVPGQILICEGVDAPVSWVLPSRLNTKYITKEGDTMNPLYVGIDVSSRSNVVYFMRPDGTKHSCFPVTNSLDGARQLSKRIVSAITSESLTDIIIGLEATSVYGDNLVCFLREDGHLAPYNKKIHVLNPKQVKKFKDAYPDLPKNDYVDAYIIADALRFGRINNEVYMSDYRYKALQNLTRARFFAVQNQTKEKQRFLNYLFMKYSSLAQEKVFSDTFSTTALAVYEEFSSADELAYMDLNEPTDFIRLKGKNRFPNPEEVAKSIQAAARGSYRLPKTVNDSVNQVLSLSISSMRALDAQIKAFDKVIAEQMELIPNPLISIKGIGPVYSAGIIAEIGNINRFQNQAALAKYAGFAWTQNQSGNFEAEHTRLIQSGNRFLKYYLSEAAFSLVRCDSEYKRYYRLKY

SEQ ID NO: 436450 - protein, 400 aa, unidentified
MNAVGIDVSKGKSTVAVLRPFGEVVASPFDVIHNDNDLKRLVKLIRSLPGESKVVMEYTGTYFEPIAQFLHNNGIFVSVVNALLVHNYGRNSLRKVKTDKKDALKLASYALDRWTELDEYVPADEQRRTLKLLNRQYNQSIKIQTTMKNNLISLTDSVFPGINRLFTSLERQSDGHEKWVDFLHAFPHKDCVAKLYLSAFKAKYKSWCSRNKYRYSESKAEKIHSYAKSVIAVLPPNESVKLLVTQVVSQLNTILETAFSIRTEMDRIASSLPEYDTVMSMFGVGKVYGPQLIAEIGDTRRFRNRRAITAFAGLDAPPYQSGQLDVSSRHISKRGSAALRKVLFQITEIFILSKPENEPVYQFIIKKRSEGKHYYSYRIAAANKFLRIYYAKVNQVLNAT

SEQ ID NO: 436451 - protein, 391 aa, unidentified
MVCIGIDVAKDKHDCCILDSEGTTLVDCFTIPNNMDGFKSLLQTIQDCSQKSDKIKVGLEATGHYSYNILGFLLDNDLPVYVMNPLHTNLYRKSLSLRKTKTDRVDAKTIATMLLSDVDLKSYTDTAYHNEELKSLTRYRFDKVQERAKLKQSVSRLVTILFPELEQLVSSIHGTSIYALLSEYPGAKQISEAHLTRLANILVKTSRGHYRKDKATHIRDAARTSIGSVMPAKSLELKHTIKLIQELTSEINEIEDAIRKIMDELKPPILSIPGMGFHSAAMILAEVGDFSNFNSPDKVLAYAGCSPSTYQSGKLTNCYAHMEKRGSRYLRYALYTATKYVCYWNPVFTEYLTKKQAEGKHYNVALSHATKKLVRLIYALQKSGKAYLAVT

SEQ ID NO: 436452 - protein, 310 aa, unidentified
MERIYVGIDVAKQHVDVHVRPTDESFRVSRDDAGLGELVARLSGLAPTLVVLEATGGYEIAVAAALGGAGLPVAVVNPRQIRDFARATGQLAKTDALDARNIARFAEAVQPVARPLPTAQAQALAELVARRRQVVEMLGAESNRHQQARDPRVHRRIASHLRWLTKALAELERDLDDTLRASPLWRATDNLLQSVPGVGDVTAFTLIADLPELGHLDRRQIAALVGLAPLNRESGTWRGHRMIAGGRPVVRCVLYMATLTAIRFNPVIAHFYQRLVAAGRPKKVALTAAMRKLLTILNAILRDQRPWQPA

SEQ ID NO: 436453 - protein, 361 aa, unidentified
MSSMPQSTPSDPAEVVLGVDTHKDVHVAAVLTTLGVLLATSTFPTTAVGYRRLLAWARGFGPVGRAGVECTGSYGAALARYLLAATITVIEVNRGDRGERRRRGKTDTLDAETAARAVLSGRATAIAKSGDGQVEMLRMFKLAKASAIKSRSQAINQLKAVLVRAEPTLRESITGLGNPALFRRCAQLTVSDPCDPAGAAALTLRLLARRVLTLTSEIDELNVHITAAIKTHAPQLLQRYGVGPDTAATLLLAAGDNPERLTSEASFAALCGVSPIEASSGKTRRRRLNRGGNRQANSALYTITIARLRWDKRTQHYIRRRVAEGKTRREAIRCLKRYICREIYRDITLARDQPAPASSAA

SEQ ID NO: 436454 - protein, 355 aa, unidentified
MLYSGIDKHKDNCFVTTVNDQGIIVGEVRVKNTVADISAYFQSFDTETHRAVVESTTGWYWLDDLLKTLGVELVLAHAKYLKAIAYAKVKTDKVDARTLAQLLRMNYIPIAHKSRPELREVRDLTRARLRLVWKRTSCYNSIHRLGEKFNCDHLIDPGENVLPEELPLLYKEQVTCLHHQIVLLTEQIKHLEHLLNERLIDNDVIQHLLWIPAFGRITAFSVYLEIDGIERFASEKQLFSYARVVPGANNSNHSRRHKSGNKDGNKYLKIAFTDAAVHAVRFYPEIRSFYQKMCRRSNEAIARTVVAKELARIVYYMLKNNTTYQGFKGQPIQQHKVAAWPRRTTFAPASLAAQL

SEQ ID NO: 436455 - protein, 348 aa, unidentified
MILLGVDPHKSTHTTVAVAPEANRQLASVTVGARLPEYRRLLTWARKWPERTWAVENANGLGRHLAQWLIARGERVVDVPASATSRVRELSRGGGRKNDQIDAAAAATVACLHGDGREVGAEDHATALALLDERRVNLTQARVRVVNQLHALLRDLLPGGGPGQMSADQAAALLRTVRPVGAVEKVRKGLARDLVAEVRTLDKQLVANAADLETLVKAANSTLMHTPGIGPVLAARLIARVGRAGRFPTAAAFANYTGTAPVEIASADKSRHRLSRSGDRQLNSVLHTIAISQVRMPNSPGHVYYQRKLSEGKTPREARRCLKRRLADHVWKVMLADERRTRPPAVTP

SEQ ID NO: 436456 - protein, 388 aa, unidentified
MQVAADRTDASTAIQTDLPAIFASLELSRSTWLITSLSPGAGEKMSKHSIRAGDVAGLLVRLAQLKEKARGRTGRDFPIVAIQEAGLDGFWIHRVLQSEGIESHVVDAASILTSRRRRRAKTDGIDGETLVRTLLAYKRGEPRVCAMVKAPTPEEEDRRRICRERKTLVGERVEHVNRIKGLLFAQGVSDYEPLKRNRRARLEELKTGDGRPLPAHLKAQISRELDRLELVLPQLKAVEAERDTLLKPVSEGCPTPAAMLAQLKGMGPEFTAILWSEGLFRSFSNRRQLAAYAGLAPTPWQSGSVAHEQGVSKAGNPRLRTTMIQLAWLWLRHQPTSALSVWFQERVQSNGGKMRKTTIVALARKLLVALWKYSISGVIIEGAAMKTI

SEQ ID NO: 436457 - protein, 345 aa, unidentified
MPIVGGLDIHRKQITFNYLDTETGVVKRGQIAPADRAHLRAWLTQFAGRDDVAFALEGCTGWRYVSEELAAAGVAPHVAEPADTAFARGRKRHAKTDKTDSRHLRELLAEGRLPGCWIPPSHILECRALLETYHDLRAEHTAWVQRIHAVFFHQGAPALGDGALRTGDDLEALRAAAACHLSPAGQLQVDTALDMLAALEARLDVLRHRLLDAARGLTGAKVLAERLYGVGPVTALAMTCWLGGAGRFSSSRKAVRFAGLDITVWSSDRKGPPGRLSRQGPEVLRWCVYEAGKTHARASAPDHRYYAAVKDRQGGKRAALSEARKILRQACHILAELGDDALTAA

SEQ ID NO: 436458 - protein, 389 aa, unidentified
MLLLGIDIAKLNHVASLVDSESGELVFSNFKFQNNMPGFFSLYEKIVDFSIKDIIIGLESTAHYGENFINFFFQKGFKIAVINPLQTSHLRKANIRDTKNDHLDSITVAKALLFDNFKFISQNNVSNFALKKLTRFRKSLVKQRSRSKIQLVSLLDIIFPELQYVFKAGIHTKALYALLKKYPSTEKIAALREKSLFSILSKASKGHYDLDSALLLKSHARSSVGVKDTSISIHIPQLIELIELLDKQIKSIEEEIEDSLDNESPVLTIPGISNVAAASIIGEINDISNFDSPSKLLAYAGLDPKVRQSGNFNASSCRMSKKGSPYLRCALIFTAWNLVRNSKRFKEYYLIKRAHGKSHYNALGHVAHKLVRTIYTLLKKNISYQELII

SEQ ID NO: 436459 - protein, 436 aa, unidentified
MASHCQFYNYKFQEVILLSFKILKFKCCGLDVHKTWIYACIGITDSNNRTEYKQARFSSFTKGLNELCDWLAKYNCTDVCMESTGKYWIPVFNILEQHNLWVTLSHPKYTKPMKGNKTDRKDAKWICDLYMCGMVKPSFIPPADIRELRDLVRYRYKLTCMITGEKNRAQNCLTVSNLKLDDVFSDVFGKSSRSITEQILQHPGEKFDVAPFVHGRCKTPIEEIQAAVDGAISKEQAVKLRQCLDHIDELNKHISELEQEILRLSDKYEAALNLIRTVPGFDKNPMTAVQILSEIGGDMSVFPTAKHLVSWAGCCPRNDQSNQKIKSTRISRAGSYFKPVLVQVANALIKSKKHLEFTNRYKRIKARRGHKKAIIAICRMILTAIWHILSDLKPYTPEGFLESHPVKEGKVLSSSQALNFFKQRGYIIKNEPLSVS

SEQ ID NO: 436460 - protein, 360 aa, unidentified
MRTKVNENLFNGQNFYIGIDYHKKSWKVTIQGEDYEHKTFSQNPDPVILSNYLHRNFPGATYHAVYEAGFSGFESCRELNQLGINCNVIHPADVPTTQKEKLQKSDKTDSRKLAKSLQNKNLEFIHIPERQLEADRALVRQRFRAVKDVSRTKNRVKSLLFQFRINIPDRFTASQTRHWSKVYTEWLKSLDVKEESLRQTLDNYIKIGERQRKELLEINKQVRKLAQNDAYYKNYNILISMPGIGLMTAMTFLVQIGDISRFKRLDELCNYVGLVPKMYGSGDKMQTGKMMKRGRKELKIMLIEASWEAVRKDPALMLKFNELSKRMNKNKAIIRIARKLLNRMRYVITHQEDYSLGVVK

SEQ ID NO: 436461 - protein, 427 aa, unidentified
MVLLPKKALSFKLSNKILRAMKKKEVIEFEQLVDCGCGMDVHKDLIVATIQGKSIKTQTQSFKTFTSSLIKLKEWLLKNGVTHVAMESTGVYWKPIFNVLGDDFKILLVNARHVKNVPGHKTDKKDSLWLTKLLLSGLLKGSFIPERPIRELRDLARYRTKLVNQISAERNRFQKILEDANIKLSSVLNDVFGATGTKIINHILLHESYRPEELLQYVHGKVKASRTDIKEALTGYITLHHRFMLKTIMGNIARIESTVAEVNAQIEICIEPYKIERKLLESIPGVGIDGATCIIAEVGVNMDQFPDQNHLASWAGVCPGSNETAGKNKSGRITYGNKYLRSLLVECGWAASRTKNTYMSAKYKSLVGRRGKKKTIIALGHKILIATYFIIKNKVAFKELGEDHLNNFRKDRLIAYYKQQLEKLTAA

SEQ ID NO: 436462 - protein, 319 aa, unidentified
MQSKLTFGMDIGKNEVVVACHEGAFAILKMANAVAGLRRWLGSVPAGSRLGLEATGGYHEPVAELAYSLGFTVYILNPKDVHFYARALGARGKTDRLDAQIIAAYVAEHCARLHPFTPLSADEKLLRELARRRATLVNAKSMLQQSLRVLPGFEREGRELLRAMGSFADRLERKLAQIAARSSERATLVKRLQTIDGVGTLTSIRCATLFTRVPFHSSDAVVAFFGLDPRPNDSGQHRGRRRLSKRGPSEDRRLLYNAAMSAIRTPTWRPLYQHLRNRGLASTEAIIIIARRMVRIAFAMYQNHSDFNPRLVPRPSCPA

SEQ ID NO: 436463 - protein, 342 aa, unidentified
MRQLGSVRHTPEQIAKLAEKLAKGGRRLSFCYEAGPCGYGLHRQLTDLGHDCIVVAPSLIPMKVGDRVKTDRRDAVMLAKLHRSGDLTAVWVPDSAHEAVRDLIRARATAVRVLGKARQHLQGFLLRHGRVYAGKRGWTLAYRRWLTTVRFDHPAQQVVLQDYIHAVTDAEARVERLTRQIEDLLPHWSMAPVVEAVQAMRGVAFIVAVTVVAEVGDFSRFDNPRQLMAYLGLVPSEHSSGATVRRGGITKAGNALARRALIEGAWTYRMQARVSRKLHDRLENLPQAIRDIAWKAQVRLCARFRRLAATGKARVVVTTAIAREMAGFLWAIARQVQVAPAA

SEQ ID NO: 436464 - protein, 379 aa, unidentified
MRQVCGLDVHKDSVFVCILNEKGVVFQEKFGVLTPELERMVGVIMEHGVTEVGMESTSVYWMPVWRVIDPYVEQKLVNPYFIRQLPGKKSDVKDAEWIATCILKGLVRGSYVPEDRIQRLRQYDRRIFDLNDDIVYRLAKLDAALQRCNIRLSNYVSTTDCKSYGDVAGAIAGGETSPDALLKCIHGRIVNKHGADVIRSALTGVITPADVDVIRQLLEEIELARRHRDECQRRMDELCAEWFPEQYANLQTIPGVKARSAAAIIAEVGTDMSSFEDAAHLVSWAGLRPRNDESAGRIKARGITHGNKYLRKTLIECAWGASKTRGCFYSRFSYHQTVVRRKSRMKVQVAIARKMLSAIWFILHDGVAYRDFEGDANAA

SEQ ID NO: 436465 - protein, 318 aa, unidentified
MEQPFIGIDVAKATLDAYVHPSGARFPVTNDDKGIKTLLEQLQAFPQATVVLEATGGLEFRVAAALASAGFRVAIVNPRHVRDFARAIGRLAKTDPIDAEILALFGDRVRPEPRPIPDSALRSLEAHVARRRQIVDMITAETNRLGQAIDADIKKQIKRHITWLEHELKSVDTDLGDAVRQSPIWRAKDQLIQSTPGVGRVTSFTLLAQFPQLGTLRGKQASSLVGLAPFNVDSGTLRGRRHIWGGRASIRSVLYMATLSAVRYNPVLAEFYQRLLRAGKSKKVALVACARKLLVILNAMLRDNRPWSPAPLDPQHGC

SEQ ID NO: 436466 - protein, 352 aa, unidentified
MESITYLGIDFHKRTSTLCFMNEKGGDIEMVNIHTKNLNKFLANRKNLLIGIEASGGTNDAAEKLKLSGHDVQIVNPNKLGLVGQGGKKTDEKDARAIADCLRLNFVCEVHHKSRRARELKSLVVGREMLVRSKVNQINHIRGTLREYGITMPAGVEKFMALARASIEKIDCGYLKEHLLYLLDRTVDLEERIKHTEDHLEKILEENEQAKNLRTVPGIGLMTVAAILAVVDDVSRFKDAKSFASYLGLVPREHSSGDKRRMGSITRSGSEIVRRYLIHGARCILALSSRPTKYDSDPNISWAQHLKSRIGMNKATVALAHRMARTALAILRENKPYEAKKPKRLKTIDLAS

SEQ ID NO: 436467 - protein, 393 aa, unidentified
MICVGIDVAKDKHDCFILSSEGEVLADVFTIQNNAEGFDTLLQTIRRCVCPGDKIKVGLEATGHYSYNILGFLLDKGLDTYVINPLHTNLYRKSLSLRKTKTDRVDARTIAAMLMSDVDLKSYTDTAYHNEELKSLTRYRFDKVRERAKLKQSVSRLVTILFLELEKLVPSLHMASVYALLSEFPGAKQVAGAHLTHLKAVLYDASKGRYGRDMATTLREAARCSVGSVMPTKSLELQHTIRLIRELDAEIEDIEAAIQSMMDEMQSPIMTIPGIGVRMGAMILAEIGDFSRFDSPDKILAYAGMSPSTYQSGQLSLSGAYSHMEKRGSRYLRYALYNATKYVCLWDPVFAAYLAKKRTEGKHYNVALSHAAKKLVRLIYAMEKSRQSYRNAA

SEQ ID NO: 436468 - protein, 397 aa, unidentified
MYIVGIDIAKRKHEAAVIDGEGTVIIKPFSFTNNCSGYNRLLAMLAKAKLPLDEVSFAMEATGHYWLSLFTRLQKEGFRVQVINPVQTNSIRNFYIRQAKTDPRDALLIAEVIRFGHFSESTLHPENIYELRELCRGRHAIVSMQADVKRKVVALLDQVFPEYETAFTNLFGDTSMAILQTCPTPKELSEIPLEELCHLIEVSSRKRFRMAKAQELQALARNSFGFAMAGDVFSTMIRLYVKHLDFLKQQVREMDRKIAEIMETLDTPITTITGIGPTLGAYILSEIGDINRFSSAAKLAAYAGIDPTMRQSGEYNGVRNRMSKRGSPYLRHAIWLATSSAVLHDPALKLYFQKKRDEGKPYMASVGHACRKMVSIIYAVMRGNKAYTPYIPNEISA

SEQ ID NO: 436469 - protein, 473 aa, unidentified
MGKANGMTRGDRRRNGRREQLRAMLPRDGAVIGIDLADEKQALAVIDHDVRVLARKTVRVKAFRLGEALDWAAGQARARGFTSVTVACEPTGPRWLQVQRLCAERGLPLVCVQPLVTHIARQQQDYTAHKTDEADCVMIARLAAELHCYVPEELDEVWADLRHLGRRRTALITSGTASVQRIRDFLSVAWPVVPEACAKPFESMTWLAALQAVTSRCGGQPEELADLGVEAFTGLVRSAVPGWGGQRVHGPVCKTVFAALTSTEGVVWAHRRGLLRRVAAELGDLQRARAQRQETEAAMTAALGDLGLARLGDIPGLTATGAAAILAETGDPKRYDTSSSVVKHAGLSPSENASGAFDGEAHISRRGRPGLRLTVWRAVWAVLIHTPVMAAKYAAMTQAADQAAVDARAGSSGHATAAAEAARRRRAKARVACAAALLRWIYSMVVHGTCQDPGVAAGRKDTLAAPSCLPEAA

SEQ ID NO: 436470 - protein, 376 aa, unidentified
MGDYSEAFVGIDTSKLRNAVAIADAGRGGEVRFLGEIENTTAATAKLVRKLTARYERLTFCYEAGPTGYGLHRQIKGLGFECVVVAPSLIPKRRGDKVKTNRRDALSLAKLLRADELTAVWVPDGGHEAMRDLTRARETAMLDLRTKRQHVSAFLLRLGRPYPESRKTWTKAHASWIASQKLEHPQQRLVLEEMLLAIRQAQERLQRLEQAVAAAVPEWSLAPVVTAVMAMRGMDMVSATTLLAEIGDLSRFQTPTELMAYLGLVPSEDSTGDTVKRGPITKAGNRRARRMLVECSWSYQHPPRVGQAKQSKVDAAPPAVREIAWKAQCRLYRRYRALIRKGKRKTVAIVAIARELAGFIWAVARAVSATRIAAAT

SEQ ID NO: 436471 - protein, 461 aa, unidentified
MARAKNTHKRRHEPVKMELPVELKNVNLNAAGIDIGSRRHYVAVPEGRDTVSVRQFGVFTADLEALAEWLYQCGVTSVAMESTGYYWIPVFELLESKGFEVKLVDARQTKNVSGRKSDMLDCQWQRELHTVGLLKGAFRPPDEVCVLRGFMRQREMLVQASSMHIQHMQKALTQMNLRLSNVVSDITGVTGTRIIKAILNGERNAEVLASYRTKECKQTAAVIAQSLLGNYRVEHLFALRQAFELYEVYQEKLKDCERELMKVVQQRPHQTEAEPPPLGRKLRARDKVRGEVDVRSELYKQTGVDLFRVPGLGPETLLTLSGEVGTDMSPWKTEKLFSSWLGLCPGTKESGGKILSRRTKKSRSRAAAAFRIAAASLRSSPTALGAFYRRIRARGGEAIAVTATAHKLAKIYYRLLKYGEEYVEAGEKAYEERYQQQRVKALAKQAALLGFTLVAAAAVST

SEQ ID NO: 436472 - protein, 377 aa, unidentified
MLNPSRARTTEIKGSKPNVLRSALEELPMITNTTKESVVYAGIDYHKRTIAVALGDKEGRVLERFNLLNQTELVTQFFQQFSKIECVVESCRGYEWFVEMLQKQGHTVHVGDSRSIKLIAHSRCKTDKVDSQILMELLAIKYLPTTYIPTAKEREYRELLRHRSSLVQTATRSKLRVHALLDKENKGIRFPFSKNGRKQLEELDLSESRRRIIEHELDIIDFAEEHAHAQQLRIHLLASYEPEIKRLRTIPGFEVLMAAAFLAEVGDVSRFKNGDQVAAYFGLVPRVYASGNTMRCGRITKAGSKFMRWMLVQAAWAAIKSSPNLRQSFGVIGRRRGQKVAIIAIARKLATIAFRVLRDKTTYKEELLDAGLARASF

SEQ ID NO: 436473 - protein, 361 aa, unidentified
MRKIALDLGVRKTAFCEVKNGAIVQRATVTSVETLSSLLGPQEQPAVVAIEACREAWHVHDLLRSWGNEVVLVDTTRSRRLGIGQHGRKTDRIDAEVLALALERGGIPIAHVLSPHRRELRRWLGVRRALVESRANLITTCRGLAREQGVVLPQCTVAIFARKARRAGGNALPVLEPLLKQLDAINPELASAEAKLSELCETEPVVKLLMTAPGVGPIIAACFVSVIDDAKRFRSPHHVESYLGLVPSEDSSGGKRRLGAITKKGNPYLRSLLIEGSWGILRLSDHKEPLRVWAEAVAARRSRKVAVTALARRLVGVLWAMWRDSKSYDPKLLAAASSRGTRRLAHTLQLQAHNLEVQLQP

SEQ ID NO: 436474 - protein, 420 aa, unidentified
MVEATEEAAELVQRVAALDIGKAVLEACVRVPHPTKPGRRAQEVRTYPTTTGALLELADWLRAQQVTLVVMEATSDYWKPPFYLLEDEFDCWLVNARQVKNVPGRPKTDRQDAIWLAKLAERGMCRPSFVPPKPVRRLRDLTRYRRTLVRERTRETQRLEKLLEDAQIKLSSVISDLLGVSGRAMLQALIDGQRDPTALAELARGSMRGKRAQLIEALRGHFDDHHAFLCRMMLDRIDALTAQIATLSTTIEAVIAPFQAQVDQLDAVTGIGQRSAQELIAELGVDMACFPSADHLVSWARYCPQTRQSAGRTRAATTGKGNPWLAATLGEIAMAAARTDTFLGARYRRVAKRRGKRRALVAVGNSMLTIVWHLLSDPDAAYHDLGADYYQARINKQRQTRRLVHQLEALGHQVTLQPAA

SEQ ID NO: 436475 - protein, 411 aa, unidentified
MELLHLRCAGLDVHKQTVVAGVRLASEGKVTTEVKTFAATTAGLLALADWLAENGVTHVAMEATGVYWKPVWQILSDGDFELLLANAAHVKNVPGRKTDLSDAEWLADVAAHGMVRPSFVPPPEIRELRELTRYRKTQIDARAKEIQRLEKTLQDAGIKITSVASGVWSLSSRRIVEALIAGERNPGVLASLAVGKLRPKKAQLEEALDGWFGAHNAFVCRQVIDHIDFLDDSIAKLSEEIAARLLPFEAAVSLVCSVTGIGEASAQAIIAETGVDMSRFPTAGHLCAWAGVAPASHESAGKKRPAGTRHGSTWLRRVLIEVARAAARTKGSYFTAQYSRIARRRGSNKAAVAVANSMLAVIWYVLTNGCFYEDPGADYFERRHDPAVEAKRLQARIEKLGFDVTISPKAA

SEQ ID NO: 436476 - protein, 433 aa, unidentified
MPTTHPYDLVIGLDRSDRQADLHLIDTRTSKAHKHTIATSPEALHDWLARLRQDHPQERVAIALEQPAANLILFLETYDWISLYPINPISLQKFRETFVTSRAKDDGKDAQYLAELLLSHHPKLKAWQPDDSQTRQLQQLVFHRRAVVDERTELTNRLQAHLKQYFPQALDLCGEDLWRPLATAFLLKWPTLQSVKKFRPAALKQFYYLQGSRGQKLVEQRLERIDQAVPLTEAIALLQTYTLRVQLICKELQLLRKTLEQFDQQIAEVFRHHPDRELFEALPGAGPVLAPRLLASLGSERERFPRPQHLQCATAIAPVTKQSGGKRHVHRRYLCSKFLKQSFHEYAKESILHSRWAAAYYLQQRTKGCPHHTAVRALAYKWQRIIWKCWQSRTVYQEAIYEAALKKNRSPLVGLLPQIELGKSPVKNPAKKS

SEQ ID NO: 436477 - protein, 393 aa, unidentified
MIVIGVDTHKGQHALAGVDEGTGKVRGSREIEADDAGHLAGVRWARGLDDERVWAIEDCRHVSRRLEQALLAAGERVVRVAPHRMGASRRGEREPGKSDEIDALAIARAVVKDGVESFPVAYLDERAMEIRLISDHRNDLVTERTRTVNRLRWHLLELCPELERSLKRGALNKARVLDRVDRRLRKLKAGARVRIAREQISQLRSMGRQIDALHRELGELVTAHRPKLLAEQGCGALTAAILIGHTAGNERFRSEASFALQTGTAPIPCFSGKRTQHRLNRGGDRQLNHALHIIAVTRAQRDPATKQYLARKEAEGKTTKGALRALKRHLARHFQKLLSEPPADQKQAAQPQTISEPEPTEHARPQIPPRPRPRREPDPTIQGQAACPMVCIS

SEQ ID NO: 436478 - protein, 408 aa, unidentified
MQVYIGIDWSEDKHDVVFMNQAGVDVARLTIPHSLDGFVQLDAARQKLGLTPDECTVGLETAHNLIIEYLWSQAYQQVYVIPPSVVKSNRNRFRQSGARDDQSDGYLLAEILRTDRGRLQPWHPDSLLTRQMRAKVSWIRHLTRASTRLSNRLRAVLLRYYPAALQVFPDLSTQIALEFIRTYPTPQAAARLTLVELVDFAQQQGYSHPKKLPSCFARLKRDYPPTSPETVLIYQEEAIQLARLLLQMTYTRVDVLRELHALFRQHPDYPIFSSLPGAGDLLEPALLVKFGDDRARFPTPASVQALAGTCPVTDQSGKRRVIKFRKACDREWRSLSQAWAIALVNSAKSPLAIAYFEQIRPHCHNRHQAYRCVANRWLAVAWKLWQTNQPYDEAYHFQQRAARSKAKI

SEQ ID NO: 436479 - protein, 396 aa, unidentified
MLSTNLQNPIDFKGQKFYVGLDVHKKSWAVTIRSLGIQVGHFTQPPGADTLLKYLQRNFPGGQYHSAYEAGFCGTGIHEQLCELGIKNIVVHAADIPATDKQKKNKTDLHDSRSIADYLEKGNLKGIHVFTRDQQELRSLFRLREAKVKEVTRSNNRLKSFLMYFDIQIPETVSKKEQLSLKALAWLNFELASAAGTIALQQHVEELKYQRKRLSEITKQLRKQIQEFHAKSYECLLSVPGIGAITAMGLIAEIADFGRFDDPDEYCSLLGLCPWEDSSGDTIKTKGMQPRCNKHLRPLLVEAAWTAIRRSPVLFAYYSKHAVKDSKKAIVKVTRKLALAARGVVLKQQLYQEDYLQTKRAEQATQKEASKRRFSSGITEQHINKQPGNVLASQPG

SEQ ID NO: 436480 - protein, 424 aa, unidentified
MKRTQNEKILQIKNETLIVGVDIAKKIHHARAFDNRGVELGKLLKFENSAQGFAAFDAWLAKIQQKHGMTEAVVGFEPTGHYWFNLGDHLAECGHKLAILNPYHVKCARELDDNSPSKSDQKDPKTIAMLVKDGRYRDVYIPDGDYQELREMVRERERLQERLGSLSSQIIRWLDIYFPEFVTVFKDWRGKAAWIALRRFSTPKRMAEVGAQEILLAWREEMKRPSLKKAEALCSTAEQSIGRTQGSGAAVRSLQNIMTEYELLTMQMEQLEEEMQECLFRIPHAAELLAIKGVGMVAVAVFVSEIGDIRRFKDPRQLIKYAGLNLRTNSSGEFKGKTKISKRGRRRLRHALYKAMIPILATNEEFRSLHQRNLTRTQNPLTKMQSIIALCGKLLRVIFALLTKGVEYEPSKIKVVTTDVAQAA

SEQ ID NO: 436481 - protein, 340 aa, unidentified
MKFIGMDAHSRSCTFIVLGKNGRVLRRAKVKTQEDELLGFVRSVKGKKKMALEEGVMSQWLYMLFKEEVEELVVCQACERRGAKTDNIDAGEIADLLRVGRLKTVFHSDNDLMHLRTLISGYRDVIQEIVRTKNRYKALYRQVAIPARGTGFYREEKMISLLNTDESRYVAGALFEQLSLLENQRLGYVEKFETNCSKCKPVKLLTSIPGIGPVRANQIVGIVITPYRFPTKYNFFSYATLIKHSRMSDGKEYGKKRACGQTVLKEIFKMATFSALSSNTAFRRKYDAMREAGKTDHAARNAVAKKLAATTLGVWKSGKKYNDKNMEVTQRQKQNCHSGA

SEQ ID NO: 436482 - protein, 370 aa, unidentified
MKKRITFVGLDTHKNSIEAALADDGRNTEVRLYGTIGGDLASLDKMIRKLQTTGAELRFVYEAGPCGYEIYRHLRAHGFHCDVVAPSMVPKRSGDRIKTDRRDARNLARLYRAGELTAIYVPREDDEAMRDLVRGRQDAIHAQRKARQQLGGFLLRHGFRYSGKCAWTLAHRRWMAEIKMPHPSQQIILEDYIHSVEECTQRVHRLTEQILQLMPDWRMHPLVTALQALRGVAPVVAATAVAEIGSMDRFESPRQLMSYLGLVPSENSSGQSIRRGAITKTGNGHARRALIEAAQAYSYPARISRVILKRQEAVPEPIRQIAWKAQLRLCARFRKLTARGKSRNRVVVAIARELSGFMWAIAKQVPLPQA

SEQ ID NO: 436483 - protein, 398 aa, unidentified
MDSLLVGIDVSKELFSVAGIDSKGNESFSRTYSMDSSGFDELLETITSHCKDLSKVIIGMESTGCYHINLYSFLTSRQIHTLVINPLLIANYAKLSLRKTKTDKKDARTIAKFLLDHRQEISQLSVSQDLQDLRDLSRERESLCHLISATKVEIKRVIRTIFPELESIGDLYTRAMVRFLQQYPSARLVRAAKPKAIAKVLKGPYVGNKLTFTAEDIVKAAQSSVATVSPAKEIIVRGKIATLLHLQERLAEVTKLLTDLCQSTKLEDLEILRSIKGVGPNTAAPLLAEMGEVKNYSSHKKIIAYAGLDPSVHESGKFVGMSKLSKRGNRHLRRAIYLMTASVVSQNAFFKAYFLKRKREGLAPQKAIFATAHKLIRVIFAMLSQRTYFNVKEAYKNS

SEQ ID NO: 436484 - protein, 437 aa, unidentified
MSNVAYLGLDISQADVSVCFLLADGGEPVPRWTVANTQPGAERLSSTVAQLCQTHQIGELRIGLEATGLLWWHLACLLSAALPLRPFQPQLYVLNPHLVATFRRNYGALPKTDRADAFLIAERIRFGRQLPPPFQVDVRYAPLQRLTRFRFHLAHNLAREKSYFLSFLFLTFSSFGQVQPFGDPFGATSSAVLTELTTEELAQQSLAELATYLQTQGHGRFSDPEALAETLQQAARDAYRLDKVLAEPLRIVLSTTMANIRSLTAQLKTLDKTIAAELQAIPQTLDSVPGLGPVWRAGLIAELGEVSRFTDDDAIAQFAGLTWPAHESGQFQAEDTPLSQRGNRYLRYYLVEAANSVRRHCPEYADYYAAKYAQTPKHPHQRALVLTARKLVRLIDALLRTQALYQPPAQRPTPAGPGPHAQRPQRQRRQRQADPIT

SEQ ID NO: 436485 - protein, 337 aa, unidentified
MIVYTGIDFHKRTSTICFLKEDGTHQIEKILSSNLVNYLSSKQGLSVAIEASCGVNHIVDLLKANSIEAKIINSNKFRGIGIGGKKTDERDAIALATGLKTGFIPTVYHKSLGARRLKSLLRVREQYVQTRVSATNHIRGILREYGITINIGAEEFETGIGEALEKLDYSLLQEKLRDLVYEERRLKLKEKEIDNDIETLLASDVHFKNLKTIPGIGTMTAAAMLAIGDEFSRFPNAKAFASYLGLVPSESSSGDKIRRGAITKAGQEMLRRYLIHGARSVLRYTNENSKESIRVWAFKIKETRGMNKATVALAHRLAKICFCVIKNERQYLKEIKN

SEQ ID NO: 436486 - protein, 367 aa, unidentified
MKKHSSKHDPLSSTDVELCTTLCVDLAKQVFQLAGEDATGRVIYEDRIKSRQNFHDFLIKLPVTVTVLMECGPGAQAWARLLQAKGNPVRILPAQRVAEHRSGAKNDRNDAHAILRAGRDTSIASIPIKSITALAIQALHRVRRGNIKRHTALGNQIRGLLLEHGVSMPQGDAAINTHVPLALEDASLPLPDLLRELLDELLTDWLSLGERIAALSRRLEATAQEDEVAQRLVTIRGVGPIIATAIVAKQTEPSRFASGRMYSAFFGIVPDQHSSGNKIRLGRMSKRGDGYIRSLMIQGAHAVLSQLRPDSDQPDDHRLLRWLSRLGRKEAAIRLANRNLRIIWALLQNDQVYQRKPNSNSEAAMSL

SEQ ID NO: 436487 - protein, 320 aa, unidentified
MTSRGAEKMKNDTIGVDVSKDHLDAHRLADGATRRFANDKGGHKALIKWLAETPLNRVVFEPTGPYHRAVERALGASGVPFVKVNPRQARRFAEATGKLAKTDRLDAAILARMGALLELEARPARSELLFELKELYVAREALVKDRTAARNRGKALTLSLLKRQNAQRLEQIDRQIATVEAAILQIIEANVSLADRFAILISIPGVSNITAFALLIAMPELGSLEAGQAANLAGLAPIARQSGRWTGRSFIRGGRADVRQALYMPALVAARFNPDMKAKYAHLIETGKPAKVALTAIMRKLVVLANALLKANRTWTPRTA

SEQ ID NO: 436488 - protein, 365 aa, unidentified
MQKISTMQTSGENIFKGQLTIGLDLGDRFSAYCVLNETGEIVFEHKLATTPEAMKQVFSSMPRCRIAMETGTHSPWVSRLLTALGHEVIVGHAQKVRLITKSRRKDDRLDARTLARLARIDPELLSPVKHRSAQAQLHLTEIRARAVLVSARTALVNAARGLVKSYGERLRKCGTQQFRRETTSGLSTGLREALEPLLREVESLNERIQEYDRRIEKMAKQTYPETALLKQVKGVGDLIATAYVLTIEDPHRFRKSRDAGCFVGLQPGRRNSGESEPQMHISKEGDEYLRTLLVQGAHYILGPFGEDSDLRRWGLKLSARGGKNAKKRAVVAVARKLAVLLHRLWVSGEVYEPLRNSQKAMSAAA

SEQ ID NO: 436489 - protein, 370 aa, unidentified
MRIIGCDLHARQQTLAMLETTTGEVVNLTLMHEGNSVREFYSKLPPPVIVGIEATGPMKWFLQLMEELGIECRVGHPAQIRAAEPRKQKHDRRDADLILKLLAENRFPAIWLPNQELLDLRALLLHRHQWVRMRTRIQNSLQAIALANGLRRGPSLWSYDGQAKIAFLPLMPHAAYRRNRLQAMYKTMESEIESLNKQVAEQAGNRPGAQRLMTHPGVGPVTALATEVFLGDPQRFADGKALASYVGIIPREYSSGGQQRLGGVTKQGSPLLRFLWGEAGAHAARRDPDLKRFYRRKLVHKGLGKARVAVARKLGIRLWIMLRDEIDYQEFCRRGQMQQKTVRPVAGMPETGNGAKSHRPVDEATRLPES

SEQ ID NO: 436490 - protein, 364 aa, unidentified
MDVHLRSTTVCALDAETGEAVTRRFRGNPWGEVAEWMSGFPGPSLAAYESGYLGFAPQRELSGLGVDCVVAAVSKVPRSAADLSSKNDRNDAARMAKAILSHDISPVWVPSPEIEGLRDLAGAHDAATARLAAAKQRLLAFLARRGYAYGGTTPAGNPRKYWTYGFLRWLDGIHPADDGGIRALAALRNEVEAADETREAVLAEYRAAVAAGPLSAEVEALQSIKGCGFALAAAFAAEVGDFSRFRSGRQVTAYFGLAPKQRSSADSVRLGGISGAGNALVRKLAVEGSWCYAQAGHQPKLMPKGSGVPLEIRMHGRKGSERLLRRREEMLERGMPQAKANAATAAELVRWLWALGAMCREAGE

SEQ ID NO: 436491 - protein, 326 aa, unidentified
MTDLINGILGIDISKAKFDVALMIAGKVKKTHIFDNTAEGYKKLSAWLNKQGMATVAACMEATGCYGEALATYLYNEGCVVSVVNPAQIKSFSGAQLKRVKTDKADAKLIAQFYQDMHPNPWTPPPVHVRDLHSLVHRLTALAHMEAQEQNRLDTAASVIRPSIETVLATIRAETKAVKALIHDHIDGHPDLKNQSELLDSIPGIGEATIARLLAFIGDVTRFDHAKALAAFVGLNPTVHQSGTSVRGKPHLSKKGNSALRCALYMPAIVARRYNPILKTFADRLKKAGKPNMVIIGAVMRKLLHIIYGVLKSGMPFDPAWTAKHA

SEQ ID NO: 436492 - protein, 343 aa, unidentified
MVTIGIDAHKRSHTVVAVDERGRQLAQRTSGTTSSDHLELVAWAACFTERRWAVEDCRHLSRRLERDLLAAGESIVRVPPKLMANARDAARSFGKSDPIDALAVARAALREPDLPIAKLDGPEREVRLLVDHHEGLVAERTRMISRLRWHLHELDPGNEPAARTLNHPRNLARLAERLANIKGTVARIARDLVDRCRELTTEINGLEQEISTLVEELAPSLLAIRGCGALTAAKIIGETAAIEHFKSPDAYARHNGTAPLPVWSSNRARHRLSRSSNRQLNASLHRIALTQARLHPGAQALHARRRANGDDGLEALRVLKRRPSDVVYRALKADATIEPRLAA

SEQ ID NO: 436493 - protein, 353 aa, unidentified
MKLDKYIGMDVHQATTVVVVLDASGKVALETIVATEAAPIIRLMQSLNGALHVTFEETTQAGWLYDVIRAYAHEVVVCDPRRNRFLSEGSKADKPDARKLAELLRAGLLRSVYHGHEATRRLKELVRAYETLSVDTMRTMFRVKALYRGRGIRTPGSGVYQLKQREQWLHRLTEPGLRQRVEWLYEELDHLRSLRKRAKLAMLTESRKHRAFSLLRTIPQLGPIRCALIVATLDTPHRFRTKHQLWAYSGLAVVTHTSSEYEIKAGRVVRNRKPISTRGLNRNGNRRLKDVFVAAATGGTQAEPYRTYLRGLEQKGMRAEMARLTLARKIAAITLSIWKKGDTFDPKKLNWTT

SEQ ID NO: 436494 - protein, 355 aa, unidentified
MITIGADYHPGFQQIAFVDTDTGEFQERQLQHREEAEKFYRELAAQGQKVRVGMEASGHARWFERLLAELNFELWIGDAAEIQTKRVRKAKTDREDARLLLRLLLEDRFPRIWVPSWENRDLRQLLWHRHRMVQARTRIMNQLQAVALNEGLRAKKKLWRECGRQQLESFPLAPWANRRRQDLLALLDRLNPTIAELNQAVDQEVERCPAAQRLMTHPGVGPLTALAFILIIGEAERFGCGKQIASYVGLVPLEKSSGNRRRLGHITKQGNSMLRFLLVEAAQVTARSIPEWRSRYFHLRMRRGRKIAKVAMARRLAVRLYWMMRKQWDYEQLKKFGSHAGQPGTGDGVYKTPRN

SEQ ID NO: 436495 - protein, 418 aa, unidentified
MSYKVAGIDIHKKVLMVVVATAANEVADAAGEGLEFECRRFGAAASERRHLCRWLQERNVSEVVMESTAQYWKPVWLDLEPHFGKLHLAQAHSNRAPKGRKNDFRDGKRLTRRLLADELLLSFVPAGEQRAWRTITRGKQQLVRDRVRLQNQLEAMLEEARIKLSSVISDLLGVSGRRILQAMADGETDPDRLAALGDDRLRCSKPELMDALNGSVEPIHCQVLTLYLKRLELLDEQIGKLDQMIAAALKQHQDAVIRIAEIPGFGVDSAQQLIAEMGIDAEAFLSAGQFTSWAGLCPGTEVSAEQNHSSRSAKGNRFVRRILTQAAQAAVKKKGSHFQALFRRFVPRLHYNGAIWAIAHRLGRLVWKILHDGVRYTEQGEQSNPKAKKRRAQKLAQALRKLGYSVALTPLAPEPARA

SEQ ID NO: 436496 - protein, 323 aa, unidentified
MTVYLGIDIASKKFDVAELCDGNYRCKAFENTSAGFLALYKWLGQSTMPDIHACLEATGDYGTSLATFLYENKIKVSVVNPARIKGFGASELSRTKTDKADSKLIARFCKAAVPDGWKPTSAPVRKLQALVRRISALNGMLRMECNRRENADENIQASLDRIISLLNTEIEVVRQEIKDHVRSDDELKKQDALIQSVPSIGEVSSNLILSFMSGKGFRKAKEVTAYLGLNPRHHQSGSSVRGKTRMSKMGDARLRSALYMPALVALRYNPDIKAFGQRLLLAGKPRMLVVGAVMRKLIHIVFGVLKSGTAFSSRIAVHSVVTS

SEQ ID NO: 436497 - protein, 349 aa, unidentified
MTVYVAVDFHAREQTVSYCDLADGEIHRRKLRHQHDDVRAFYQQFTGEVIVAFEASGYSAWFEQMLAELGHTVWLGNPAEIRRKAPRRQKNDRRDADLMLDLLLKGDFPKVHGFSEESRTVLRQLRYRHKLVKVRTIAKNSLHAIGINAGLPLKRRLLTEPGIAQLQALSLSPVLTQQRDEWLQLIALMNQRIATVEAQLQQRAKDDAAIALLQTHPGIGLLTSLALRYTLLPTSRFSSTRQVTAYVGLDCMEDQSAERRRMGSISKAGSKLLRFLLNEAGHTAARHDPELKKFYRRLLHRRDKPKAKVAVARKLLVRSFIMLRDQIDYAEFVRRGVAARVAREAHSLP

SEQ ID NO: 436498 - protein, 341 aa, unidentified
MDHYAGIDVSLEQSSVCVVDASGKIIREGKVASEPQALIDWFGSLGFDLVRIGLEAGPLSQWLYAGMKQAGLAVELLETRHVRDAFKAMPVKSDRNDARNIAQLMRLGWFRPVHCKSISAQEVRAMLTARKLVQSKLRDIEMSLRGTLRGFGLKVGNTTLTRFAARIRELVGENATLQVIAESLLAVHAVLLREFRGFEKRLRLMARCNVEAQLLMSAPGVGAIVSLTVASAIDDPARFKSSKQVGAHFGMTPKKYQSGETDITGRISKIGDKAVRTALYQAAHIVLTRPVKGSALKSWAMRLAKRVGMRKAKVALARKLAVILHRMLADRKPFAFAATAA

SEQ ID NO: 436499 - protein, 339 aa, unidentified
MKYTPVGVDIAKHVIQIHFINEHTGEVVDKQLRRQDFLTFFGNREPCLIGMEACGGSQHWARELTKLGHKVRLLQARFVKAFVMGNKNDVMDARAIWMAVQQPGKEIAVKTEEQQSVLVLHRTRMQLVKFRTAQINALHGTLLEFGETIHKGRAAMEREFPEALERMKERLPPYLIMVLENQYNRLNELDSLIEDIEKQLTSVARQNETCKRLLDIPRRWTTYCDGSGGHHGEASAFKSGREFAAYVGLVPKQTGSGGKVRLLGISKRGDTYLRTLFIHGARAVALVAKEPGPWITELKKRRPASVAIVAMANKLARTVWAITAHDRKYDRNHVSIRPY

SEQ ID NO: 436500 - protein, 408 aa, unidentified
MLFVGDDWAEDHHDVEVMDASGRRLAKARLPEGMAGMTRLHAMIGQALGDDIEDDAAQVKIGIETDRGPWVQALIAAGYTVYAVNPLQAARYRERLAVSGAKSDAADAHMLADMVRTDAHQLRPIAGDSAEAEAVKVVTRMHKTLIWERTRAGQRLRHALREYFPAALAAFEDLDAADTLELLAKAPDPASAARLSLAQISAALKRARRRDIPAKAAAIQAVLRGEHLGQPPVVTAAYAVSVRALVALLITLNEQVKALQGQVEAHFGRHPDAEIILSQPGLGAVLGARVLAEFGDDHARYVSAKARKNYAATSPITRASGKKKTVTARFVHNDRLVDALMTQAFTSLSNSPGARAYDDRQRARGASHNAALRQLANRLVGILHGCLKTGTPYNETTAWSHHLNEAAA

SEQ ID NO: 436501 - protein, 346 aa, unidentified
MTIVGCDFHPGWQQVAVFDSATGEIREQKLENGNGEAERFYRSLPSPARVGFEACGNTQWFEDLLDGLGHEVWIGDAAEIRASYVRKQKTDRRDAAHILKLLIEGRFPRLWRPSRAERDLRQLLIHRHRLVGIGTRVKNGLQHLMLNRGVQLKHKLWNEAGQKVLRELPLEGWAAQRRQDLLKLLSELNPQIAKLDQAVERAAHQHPRARLLMTQPGVGPITALAYVITMGDVTRFQRGKQVASYLGLIPSEHSSSKRRRLGSISKQGNPFLRMLLVESVQTVCRLDEGFRKQYKHRCHRMKKGVAKVAAARKLAVRLFWMLRTNTAYPEIARIESNPPHAVVGES

SEQ ID NO: 436502 - protein, 337 aa, unidentified
MKYAGIDLHSNNCVVSVIDETDRVVAERRVGNEIEQVIAVLQPYRSELAGVVVESTFNWYWLVDGLQERGFIVHLANTAAMQTYSGLKHSDDRDDARHLAHLLRLGVLPTGFIYPKEQRATRDLARQRMRLVQARSRSIIAVENVWSRQTGGRLSGNQVKRLTGDDIEAMELHADVRLGLQAQVALVGALEQQIDALEKRLQERVRLQAGYRLLTTVPGIGATLAAVIALETGPIDRFAAAGDFASYARCVDSALISNGKKKGEGNVKNGNRYLAWAFVEAAHFACRYCEQARRFYERKRAQTNTAVATKALAHKLARACYHMLKRGAPFDVARCFG

SEQ ID NO: 436503 - protein, 400 aa, unidentified
MNAVGIDVSKGKSTVAIMRPFGEVVAEPFEVSHTDAELRKLACFLEKLPGETKIVMEYTGSYWKPIVKVLYDAGLFVSVVNALLIYKYGNNSIRKGKTDKLDAVKIANYCLDRWTVLERYTPVDQIRQALKTCRRQYDQYIRLKVNLKNNLIALLDGTFPGLNILFKSAPRDIDGHEKWVDFAGKFWHRECICGNSEKAFTNQYKKWCAKAGYRFSEEKASSIYAHAVSQVNTLPMTDSIKRLVTLAVSQLNTIIETISVIQHEMLTLAAQLPEYPVVMRMFGVGPVLGPQLMAEIGDVRRFERKQSLVAFAGVDAPPCQCGTFESKNRHISKRGSPRLRKTLFQVMSTIIQHAPADDPVYQFLDRKRREGKHYYVYMTAAANKFLRIYYGTVMAYFEKP

SEQ ID NO: 436504 - protein, 313 aa, unidentified
MSQNTIPTIYTGLDISKLNLQLRLADRLHDLPHSAPGHRRLLHLLAAYPGAHVVCEATGGYERAVVAALQQAGIPVSVLNPARVRHFARAQGQRAKTDRIDAAVLCAYGQALHPKPTPARSEVEQQLTELVRRRAQVVELLVAQRQQAEQLSLPSLRRQAKGLLRHLQTALEQIEKELEALQQQDKPLRERVEKLQAITGVGSVTALAVLAELPELGSLNRRQVAALAGLAPHPRQSGNWDGRRTIGGGRAAVRRALYMAALVAAHRNTHMKIFYQRLRAAGKPAKVALTAVMRKLIVLMNQILKNPNFVLQN

SEQ ID NO: 436505 - protein, 333 aa, unidentified
MQSAKKIVGIDVGKDWLDVCYPDGRKEHIRNIRSCRTKLIKKAAKLGAIVCFEATGPYEEPLADECLARGVKAVRLDAWGTRKFAESQGRIEKTDAIDCEMIRDYAASLKDEKLHFIKPRSESQKRLKKSVRTRKNLLKARAIIANQFEDDLDPETARHLRSALKSLDKNIAKVEAECDAAIASDGRLSELDRRFREVKGVGPCLSRTVLAQCPDIGDFNSKSIAKMCGNAPLDHESCTIKYTAKPRRGRSDLKKALYMAAVSASRNNHILREFYQRLVANGKPRKVALTAVARRIAILLNTIAKHPDFKPAQDPKATAKKAGAKHGRPRKSK

SEQ ID NO: 436506 - protein, 371 aa, unidentified
MKKNSIVKRSSKRAAARAEGALTIGMDVGDRTSRYCMLGGGGEVVSEGSVATTRKAMAQKFAGLRRCRIALEVGTHSPWLSRWLSGLGFEVIVANARQVRLISQSSRKNDRLDARLLARLARVDPQLLRPIRHRSEQAQADLTAIRVRAVLVETRTGLVNAARGFAKAAGERLPASDTDSLGVEKMAALPAALRELLRPLLEQVEALTEKIQEADVKIEQIARIEYPETELLRQVSGVGTLIALTFVLTVEDRERFPKSRDVGCYIGLRPKQSESGQSQPQLPITKEGDRYLRTLLVQGAHCVMSRRGPDTDLKRWGLRLAERGGKNAKKRAVVAVARKLAVLLHRLWATGEVYEPLRNNQASERVKKRAA

SEQ ID NO: 436507 - protein, 455 aa, unidentified
MVKQKHQEKMKVQVNALEQIKPHAAGIDVGAEEVYVAVPPDRDEQSVRSFPTFTADLRRLAEWLKACQVETVAMEATGVYWIPLYEILEEEGFEVCLVNARHLKNVSGRKTDVLDCQWIQQLHTYGLLSPSFRPPEQIVAIRSLVRHREMLVRYRSAHIQHMQKALTLMNVRLTNVLSDITGVTGLKIIRAIVAGEHDPKQLAQFRDERCKRSEAEIAKSLEGHYKREHLFALKQALELYDFYDQQLQACDTELEAMYQEFDPPENPGTPPPASRTQKRRKNQAHFDLAPALYRLTGVDLTQIDGVDELTVQNVLSEIGTDMSKWPTVKHFTSWLHLCPNNKITGGKVIQTGVQPTKNRASAALRVAAASLKSSDSALGAFFRRLRARLGTPVAITATAHKLARIIYFMLKERKPYHDFGADFYDLQYRTRVLRNLNRRAAKLGFRLEPVDPAVS

SEQ ID NO: 436508 - protein, 430 aa, unidentified
MKSNTQNAKIEAITEKTLVLGIDVGSEMHYARAFDYRGIEYSKKPFKFSNTEAGFVTFKEWILDLKERHEKDKVVPGMEPTGHYWFNLGKFLQDNEMKPVLVNPHHVKKSKELDDNNPTKNDRKDPKVIAGLVREGRYMIPYLPDGVYADLRTASNIRFQLQAELTRIQNRISRWFNIYFPEYKTVYGKPDAKSGMLILKAAPLPEDILTLGIDGVNQIWRDAKLRAVGKARAKTLIEAAEHSVGSKEGAVSGKMEIRMLLEDYESRNTRLQEVMVLIEELVRKIPMTEKLLEIKGVGIRTVSGFLAEVGDISRFNNPKELQKLAGLALVENSLGKHKGETTISRRGRKRLRYLLFEVAMSLVSKNQEFRELHNYYTTRRLNPLKKMQSLMAIAAKLIRVFYAILTKGVDYDPKKMVSDIKRPAVYLQAA

SEQ ID NO: 436509 - protein, 412 aa, unidentified
MQALIERCCGLDVHQETVVACLLIGAAGARARKEVRTFRTVRRELEALRDWLKAAGVTHVGMESTGVYWRPVYAVLEGHVELIVGNARHIRNVPGRKTDVKDAEWIADLVRHGLIAKSFVPPAPLRELRELVRYRRKLIEAQAAERNRLLRLLETANIKLASVMSDVFGVSGRAMLKALIAGSAAPEEMAALARGQLRRKRAGLIEALTGGLEEHHRFLLAMQLGRIEAIEADVATLDARIGERLLPYDAEMALLMTIPGVNWLVAAVVIAEIGTDMSVFLSVHHLAAWAGVCPGSYESAGKQKSGRARKGNVHLRTILVGAAISAARTKGSYLRDKFHRLKARRGALRAALAIAHKIVVAAYHMLARGVAYRDLGEAYLDQIGERRTVANLKRRLERLGYHVALKPRAEAA

SEQ ID NO: 436510 - protein, 341 aa, unidentified
MNVTTIGIDLAKTVFSIHGTDQHGKVVVRKRLNRPKLLAFFAQLPPCLMGMEACSGAHYWAREMTKLGHDARIIAPRFVAPYRKSSKNDDNDAEAICEAVSRPNMRFVPIKTEDQQATLSLHRIRRGLTKERTAQINQIRGLLAEFGLIIPQGRYAARRRVPEILEDAENGLPMLARRLLNNINQRILQLDEEILAYDREIEAMARRDEQAKRLMTIPGIGPQTATALLASAPDPRQFKSGRHFAAWLGLVPRQYSTGGKPRLGRITKRGDKYLRTLLIHGTRAVIATIDTKEDRLSAWAKELKERRGYKRAAVAMAAKNARIVWALLMNQTEFKTQPVEG

SEQ ID NO: 436511 - protein, 392 aa, unidentified
MFYLGIDIGKRNHVATMLDDGKKAVFRAFSFSNSTEGGEALLAQIVKHAPDATQVSIGLEATGHYWLALYSFLTERCYMIHVINPIQTDGWRKGIEIRKRKTDKIDSELIAELIHYGDFSSTQLADETIQSLRTLTRFRSYLVDSIADLKRKVICVLDQVFPEYETLFSDVFGATARELLLKYPSPAELEQLSVEKLTQVLEQLSRKKCSTAKAEKVLKAAKHSFGVTHCRDTFIFQLRALLNQMNFIEQQVTDTEAEIDVLMEQLQSPITTIPGIGPVLGAVILGEIGDIHRFESPSKLVAYAGIDASVSQSGDFEGTQMHMSKRGSPYLRRALFMAARIAVNSDAQLGAFFEKKHSEGKHYSACIGAVSRKLCFIIHAILSQNRPFSPMP

SEQ ID NO: 436512 - protein, 461 aa, unidentified
MKNSTAKKRKQVPVGYLVVGVDPHKKKHAAVFMTQDFMTHSKLKFDNSREGFETVLERARTEMLKTECRGVIFAIETGAHHWRNLAYFLDEKGIPLRLINQFTLKRRREGKDLNHRKNDYRDSEVAAQLLCTGEFNAARLSQGVYAELRAAYGSYRRLVKEKTRTVNLVKSLLDGLFPEFTQVFKNPCGQTAASVLCTCAVPQAIAGMTESEFAGAIKAACQGRVMKGKLRVLHHVAMTSIGIGAGAQSVSSEIAFLIEKLRLIEQQLRQINEALTRLVHETMEGKYLLSIIGLSYVSVAGIIAELGSFSSYQNAKQLIKMAGSNPTESESGGKRHSHTPISKQGRPVLRHCAWTAVIPMLRFNPDFRDWAKKLRERPAGANPLSGREVMVAAVNKLLRLAFALVKNQALYQIPESQPVEIAIKEVSNTSGGQGNTAGSFGSSYEPTRQKTWCPALLAKPV

SEQ ID NO: 436513 - protein, 349 aa, unidentified
MLSDQLDYVVGVDTHRDEHVLALVAAPAGAVVAGKAVRANRRGYREALRFAERYGPGRRAWAIEGTGSYGAGLARYLAEQGETVLELSRSPRAERRLHGKDDALDAARTARAALASETLTLPRAGQRREALRLLLVARRSAVDVRREALAQLRAVIATAPDHLRQRLRGVPAGKLLERCSRLRRSTSVDADELATRLVLRSLARRIESATAEAAELEGEIRGHVRALAPSLLDEPGVGPIVAAQLIVAWSHRGRLRSEACFARLAGVAPVPASSGQTRRQRLSRGGDRQLNRALHTVVLHRRQHDPATRDYIARRIAEGKSRRDATRLLKRYLARHLYRLLQHQEPLMA

SEQ ID NO: 436514 - protein, 351 aa, unidentified
METQQTASSKLFIGIDIHKRSWKIHCATDLFSGKTFSMSPRPEVLKEYVIKHYSDYEVTTAYEAGCCGYRPHRCFESYGWKSLVVNPADIFRRGKERLTKTDRIDAQLIARELKDGRLTSICVPDKCREQLRSLFRRRNDLVKDMRQIKSYIKMQLLYYGIEIPPEYDNDHWSHNFRYWLDDLKFEYDTGTEVLRSRMRSFRFIDQEFRDVSTLLRKYTKTHFKRDYLLLRSIPGIGPIVASGILSELGDLRRFNSIKHLAGYVGLAPGIYQSGDTIRHTGVSMRAHRLIRSYFIEASWQAIRTDPVIQEYYRKHQGKNVKSIIVKVARKLLSRTLAVIKTGIPYEIGIIE

SEQ ID NO: 436515 - protein, 313 aa, unidentified
MDQESVFVGIDVSKSKLDVFASCASGVDQYLNTPEDIKRLAQCLKTYNPTLIVLEATGGLERLAAAELYDAGLPVVIVNPRQVRDYAKATGRLAKTDALDACILAGFAQAIRPAVREIPNAQSRELADLLARRRQLIDMIMAEKFRLKQVVVKALHRDIKAHIVWLEKRLKNMDDGLYEAIQSSTIWKANFDLLCEVKGVGKVLALSLLALLPELGKIDRKQVAALVGVAPFNCDSGTFKGRRRVWGGRAELRSVLYMATLTAARRNPVIAPFYERLVASGKTKKVALVACMRKLLTILNAMVRDQAHFAEMG

SEQ ID NO: 436516 - protein, 408 aa, unidentified
MEPIFAICCGLDVHKRSIQACLRRLGPDGRVHQETRSFGTMTRDILEMADWLAAAAVTHVAMESTGVYWQPIYNLLEGHFTMLLVNARHVKNVPGRKTDVKDCQWLAQLLQCGLLKGSFIPPRPQRELRELTRHRTQLVAEKTRAANRIQKILEDANIKLASVASDILGASGRDMLRALIAGEQEPDKLADLARRQLRSKIPQLRLALEGQVTEHHRFVLGELLDHLEYLENQIDRFTRRIEEVSRPFASAIEAVTQVTGFEQRAAQNVVAEIGATMEPFPSEHHLASWSGVCPGSNESGGKRKSGKTTKGNRWLRTALVQAAWAATRKKDSYFQAQYRRLAARRGKKRAILAVAHSLLTVIYHMLKTGSTFKDLGGDYFDKLNKNRLLPYFLKRITDLGFQVTLEAA

SEQ ID NO: 436517 - protein, 347 aa, unidentified
MDQISRIGMDTSKHIFQLHGVDTAEVPVLRKKLRRTEMIAFLAKLEPTEIAIEACGASHHWARVLQSFGHRVKLIPPQLAKPYVKRGKNDAADAEALCEAMSRPTMRFAPVKTAEQQAALMLVGVRNRLIRNRTQLANSIRGHAAEFGVTAARGLAHLADLLGRLQADETLPALARELFATLEEEYAQLDARIDAIEARLMAWHRANECSRRLTKIPTVGPIGATLLVMKTPAPELFRSGRQFAAWIGLTPKDHSTAGKVRPGVMTRAGDEALRATLVAGATSLIRQVQQRGNRNAAPWLIELLKRKPPKLAAVALANKTARIAWKLMLTGEKYAVKSSPAPLSRVA

SEQ ID NO: 436518 - protein, 344 aa, unidentified
MKFTRCGLDIAKQVFQVHGVNEHDVVKARQTLRRGKVLEFFAQQPTCLIGIEACGSAHYWARELTKLGHTVKLMATQYVVAYRKRGKNDANDAEAICEAVGRPNMRFVAIKSEEQQAVLMVHRARALTMGNRTAQVNQIRGLLGEFGVVVPKGVARLRRELPGILEDAENGLPALAREVLSGLLEQLREVDTRINAYDRQLRALAEASEPACRLMQIEAIGPQTATALLATMADPHVFKNGRGFAAWLGITPRQHTSGGHERLGQITRQGDSYLRTLLVHGARAYLRVVDKKADAKSAWARRLKERRHVNVAAVALAAKHARIAWAILAHGTEYRPTGPQSAAA

SEQ ID NO: 436519 - protein, 350 aa, unidentified
MAIVGGFDVHRKQITFDYVDNDGLVQWGQIRPATRKTLRSWLAKHCPEGAGEFALEGCTGWRYVSEELTAAGVGVHLGDPAEIAALRGPKKRAKTDRADARLLRTLLVEGRFPESWIPPAHVAEIRALGRLYCALMEERRGWQQRIHAQLFHQGCPPVKALLSEPGREVLVAAELSAAGRQYVDTALRRIDELTAEIDPLRMQLVRFARRQSGCRVLQRHYGVGWLCAPIIWAEVGDPRRFSSSDQLVRFAGLDVTVYSSDGKRAPGHLSRQGSPELRWAAFEAAKCAARRGSPDYAYYHNLAAKHEGRNGKNPTLAVERKILRRCYHTLRELGDAVLAMPIAEAEEVAA

SEQ ID NO: 436520 - protein, 399 aa, unidentified
MQVPIRGGKSNLFRPSCTETFHGNLFDSGLLRALELSRSKWLVGALLPGRSKITSTLGPGGDTAALLNVLTRFAARAALDTGSPVALKVCYEAGYDGFWLARVLIGHGIETHVLDPASFLVSRRGRRVKTDRIDVEAMVLTLKAFLLGDRSVCRDVIIPSPEQEDARRLSRERTQLAAERTRHINRIRGLLALHGIREVKGLWGGDWSQVLAELRTGDGRELGGYLRAEISREFERLHLVLQHIRALDAERQVALAEEVSPFPQRQKAGALIKLAGIGPVTATTLVAEVFHRRFQSRRHLASYLGLAPTPYASGDSKRDQGISKAGNQPARSILVELAWGWLRYQPGSPLTTWYQQTFAGRGQRGRKVGIVALARKLAIALWRYVETGVVPEGAVLSSR

SEQ ID NO: 436521 - protein, 359 aa, unidentified
MLNDSTTFLGLDLGDKHSHLAILDQGGEMIEETRLPTTQAAFHRKFSTLSACRVAMEVGAQSRWVSHLLKELGHEVLVANARKLRAIYANPRKDDRTDAETLARLARLDPHLLSPIHHRSPKAQADLAVIRSRDALVRSRTLLINHVRGIVKSFGDRLPSCSANYFAKKVASDIPEPLQPALMPILETIASLTQQIRAYDRQIKSLCEIKYPETKLLRNVSGVGPLTALAYTLTLEDPQRFPKSRDVGPAIGLVPKRDQSGGRDPQLRITKTGNIFLRRLLVSSAQYILGPFGPDCELRRWGLRLAERGGKNAKKRAVVAVARKLAVLLHHLWKNGEVYDPFYHTQKEETGSAVLPTAA

SEQ ID NO: 436522 - protein, 346 aa, unidentified
MNKITRIGLDIAKNIFVLHAVNAHGKTVKRQTLDRSKVLECFANIEPCLVGIESCASSQHWAREISQFGHTVKLMNPKFVVPYRKSGKNDANDAEAICEAVGRPNMRFVPIKSVEQQAVCSLHTGRQFLVVQRTALINHCRGLLAEFGIIMPLGADKVRRLFSEILADENASVPLFLKDLLQQHLQDLARNEQRIESIDKQLTTWAKTNHQATTLLQMLGVGVITATAFAAGVCDAKSFDNGRQFSAWIGLVPRQYSSGGKNKLGSITKAGDVYLRTMLAQGARSIVFNAKKKSDPFSLWIQRLLERAGMNKTVIAVAAKQARIMWAIMAKNQDYQPERICSPLSA

SEQ ID NO: 436523 - protein, 410 aa, unidentified
MDAIVERVCGVDVGQATVVATTLIGAAHERATKQTRTFRTVTKELMELREWLLANGVTHVALEGTGIYWKPVHAVLEDAFEVIVGNAHHIKNVPGRKTDVKDSEWLADLARHGLIAKSFVPPKPLRQLRDLLRYRRKLVEGRTAERNRLLKLLETANVKLASVMSDVFGVSGMLMLRALVDGTATPETMAQFAKGLLRKKTADLERALEGRLEDHHRFLLSLQLRRLELVDQDLALLDDRIDETIRPYQEQCRLLQQIPGVNRVLAAVLVAELGPDMRVFHSARHLAAWAGVCPGNNESAGKQKMAPARKGNVHLRTALVEAAMAASRKKGSYLKDKFHRLRARRGTKRAAIAIAHKILIAVYHMLSTGTGYADLGETYLDGLEKRRVTRNLIRRLERLGYEVKLETKAA

SEQ ID NO: 436524 - protein, 371 aa, unidentified
MEHTRFIGLDIHKERISVAVAQSGRSGAVEYLGEIINEPGAIGKLCDRLRRPGKPLVFCYEAGPRGYGVYRQLTSLGHRCDVVAPSLIPTKAGDRVKTNRRDATMLARLHRAGELTPVWVPDADHEAMRDLIRPRSLVRQIVTRARQHLQGFLLRHGRKHGRGTAWRMAYRRWLSTLPFEHPAQQIAFQDYVDAVTDAERRLKRVEEQIFGLLPDWNSRPVVDASQAMRGIALINAVVLVAEVGDFTRFSNPRQLMAYFGLVPGERSSGETVRRGAIAKTGNTHARRALVEGAWAYRMKARIGRHKVDRIEALPKIVRDIGWKAQARLRARYRRLSTRGKTANVVNVAIAREMVGFIWSIACAIQSTPKAA

SEQ ID NO: 436525 - protein, 366 aa, unidentified
MKKIITVARNRSEIFKQQQLTIGVDLGDRISYYCILDETGNVILEQSVPTTPKGMQQVFSKISHCRIALETGTHSPWVSRLLTQLGHDAIVAHARNVRLITESSRKDDRLDARTLAKLARIDPELLGPVRHRSAKAQIHLTAIRARATLVSARTALVNAARGLTKSYGERLPKCGTEQMNREIAKGLSPELRDVLEPLLREIESLKERIAEYERRIEQIAKEGYPEVALLKQVKGVGTLIALTYVLTLDDPHRFRRSRDAGCFLGLRPGRRNSGRSEPQMHISKEGDAYLRTLMVQGAHYILGPFGQDSDLRRWGLKLAERGGKNAKKRAVIAVARKLAVLLHKLWVSGEVYEPLRNNHKVVSAVA

SEQ ID NO: 436526 - protein, 358 aa, unidentified
MTNLAEKLDFSGHTISCGIDVHLKSWTVSLYLGKQYLKSFVQSPPSVDGLWNFLSTNYPKARYECAYESGFCGFWIQRAFAVHSISCIAVNAADVPRTDKGTKNKNDRNDSRRIAEALQAGQLAGVYVPDPELEADRQLVRLNERYSNDLTRSKNRIKGLLRLMGIEIPQRFGKANWSGAFVKWLKEVSCGEPSIRIVLDRQLSIMEVIRIQKLDTLREIRKLMDKAHYRTIVGLLCSIPGIGPVTAAVLIVEIGDISRFKKFDRLNSFVGLCPMEHSTGENDRKGSITTRQHRRLRYMLVEAAWVAVRTDPALTLCYSRWTARVGSRRAIIKVARKLLSRVRHVWNNRTPYVSGLVK

SEQ ID NO: 436527 - protein, 428 aa, unidentified
MNCNTQNAKIASITEKTLIVGIDVGSETHFARAFDWRNYEYTKKPLEFSNTEAGFMMFKAWVEDIAEKQGKTAVIPGMEPTGHYWFALGKFLQDSGMKPVHVNPHHVKKSKELDDNNPNKNDRKDPKTIAALVNEGRFSYPYIPTGIYAEIRSLSNLRFQTQEELTRIKNRIARWFAIYFPEYKDVYGDLMAVSGRMILKEAPLPEDIRILGVNGVNQIWRNAKLRGTGMKRAKILVSAAEHSVGSKEAPEAARIELKNLLNDMDVYVSRMEELLQTIEEKLKTIPYVDKLMEIKGIGLITVSGFIAEVGDIGRFDNPKQLQKLAGYAIVANDSGKHNGESRISYRGRKRLRYVLYEAAISLVGKNAEFKEIYEYYRTRKENPLKKMQSVVAVACKIIRVFYTILTKGVDYDPMKLMSDIRRPQLQAA

SEQ ID NO: 436528 - protein, 353 aa, unidentified
MRKQYNTVSFKNQTVFVGIDVHKKQWTVTIRHCGLAQKTFSMDPEPEKLAEHLKRNYPDAEYRSVYEAGFSGFEAHRALCRLGVQNIVINPADVPTSGKEREKKNDNCDSRKLARELENGSLEPIYIPTPENLMLRNLKRREDQLVQNLTRVKNRIKSHLYFNGIKLSSWSGGSLKNLEEDARKRYDWALLSDLREYRFLRVERVQVVRDQRECLKMLNREKIQENIQSVSGIGFRTAIALQAELWDMNRFKTNDHLNSYVGLAPHTFGSGEDIVIKCGNRKKKQLQSLMIEAAWRAIGHNLEYRARYGALLGRGMSSQKAIVVIAKKLMDTVRAVWLQDRKYKNYLETSKVK

SEQ ID NO: 436529 - protein, 453 aa, unidentified
MRIMYERCCGLDIHKASITACALITEKGKTQEETRRFGTMTDDLRALAGWLQQKEIRQVAMESTGVYWKPVWNILEPAGLELLLANAQEVKVVPGRKTDQKDSQWIADLHKHGLLRNSFVPPRAIRDLRDLTRTRAMLTQEHSSICNRIQKVLEDANIKLGSVASDVFGVSGRAILRALMNEENDAEALANLSKGTLRKKIPQLRRALEGQVTPHHRLLLTEHWDRMEFLERQIADFEIQIADRMKPTPEERALMMQDATEDAPAPLSPREEAIQLWMAIPGVGWTAACSMVAELGINMDQFPSAAHVASWAALCPGNNESAGKRLSGKTRKGNVWLRRTMCEVAWAASHTKDTYFAAQFRRIASRRGNKRALMAVAHSILVTAYHMLKHKRHYTELGADFFDVINRDKVRDRLVQRLSKLGFDVTLKSKGTLESVDHLADNSHPVVPASPKS

SEQ ID NO: 436530 - protein, 366 aa, unidentified
MKKISTVAIETMEIFKGHQLTIGLDLGDRWSFYCVLDEAGKIILEQKVSTTAEAMKQTFAKIPRSLIALETGTHSPWVSRLLTELGHQVLVAHAQKVELITKSTRKDDRHDARTLARLARIDPELLGPVRHRSAQAQIHLTVIRARAELVRARTALVNAARGLVKSYGLRLPKCGTQQVSRELAAGLCIELREVLEPLLKEVESLNESIQEYDARIEKIAKESYPHVALLKQVKGVGTQIALTYVLTLEDPHRFRKSRDVGCFLGLRPGRRNSGQSEPQKHISKEGDRYLRTMLVQGAHYILGPFGEDSDLRRWGLKLAERGGKNAKKRAVVAVGRKLAVLLHRLWVNGEVYEPLHNSHKEMRAVA

SEQ ID NO: 436531 - protein, 452 aa, unidentified
MSLVPSHPNAAGLDIGSDTIVVANPPDRDPLPVRAFQTFTVDLQALVAWLQACGIDTVVMESTSVFWIPIYELLEQAGIVPYLVNARHVKTVPGRKTDWNDAQWLQKLHALGLLQASFRPDAEIRTLRTLARYRAELIERRAPHINHMIQAMGHMNLQLNLVLTDTTGVSGLAMLRAIIAGERDPQRLAEFRQPGCKHTEAEIVKALSGRCDDVQLFILKQSVDVFDYYTTKIVECDGQLDQLYQAMESRREKDAPLPDLPPAKGESKSKNAMTFNARAQIARLIGVDLVAVMGLSAITVQTIISEIGTDMERFPTVKHFCSWLGLAPHNDISGGKVLRSRTMKVHSRANQAFRQAAHSVTRSHSSIRAYYRAMRARLGPKQAIVATAHRIARIVYHLLKTGEPYREENDAEYERKGQERELKHLARRAQKLGYTLTAVPATAPELPAEPDG

SEQ ID NO: 436532 - protein, 364 aa, unidentified
MKEITLLGIDLAKNVFQLKGLDKHHKEVFKKRLSRSKLESFVRGLPSCTIMMESCGGSNHWGRVFGTMGHEVKLISPQHVTPYVGNHKNDDKDTDGILECGTRPRTKFVTVKTLEQQDMQSTLRIRERLVGNRVSLSNQIRGLLLEYGIVIPQGFSHLKKHISQLLDANSNELSEELKEGISDCYEEFKELSKRIAYYDRKIETISNKHEYCRLLRTIPGVGPISALALYAAVGNGSQFKNGRMMAAHIGLVPKQSSSGEKHRLLGIIKKGHADLKKLLIHGARAVVYHAGKKTDWRSEWITALSSKKHTNVVTTAVANRTARIAWAVLQSCKPYQAKNDELVEGSACYPQPYHALRKNEGLLA

SEQ ID NO: 436533 - protein, 308 aa, unidentified
MYDSMTTVAVGLDVHARSIRLAAVRADELLEERTLPYDEEAVERLLRRWPSVRCCYEAGPTGFGLYRHLVECGIDCAVVAPGLVPQRPGDRVKTDPRDARKLARLLAGGLLEPIHVPSPELEAARDLVRAREDARHDRMRDRHRLSKFCLRHGRLLPTSSWTVVRRRWLGEQRFEHAAEQITFETYLHALDLVDARIEALEQAIRKTAEQAPWRELVLRMRCLRGIDTLTALALVAEIGDFSRFRSAEEFRAFVGLVPSESSSGAHRRQGSITKVGNSPACSSRPPGTRAGGRRSATNSPAASVAKTP

SEQ ID NO: 436534 - protein, 345 aa, unidentified
MEPMHYIGLDVHKRKISYCVKDSGGKIYLEGSLSSTRLDLDHWMKTLPQPWSAAMEATMFTGWIYDHLKPHAAALKVAHPLMLRAIAAAKTKNDRIDASKICDCLRCDFLPECYMASTAIRERRRTLRYRNLLVRQMVQMKIKISALLMEAGVSYNKQRLHKAGYFRELLASNPDINEGLGSVLRLCRETVVRLQKTESAMVRSLERDSLLMERLQWLMTIPAVGPITALTWALDVGDVRRFSSIKKAISYCGLCGAEKSSGSTVQRTPLSKQRNKHLQTTLIEAAKMAPRNSPELAMLYDKEKQKGNANRATLAVARKLVAYLVAVDRRQKEFLTVERENRAAA

SEQ ID NO: 436535 - protein, 350 aa, unidentified
MDNQIPTVALKSKVFIGIDVHLSSYAVCVVEEGRHRRKWTMPAEPEKLIEKLHKEYPTHEITTVYEAGFSGFVLHRALEAAGIRSIVVHAASVAVKTGDRVKTDRRDAQKLAEQLAAGMLSGVRIPTIEEELRRQLSRVRQQLMRDRVRIMVQIRRRLYHFGYLRDYEGILRRKDIRALLEKLPANELSVAVQSQYRLWESLERELSSINKQLAQQARECSLDALYQRVPGIGRVSARILANELGDLQQFRSQKALYRFVGLTPSEHSSGERVRRGGISRQGNSLLRKILVEAAWVAIRKDSGLRKFYSQLAARSGGKKAIVAVARKLIGRARAVLRSKEEYREAEPLVA

SEQ ID NO: 436536 - protein, 327 aa, unidentified
MDAIVVGIDVSKDRLDVAVRPTGESFVFKRTGLGIEDLVAQLEALSPKMVAIEATGGFEAVVAAGLTGAGLPVVVVNPAQVRAFAQALGKRAKTDLIDAAVIAHFAEATKPELRQMPDEMTRLLAGLVARRRQIVEMIAAEGQRARRMSDKRLIKSIARLRKALEKELSELDVLIGDQIRGSAVWAEKEDLLASVPGIGKTIARTLIAELPELGSLGRRQIAALVGLAPWTRQSGQWRGKSFIGGGRKSVRSSLFVGAIVAARYNPQLKSFRDKLVAAGKPKLIALVAVARKLITILDAILRDAHGSKSPLDRQDSRSLLQPAESVS

SEQ ID NO: 436537 - protein, 408 aa, unidentified
MNTLYVGIDVSSKSNVVYLMLPNGDKHSNFSVANSHEGSTQLVKRILSALTSHSLDTVLIGLEATSVYGDNLVYFLREDATLAPFNRKIHVLNPKQVKKFHDAYNDLPKNDYVDSFVIADCLRFGRINKEVYLGDYRYKALQNLTRARFFAVQNLIKEKQRFMNVLFKKYSTMTQEKVFSDTFSTTALAVYDEFDSAEALANMDLHELTDFIIEKGKNRFPDPDAVAKAIQKAARSSYRLPKTVNDSVNQVLSISITSMKALESQIKEFDKAIKALMELLPNVLISIPGIGPVYSAGIMAEIGDINRFDNQASLAKYAGLAWKQHQSGGFEAEVTRLIPSGNRFLKYYLCEAAFSLVRCDKKYSDFYHLKYKEVNRCQHKRALALTARKFVRLVFRLLKDNRLYCPAK

SEQ ID NO: 436538 - protein, 339 aa, unidentified
MSLYAGLDLHSSNTYIGVLDPQFNRIFKKRVSNDLDLILETLEPFRVRLRGLVVESTYNWYWLVDGLMDAGYACVHLANPSAIKQYEGLKHSDDQHDAFFLAQLLILGILPQGYIYPKEARPVRDLARKRLFLVQQKTANILSLQSLLARCCGQRVSSNQLRKVTGQDLKRWLKEEHLVLSAQANLDNIVFLKQQIARIEAAIQKQVKLSEAFNCLLTVPGIGKILAMTIMLETGDIHRFANVGNFASYCRCVSTQRLSDGKSKGSGNRKNGNRYLSWAFTEAAQMARRFNSRFRSYYDRKAAQTNSILATRALSNKLARVCYYIMRDQVEFREESVSN

SEQ ID NO: 436539 - protein, 428 aa, unidentified
MEQVDGIRLREFRQVKKEIRGSDQYLIVGIDVAKERHNAFFGTANGKTLHKGVIFDNTIEGFEKLLTLTEVLKVQHDLPKVVFGLEPTANYHKPLGEHLIKCGHMVVLVSGAAVKNNRSLLDGRWDKHDTKDSANAADLICQGKFLYYDYPDPKMQDLRNLLSLKRRLKKEEHSLRVRIRNQLLAQYFPEMDRHFGSAVSLAVVGHCLDPSMIAGMEFDEFRRSIAPGRMNIAQQKLLQTIWQIAPESIGCHVGDAVSFEGKLMVSKLNQVRDAIKEAENRIEDLCMQFPEYTCLLSIPGFGPDISSKVLGAIGNPFRFTSYKQVLKMAGFDLCAQRSGKTSNSVTPVISKQGRADLRYALYQAAFIASLRNKDFMTYYANKLRGRQRENGIGTKMRVKLAAKLLVIAWTLMKKKESFDQKYLNQEDV

SEQ ID NO: 436540 - protein, 359 aa, unidentified
MRIIGCDLHARQQTLAMLDTVTGEVLNRTLIHEGNQVREFYSELPQPVLVGIEAIGPMQWFLNLLEELGIECQVGDAAKIRAAEPRKQKQDRRDAELILKLLVEKRFPTIWMPSKELLDLRALLLHRHQWVRLRTQVQNALQAIALANGLRWGPGLWSYDGQAKIAFLPLPPHSSLRRSALQALYRHMDEEIEKLTVQVAEQAEKRSGAQLLLTHPGVGPVTALATDVFLGDPQRFDDGKSLASYAGLIPQERSSGRRRRLGKISKQGNPLLRFLWNEAGAHAARRDPELKRFYRRKLVQKGLGKARVAVARKLGIRLWIMLRDHIDYEEFCRRGQKPSGAACAGMPGTRLVHDHRPID

SEQ ID NO: 436541 - protein, 326 aa, unidentified
MLLEQKLSTTPKAMKEVFAGLPRCRIALETGMHSPWVSRLLNESGHEVIVAHARNVWLIGESRRKDDRLDAQTLARLARIDPQPLCPVRHRSAKAQADLTVIRARAGLVRTRTALVNTARGLAKSYGEWLRGCNVRNMNPEKAEGLSQELQTALEPLLAGTESLSERIREYNDRIESLAQESYPQVALLKQVKGVGMLIALTFLLTLEDPHRFRKSRDVGCYLGLQPGRRNSGQSEPQTHISKEGDPYLRTLLVQGAQHILGPFGADSDLRRWGLKLAERGGKSGKKRAIIATARKLAVLLHRLWVSGEVYEPLRKSSRMVMPVAA

SEQ ID NO: 436542 - protein, 424 aa, unidentified
MDVIYERVAGLDVHKETVVATVRIMVGAKVERECRTFATTTAGLRDLLAWLTEARCSHVAMEATGVYWKPVWNILNDGEFELIVANAAHIKNVPGRKTDVNDATWIADLLACGLIRGSFVPDEKFQELRALQRTRKQLVREQTSHIQRLQKTLEEANIKLDSVISDIMGLSGRAMIEALIAGESDPERLAQLAHRRIKATRRALYEALDGRVTDHHRFRLGLHLRQYDALDEAISAVGAEIAALVARIDQQREAAGQVPYRVLSCEICNIPGINVRSAGMILAEIGLDMGRFATAGHLVAWTGLCPGQNESGGKRKPARLRKGAPWLKTTLVQCAISASKKKDSYFRAQFQRLKSRRGAPKAACAVAASLLTTIYHMLKDGTAYRDLGAGHFDKRSAQVKVNRLVAQLAKLGYQASLQPLAQAT

SEQ ID NO: 436543 - protein, 342 aa, unidentified
MDIHVVGIDLGKTLFHLVAMDATGKVVIRKRCSRTQLLTFTANIRVWRIGMEACSGAHFLARALQQQGHDARLMPAQYVKPYVKTNKSDYIDAEAIAEAVQRPSMRFVPLKTEEQLDLQAVHRVRERWVMRRTAVINQVRGLLLERGITLPKGRSHLEEALPEILAEAHIRFSESISVLLAQLRFELDDLGTRIEEMDALIARISKENEACQRLTTIPGVGPVTATALVAAIGNGSAFKRGRDLSAWVGMVPGEFTTGGKQKLLGISKRGNSYLRRLFVQCARSLLRFRERQGAPFGVWLAKLIGRAHQNVAVVALANKLLRIAWAVLFRNETFRSPVLMTA

SEQ ID NO: 436544 - protein, 307 aa, unidentified
MAVCVGVDVAKHSLEWSAGSEGEIHHARNEPRPIAQLVRRLVALDPERIVVESTGGYERALVSKLAEAGLPVVVVNPRRVRSFGEGMGFLAKTDAIDARLLALFGEKAQPPIRPIPQGTDRLLADLVARRRQLVAMVVAEKNRRDTATPTLRRTIDPVLRTLAQLVRDLERRIDATLRQDTERAELLELLQTVPGVGPGVARTLLIDLPELGHLGRREIASLVGVAPFARDSGSFRGLRRIRGGRAAVRTALYLAAMTASRFNPSLAELYQRLRQAGKPPKLAFVALARKLLTILNAIARERTAWQA

SEQ ID NO: 436545 - protein, 465 aa, unidentified
MAKTQKSKSKSRAKPHHRAKLKPQDGTLGLQVVHPKAAGIDIGNEEHWVAVAPDLDPEPVRSFGCFTQDLQAMADWLVQCGVDTVAMQSTGVYWIGLYDILSERGIRVFLVNASDTKNLPGRKTDIQECQWLLKLHAYGLLRNSFRPEEEILVMRTYWRQRQQHIGDASRCIQHMQKALTQMNLQLANAISDISGTTGQLILQEILGGERDPWKLAKLRDPRIKASEATVAKSLEGNWREELLFVLRQEVESYQSLQTKIAECDQRLQQHYQTMESKADPKQLPPVPRDKRAHGNVPSGFDLREEMYRTTGVDLTAIDGINVLTAQTLLSEVGSDMSRFATEAHFVSFLGLSPRNKISGGKIVGREKRKPKNRGGLALQFAAGTLLRSETYLGAQYRRLRTKLGAPKARKAMANRLARIIYRMLKYRERYIDKGQEFYEQKYRQQQIRMLTKKASELGLQLVQQA

SEQ ID NO: 436546 - protein, 387 aa, unidentified
MEVRIENTPSAAVNNEPAQCFVAIELSKSSWVVGFQTPLATQTSRYQVKACDAKALLDLIDRVRARVARELGRPVEVMSCFEAGYDGFWLHRVLEAHGIRNHVLDPASLQVNRRARQPKTDRIDADRMVRALIRKLRGEPEACSVVCVPSPEQEDAKRLHRERGRLIAERVAHVNRIKGLCATQGIYDYQPMCSDRLERLEKLRTGDGRALPIRLKAEIVREIKRLELILEMIETVEADRDRIFKDKKSTHLNADKIKMLAKLKAIGPEFSTTLVGEVFYREFANRRQVGSYVGLASSPFCSGSLDRDQGISKAGNPKARTMMIELAWTWLRLQPDSALSCWFRQRVGNLKGRPRRIAIVAMARKLLVALWRYLQTGVIPTGAELKA

SEQ ID NO: 436547 - protein, 354 aa, unidentified
MQQSRTLSVGLDVHKESIAVAYVAQEHGAEVVSLGTIGTRQCDIDKLLRHLQSKGQHLVFVYEAGPCGYWLYRYLMKKGYVCWVVAPSLIPKKPGDRVKTDRRDARQLARLMRSGDLTPVYVPAVDDEAIRDLSRAREDTLRDLKAAKLRLKAFLLRHDIRYTGRANWSPAHLRWLSEVVCPTPAQQIVFQEYVQTVTEQTARLQRLEHELRDQVTTWRFQPVVEALQALRGVQFTVAVTTVAELGDLTRFNNPRQLMNYLGLTPSEYSSGPRRQQGSITKTGNTHARRALVEGAWAYRYPAKVSRHLPLRLEKLPAAIQAISWQAQVRLCKRDRQLMAKGKHAKQVVVAIARE

SEQ ID NO: 436548 - protein, 353 aa, unidentified
MRRMQNWVVKGKPIFIGLEDSKKTWKVCVRCGGTIVQETGMPARFDVLKAYLQKNYPECDIHVMYEAGFRGFWLHDALVEAGVSCVVTPAHLVTQEKVNKVKTDRVDARRLSLNLENGDYSVCAVPDRERREDRQVVRTLTQVQRKITSTKNQIRKFLDFHNLAPNLPAGSWKATQYARLRSLQLSSVLQICLDTYLDILDHLADQRDRLKKQLEVIATKERYREAVAIKASCPGIGRLSATRFTLEWGDLSRFPSGKSFACYTGLTSREHSSGEAVHRGRITGQGSGVVRGWLIQCAWRALKKDPVLWDKFERVRSNSGSKKKAIVAVARKLAVRLRAIDVARQMYVPAVIE

SEQ ID NO: 436549 - protein, 325 aa, unidentified
MEQGKGRFVGIDLAKKSMELCILCDGKAAVRSSYKTDAGGRARLYSNLDASDTVAIEACALAFVLARQLGRDVGCHVLVLNPGKLAMIWQSTRKTDKEDARKLAQLIQRYPEDELPIVAVPDEREDTMRSLVSMKHYWVTLRTSMVNRLHALYVQAGMTFVKKSDLASSAARLRMAAQLEGYLARFVAAIEHELSVTEQEIAALDQELQTMVAEHELAPYVMSIPGVGPGVAAAFLAYVGDGKRFSSPAQVANYIGLVPRLDCSGETNRYGHITGEGCRAVRGVILQATWSLIRCKEGGRLKAKSSSLPNGGERRAALSPWPVEW

SEQ ID NO: 436550 - protein, 410 aa, unidentified
MELFCGIDWAEHHHDVALVDGEGTLLARRRITDDAAGFAALLELLGEHGDAPEHKTPVAIETGRGLLVAALRSTGRAVYVINPMAAARYRERWTVARSKSDATDALVLANVLRTDRAAHRALPADSELVCAIGVLARAGQDASWSIRQVSNQLRAVLREFFPAALTAFHRKHVGLHSPEALTVLAAAPTPAAAAKLTRRRLGALLTRAGRRRNLEPWVERLHECFAAAQLHHDPLVEAAYGQQVKALLLQLDAATQACAQLLEACEQVFLTHPDAESITSFPGLGNITGARILAEIGDDRSRFADPASLKAYAGASPVTRASGKSRIVMHRRVKNNRLAAAGYVWTFASLTKSTGARAHYDRRRQHGDRHAAALRNLFNRFLGQLHHCLAEHVAYDETLAFKPPEHALAA

SEQ ID NO: 436551 - protein, 410 aa, unidentified
MQTMVERGCGLDVHQATVVACLLIVLKNGKVQKQVRTFGTTTRELGSLREWLLSEGCTHVAMESTGVYWKPIYAILEGAFEIVVANAQHVKKVPGRKTDVKDAEWIADLLCHGLLRSSFVPPKPIRELRDLTRYRRKLVDSQSAERNRLLKLLESANIKLASVASDVFGVSGLLMLQALIEGKATPHEMAELAKRQMRKKIPELELALEGRVEEHHRFLLRVQLRRLQSVEQDLGVLEQRIQEKLKPYAAQLTLLDEIPGVDWTLAAGIIAEMGVDMSVFGSVSQLASWAGICPGNNESGGKRKSSRIPKGNVYLKTALVEAANAAAKAKGTYLRDKFYRLKARRGYKRAAVAVAHKILVAIYHMFSHQVCYNELGDLYLDKLNKHHLTRNLVHRLERLGFTVTLEQKAA

SEQ ID NO: 436552 - protein, 357 aa, unidentified
MLSSNVKYIGLDVHKEAVAIAVLNGAGKLVMESIVETKASTLLDFLHGLRGELHVTLEEGTWAAWLYDVLKPHVADIVVCNPRRNALLKEGSKSDKIDARRLAELLRSGMLRAVYHGENGLGTLRELARGYLTISKDQARVMSRLKALYRSWGIPCSGRQVYTPRHREQWLSKILQPGVRRRAELLYQQMDGLLLVRHTVRGELLAESRKHPAVKILRQIPLIGPLRATLLLALMQTPYRFRSKRQLWTYSGLGVETHDSAQHRYVDGQLQRSKKPQQIRGLNQNHNHEMKKLFKSTAMSASRCAGPLQDFYAGLLAKGMKPDMARLTLARKIAAITLTLWKKGERFDAEHLKSQAA

SEQ ID NO: 436553 - protein, 454 aa, unidentified
MARNGKKKTKKQESLPFIQPDAAGIDIGATEIYVAVPEERDIRRVRKFATFTEDLHALADWLIGCQIKTVAMESTGVYWIALFQILERRGLEVCLVNARHVKGVPGRKTDIQDCQWLQYLHSVGLLRGSFRPAQAVCAVRSILRHRDIQLKSASRQVLLMQKALTQMNLQLHNVISDITGVSGLAIIDAILMGEREPSKLSCLCDGRIKASRQVVAKSLVGDYRPEHLFCLQQALESYRHFQNQIAACDEHIEQMLARFDSQEQCAEAPSTKYKAQGNQPTFDVPSEMHRILGVDLSAIPGMSAQTALTFFCEVGPQITRFPSSRHFASWLGLCPDNRISGGKILSSKTRNVRCRLANALRMAATTLYRSRSALGDYFRRLRARLGSPAAITAAAHKLARVLFAMLRDRRSFDPQLLGILNQKHLRRRQNSLRKYAASLGFELVPIQNLAHSVS

SEQ ID NO: 436554 - protein, 358 aa, unidentified
MSQEKYIGMDVHQATISVAVMDAGGKLIMECLLETKAATIVEFMEGLHGTLWLTFEGGTSAAWLYDLLKPHVSRLVVCDPRKNARLKDGNKSDRIDARKLAELLRTNQVKPVYHGEHGVRTLKELGRSYLTITKDVTRVMNRVKALYRSWAIPCAGTTVYAPRHRAEWLAKIAEPGVRVRAERLYQQLDLLQPLRLEARRELLVESHKHSAVKLLRQIPSIGPIRAALLVALLQTPHRFRTKRQLWAYIGFAVETHDSGEYRYVRGKLQRNRERITVRGLNDNHNNDLKNLFKGAAISASTRPGPLRDFYVARVEKGMRPTMARLTLARKIAAISLTIWKKGVEFDPDSCIDKQLEHL

SEQ ID NO: 436555 - protein, 335 aa, unidentified
MKITAIGFDLAKNVFQVHGIDEARRTLTRRQLRRSQVLEFFANIEPCLVGMEACAAAHHWARALQAQGHTVRLISPQFVKRFVSGNKNDKRDAEAICDSLLHHSTRFVPVKTLEQQAVLSLHRLREGFVQSRTALVNRLRALLAEFGLVVAKGRRAFEAELPILLQEGRIPELLRGALLEAREELLQYSQQIASLERRLLAWHRQNEASQRLEEVPGVGVLTATAVVASVGGNAKLFDKGRQFAAWLGLTPREHSSGERRQLLGITKRGDTYLRKLLVHGARAAIGGHRSGRNPWLTAILERRPKNVATVALAQRNARVLWAMLANGTSYQPKFV

SEQ ID NO: 436556 - protein, 417 aa, unidentified
MFKIFRKNCCGLDVHKTWIYACIGITDANGRTVYKQARFSSFTKGLNELAEWLAKYNCKDVCLESSGKFWIPVFNILEKTCFVTLAHPKYTKPQKGNKTDRKDAKWICDLFMCDMIKPSFIPGLEIRQLRDLMRYRTKLTNMKTSEKNRALNCLTVSNLKLDDVFSDVFGKSSTSIIQYLLEHPGESFDVRPFIHAHCKTPVEEIQAAVEGAISVPQAIKLRQCLNHINEIEKHREEINLEIQALAEPFSPVLELLRTIPGLDTQPITAIAILSEIGPDMSVFPTSKHFISWAGCCPRNDRSARRTKSTRISRAGQSLKPLLVQIANALLRSKEHPEFKNRYRRIKANRGHKKAIIAICKMLLTAIWNILSKHEPYSPDGYRQKYPSFEQKVLTKSQALELLKRRGFIIQDEPLIAI

SEQ ID NO: 436557 - protein, 353 aa, unidentified
MRKMQEFIVKDNRIFVGLEDSKKTWKLCVRSEGMIVHQTSMPTKYENLRSYLTHRYPGCRVKVIYEAGFQGFWLHDLLKEDGFECIVTPPNKVVQEKDNRVKTDKIDASRLAKNLEHGDYRSCHVPDKELREDRQISRTLDQIQKDIKRTKSRIRMMLYYHGLHTDLPDETWKPSDYERLREISVGDSLKIAFDATLDLLEKLGALRNRLMKAMQRLCKKERYEKSAALKASSPGIGWLSAIRFTLEWGDMSRFANGKKMGSFSGLTSGEYSTGDTVRRGRITKQSSPRVRAWLIECAWRAIKLDPVLLHKYRQVWKHSGSKKKAIVAVARKLAVRMRIVEVRQTPYCIGVSE

SEQ ID NO: 436558 - protein, 409 aa, unidentified
MEIMYESCCGIDVHKTKLVACLKLKGNRQEIKEFGGNTEDIKDMAEWLLENKCEKIAMESTASYWKPLVNIFEMKKLDYTIINARDYRNLPGKKTDVLDSEWIADLLQHGLLRDSYIPSREQRELREATRYRKSLTEERTRNINRLQKMLEGANIKITSILSNVLGVTSRNLIEYVLEHDEELTEEKASELVTTKIHAKLEDVMRAMSGIITPFQKTMMKEVMKHIDEITARISEMDKIIDDYMKDYENSKKKLIKMPGLGKRSAEIILAEIGQDMGRFPTAAHLSSWAGVCPGNNESAGKRRNGKTRKGNKTLKSTLVQCAQSAVQRKNTFYRAQYERLTMKRGKKRAILAVAHSILISIYYMLKENKEYEELGANYYNQFNVEKKANAYMKKLRDLGYEVQITAQVT

SEQ ID NO: 436559 - protein, 370 aa, unidentified
MVTRFHGVDRHIRSATVSQLNREGVEEKLIHPIRDFNAYIETLGPEDAVVMETGTGTFFWADKIEARGAQCFIIDPYRFKIIKDSWNKTDKRDSRNMAKALWVSAVTGEFGLPLVYKPSALTRELRKLYAQYQVLNKQIRVYKNTVQAVLADNGIVLSRVEKNHLLSEKYGKQMLEELDVSEASRISITMNLELLWNVLEKKEELVMEILRIGEPLKDQVELLITIRGITPLTALAFLADVGDIHRFKTLRQMNSYLGLVPRLRASGDKSWSGHINRASRKLTRTILTQSLIQVTDASLYFRNYYDEMKSRRGAGRSRIALIRKLCGIMRRMLLEGKPFKYTEVTLYTRKQKQYERMLNQIREDRERKSA

SEQ ID NO: 436560 - protein, 416 aa, unidentified
MEKEREVVCGADIHKQFLLATILTKCGQKFQDRFDTNFEGLLNFRQWLLDHRCQRLAVESTANYWLPIYLAVRKDIEFVLANAYQIKHIPGRKTDVLDSEWIAELCLKDLIAPSRIFSEEDRDLRAMTRTRESYVKTRSQIKNRIHQELESACIKLSSVLSDIFGKSGIHIIRGILNGLSIGDILESIPSKKVKARKEEIQDAIRANISPVQVDLIGRLLDSVDFLNREISSIDEQIQAIISNRNKDLKIAMSIPGMGFTSASTILAEIGNFKDFKTGEQLAAYCGLVPSVYQSAGKLITGHITKHGSPHVRRMLIEVAHALSRTKADSKLKRFYFRIKMRHGAKVAVVALARKVVCILHHLIVNREMFEDETTKESRRKNQGRSSSMPELNIADAIQILVRAGYMVQKRSEKEGG

SEQ ID NO: 436561 - protein, 492 aa, unidentified
MHRKQSLDYFNQSFERVPVRSRSTNEFSFADAYFNASTIRLSQNGSNACLPTNADQLNTKKKPTPMNPNNQNQSFAAFIGLDKSDKKINVSLQRYGTAKIERSIIKGGAEALHAWVATLCTRFAHRQVAICLEQPAAGLIHGLMGYHFIVLFPINPMTLARYREAFTPSRAKDDPTDADFLCELVALHREQLKAWQPDDVCTRKLRHLTQARRRSVNMRTRFSNQLKALLKGYFPQALELCGDDLTTPMACALLQKWPSLQQLKKARAETIRRFYYAQNVRRGDVIEKRLALIAQAAPLTNDPALIESSIITVQALTLGLRAVHTAISRYDREIARTFAQHPDASLFAALPGSGTAYSARLLAAFGSRRELFESAEVMLNFSGVAPVLKRSGQATLIHRRYARPLFVHQSFIEYANESIRHSLWARAFYQMHKAAQKSHWVIIRALAYKWIRILFRCWQERTPYDEIRYLRSLQKSRSPLLQYLAQPAIQTA

SEQ ID NO: 436562 - protein, 366 aa, unidentified
MSKIKYIGLDVHKNSIAIAIADNKRHGEVRYYGQVQNDMEKLNKVLRKLISDGSELSCVYEAGPCGYHLYRYLTDNGIDCSVIAPSQIPRKSGDRIKTDRRDAITLAKLHRAGELTSVYVPTLEDEALRDLVRGREDAQKALRKSKQQLGAFLLRHHIIYSGKTMWSSAHFNWLADISMDHRAQQVMLQEYIDTVNDNSKRVDRLTSQIRDLSEQSRLAPLIKALQAMRGVSLIVAATVAAELGDLHRFANPAQMMTYLGLVPSEHSSGEKTKRGAITKTGNGHVRKALIEAAQAYRLPARKSRVILKRQENLSKEVCRIAWKAQLRLCGRYWQLAAKGKKTNVVKTAIAREIAGFAWAIAQEVTL

SEQ ID NO: 436563 - protein, 420 aa, unidentified
MSFKIFRKNCCGLDVHKTWIYACIGITDTNGRTDYKQTRFSSFSKGLKELSDWLAKYHCTEVCMESTGKYWIPVFNVLEKAYVSVILSHPKYTKPQKGNKTDRKDAKWICDLFMCDMVKPSFIPPADIRHLRDLVRYRFKLICMITGEKNRAQNCLTVSNLKLDDVFSDVFGKSSRSITEYILEHPGDLFDVTPFVDRRCKTQIEEIQAAVDGAISPEQAVKLRQCLNHIDELEKHLEEIEQEILRLSDKYQAALDLIRTVPGFDKNPMTAIQVLSEIGGDMSVFPSAKHLVSWAGCCPRNDQSNKKIKSTRISRAGSYFKPVLVQVANGLLRSKKHPEITDRYKRIKARRGHKKAIIAICRMLLTAIWHILSDLKPYTAEGFRESRPVNESKVLTTSQALNLLKQRGYIIKDDLTPAMN

SEQ ID NO: 436564 - protein, 344 aa, unidentified
MTVKCMAGIDLHSNNLFCAIVDLQGKRVFEKRLPCELGSVLRALKPFKKGLEKIAVESTYNWYWLVDGLQDHGYPVVLANPAAMQQYNGLKHADDKSDGFFLAEMARLNILPTGNICDRAVRPVRDLLRRRMGLVQKRTRLMLSLKSLHTRMTGRDLGTGAIKALEPQDAESLFEHPADQLITRLDLALVEHLGRRIGQIEAAILAAVKGRPHYQVLQTLPGVGRILGLTIALETVDPKRFASPGDYASYCRCVDSRRLSNGKKKGENNGKCGNKYLAWAFVEAAQFARRHDGLCRKLHDRKSAQVNKIVATKALACKLAKAAWHMMSRNTPYDAGRMFPGAKK

SEQ ID NO: 436565 - protein, 377 aa, unidentified
MKRVRFVGLDVHAETIAVAVAEQNGEVRSLGVIPNREDSVRKLVRKLGPVEEPRFCYEAGPTGYVLYWQLTRMGAKCEVVAPTLVPVKSGDRVKTDRRDALKLARNYRAGELTPVWVPDAAHEALRDLVRAREAAKKDELRARHRLNKFLLRQGRRPPMGVKLWTIKYLEWVKREVHFEQMAQEATLLDYLHEVEHAAARIMRLDGAIAEAVKLAPPKMRAVIEALQALRGIAHVAAVTVVAELGELSRFARAKQLMGYGGIVASEHSSGERTRRGGITKTGNAHLRRVVVEAAWNYRHRPAVGTSLRKRQEHVSEEVKEIAWKAQQRLHQRYKKLLANGKNKGVVVTAIGRELLGFIWAIGIKVEAAQKESLQRAA

SEQ ID NO: 436566 - protein, 344 aa, unidentified
MSGAYEGRQIVGMDLHRRRSVLVRMTETGQHLETVRISNDPDYLREVMTRAGEAPDVVLEATYGWYWAADTLAELGAQVHLAHPLGVKMFALRRVKNDQRDAADLADLLRMGRLPEAWIAPPATRELRGWVRHRAKLVGLRSNLKCQVHAVLAAAGVAVSMSDLFGASGRQLLAATRLSVESRSRIDSLNRLITALDFEIDLYTRLVAGRLRADPGYRAVQTIPGVGAVLGAVFVAEIGDITRFARPQQLASWAGLTPKHHESDTTVHRGRITKQGSRLVRWAAVEAVQRVPAHTRFGQRRDRIAQRRGRNIGVVAAARDLITLVFYGLRDHHIRCLPSGTGAA

SEQ ID NO: 436567 - protein, 355 aa, unidentified
MDNEKHIGMDVHKESISIAVMNGAGKIVMECVIETKASMILEFIDGLRGDLHVTFEEGTWAAWLYDLLKPHVTRLVVCDPRKNASMKQGNKSDKVDARRLAELLRLNHLNPVYHGEHGLRTLKELVRSYLTITKDLGRVMSRVKAIYRSWAIPCTGKQVYAPRHRAEWLMKITEPGVRRRAEFYYQQLDALRALRQQVRRELLEESKKHKAWKLLCQIPSIGPIRAAVLLGILQTPHRFRAKRQLWTFGGLGIETHSSADHRYVEGQLQRSKKPVLIRGLNDNCNHDVKNLLKGAAIIASTMPGPFQEFYTALLGKGIRPEMARLTLARKIATIVLIVWKKGVCFDAQHLKPQTA

SEQ ID NO: 436568 - protein, 352 aa, unidentified
MIIIGVDYHPEFQQIALLDQDTGELQEKRLSHPGEAEKFYRALAVSQKVRVGMEASGHARWFERLLGELQFELWIGDAAAIQSQRGRKQKTDRQDAEHILKLMLKDDFPRIWVPSGENRDLRQLLWHRHRMVQARTRIMNQLQAVAINEGLRCKKRLWRTGRQQLALLRLAPWASRRRHDLLELLDRLNPTIAELSQAIEQEAAKCAEARRLMTHPGVGALTALAFVLIIGDTERFQCGKQVASYLGLVPLEKSSGNRRRLGHITKQGNSLLRFLLVEAAQVTVRSLPEWRSQYFHLLMRRGRKTAKVAMARRLGVDLYWMWREQRDYQSKSSVRTQDSPEQAMVCNRTPRN

SEQ ID NO: 436569 - protein, 326 aa, unidentified
MNLSVAALGVDIAKLKFDVCLIKENGKAKHKVFANTTHGFEQLSIWLSSHQVGSLHVCLEATGSYGEALALYLFDVGLTVSVVNPAAVKAFAASRLTRTKTDKVDAELIARFCLAQQPEAWQPPAPEVRELQALVRRLESLIEMREALDNRLSSGVSTASVRHSLEEHIAYLIDEIKQTELMIREHINNHPDLKEQSDLLDSIPGIGATTAALLLAEITDFKQYKSARQVAAYAGLVPRERRSGSSVRGRTCLSKVGNARLRKALYFPAITALRSSGFFQQWAAGLRERGKCKMAVIGAAMRKLIHLAYGVLKTGKPFDPNWAKAA

SEQ ID NO: 436570 - protein, 416 aa, unidentified
MDTMYERCCGLDIHKKTIEACFRSGKKKTHMSFGTTSAELRKLTIWLVENDCQSVAMESTGSYWKPIFNILELSGTDMEIIVVNARHMKNVPGRKTDVNDAEWIAELLQYGLLRPSFIPDREQRELRELSRYRKSLVGERAREINRLQKMLEGGNIKLTSVVSEVTGYSSRRLLDRLLRNDEPMTEEVISGLVHTSLAGKSKELETALDGLLSELQKELLIKVLDHIDDMSRRIADLDDFCRKQMKKYEDALDKLDEIPGIARRTAETILIETGLDMSRFPTAKHFARWAGLAPGNNESAGKRSNGRTTKGNPTLKSTLIQSAKEAARKKDSFFKARYQKIAARRGANRASVAVAHSMLIAIYHILKSGERFKDLGEDYYNQFNKEKKKKYYLKKLTKLGVNLKEATLSISIQAAT

SEQ ID NO: 436571 - protein, 322 aa, unidentified
MMAEPTEIQSILGLDVSRDTVTLCDGRRHTVTVANEADALRAALQPYQGTTTLAVCEATGGYEDILLGVLLELAIPAHRADPAKVKAYIASFGKRAKNDPIDARWLSRYGRDRATTLPRWQPADPTQQKLELLVARRLDLVAMRVQEQNRLKAPRSRLIADNIRDHLAELERHIEALNAEIDTLVGESRDLALRAQQLRSVPGVGPVLAPLLLAVIPELGTLNRRQVASLAGVAPHPKDSGKANWHRSTTGGRRQIRPALFIAALAACRGNNGLATAYKALLKAAKPKRVALTAIMRKIITIANARVRDAVRHQNEIGQINA

SEQ ID NO: 436572 - protein, 332 aa, unidentified
MYLGIDVHKRYAQVAVMDEAGKIVEEVRVENANLDDLAQRYAGAQAVLEATSNYYHIHDTLSEHLDVTVAHPKKINQIADTDKKTDRVDAKELARMLRLNSVPESYVPTEEVREARALVRGRQTLVENRTKYANKVHGLLSDHGITEDVKPLSVEGREFLRELSIPTPFDALLESYLDLIESLTEEIQKLDETIEERAGSLKETQLLMTIPGVSYYTALTIYAELGGIDRFDGDKEVVSYVGLNPVIRESGDSRIEGSISKRGSGRVRWLLVQAANTAVHTSNDEYLSRFYDRLASRKNSQKAIVAAARKMLVSIYHMLDRGEAYDPPGVTA

SEQ ID NO: 436573 - protein, 313 aa, unidentified
MSETTFVGIDIAKGKLDVHILPSGQAFTSDSDDNAVSLLIKRLKKVHPTLIVLEATGGYETTLAAEFQGAGLPVAVVNPRQVRDFARALGKLAKTDSIDAYVIARFAEALQPVPTPLADAQQKALKELLVCRRQLIQVRTAEKNRLSRASSSNVRDVHEQVIEHINQQIAHIDREVDDQIKGSPIWFEKDQLLQSVPGVGPQTSRTLVAQLPELGALNRKEIASLVGVAPLNRDSGALRGRRMISGGRAPVRTALYMAAISALRSNPVIRAFYRRLVEYGKPPKLAIVACMRKLLTILNAMVKSNTPYEATYT

SEQ ID NO: 436574 - protein, 269 aa, unidentified
MPRTIFQIYALSSEGAPATKRKLTRGKMREFFAKISPCLIGMETCGSAHFWARELKAMGHDVRLMPPAYTKPYVKRGKNDAVDAEAICEAVSRPGMRFVPVKSEDQQATLMLHKTRDLLVKQRTMSVNALRSHLAEFGLVVAKGIGRVDELLGLAEADATLPETAVMAVKVLGQQIEALDKGLEDLEKEIAKAHARNEMSRALCEVPGIGKLAASVIAVSVPDPSVFKSGRDFAAWLGLTPRQNSSGGKQSLGAITKAGNRYIRKLLVL

SEQ ID NO: 436575 - protein, 362 aa, unidentified
MRLMQTERKKLNFEGQKIYIGIDVHKTTWTVCFFSEHLEYRKFSQAPSAKLLKEYLERTFPGATYYSVYEAGFCGFHIHRSLEAEGIKNIVVNAGDVPATNKEKSNKNDKRDSRKLGRSLRSGELKGIYIPSRKSQEDRSLLRMRYTVRRDLTRIKLRIKSLLNFYGIVHPAAFSSPTKHWSHAYMEWLGSIEMEEKSGNTALQVLTGEAEEKRKEQLRVTREIRDLSKTDSYEKNYKLLSGIPGVGLISGMSFLTEIEDINRFSSADRFASYVGLIPSSHSSGEKEHNGRITRRAHSLLRDMIIESAWKAVRYDPALHLAFCKLTGRMNPNKAIIRTGKKLLNRIYYVLKNKREYVCATVE

SEQ ID NO: 436576 - protein, 412 aa, unidentified
MNSYNYFLGIDIAKESFDIALLNKDSDKVVKKKNLKMNNQGFTNIIEILNQHDKTKKFTFIVMESTGSYHLTILSYLVNNDYTVALVNPQLIKSFISSMTLRKSINDEISAKHIAQFAKVRYHNLETVSKDSISSLKSIIRERDNIVKSISQQKNQIRDLVNRLFPELEKLTDIFSKTVLQMLRKAPSANKLAQQGLNFIQKSINNSKGSKLKVSAQELLTAAQNSIGLNDKYLEKALTVKLNHFINSQNTLAEIENIINEAVSSNNSIKKNSKILKSIRGINDKTAIPFLIESGIAGTNIENIFPSHKQLIAYAGTDPAIKQSGTSINYRGGISKKGNSYLRKVIYNMARTVSQYNTYFKEYYRKKRDEGKCYSQAIIAVGNKLIKIIYALLKNQSYYNSEKHLNQVNWIA

SEQ ID NO: 436577 - protein, 336 aa, unidentified
MSELATVGIDLAKSLFQIHGIDENGRVLVRRQLRRSQLLAFFEKLPRCLIGMEACGGAHDWARKLQGLGHDVRLMPPSYVKPYVKRGKTDAADSAAICEAVTRPSMRFVAVKSEACSSVLVIHRTRDLLVRQRTQICNAIRAHMTEFGVIAAKGAQNVDRLRTQMHQLPETARLPVSLLFEQLVDTDTRIERLTREIEAAHAQSETSQRLVTIPGVGKLSATIIAATTPDVGNFDCARDYAAWLGLTPKPHSTGGKQRIGRISKMGNRYIRRLLYLGAMSQIMVRHGCGPRQDWLSDMLARKKTKVAAIALAHRMARTIFAVLRDGSRYQPQATAA

SEQ ID NO: 436578 - protein, 351 aa, unidentified
MQIVGALDVHRRQITFKTLEPASGECSRGRISPAAREPLRQWLERFDGLEGEFVLEGTTGWRFVVEEIERAGHVARLADPAETAARRGRKRRAKTDDADCDLQLRLLLAGELPEAWIPPAGILELRTRVRLRKTLIDQRTAWLQRLQAQLFHQGVPPGLKPGTVAGRDALARVELSPAGREAVELYLRMLDQLDRELVPIDRALRAFARRQPGCRALTEQLYGVGAVTATAILAELGDARRFRSSDDAVRHSGLDVTVWQSDRKRAAGHLSHQGPSVLRWALFEAAQCAARRSSPDHAYYLDVAKRIDHNRACLSVARKLCRRAHHILRELGDDALAPSDPPRAELVDAAA

SEQ ID NO: 436579 - protein, 394 aa, unidentified
MNEQKESAAMGRIIGLDLHPDVFSAAALSGRDAATAKPVQQWDRLATAQLEAWAMTLGAGDLVVLEASGNSFESCARLQRCGVATVVLESQRAGQIRKTYCANDRSDAVKLARIYLSGLAHPVWQPDAATRERREVLHAYRKAVTTATRTRNRLKSFLSDHGVRLQPGVRLVQASGQKTVRGSRSWTALQLVLVEQMLEELQSADDRRHQLSAVMAQEVAADPKLLPLVRLLGIRHVIAFAIAAVVGDITRFANPKKLVAYLGLAPTVDQSGNGPRGQPGLVTFGRADLRALLTQSAQNALNQRNSPLHTWGWKLCLRKSHKNVAIAAIARKLTVRIWYLLRGLFTPLKQIDASLRVKLAKIATAIGVKTIRHLGYKSKAAFIEEKNQWLLNPA

SEQ ID NO: 436580 - protein, 308 aa, unidentified
MRYVGIDYHKHYSVLCATDERGQELKQRRIKGNTAAGFAQFFSELGEQNKVVMEACWNWGWLYDLLGQIDQVGEVVLAHPYKTRLIAEAQIKTDRIDAQVIAQFAAAANPPVRALPDAATQALADLVTRRRQIIQMIVAEGQREKRASVRARKSIQRLLKSLRAELSEIDAEIDESVRGSAIWREKENLLASVPGVGSGTARTMLAELPELGTLNRRQIAALAGLAPFTRQSGKWRGKSFISGGRTSVRTALFMAAMTAMRCNPALRAFHHRLRAAGKPKMVALIAVARKLLTVLNAILRDKTKWQNA

SEQ ID NO: 436581 - protein, 381 aa, unidentified
MRRVSPNGVISVRKAPTLNEVIIASKEIHGMGRIVCGIDFHKNECVLCALHEDGSAVMPIKTIKTTAIYTFFSDKQNWELGIEASGGTNHVVTKLREMGLNVIMINSNQFRGIGIGGKKTDQRDAKALAECLRVGFAPEVHVKTVMSRQIKSLVVNREMMIQARTRMISHVRSALREYGESIPVGPENFFREAAGKIAKIENGYLKSSLEDTLEFIRRLSEQVKVMDERLKNIFTEDERVQRLKTIPGVGDMSAAMAICVVDDISRFKSADQLASYLGLVPKVHASADTRMMGHITRSGSEILRRYLIHGARAWMKYAPEGDPNRSWAEKVKERRGMNKATVALAHRMARIIFAVLRDGTTYTGKPKKKQRKVVKSNTEAA

SEQ ID NO: 436582 - protein, 391 aa, unidentified
MSMYFIGIDISKYKHDCCIISAADQKVVSKVTIKNNKAGFNELLTIIHSLANPADIRIGFESTAHYALNLELFLENSLLTFMEVNPVLISEYKKSKTLRRTKTDSVDCESIARWLMTVEYKPHSKGFYHAYSLKSLTRLRDKLIRQRSFYLIKITNVLDHTFPEFKPFFNERLSKTALYLLENYGSAEKMARMNSASYEKLRSVSRGKFSPQQFLRLKELAVNTVGVNNSIFDVELNSLLSLYKSLVKEIDTIKKEINQLIEEVHPHYMSVPGIGPLSAAVIYSEYGDISNFTNPGQMLAFAGIEPGINESGTESHGGKMVKRGSSQLRYTLINCCLPLIRFDMTFATYYAKKRGEGKPHRVAITHVAKKLIRVIYALESQDIDFNAQELR

SEQ ID NO: 436583 - protein, 393 aa, unidentified
MEKPWRRATCEREPVVKKTIRFLGLDVHAETIAAAVATADGDVRFLGTVPNRLEAIRRLIRKVGPAKDLVACYEAGPCGYVVYWQLAELGVECQVVAPTLIPVKSGDRIKTDRRDAEKLARGLRNGDLTAVWVPDAAHEAMRDLVRARLAAKRDQLRHRHRLGKFLLRRGCRRPDGMKAWTRTHMEWVRKAVHFEQPAQREVLLDYVNEVDRCAERLTRLERAIDDAVAQAPEPMRDVVKALQALRGVAKVTAVTIVAELGQLSRFARAAQLMAYGGMVSREHSSGDTVRRGAITKTGNAHLRRVIVEASWSYRHPPGKSALIRKRQEGLSDEVKAIAWKAQHRLHKRYGALLGKGKSKQQVVTAVARELLGFVWAIGVNVERGSSSDDRRAA

SEQ ID NO: 436584 - protein, 460 aa, unidentified
MIRRLVGVDLGIASAHTVRVLAEDGRDVCRRRCEPTVDSLARVEAAALAGTPAGTVLEVVMEPTGPAWLPVAVFFTARGHLVFRVSSAKAADLRRFLSRHAKSNGIDADTLARLPLVDPAGLHPLELPGAVAAALDRRVRVTDRLTVLAARHKTRIKDLTRQLLPCSPLTGELGVADLAVLERWADPRALLAAGPARLTALIVKASHGHLGADRAQQWRTAAAAAVELYADHPAIAFTDLAAEVGTEVRLLRATQAELAAHAQERETAYRYTDLGGLARTLPGVADVGGPVLVAGMGRPGRFGSGAAFKSYTGLAPRASETGNTDRKGQPMSKAGSCLLRTTLIRAADNARRQDPQLARIYYTQMVERGAEHLKAVCVVAGALAERAWTVMNRQMPYVICDIDGTPVTPEQAKQIIAQHFTVPDEVRRRRRSSKTPGRKPAPQPTSGSGGRPLSKPHTAA

SEQ ID NO: 436585 - protein, 346 aa, unidentified
MKKIFIGIDFSKEKFDATVIKAEGVEERAERQHEVFDNKVSGYRRLLRWVKSVVDEQDTDLWLFCGENTGGYSRALCNYLYSSGYDIWLENALSIKRSSALQRTKNDKADSGIIAEYAMRNYDQMRLYEPLDRNLERLREIFLYRHNLVKLKASITVRKGEKRLTQEKSDVSRFMAMSSKHLISEFNKKIAECDMRIEKIICEDEDLRRNFEIITSVPGVGTQNAVCLMVYTDNFCRFDFDSRKIACYYGVAPFGRQSGTSVNTPPHVSPFANKLIKALLSQAALASVNFCPQMATYYHRLVKAGKKKPVAINNVKNKLLHVITAMVRNGEKYNPDHDYYAALNAA

SEQ ID NO: 436586 - protein, 359 aa, unidentified
MEAQRKALCFKGQNIYIGIDVHLKSWSVTLMSEATQLKRFSQSPDPDALYAHLVRNYPEAEYHSVYEAGFCGFWIHYRLVGLGIHNIVVNPADVPTTTSEKLRKTDAVGSAKLARSLRAGELKGIYVPGSESLETRSLIRLRDSITKDQTRLKNRIKSHLRYLGIEIPEEFSGPGRCWNRRFVVWLKGSETGTAYGRQTLDFLVRQYEALRGQRLEMLRAVMALSRTERFEKPLENLMTVPGIGQLTGMSLLSEIDDIRRFKSADQLAAFIGMIPMCHSSGEREGVGDITVRRSARLRSVLVEASWVAVRQDPALSMAYGNYCKRMAPGKAIIKIARKLVNRIYFVMKRNQPYVKRVVA

SEQ ID NO: 436587 - protein, 349 aa, unidentified
MGDGIAVGRQFVGVDLHLHRSVIGRIDEQGQQLGWVRIDNDPKALVRECRKAGRGAPVAIEATYGWYWAVDALVAAKFDVHLAHPYGMKAMRKRKRVKTDWRDAYELANLLRLGSLPEGYISPPELRELRELVRHRQQLVKLATSLKAGVRALLAKHNIRLAARQLDGDAAIAVMDQLQLPGTYAVRLAAQRRLLLALSEEIAAVEVELARRLKDHPGYRRLLTIGGIGPTLAAIFIAEIGDINRFHDAAALCCWAGITPRHYESDRTVRRGHISKEGNSLVRWAAVEAVQRNCEPAIKAVREGILARRGKDARNTAKVAAARVLLEAIFHVLRDGYSHRLNNEWHAIA

SEQ ID NO: 436588 - protein, 394 aa, unidentified
MPKASAHPEAPAAIQTHLTAIFVSLELSRKVWLITSLSPGAGEKMSKHSVPADDVAALLMRFSELKHKAEARTGKTFPIVTIQEAGLDGFWLHRVSQSEGVESHVVDPASIATSRRRRRAKTDRLDGEALLRALMAFKRGEPRVCAMVKPPTPEEEDRRRLSRERKTLIAERVQHVNRIKGLLFAQGVSDYDPLARDRRQRLVELKTGDGRPLLPHLKTQIVRELDRIELLLGQIKAAEAERDAMLAASKAEAQQVGSPPPAGKMLLDFKGIGPEFASVLWHEALYRRFDNRRQVASYAGLAPTPWQSGSVDHEQGVSKAGNPRLRTALVELAWLWLRNQPDSALSLWFKQRVAANNGRRKKATIVALARKLLVALWKYVTFGVVIEGAVMKQA

SEQ ID NO: 436589 - protein, 334 aa, unidentified
MQNVALIGIDLGKHSFHIHCQDKSGNALLRKKFTRTKLMQFLVTCPSSVVVMEACAGAHFMARRISDIGHDVKLISPQFVRPFVKSNKNDFIDAEAICEAASRPSMRFVQPRTETQQAMRALHRVRESLIRDKVKTTNQIHGFLLEFGISLPTGDAVIKRLSLVLAEHEIPEYLSRLLMKLHAHYLYLIEQITELESELNQSIKAHATAQRIMTIPGVGPITASLLSSQLGDGKQFSCSRDFAASTGLVPRQYSTGGKSTLLGISKRGDKNLRRLLVQCARSFMMRLVHQQGRLAEWVRKQLDNKHSNIVACALANKLARIAWAITVLQKEYQA

SEQ ID NO: 436590 - protein, 320 aa, unidentified
MDVVLGIDIAKAKFDVALLWPDGRLRRKSLANNAKGFAELAAWLTRHGVERVHAALEATGTYGNAVAEFLYDAGHHVSVLNPAVTAAFAASQLLRAKTDRVDAALIARYCATQRPALWTPLPREVRELQGLVRRLDALQDMRAQESNRLGAGEVVPAVATSIETVIKTLTKEIAAVRRQIRDHFTQHPGLKGQRDLLESIPGIGEATAAVLIAELFDKPYRSARQAAAFAGLVPRICQSGTLRGRSRLSKIGPARLRKALYFPAVTALRANPNLQSLKARLSALGKPKMVIIGAAMRKLIHLAYAVLKSGRPYDPRYARA

SEQ ID NO: 436591 - protein, 383 aa, unidentified
MTMAIDTRDVCCVALELSKTTWVCAFAVPGERKVAIHKIKAGEVERLLAVLSTCKAKAEQHLGQPLQIVLCYEVGYDGFWLARWLIARGIRTIVFDPASFLMPRRSRVAKTDRLDAEGMTRILRRWLSGDREMAREVQIPTVAQEDAKRIERERKYLVEERISVIGRIKGLLALHGIWLDRKNIGKGLRQRIGAMTTGDGRPLAPFLRSEIERMLTRHDLITQQIAEVEADRKAALKNEKGSFPQTDKVRRLTMLGAVGETTATVLVAEVYHRTFQTRRQVASFVGLAPSPYKSGEVDHDRGINKAGSKLARHMLVELAWFWLRYQPDSQLSRWWRERFGNQGMRGRKVGIVALARKLAIALWRFVEDGIVPDGATLKARPLI

SEQ ID NO: 436592 - protein, 389 aa, unidentified
MYFVGIDISKYKHDCFIATEAGEIIQQNLTFQNNHQGFANLLQILDSLDHSQEIKIGFEATGHYGFNLKLFLEKAHYSFMEVNPALLSKFIKSQTLRKTKTDAIDSRSIAHWLMSVEYKPHPKEFYHMYSLKSLTRLRDSLVKQRSFYLVKITNVLDHIFPEFKPFFNDRFSVTALYILSKYHSPQAISRMRSSSYDELRRISRGKFTMNQFFTLKDLASTSVGESNEILESQLSSLLELYTSIEAEIQKIESQIIQLVTVLNRPIMSIAGVGPLSAAVILSEFGSISKFDSPAQMLSFAGLEPGYYQSGTSEHSGRMVKRGSSHLRFTLMNVCIPLIRYNIVFAEYYHKKRSEGKPHRVAMSHVAKKLVRVIYTLESRNIIFDTEKLR

SEQ ID NO: 436593 - protein, 405 aa, unidentified
MQTIIAFDVSMGKSYMVIYQNGQCVEEKEIQHNKKDFQALHVTIQSLFMRYGQYPEIVFEATGVYSKVLESFMQANQYPYYLLNPLEAKQQCDRLRVHKTDRSDAHRLAQTHLTSNRKPKVFESTEYQQLRVLSRFYEEIDKEIILIKNRLHNALQLTFPELASIFPNQNSALYLNVLLLFPHPELVLSCSRTVLKNKLLANTKKNLSSERALKKAEELVSIASSSYPAVTLEDVTVSKVRYYAEKISHLLCKKQEIIEEMEASASPLPEYDILRQIPGIGSSSAVRFIAEAGDVRRFTTSRELNAYAGIDIRRYQSGKTFYSDHINKRGNPKLRKLLYLMIQNMLKKQQNTSNHIVHYYYKQKEEPYNKCHKVASVACINKLLKTIHYLTKTNQMYDYSLATTS

SEQ ID NO: 436594 - protein, 349 aa, unidentified
MNRTTYGLDIAKSVMQLHWVDGETGEIGRKKLARAKLVEFFALRQPVRVVMEACGSAHHWARVLGALGHQVELLPARQVRPFVRSNKDDAADARAIWLAAQQSDIRRVPQKSVDQQAVMALHRTRSHWVSVRTATVNALRGTLYEFGVILPGGKKVGLKALGARRAEIDTQVPATVQRLIDGQLATLKDIERRIDELEAEIATQQKQLPRANTLRRVPGIGVLGATALAATLGDGRAWKSGREFSASLGIVPAHSGTGGQARVGHLSKRGDPYLRTLLIHGARSVITHAKDKPKWLEQLLARRPLNVAAVALANKMARTAWALVAHGRDYQREWKSTAPTGCAAQAVAA

SEQ ID NO: 436595 - protein, 332 aa, unidentified
MDNFYFIGVDVSKKKLDFCVLFEGKVLREEQVSNHQQAVARLIGELKNDLEMDNEQFLICAEHTGQYTFPLVCACKSVECKLWLENPSQIKYSSGMQRGKNDKVDAKRIAIYASRFGDKVKYYDRPSEEIERLKQLERERALYVTDLAKYKGQMYDQKDFMPAALYRKKTKRMKGLIQELQAAIDAITAEMEKIIGSTEVLARQMELLMSIDGVCKVVALNVIIETEAFSRFDNPRKFCCHAGVAPFSYTSGSSQHSKNKVSHRANKNIKKLLHMAAVSVTHRKEGELKAYYMRKVEEGKNKMSVINALRAKIVARMFAVIKRNEFYTPIYS

SEQ ID NO: 436596 - protein, 319 aa, unidentified
MNTIAKNYSQNNMRNVGIDVGKSNLDVFIYELDLHWRVANTEQEVRRLLTTLNRYKLARIVVEATGGYERLLVEACAEKEMPLVVAQPMQVRQFAKAQGVLAKTDKLDSHLIAQFGAVMQPQPRPIPSKNVRDVRDLLASKRQLNELRTQELNRQHKAVKALQASHTRLVKICDKEIAQINLKLEKAMASISEWMRTYEILSSVPGIGDGVAYTLVGELPELGQLTHRQIAALCGLAPFNRDSGNLKGKRRICGGRAPIRTVLYMAMLCGIQHNPVMKSFYTRLVAQGKHKKVAITAFMRKMVTILNAMVRDNLEWRMM

SEQ ID NO: 436597 - protein, 353 aa, unidentified
MQALTMKSYEVVLGVDTHFNTHVGVVLSGAGNLLGTLTTPVSTKGYRQLLAWAMSYGDLRRAGVEGTGTYGAGLTRLLREHDIEVLEVNRPDRAARRFQGKSDPTDAESSARAVLSGKATAIPKTQSGVAESMRAVLVARRSAVKARTQAINQVKALLISAPQPLRERLWRNKPAECIAGCLRLREKATHPLQALTATLRLLAKRWLLLDREVNALDAMLECLTQLHAKRLRSRFGIGPQTAATLLAVAGDNPERLRNEAALAALCGVRPLQASSGKTIRHRLNHGGDRSANNALWTIALVRMRGDIRTQADVKRRTREGRTTREIHRCLKRYIVRELYPLIRADLVDSTNSG

SEQ ID NO: 436598 - protein, 387 aa, unidentified
MSQTAAVLTPAAVEYERTLVLSIEVSNKSWVLAAQVPGLPHTKAKRTINPEAEALSAAIAGYRARAAAVGRSIERVIAVYEAGWSGFWLARWLMSHGVEVYVIQPSSVPVDRRMRRAKSDGIDAELLLRTLLAWLRGEPRVCSMVPIPDEADEDARRGVRERAELISERVGLVNRITAVLATLGVSDYNPLLRNRHRRLAELRTGLGKPLPLNAHGKIVRLLARLELVLAQIAVLEHERDAVMEADASDQASKMIQQLASLRGIGVQSATVLVREAFVRRFANGKALGSYAGLASSPYSSGGIDREQGIGKGGNRRVRTVMVELAWLWTRYQPAAAQVCWFRERVGSTGRRVRKVMVVALARKLLIALWRFVTDGVVPEGAVLKPAT

SEQ ID NO: 436599 - protein, 417 aa, unidentified
MQVVRPICCGADIHKDIIVATIATSNQNGIAEYTQRKFCTQNYDLINLKSWLKEHNCFEFAMESTGKYWIPIFNVLEDEIKVYVVHPKYTKSIKGKKTDKKDSKWIAELFRHGILTFSFIPPREIRELREISRYRIKLVAMRTSERNRYQNAMTVSNIGLASILSDPFGKSSKAIMEEVLKSSSLSEGKIRSLLNKSAKKKAKEVFASLEGSRIEPDQRLKMTVSSEHMNQIDSHIDTLELDLVQRCLPYANLINLLIDIPGISYISAIAVIAEIGIDMSVFKSSKQLTCWAGLAPANNESANKKKSVRISRAGTYLKPLLIQCALSAIKSTSNPYYRIKYNTIKKRRGHKKAIVAIARMILVNIYAILSTGEVYNPCDFKEVTSPKPAKKEMTIENALFFLQAQGIDTSALVLNVS

SEQ ID NO: 436600 - protein, 321 aa, unidentified
MDKTFNRVFKKRVPNDLDQILETLTPFHDQLKGFVVESTFNWYWLVDGLMDAGYGDAHLANPAAIKQYEGLKYSDDQHDAFFLAKLLILDILPEGYIYPKEHRSVRDLARKRMFLVQHKTANILSLKSLLQRSCSIKVSANDIRKLTAEDLEAYLKEEYLVLTAQASLDTITFLKEKIKHLEKAIIKRVKLRKGFRQLLTIPGIGNILAMTIMLEVGDIDRFPKVGNFVSYCRCVPSQRLSDGKSKGVGNRKNGNRYLSWAFTEAAQLGRRYNEPFRRYYNRKVAQANTSLATKALGNKLARICYYVMRDRVPFREELIAH

SEQ ID NO: 436601 - protein, 339 aa, unidentified
MKNTKYYIGLDVHKERTLYCVRDRLGNILIEAEAATLYSELEHRLKPYLAASMIGLEASTSYYTLYQNFLRNNYHIKVANTIQLRQLIAKNDKLDAQRLSEMLRLGTFPCSYIPEEKTQHLRSLIQMRHALMQEKVRCNNRIQAFLDRNGVMMPLCKAFSKKWKHALMQHLGSGNISTELRYEYNHYVYLEKTNEQADQEIIGYTKTYWNQEYQLLRSITGFGVLLPCYIIAFVHPIERFLSNRKLRRYAGVIPVAKESGNTTSRGRIPKTSSKALLRWALVQAANTIGKTNTTLGRYYRRKKNQKKNTGIAKIAVASTLVDIIYKVLTTKKPYISTAC

SEQ ID NO: 436602 - protein, 427 aa, unidentified
MFTAAFASLTKMNFNKLLSGNITKYQKEGFIMISVGIDVSKGKSTVCIMKPCGEILESPFDIGHTADELDSLISLIKSFDEETRVVMEDTGHYHLPVATYLSSHNIFVCCVNALRMKKFCSQSIRRAKTDKIDSIKIASFGITYWNELVKAYPSNVIYDELKFLARQYYQVTGMLVKSKVNFSNLLDQVMPKINDVLSNQGENHKLTEFVNRYIHFQNILDMGEMKFTSDYCKWAKKKGYRLNERKAAEILALAQNGIPTLPNSQSVKIAVSEAVKLIHSVEESRNTILAQMQELCNTLPEYSVVKEMDCIGDTLAPRIIAEIGDVRRFKNKHSLVAYAGIDAPPYQSGAFHASERHISKRGNSYLRKTGYEIMQSLIKHKPADNAVYNFIQKKRSEGKCGKEAMIAGLNKFLRVYYGKVMEFYSEH

SEQ ID NO: 436603 - protein, 357 aa, unidentified
MENRLKQCLGIDVSKLNLSLTLGFLHGDLGKKFEVHPDITNDLSGFKELHGWLKKTLAPNVDFIVLMEATGVYHQGVAHYLYEHGYAVCVMQSGRVKRYAQSLDQRSKTDALDSRMLSMLGLERDLRLWCPPSVGLQHLKGLSRERSSLLKDKTTETNRQGAIISSYYNNSKAKKRHLNRLRLLQSQIVSIEEEMRDLISKDDVLKKKLSFLESIPGISFISAATVIGETLGFESISNAKQLTSYAGYDVVLRESGNFKGKTRISKKGNSHIRAALHMPSMTCVRCNPTLKAFYTRLKPKKAKPLVALIAVQRKLLILMFTLWKNEEVYDAEFEKKKQQRQKTLAAQDNNLINQLAS

SEQ ID NO: 436604 - protein, 370 aa, unidentified
MNEDSVVYVGVDAAKAKHAVAIAESGRGGEVRSVGEIETTPAAVERFVRKLARKYPRLHFCYEAGPTGYELHRQLVALGHACEVVAPSLIPKRPGEHVKTNRRDAASLARLLRAGELKGIWVPDAVHEAVRDLVRAREAAGEDLRKKRQQLQSFLLRHGRTFTGRKAWSPAHSRWLAAQRFEHPAQQIVFQDQVDVIADASKRLERLDAQLAELVPTWSMAPVVAAYQALRGVSFVVAVTFVSEVGDVRRFDNPRQLMAFLGLVPSERSTGESVRRGGLTLAGNRRARRVLVEGAWSYRHPARVTETILVRLEGLPKEVREIAWKAQTRLCARYRRMRAAGKKAPIVIAAIAREMAAFLWAIGRQVEPVR

SEQ ID NO: 436605 - protein, 319 aa, unidentified
MRRTPVGVDIAKLKFDVAVLLDNQKYKTKKFANTPSGCREFAAWLSRFGDCHVCMEATGSYSTELATYLADNNYHVSLMNPACIHSFSNTELTRNKTDKSDAAMIARYCALHQPDPWFPAPLSERQLTALVRHLKNLEEMRQMEENRLEVAEAVIVPSLNEHIATLDELIRETKKKISQHIDDNPDLKRDSELLKSIPGVGEMLSSSLLAFAGNLRRFTSSKALVAYAGLNPQRCESGMFKGKSRLSKVGHGELRSALYMPAVVAGQYNVVVKDLTERLKLRGKTGKERVCAAMRKLLQLAYGVVKSGKTFNPEIPLAG

SEQ ID NO: 436606 - protein, 338 aa, unidentified
MNIARIGIDLAKQVFQIHGVDRTEKVLVRRQLRRSQMLDYFSKLTPCLIGMEACGSAHYWARELGKLGHEVRLMAPQFVKPYVKSGKNDANDAEAICEAVGRPNMRFVAIKTAEQQVIQAEHRIRARLIKSRTALSNEIRGLLAEFGIVVETSIGRLRKALPELLEDSENGLPRSFRVLLAGLGEELRALDDSITAFDAGIAQRAREDGRIRRLLDVEGIGPITASALVAAVGNGTQFNSGRDMSAWLGLTPRQYSSGGKNRLGGISKRGDKYMRMLLIHGARAALNAAKNKEDGRSRWVKSLATRRNKNIATVALANKNARIAWSILSRGESYRKAA

SEQ ID NO: 436607 - protein, 412 aa, unidentified
MIPAAIERCAGIDVGKKFLAVCIMVGPLTGEPRVERRRFGTITAELQLLRDWLQQESITHVAMESTGSYWKPVFNVLEETVQVCLANGRDTKNRKGHKTDDKDGWWLAHLLRHAMIHPSFIPPRKIRELRDLTRRRKKLLGAGTAEKNRVQKVLEEANVKLGNVLSDVFGVSGQLMLEALLEGHATPEQMAQLAQRGAKKKIPEIIAALEGHRMNAHHRRMIRYSLEHMQFLEMQIAQLDQDIAEQIREAGLEEDWQRLQTLPGVKQTSAASILAETGNDMTRFPSDKHLSSWAGVCPGNNRSAGKNKSSRTTGGNRSLRGALTECAWAAASKKDCFLKDKFWRITTKSGGKKAPALIAVAHMLVKLVYQVLSTGKPYQYQQPPPLNPNQQQRLIRHHVRRLGKLGIKVRCS

SEQ ID NO: 436608 - protein, 367 aa, unidentified
MKKGSTAAAIESRNFSQQKLTLGMDLGDRNSWYCVLEEAGQIQQEQRVRTTAKALREVFGGMPRSRVALETGTHSPWISRLLTELGHEVIVAHARKVRLIGESRKKDDRRDAQTLARLARIDPELLCPVKHRSAQAQADLTVIRARAGLVRARTGLVNTARALAKSYGERLRGCNVRNMSPEKAEGLSPELQRALEPLLSAIEELSARIGQYNQRIEALAEASYPKVALLKQIKGVGTLIALTFLLTLEDPHRFRKSRDVGCYLGLQPGRRNSGQSEPQMHISKEGDPYLRTLLVQGAQHILGPFGVDCDLRRWGLKLADRGGRNGKKRAIVATARKLAVLLHHLWVSGEAYEPLHKSSRVTAVAAA

SEQ ID NO: 436609 - protein, 365 aa, unidentified
MTSVAHLGPTHLGLDVHKDTISVAILAPGRDGPDIERIPHDEASVRRLVGRLGDPRWLRACYEAGPTGFGLARLLESMRVGCQVVAPSLIPKAPGDKVKTDRRDCRRLARLHRAGELVAIRIPTPAEEAVRDLCRARADMVEDRTRARHRLGKFLLRHGRVWRGGNAWTLTHERWLCSQRFDEPALAATYAHYRAVLQGRDAQLEAIQADLAGWYDRAPFADAVHRLSAYRGITRLGALTLASEVGDWRRFPRAAAFAGFCGLVPSEYSSGTSTWRGHITKTGNAHLRAQLVESAWAYQHRPAVGLELRERHKGLDPAVLARAWAAQLRLCGRFRRLAARKDSKNVVVTAIARELTGFLWAEMAA

SEQ ID NO: 436610 - protein, 345 aa, unidentified
MKKGITIGMDLGDKKNQVCILDETGKIIVEEGIDNNRKAATKFFKRYCGAVVAMETGTHSRWVSRIAETEGLEVLVGNARKLRMIWQSRQKSDTRDAVMLARIARLDPALLCPIRHRGEQVQIDLEIIRARDLLVGERTKMINHVRGVVKSMGERLSPSSAASFGRKAKIPEALNEALQPMLEMIRELTDKISEYNLLIKKTAANKYPETERLSQVGGVGPLTALAYVLTLEEPERFAKSRMAGAYLGLVPRLDQSGQIDKQLRITKHGDGYLRRLLVGSAHYILGPFGPDCDLRTFGLKLMQRGGKNAKKRAVVAVARKLAVLLHALWRSGQQYEPKRRQQAAA

SEQ ID NO: 436611 - protein, 366 aa, unidentified
MKKTITVQAFQSDIFKEQKLTIGLDLGDRWSFYCVLDEAGQVILEQKLPTTPEAMKQTFGKIARSLMALETGTHSPWVSRLLRELGHEVIVAHAQKVQLITKSNRKDDRHDARTLARLARIDPALLGPVRHRSVQAQLHLTVIRARAELVSARTALVNAARGLVKSYGQRLPKCGTYQVSEKLAEGLSAELREILVPLFKEIESLNERVKEYDERMEKLAKEVYPEVSLLKQVKGVGTQIALTYVLTIEDPYRFAKSRQVGCFLGLRPGRRNSGESEPQKGISKEGDRYLRTMMVQGAHYILGPFGEDSDLRRWGRKLAERGGKNAKKRAVVAVARKLAVLLHRLWVGGEVYEPLRNSQKAMRKVA

SEQ ID NO: 436612 - protein, 317 aa, unidentified
MESTPAADRFVGIDVSKSWVDVHVRPDGIAFRCANGSEGLAELVRRLRPLTPLLIVMEASGGYESLVAVSLAEAGLSAAIVNPRQTRKFAEALGQLAKTDAIDARVIAHFAEAVRPTPRPVPDAMMTQLQELLARRRQLVVMINAEKQRLAKAESRVTQRSCNAMLRSLEAELARIDRAIDKLVQQSPLWCKKLDLLTSVPGVGNVVARTLLAELPELGSVDRHQIAALAGVAPFSRDSGKRRGKRFVRAGRVQVRAPVYMACLVAIRFNPPLKSFYRRLREAGKPARLALVAVMRKLLTMLNAMLRNNTSWTWAES

SEQ ID NO: 436613 - protein, 351 aa, unidentified
MLIIGCDYHPSVQQIAWVDTETGETGERRLKHSDREAEGFYRELKEKGFSVRVGMEATGHARWFERLLGELGFELWVGDPGKIRAKQVKKQKNDRRDAEHLLKLLMKDDFPRLWVPTPENRDVRQLVLHRHRLVGMRTRVMNQLQAIAMNEGIRRKRGLWNKQGRALLESLSLPPWTSRRRQELLELLDHLDPSIEQLSQAIEQEAEKWPEVQRLLTHPGVGPITALAYVLVIGTPHRFRCGKQVASYLGLGPSEASSGDRQRLGHISKQGNAMLRHLLAQAAQSVAHCEDQWRGQYVHLALRRNHAIAKVAMARKLAVRLFWMWRKEWDYQQLKNFGSHVGQLVKSHGVE

SEQ ID NO: 436614 - protein, 556 aa, unidentified
MYLITYNDLLNIASKQVVVKKMPQRFSIYKEIWKDDLINVDLKNLDEVIKYVEKRQDVQWVVGCDIHKEWIWTAFQGQKIDKLNEDYLGPVLKFKNDDFGREALKRWVHAFKAERVLMENTGHFSLIIRNILAEIYDPNTVKLHVYVMNSLDTSRFQTINVKTDERDSRNLAKLATQPMSLSNSRWEDLDEVSYRYKCRRVGKLIQQQVRLENQIHGIFHVNGVNAFFSFNKSTKTWLKLLCKNEGMISDLIISICNDPESDIYLKKLAIKFIPFMKTILSAKARDSICMILFEIERQEMMIKLNEKELLEWILHDEYYKKQYEYIRRIVGFGESSLVRFILEVGDPKRFNRVKSFMCYAGVAPLISKSAKTKKKDRPNWKSNHHLKLINKFVGMGIYNKVRIMIKNGDVVLSDLLKYAKKLYMKPGIPTGKKIWKMGAKALRIAFTCLRNKTRYDEFFETKQCLKKQKEEFKKIIVKANLKKKLVSKERFLIKNTFVEDGKMLIKDVDQHPERFEYFKRHLEQLDEYYPNGYNLLLSIQPVGYSNNIKLEYPKEV

SEQ ID NO: 436615 - protein, 482 aa, unidentified
MASKGMVEGSKGQRLTRRQRKELGRRIWSDHPGLEVVHRDAAGIDIGSREHYVAVGPDRDAEPVRTFGCFTADLNRMAEWLKQCGIQTVAMQSTGVYWIPVYDVLERHGFEVWLVNARDTRNLPGRKSDVHESQWVLKLHTYGLLRKSFRPTAEFRALRTCWRERGEYVEQAGACIQRMQKALTEMNVQLATVLSDLSGVTGMSILRAIVAGERDGLRLAEFRDPHVKASKETIALSLEGTWLPEQLAVLKRQLEDWDHIQRQMTACDQDLEAMMQKLPQANDEPAPPAQPAAGTLTGRKRNKSSKSSKNEPDFDLAAALRRVTGVDLTRIDGGKVNTVQTVITEAGLDLTQWRTEDHFVSWIGLCPRNDLSGGKVLNRKTRKVVSRLATALRMAASTLRESDSYLGAQFRRLRTRLGAPKALTAMAAKLARLIYRMLRYGQEYVDKGTAQYEQKYRQQQIKLLAKKAAQHGFALVPATNRA

SEQ ID NO: 436616 - protein, 355 aa, unidentified
MDTKKYIGMDVHQVTVSVAVMDSGGKIVMESLIETKSVTILGFIQGLRGTLWVTFEEGTSAAWLYDLLKPHVAKVVVCDPRKNALLKAGNKSDRIDARKLADLLRCGLLSPVYHGESGVRTLRELARSYLTLTRDLTRVMNRIKGLYRSSAIPCSGQKVYSPLHRTAWLEKLPQAGVRRRAEWLYQQLDDLQPLRRQARQEMVIESRKHRASSLLDEVPWLGPVRVALLMALIQTPHRFRTKRQLWEYSGLGLETRTSGEYRIKDGQLQHSKWPPALRGLNQNHNHDLKAVFKSAATVASTSPGPFGEFYAALLATGMRPSMARLTVARKMAAIVLSMWKKGESFDPALLKRQAA

SEQ ID NO: 436617 - protein, 341 aa, unidentified
MSEYVGLDVSQKETSICVVDGDGRIIAEGKVATEPATIAAFVAKRAPTAIRVGLESGGLSEWLHDGLQACGVPAICLDARQAHAKLSGNKLNKTDRNDARGLAQLVRTGWYQEVCIKSASSRRVRGLLASRGLLIATRMNLENQIRGLLKGAGLLLGKPGRQGFARRAAALSADVPHLTALIGPLLAVRETLIRQLAILDKTLRAEARRDAVVRRCMTMPGVGAVTALAFRAVIDEPTRFAGSRTVGAYLGLTPRRYSSGEIDYSGRISKCGDRWLRSYLFEAATVLLSRVSRWCALKAWAVRLAKRIGLKKAKVALARKMAVILHRMWIDGTDFRWTAAN

SEQ ID NO: 436618 - protein, 466 aa, unidentified
MENNYILYVGMDVSKGKADAAILKVSDRRSVKPKFLRKKLSFKFVKSEVASFLETVRSYSDVNCTSICFALEVTGIYSTNVYNYIKANLYENESIKFLNTDFVNQWRIAHNIAKSDPLDAQTISTIIGTDSDVQYVNDNVFENKNGYQDLKALVHRHYQIKKIYSQEINRLIAQCDCLFPELQYVFEPKSAAFIAVLSSYPTTHDIINASRVEVFDVVYEATKHRCSMDKVDKLFELCQDTLVPDDISSYGKSIILDLVENIKNIKGRLKSIERYIRDVASLNPAYKLLLTITGCGPITAATVIAETGNIRRFKNADCFVSYSGTSPRNKRSGTSVETMGKISKKGSRYLRHAIYMIAEFARRHNPVLKHQFERIKNGNKKRHKLANIAIANKIARYIYSIMKNKSSFVISHDHIMRLPEETRDTFFNSISLDFPKNTRKQIYQYSDINGELHRFVYIKTDEMIPA

SEQ ID NO: 436619 - protein, 339 aa, unidentified
MNRIVVGVDIAKRVFQLHWVEPATGEIVTLQLKRERLLAHFANRASCLIGMEACGGSQHWARALQRLGHEVKLMSARMVKPFVGGNKNDVADARGIWTAVQQPGIKAVAVKTEEQQAVLALHRMREQLVKFRTAQINGLRGLVMEYGEVMPQGRAGIKRDMLGALGRLSDRLPAMVIDTLREQYARVSELDEQISEIERRLRHRQRNDPATQRIAAIPGVGLLSATAAIAAMGDAKAFKSGREFAAWLGLVPRQTGTGGRVRLLGISKRGDKYLRTLLIHGARSVLTHSKAPPEWLTELLKRRPKNVAVVALANKMARTIWALTAHERAYQSGYVSQSA

SEQ ID NO: 436620 - protein, 463 aa, unidentified
MRDTRKTSPKTSPAISLPAIRPDVAGIDVGSSQHWVCAPPKPGGEPNVRVFGTTTPDLQELVDWLSSEGVTSAAMESTSVYWIPLYELLESRGIEPVLVNARQLHNVPGRKTDFSDCQWLQQLHSCGLLRGSFRPTESIARLRALQRQMANLVAERARCVQWMQKALDQMNVQVHRAVTDLTGQTGMAIVRAIVSGERDVKVLAALRDRRCRKSAAEIARHLTGTWRDEHLFNLASALRLYDTIDEMIGSYDQHLVGELKLLQSPDRQDQKPPKHPNIAKEREFKYRGTQEMRTMLWRFAGVDLTRIDAINAGAAQVILTEVGPNLAAFPSEKHFVSWLRLCPRTPISGGKPIKKRRNGMGANRIAAVLRMAAATMQRSKTALGAAFRRIARHKGGLVAAFAIARRLAQLVYRMLRHGQDYLDIGAQAYEATFASKRFASLQEAARGLGYTLVEAGDPTSVPT

SEQ ID NO: 436621 - protein, 337 aa, unidentified
MCDSTVFVGLDYHQGSVQVCVENQGGEVLLNRRCRNDWSAIAVAVERCGRVGRAAIESCCGAADLAEELVHQAGWSVDLAHPGYVQRMKSSPDKTDFSDARMLADLERVGYLPKVWLAPQEVRELRRLVRFRQQLVDERRNSKLRIRALLRDQRIREAPVHPWTQPWIAWIKSTEALSEQSRWIVNRLLRRMETVIQEIGEVEERLGEVTKGDPMIEALCSLKGIGSITAWTIRAEIGRFDRFRTGKQLARFCGLSPRNASSGARVADSGLIKAGNRQLRATLMEAAHRLIRFDPHWVSFACDLLKRGKPKCVVVAATANRWMRWLFHQMQPTRLAA

SEQ ID NO: 436622 - protein, 336 aa, unidentified
MKTLDKNSATFLGIDAHPTTHTALAINRFEEEKGILTFDNTKDGIATFLSWLPTIEADMDKVIIGLEGGGNSRHALVANLLKEYQNIYEVNPLYTKQRRMFGTKGDKADPRDAKLIAEVLTRKLPELPKITKHDLSAHILVLKKTVWFYEQTTAQGVSIQNQLHQLKREADLSSDTTEKKALRMMIADLEKQLKSVRKTQKKCQEQLVILLEKQGKNLMTIKGIKTILSAKIVAHSGGIERFSNLDSFIQYAGIAPREKSSGKTKRHSKSKTGNRKLNHAFYLAAMVQLRWSSKSKEYFEKKIQEGKTKKHALKCLMKRIACITYGMLRSGEEYKG

SEQ ID NO: 436623 - protein, 318 aa, unidentified
MTNKTYQFNIGVDIAKHKLDVSFSDQRVVSFENNQSAFKLLLKEIENKSQTRVVMEATGGYEKPLAHFLQDHGVAVSIVNAKRVRDYAKALGLLAKNDVIDAKVIRMFADAVNPKLLPAANDTQQALDAQVHRREQLVKQRAMEKQHLETVGNKDAVRSIKRTITFLDKEIERIEKAIKALIKTDSTLTEKVDRLSAIKGIGDITALTLIADLPELGQLSNKEISALVGVAPFCRDSGTQKGKRTTWGGRIQVRSILYMAALSAVQYNPPLKAFYNRLLMKGKTKKVALVACMRKLLTVANSMLRNNTEWNPNHGKLA

SEQ ID NO: 436624 - protein, 354 aa, unidentified
MTSPNFKNVNFYIGIDTHLNSWSVTIRSAGIALQTFSMNPSAAELNNYLGKHYPNGSFKIVYEAGFAGFSPLRKFKELGIDCMVVNPADIPSTNKEKTMKSDPIDSRKLSRELENGSLKAIYVPEIFYEELRSLMRLRFRHVQNQTRIKNRIKGLLHNYGITIPIQYSRNSRWTYNFIAWLETVQLNTGAGNFVLNNLIDQLKESRQHLKTVLRQLRKEANKDNIAPVITALCSVPGIAFITAMSLYTEIIDIKRFSSFDRLASFVGLVPSTYASADNEYSRGISFRHNKFLRPMIVESAWTAVRKDPAMTQKYYHLCKRMSKQRAIIRIAKILLSRIKHVWENQEEYKFSLVA

SEQ ID NO: 436625 - protein, 337 aa, unidentified
MESTTIAIDLAKRVFQIHFVDPDGTIHSKVLKRAQMLPFFANQPAARIVMEACGSAHHWARQLTTLGHEVRLIAAQFVRPFVKSNKNDAADAAAIWEASQRPGMRFVAVKSADQQAMLALHRMRQQLVRIRVMQVNQLRGLLYEFGVVLPQGRRPSIQAAQVAIATLADQLPAMLIDSLRDQLSRLHLLDDQIQRIEQRILEWRRGDEACRRISEIPGVGPLTATAAVSVIGQAQTFRSGREFAAYLGLVPRQNGSGGKVRLGGISKRGDVYLRTLLIHGARAVISSSKHLPAHMRELLARRPTNVVAVALANKMARTIWALLAYGRTYQPAASLPS

SEQ ID NO: 436626 - protein, 491 aa, unidentified
MNSIFQRSNPAIKKLFQEAGSPKKVMCVPIDYAKRQHTALVCNGEGMQLRGTFNIHNTAEGVAFLEDIIKGLCKKHSIRKAHVFFGGEDCTAFCYNFIHALLEKKYLGIGINAYEGAEARQNQLASTDKLDLLGIASVLINKKHGRTLSTAYGQARIMRELTHHRDSLVKAHTASAYRIYHWVDQLMPGFLDAKQSGLEPFSEASLWLMSQNFSPRQLLARKNDILAEKLGLLMLRNTDAKVAQLKQLARTTLPPPTGLCETLQDNLAREVALYRHLRDTLRQLDQQIARRLAATPGAMLTTASGIGIILASGLYAEIGDPARQRNMASLAAYAGIVSRLKQTGGPDNPARSLGRSRRACIPLKRRILDIALSISQYGAEELKADYRRRVEANQDARFTMGRRMLRICAHLIQRQDFFLPPALLANTDPDARKAYFAKAWDPILIKWRNAGAIQQAFADGAPLEQWRTMLNELYNLNLSKLSPQYERLRDR

SEQ ID NO: 436627 - protein, 462 aa, unidentified
MKRKAKSQATHSGLAVVNPNAAAIDIGATMHVAAVGADRASDPVRSFGTFTADLHRLADWFAECGVKTVVMESTSVYWIPIFELLDERGFEVILVNARDAKHVPGRKTDVSDAQWLQRLHSYGLLRASFRPKGEIVELRAYLRQRERLLDTAASHIQHMQKAMTEMNLQLHHVVSDITGATGMRIIRAIIAGERDPAVLASMRDTRCHSSAEVIEKALTGHYRGEHLFVLEQALALYDVYQQKVAACDIRIESVLKELSSIRGRKEDARADGSGSPRRRSRQSNGPDFDVGKALHSLLGKDLTRIHGMGPYLALKLVSECGDDLSAWPSAKHFTSWLCLAPSNKISGGKVLSSRTRRSGSRAASLLRLAAVTIGRSDTALGAFYRRLSARAGKSKAVTATARKIATLFYNALRHGMDYIDPGASYYETRYRERVVKNLHRRAKAFGFILQAAEMPAAEQAVS

SEQ ID NO: 436628 - protein, 455 aa, unidentified
MSEAEQVEEPTELLARVAAVDVAKDSGVVCTRVPHESRSGRKVQKVWTAPARYADVVALADHLRCQGIERVVVESTSDYWRIWFYLLEAAGLQVWLVNARDVKNVPGRPKTDKLDSVWLCKLNERGMLRRSFVPPAAIRDLRQLTRLRAVLVAESSRHRNRIEKVLEDALLKISSVLSDMLGLSGRQILNALVAGQRSPKVLAELAHPRVRASRAELAAALTGRFRDVHATEIKMLLELIDTLHAKVEQLDTQITALITELPDAHGVCTSCGVTGTAHAPTCPDLALPILSLAQRLDEITGVGLPCAHVIIAELGTAVTTQFPTAGHAAAWARLVPLADQSGATTKPGRTGNGNRWLRGALGTAAMTCAKTKDTFLGERYRRIRRRRGRNKAMVAIARNILEIAYLLIADPSLRFHDLGADYYTRLNPQRQTRTKIRDLERLNSGMKVTLVPTTA

SEQ ID NO: 436629 - protein, 382 aa, unidentified
MNPILRGPTVRKHRGSPDTHKHIHVAAVMDSIGGTLATLTIATDTAGLRQLLHWAEGFGKIIAFGIEGTGSYGAGLTSFVRRHGHKVVEVSRPDRRLRRLNGKSDTLDAENAARAVLAGFATAIPKAADGAVEMIRQLKVAHDTAVKDRSAAMIVHAPEKLRTETAEKTQRMIARYCAALRPRALETPDDSIRHTLRSIAKRWLALDEEIKELVAMIEQLVVKRAPHLLDEFGIGVDTAAENLIVAGDNPERITSEAAFAKLAGISPVPTGSGMTSGKHRINHGGHRQLNAAIYRTVIVRMQHHEPTKAYVTRRTTEGKSKLGIIGCLKRYVIREVYQLIKVNPRTGDITIDRHRSINAMIESFWGEQCKWSFRTGGDGGHD

SEQ ID NO: 436630 - protein, 391 aa, unidentified
MFYLGIDIAKVNHVASLIDEDGSILVKAIKFTNSNEGLQKLLDAISNFDLSQIYCAMEATGTYWLSLFSALTDKGFNVSVFNPYQIKSFRGAYTNRKQKNDVIDSILIANFLHFNGSTQSSLPNDDLLALKNLTRYRSNLVSNISKAKTQVTGILDKVFPEYSSLFSDVFGEASKQLLLNCPTPNEVVSFNTRKLANILKKASKGRHSTDKVREVKSVAKNSFGIKFTGDACSFEIKQLVNQIIFLENQVNELDIKIKDIYSKLDNHLESIPGIGKVTAPVILAEIGDINNFSSPSKLNAFAGIDPSENQSGNQKSTDEKMSKRGSPYLRHAIYLAALVASNTDPVMHEYYLKKRAEGKHHYVALAGIERKLLGIIYHVLKENRDYRQPIN

SEQ ID NO: 436631 - protein, 389 aa, unidentified
MQTEAAQVETSTAIQTDLAAIFISLELSRSIWLITSLSPGSGEKMSKHSVRAGDVAALLARFSELKQKAFARTRKSFPIVVIQEAGLDGFWLHRALEREGVESHVVDPASIATSRRRRRAKTDGIDGEALLRALLAYKRGEPRVCAMVKAPTPEEEDRRRLCRERKVLIAERVTHVNRVKGLLFSQGVSGYGPLRRDRRQRLEELTTGEGRPLPTHLKTQISRELDRLELLLDQIKLAEAERDALLAKRHEGGPAPTGRMLLEFKGIGAEFAAIIWLEALFRHFDNRRQLASYAGLAPTPWQSGTVDREQGVSKAGNPRLRAALIELAWLWLRHQPQSALALWFKERVNRNGGRMKKTMTVALARKLLVALWKYVTAGVVIEGAVMKAA

SEQ ID NO: 436632 - protein, 389 aa, unidentified
MKIYVGIDIAKLNHFAAAISSDGEIIIEPFKFTNDADGFQLLVSKLESFDKNSLIIGLESTAHYGDNLVRYLVTELYQVCVLNPIKTCQMRKNNVRKTKTDKVDTYVIAKTLMIQDNLRFVSFFDLDMMDLKALGRFRQKTIKQRTRLKIQLTTYVDQVFPEIQYFFKSGLHQHAVYALLKEAPSPKEIASMHMTHLANLLKVNSHGHFTKEQAKELRVLAQKSVGANDSAISIQITQTIQQIELLDSQLDKIEAEMTDIMKFNDSVIMTIPGIGYINGGMILGEIGDIHRFSNPNKLLAFAGLDPSVYQSGNFQAKTTRMSKRGSRVLRYALVNAAWNVVRNNATFKAYYDAKRAEGRSHYNALGHCAGKLVRVIWKMLTDEVEFNLE

SEQ ID NO: 436633 - protein, 331 aa, unidentified
MQPGEGIIGIDISKDSFDIVLRSVRGEAHRVFANNQKGFTAMIVWVEKQPERIERICMEATGSYWEGLAEYLDERGYPVSVVNPYQIKRYGDHLLNRNKTDKADASLIAEFCEKDLERLRRWKPYPAEIKALRSMERRLDELQSMKQQEQNRLKSGVSDPVVIESLEENLKHLEEQIKALKEKIEDHMEQHPDLKAKQRLLTSIPGIGKQTANKLIAEIRDIEDFASASQLAAYAGLSPRQYRSGSSVYKQTRISKQGRSQLRTCMYMPAVVAADHNPIVMDLKRRMLASGHAKMEVIVAAMKKLLHLVYGVLKHGIPFDPEYVQNSTLIP

SEQ ID NO: 436634 - protein, 341 aa, unidentified
MKQFIRIGVDLAKNYFQVHAVANEGGPAVTRKLKRSKMHEFFAQIEPCLIGMEACGSAHYWARELETMGHEVLLMPPAYTKPYVKRGKNDAVDAEAICEAASRPGMRFVPIKSAEQQATLMLHKTRELLVKQQTMSVNALRSHLSEFGIVVAKGIGRVDELLELAESDTTLPEVAKAAVKILAQHLEGLDKSIDDLEKQIGRVHAQSEMSRLLDQVPGVGKIIASVISASVPDPSVFKSGRDFAAWLGLTPRQNSSGGKQTLGGITKQGNRYIRKSLVLGATSLLRVVGKRKGALRDWIVALLAKKPARLVTVALANKLARIVWAMMKTGECFRAEMFAKA

SEQ ID NO: 436635 - protein, 534 aa, unidentified
MRVVHERCAGLDVHKSSVVACALLPEGKQLRTFGTLTWQLEQLAQWLQGLSVGVVAMESSGVYWKPVFNILEAADFELLVVNARHIKAVPGRKTDVKDAEWIADLLRHGLLKPSLIPSREQRELRELTRYRRTLIEERAHEVQRLQKVLEGANIKLEDVISNVVGLNGRRFLSALIAGDYDPEAVAATANYGLQRKRELLAQALHGTLATHQRFLLDQLLSHIDFLEQRIAALDQEVKQRSRPFETAIDCLDQIPGIGTRAAEEILAEIGTDMSRFPSDRHLASWAKVCPGNNESAGKRRSGYAGKGNRWLRSILVESAWCASRKKDSYFKVQYHRLAARRGRKRALLAVSHSLLTVIYHLLNDGVVYQDLGPNYFDQRDRSQITRQAVRRLPSPAGRTGGDLGFFERPSQPRLLRGGLHLEDPEALLRLQSRHLEALLRQPLGERVRAEVALDDQVGGAAGRQAGKPFEQEGMQRALAYAHRRVGVDRIEANVVRHVSGRSDRDVGRLRRLRVGPGELEGALVDVDRPDAGLG

SEQ ID NO: 436636 - protein, 313 aa, unidentified
MSPNNPIIHCGLDVSKSSLDLFCQGRNSNFSNSSSGIQRLITHLASLQKSLHLVLEATGGYEQLLVRACHNASITVCVVEPGRVRHFARSQGILAKTDALDAAVLARYGECVQPRATTPLTAQQDQLRQLVRERARLIELHSVLKNQSRASTLPELVRLHKKHLKLLDKQIAQINLLIQQTIQEDSTLKEKNDLLMAVPSIGPVVASTVLAELPELGSLNRNQIAAMAGLCPYNRDSGKWKGRRWIQGCRPLLRKALYMAAVVGMRYNPVLKPLYKNLKLRGKPSKVALVALARHLLIHLNSILKKSHFPLAS

SEQ ID NO: 436637 - protein, 330 aa, unidentified
MYNVGIDVGSKELVMVIRHKEKNQKARTFNNTPEGHAKIVKTLSAQKGELKICLEATGIYHFDLSVALSHANLSLMVVNPKAAKHYFEALMTRAKTDQVDAGILAQYAENMPFNAWRMPDKKILQLQAFSRKIAALTKLKAQTKNQLHALVSSNSVPEIIIDETHDSILFFENQIQRLKDHAITLINSDDGLQRSLKIITSIKGVADASAIQLLGELLILPKDMNHRQWVAFAGLDPRHHQSGTSVSKKPRISKAGNSYLRQALYMPALCAANRDPYVRAYYQHLIEDQGLKKMQALCAVMRKLLHAIHAMLKNEIYFDNTRFYNIVTQQ

SEQ ID NO: 436638 - protein, 425 aa, unidentified
MNSISNKKINQVTDQTLVVGMDIAKKKHYACFVDERGRVLKKPFPVLQSREGLEWLYQCIVEAMKEFGKTEVIVGIEPTGHYWLNLAYFLDEKGIPLVMTNPMHVKRSKELDDNLPTKHDAKDALVIARLVKDGRFSYPRILKGMEAELRVGATFRSKLVEEQGAVRNQMIRWLDRYFPEFSQVFPSFGKMALAVLEYTPFPSDLAGKELEEVLALYRQSEGLQSPQKPKAKKLMELAQHSIGVTEGQQMARIEIATLVRRYRQLEEEIEALTEQLIELVQTSVEYEWLKTVPGLGDATIVELLSEIGSFSHYQDPRQLIKLAGLTLREHSSGQHKGQKRISKRGRRRLRALLFRVMMPMIRHNEAFRQLHDYYTTRPDNPLRKKQSIVVLCGKLLKVLHAVCTKHQAFDAKRMMQDIFGLETAA

SEQ ID NO: 436639 - protein, 429 aa, unidentified
MNSTQNKKIGQVKETTMIVGIDVGSEKHYFRAFNWRGIELTRKPVPFSNSMEGFNSFYNTIVELMQENKLEEAMVGIEPTGHYWFDLGQFMGEKDIKFVMVNPHHVHKTKELDDNSPSKNDRKDPRIIAGLVKDGRYFYSYMPTGVYAELRNASNRRFVLVEEQTRAKNRLQKWIAVYFPEYKGIYTHIDAKGGLLVLKQAPTPEEIVRLGVEGIIKIWKDAKLRGNGYKKAMLILNAAMRSIGLKTGLTEARMEIQDLIEDYELQTKRLERVNDLIKELCHQIKYVDKLLEIKGIGITTVAGFIAEVGDITRFDNTKELQKLAGLELVADSSGKHNGKTKISKRGRKRLRYLLFEAAISVVGKNEEFKEIHRYYTTREKNPLKKMQSLIAVACKLIRVFHVILTKGIRYDASKMLGDIKRPGTQQKAA

SEQ ID NO: 436640 - protein, 385 aa, unidentified
MSSKAFIPRDYEVFAGLDVDKKSISVTFTNHQGFIRSLRVPYSAEHLVNHVRKHFPDQKVAFAYEAGPTGYGLYDGIVAQDYPCLIASPSMIPKAPGQRVKTNRLDSRGISENLRGGQLKSIHVPSVLYRELRHLTQLRDTFVSELVAMKQRIKSLLLMEGLEFPPAPAGSQWSFMVKAKLRKLPCSSTVRFKLDQLLDSLEFNEKQIVKTTQQIRRFCQNDPELSQCIEYVVSVSGIGQIVASQLLARIGDWRELKNVRQLGGFLGLVPSEYSTGERTDRGSITHSGDPRLRSKLIQAAWSAIRKDGELREFFRSVCQTHARPVASRVAIVAVARKLTVLVSVVLMKQRPYVVRKKVHSAPLTQEETVPQRTPRRHAEPGAKNS

SEQ ID NO: 436641 - protein, 451 aa, unidentified
MTATKSRRAGSVAQITVVHPHAAAIDIGAQFHVVAVGPERDPQPVRSFRSFTKELHDLADWLEQVGITTIAMESTGVYWIPAFEILEAHGFEVVLVNARDAKNVPGRKTDVSDAQWLQKLHAYGLLRASFRPRHDVATLRSYLRQRERLLEYAAAHIQHMQKALMQMNLQLHHVVKDVTGATGMKIIRAIVAGERNAVELARHRDVRCKASVETIRDALIGNYKAEHVFELTQALSLYDYYQTQVAQCDERIELTLRQLQTGAEPPAAPLPAARYRTRQPNGFSFDVRAALYAMLGVDLTQLHGLGPYVALKLVAECGNDMSRWPTAKHFTSWLCLAPGNKISGGKILSSKTRRSSSKAAAALRLAAVAIGKTDTALGGFYRRLSARIGNAKAVTATARKIAVLFYNTLRYGMQYVDPGAAYYEERYRQRVLNNLTRRAESLGFVLQAKPT

SEQ ID NO: 436642 - protein, 449 aa, unidentified
MAHGSGVSRGDRNRNARLARLRALVPVENAIVGIDLADAKQMVVVTDHDSKVLARKTFRCRAWDLGTALDWAGERAVAKGFAGVTVACEPTGHRWRVLGQLAADRGMSFVCVQPMLSSWARRSEDLTFDKTDEKDAVLIARLTAQLRCYEPEPVDETWGRLRHLGARREQLLADIASKVQQMRDLLDCVWPAALGTAQQPFRSRTWIAALSVIVDRDGGDLARTRRLGLARFERAVRTVILKRGGQKPTLRIVRNLFTALTDPAGVIAHRPGALERIGLILEDWQHAHTRLADTEARLVAVLDELQLTALACSIKGLSPVGAAAILAETGNPHRFLTARALVKHAGLAPRQKSSGAFTGRTKLTGQGRPSLRLAAWRAVWGAVHTNPVYAARYHHLTTREHNRLKPIQAQTVVAAAILRQLHAVITTGQAWDPDIATHGTRQALTATAA

SEQ ID NO: 436643 - protein, 338 aa, unidentified
MPLYGGIDLHANNSVVVLLNEQDQVIYQRRLTNHLPEILEPLAPYQADITGVVVESTYNWYWLVDGLMEAGYRVHLANPAAMQPYSGLKYTNDHSDARWLAHLLRLGVLPEGYIYPKAERAVRDLLRKRAHLVRQHTANVLSVQNLMVRNTGARFGAKRIDEFTPAELAGILPEAEQVLAVTSSLAVMHCLGQQIKTLEKTVQKHLKHTPAYAQLQTVDGIGTILAQTIVLETGDIGRFPSVGHYASYCRCVGSTKISNGKRKGQGNVKNGNPYLEWAYMEAAQFAIRFSPTVQRFYQRKQVKSHLMIARKAVAHKLARACYYIMRDLVPFEVHKAFG

SEQ ID NO: 436644 - protein, 403 aa, unidentified
MKRTCGLDVHKDTIFCATYDGKKHGSVIEYSTLTTSIRAMGAALLSEEVKEIAMESTGMYWIPVWNILEEMGFNLTLVNPYLIKQMPGRKSDVKDAQWIATLLHKGLLRSSLVPCKEIRELRTYSRRYVKLQQRKTSVLQDMERTLEVCSIRITSLVSNISGKSIMKVIHAIIEGENDPEVLAGYIHGRIVNKHNREKVVESLRGYITPQHRFQLELSLEEYELLCRQSDRCVEKMNTLCHEHYPKELELLQTIPGISLLAAMIVIAETGADMKAFENSGKFAGWTGLRPRNDESAGKFKSTATTKGNRFLRAILVQIAWAASRTKGSFFKEKFNRLCIRKNRKKALIAIARKMAVLIWNVLYDQEGYNPRKLIVYEPGKVQAKMNYHQKELERLEKLMQNYA

SEQ ID NO: 436645 - protein, 363 aa, unidentified
MKRKRSYTTTDVEQLDVEALLLLVAVGCIVAIDVAKTKFVAAIATAAGEVLKLVRFEHPRQTGAFMELLRALQQAEREPVVVMEPTGTYGDAVRHQCHAMGLPVHMMPPKYSHDFAEVLDGVPSMHDPKAATVLAKLQAIKPARAWQPESDARRDLRAWVDQRRPIARVLAIYHGHLEGMLSRHWPEFAAHMDVYRQRSWFALLKEFPGPHATTAAREGAAQTLRKAGRGQLGDARVQAIVDSAKSTTGVPMTAGEQEKLRDITEQIESQTRRLDAVDAKLAELVGRDAVLSRMAIVVGPACAAAIGALVGSPLDFTNARALEKAIGLNLKEKSSGNTRGPMSITKRAPAKCVTSYSWRRCVS

SEQ ID NO: 436646 - protein, 392 aa, unidentified
MNTLRVAVDVGSRFHQVAIGDDSGKLLDEFQIDHGRVGFEQFFARVSHHAATDVRVAMEGYNGWARPLDQQVLARGWRLYNVNNLKLARYKEIFPAPTKSDAIDSHRMLELFGFDEQRPLGRDVLQEVTTSTTTQRELKYLTRRRRQQVADRTTRLIRLQGDLLAVCPDLLALTRSVNNLWFLRLLTCRDRLTALPQLHAKTVTSIRGIGAKTSPRILAWQKTATFGGSIDLVDTDIVADAAAIVALNEQIKAIEMRIEATALECPMASRLRTMPGFGVIGTAELSGEIGSLYRFDTEASLALYLGMAPLDHSSGLRHRGKRPKCVNARCQAALMTSTVRHIACVPESRAYYDRKCAQGKRHNQAVRALGRHLVRVIWRMLTDGRDYQARGE

SEQ ID NO: 436647 - protein, 347 aa, unidentified
MRFYTKQHKYYCGIDLHTKKMYICILDTEGKIRLHQNIKTDPESFLHILTPFREDVVVAVECMFTWYWIADLCVQQSIPFVLGHALYMKAIHGGKAKNDKIDSHKIATLLRGGMLPQAYVYPARMRATRDLLRRRNHFMRKRAELFAHIQNTRSQYNLPDPLGCIAKPQNRKGIVERFDDPSIQKSIAANLVMIEAYDHLLTKLEHDIIASAREHDLRSYALLQTIPGVGRILALVILYEIESIERFPSVQDFVSYSRLVKCIKESNGKIYGTNGNKIGNAHLKWTFSEAAVLFLKGNEPGKKYLERLAHKHGKAKALSILAHKLGRAVYFMLKNKEAFNQKQFLGF

SEQ ID NO: 436648 - protein, 364 aa, unidentified
MIVIGADTHKATHTCAAVEGATGQLAGELTVTARRPGFVELLSWGRELGLERIWAIEDCRHVSGALERFLVAAGERVVRVPPKLMGESRRAERSAGKSDPIDALAVARAALREGPETLPPAHLDEEALELKLLLGHREDIVSARSAEQQRLRWHLHDLWPELELPAGCLDRPSWLERLGRKLSRAEQSPRVRVARELVLEIRRRTRRAAELEAEIAALAEEKAPELLELKGCGALTAAKLIAETAGAARFASDAKFARLAGVAPIPASSGKRTRHRLDRGGNRQLNCALHRIAVCQGRVHPPAREFLERKQAEGKSRREALRCLKRHLARRVWKLLIDSEIDQSQSNPVDPQRGSLSQQIAAVA

SEQ ID NO: 436649 - protein, 355 aa, unidentified
METQTNLEKSFFENKELFVGMDVHKAKWVVTVRSYDLELKTFSMQPLAEMLEKFLLTTYPGAKYKIVYECCFSGFWIYDYFSEKGYSIIVTPTNRIYKDGNSIKTDKIDSRKLAFQLSRGLLREVIVPTKKIREYKYIFRIYDKQKMRKGQILRQVKAFLEQKNHPLKWEKWNKGLVEKLKLLTFEDKLFDLKFGNLLKEYEYVVSQIKDSEEIIERIKEDEVLGPRISRIEKINGIGIISAVRMSVYLFDRKDRFESSEKLNHHLGLTPSERSSGDKVNRGRSGMCGNRQLRSIIIQLAWKAVRKDGALLDKFERVYKKSGSKQKAIVAVARKLMTKLYAIITKEEAYRVNLAA

SEQ ID NO: 436650 - protein, 363 aa, unidentified
MIIIGADYHPGFQQIAFVDTETGDCGEQRLQHREETEKFYRDLAAQGMKVRVGMEASGHARWFERLLAELNIELWIGDAAEIRTKRVRKRKTDREDARLLLRLVQEDRFPQIWVASWENRDLRQLLWHRHRMVQARTRLMNQLQAVALNEGLRCKKKLWREHGREQLESFRLAPWASRRREDLLKLLDQLNPTIAELTQAIEQEAENCPEARRLMTHPGVGALTALAFVLIIGRAERFQCGKQIASYLGLVPMEDSSGERRRLGHITKQGNALLRFLLVEAAQVTVRTIPQWRSKYFHLAMRRGRKIAKVAMARKLAVRLFWMMRQEWNYEQVQKFGSHVGQPENRHGVQENTELLTGASRSS

SEQ ID NO: 436651 - protein, 340 aa, unidentified
MNEITTVGLDLAKHVFQVHGVDASGAPVVRKRLRRGEVLAFFARLPGCLIGLEACATAHYWARELQAVGHEVRLMPAQYVKAYVKRNKNDAADAEAICEAVRRPTMRFVPIKTAEQQAALLVHRGRERLVRQRTALVNALRAHLAEFGVIAPLGLRNVARLIAIVRDESDARLPDLARQVLRVLAEQVEQLEAAVAALEKQLMAWHKSNPVSQRLATIPGIGPIIATALAATVVEASGFRSAREFAAWLGLVPRQHSTGGKARLGGISKRGNRYLRRLLINGASANLLRSKATNADPWVIGLRRRRPSLVVAVALANKTARIAWAVMHRQENYQRMAAAA

SEQ ID NO: 436652 - protein, 337 aa, unidentified
MQIAVLGIDLGKNSCSVAGLDATGRIVLRRRMHRDSVIKLASRLPACVMAMEACCGAHHLGRVLQAHGHEVRLMSPEHVQPYVKAQKNDERDAEAIAEAATRPTMRFVELKSEMQLDVQSLHRARSRLVGERTALINQLRAVLFERGVTVAQGRRRLERYLALVLDRDEAPTLQLSPRMRLLIDDMRAQWCELDRRIAAFDAEFVAAARSDETTRRLSTIPGIGAINATALVAAVGDARSFARARDLAAWLGLVPRQATTGGRPRLLGITNAREQIPPHAADTWGPGGAAIAHRDRGFAGQLVTRLERAGASKHRDRRIGQQAGADRLGSAALDGHL

SEQ ID NO: 436653 - protein, 382 aa, unidentified
MQASTIGTPTAGHCGTIFVAIELSQKTWLVTLHSPDRERMSRHKLDGGDHAELLALIERIRARVAEKLGSVPRVVSCYEAGYDGFWLHRLLEAARITNFVFDAASIAVEQRARRAKTDRIDGELLLRTLMAHLRGEPRVVRIVRVPSVEAEDARRASRERDRLVKEQTAHTNRIKGLLRLLGMAVGNPRRRDWLAWLERQRDWQGQPPPPHLLAEAKREHARLILVRDQLMALEEAQAAQTLPVPAPVAERRDLLLRLKALGPAFTATLVSELFYKDFRNRREVASYCGLTPSPWKSGGIDREQGISKAGNRRARHKAIELAWLWLRHQRDSALSCWFRARTANAGKRAKRIAIVALARKLIVALWRYLSSGLIPEQATMKA

SEQ ID NO: 436654 - protein, 347 aa, unidentified
MRFYTQMHKHYCGIDLHARCLYVCILDQDGNILVHRNIKADPNALMRLVTPYQDGLVIGVECMFSWYWVADLCRDQQITFILGHALYMKAIHGGKAKNDKIDSHKIAVLMRGGMFPQAYVYPREMRGTRDLMRRRIRLMRLRAELFTHIHNTNSQYNLPPISKDLRHIGNRHGIAERFADPGVQKSIELDLSLVGFYDQQLNKVERAVQTHAVNCDQHSLILLRTIPGIGRILSLVILYEIHIIERFPTVQDFASYCRLIKCQKESAGKLYGTSGKKIGNAYLKWAFGEAAVMFLRNNSEAQLWLKKTANKHNKARALTILAHKLGRAVYFMLKRKTVFDQERFLNN

SEQ ID NO: 436655 - protein, 337 aa, unidentified
MNFIFYLGADISKDTIDVQLRNANESIVKGQFENTSKGMKAMDKQMSGHKGFDWDKTLVCMEFTGIYVNPFLNFLMLKKGNIWIERALQIKNSMGMVRGKDDRVDAERIADYACRYQDQARLWTPSRPVIAKLKKLSTIRRQLIKMKGQLTKPLQEARTYEDKVLYRLEKEHKTPLIRKLDLQIQNVDKSIASTIAEDSELKKLASKVTSVTGVGKVTAAAVIVTTNEFKDIKEAKKFACYSGIAPYPNSSGSSKKGRVRVSHLANKKVKTLLHLCALAAIQSPGDIKTYYDRKVAEGKNKMSVINAVRNKIVHRIFAVVRENRKYEKNYQICLVEP

SEQ ID NO: 436656 - protein, 359 aa, unidentified
MSAIRKKERVSKRPVVTAKDVIHIGLDVHKKSIHVAVWKNGAVDDTWVAGSDYSALCAQLEVYRPAVKSVAYEAGPTGFALARLLEAEGFKTIVCAPSKTPVRPGDETKCDRLDARKIAVYTAQGLLTPVTIPTEAEECQRSLVRLRDQLAKKIRRAKQQIKGALLFHQCGSLNSWSAAERGRLLDTELPAEVRFALDSHFRELDFLDAERRKVDIELRATLKRRRQSETIRKLETHPGVGPVVSACFVLELFRPRRFKHGDAVARYVGLAPRVRQSGESCRGGSLLKAGQGRLRSLLLQSAWRWRACDERARAIYNRLLANTGNGNKAIVGLARRLAIRLWTMWIRGEAYEASKGACT

SEQ ID NO: 436657 - protein, 408 aa, unidentified
MLWGAARQWHHRRCNQPMERPMPQPNDLSRSLVTLEQDSTLIAVIEMGQSSWLVAGIVPGIERQPLKKLTADQDGLLQLLHRWRKEAAQTGHTIKRIAVAYEAGRDGFWLARWLRAREIEAYVIHPSSVPVSREHRRAKTDRLDTELLKRAFLGWLRGEPKHCSMAAIPTVEDEDAKRPSRERESLVGECTRIVNRVKANLARLGIRGFRPRLAHAPKRLDTLRTPEGTTVPANTLAELQRDMAHLRFVKQQIKEIETTRTKRLQQASGGGRNAMVRLLARVVGIGIETADLLVQEAFSRKLRDRKAVARYAGLTGAPDESGQKRRERGLAKAGNARVRHAMIELAWGHLLHQPDSALAEWYRRRTVHARGGTRKTMIVALARKLLIALWRLVTTGEAPAGLLLRPAA

SEQ ID NO: 436658 - protein, 344 aa, unidentified
MEYYVGLDVSLRSCALCIVDGKGTVLFEREVPCEVGDIAECLVEFPHPIERVGFEAGAMSQHLFFGLTAEGFDFVCMEARQVNAALSAMRNKTDKTDARGIAQILRTGWFSPVHMKSREAHGLRALLSTRKALLKKTMDLANEVRGLLKIFGIRLPQTVKHGRFDGVVRPMIEIDDVLAHALVPLLDARVVLYQHYLELDRRVKRAASQDDVCMKLMTIPGVGPIAALSFKSAVDDPTRFKRSRTVGAHFGLTPLRYQSGEHDNPGRISKAGDRDVRAVLYAAANALLMRTMASSQIKSWGMRLMRTKGRRRAVVAVARKLAVLMHRMWIDGSEFRQDQVGGMA

SEQ ID NO: 436659 - protein, 411 aa, unidentified
MQVLYSRCAGLDVHKKTVSACISIREGGVVQQHVRTFSTFTSDLLAMADWLKQHGVVHLAMEATGVYWRPVWAVLEGQFEQMLVNPQHIKAVPGRKTDTRDCAWIADLLQHGLLKGSFVPPTPIQDLRDLTRYRAELRQSQNRVANRIQKFLEQANLKLSSVASNVLGVSGLHILQAILSGQDDPQQLAQLARGRLRERIPQLERALEGRVRDHHRFLLSEYLDEWASLEERIERMEAEIDKQIRPFESSVALWQTMPGVDRLTACNLVAEIGVAMSQFPSAQHLASWAALCPGNHESAGKRTSGRTRDGNKWLRLSMCQAAWAVTRKKDCYLAAQFRRLASRRGVKRAVMAVAHSMLVIGYHMLNTGKGYHELGGDYLDQINKTQQQRYLVKRLQGLGLKVTLEPATSPA

SEQ ID NO: 436660 - protein, 400 aa, unidentified
MKKPCIAIDVSKGESHVEAYLGLKNVFIKAKKIKHDAEGFNYILDVVKQIEDKIGEKPVVLFEATGVYHRTLEFFVAEQKIEYFVINPLHSAKFRKRELRSVKTDKRDCSNLARMYYNGLLKESYKEEEIYNELRQLNRYYETQVSHLVKCKVNFNEKLDIVFPDYKQLFSDLYSDISLLIIKKYNHPKNIIGKEIKTISKYLEDKTIHKKVYCMNIAEKLINFSKQCCPGCDKKSVDVDILIGLVNELEYYQDLCEKTLNRIINLAKNLPYFNILHSIPGIGENLAARLIAEIGDITRFENNKQLIAYAGIDPIIYQSGQMSGEHLKMSKKGNKRLRRLLYLAITCMLRNKSVNNSIRDFYKKKMQQTSGMKSMVASFACANKFLRTIYSMCINGTLYQ

SEQ ID NO: 436661 - protein, 438 aa, unidentified
MQIINSNAAGIDIGSRSHFVGIGQTDKDVKEFGVYSSDHKQIISYLHEHKVDTVAMESTGSYWQALFFELQQAEFEVLLVSGHQTKDLRAKTDVKDCQWIQKLHSLGLLNGCFLPDEQTNRIRILHRHRSSLIEQSARLVNKMQKSLRMMNLRIDVVLSDITGKSGMSIIKAILKGEREGKVLAQLTDPRVKKSKQEVEDALQGHWSEEFLYELNDCFQMYEIIQAKVQACDTKIESLLIEFTIDTEHDTKELVLTTKQVKGKNQPKFDLIDLSYKQFGVDLFAIEGVSVNTVLTLITEIGHDGIHRFKTAKQFTSFLRLAPNNRISGGKLISSRTPKGGNRFAISLRNAANTIDRKKEGALTRFFKRIAYKKGRAAAITATARKLAVIIWNMVTKQEEYNPIPDQNYQQIIKERVLKSIQKNMKRLKIQVSDLEAVA

SEQ ID NO: 436662 - protein, 421 aa, unidentified
MKNNAARKLRQVPVGYLRVGVDPHKKKHAAVTMTEGFLVQGKFKFTNSRDGFEEALERARAGMEKAGCTGIIFAIEAASHLWRNFAYFLDEKGIPFRLINPFSLKRRREGKDLNRRKNDFRDAEVAAQLLCTGEFTETTLPQGVYAELRATYSAYRRVVKEKTRSVNLLKGLLDGLFPEFTQVFKEVSGQTALRVLSVCSIPELIDGMTEDEFIKFVREGYQGRLMKGKLLALHYVARHSAGIKAGAWSVSSEVSLLVEKLCLVNRQIRQIEQTLVRLVDEAEEGKYLLSIIGLGYISVAGLLAELGSFRFYHNARQLIKMAGSNPTESESAGKRKSKTPMSKKGRPGLRHCGWTAVVSLLSHNPDFRTWAKRLRERPAHANPLSGREIVGAGINKLLRIGFTLVKKQAFYQLPQVAQLVS

SEQ ID NO: 436663 - protein, 345 aa, unidentified
MSEFYEGRQFVGMDLHRRRSVLVRMSETGEHLETVRILNDRDVLAEVMSRAGESPEVVLEATYGWYWAADALAELGARVHLAHPLGVRAFSYRRVKNDQRDAFDLADLLRMGRLPHAWIAPPETRELRELVRHRAKLVAMRSQCKAHVHAVLAKGGIWVPMTDLFGVEGNLLLNKVTMPAPYKARIASLRRFIEAFDAEIDLFTGLAQRRLTHDAGYTAIQQIPGIGPVLAAVFVAEIGDVHRFPGPAQLTCWAGLTPSHHESDTTVHRGRITKQGSCLVRWAAIESVKILPDTSRIGAIREQVAHRRGNRNIGAVAAARRQLELVFYGLRDHHIRALHHPPHAA

SEQ ID NO: 436664 - protein, 404 aa, unidentified
MKGPIVSIDVSKGKSDYQAFKNLNVKYTGSRSIKHTKEGFDEIVNLVREMEKKLETEVCVVYEATGVYHRVLKKVLEDNNIKQFIINPLLSAKTRKNDSLRSPKTDKLDPKSIAKTYYSHSLHNSHKPETIYHELRELSRYYEDILVHIRKDKVSFRAQLDVVFPGYDTLFDDLYSPVSLTIIEKYPHPEMLQKKKINTVSKVIQSKTCHRQAASDTMADKAIEYSKTIYSGCDKDDIEVLILQRLIKKLKEDMAEAERTIGEMIKLAQELPDFSIIKSIPGIGDNLAARIIAELGDMTRFKKKNELVAFAGLDPRISESGKNDGDHMHITKKGNKRLRCLLYLAVTCSIRLKRDDNSIKDFYIKKKQQSNPMCSKAAKTACASKLVRIIYSMCKTGELYQYNK

SEQ ID NO: 436665 - protein, 419 aa, unidentified
MSNSTGYAFFVGIDWADSKHDVAVYSTAKGTNKVFIIEHSTEAIDAFISELLVEAKGAPIAIILEQSKGSLMHALMLRDNVDLYPINPKQFASYRESFRTTKGKSDKNDALLLARLLYERHKQLRVWKPEDENTRLIARLCSRRRVWVEQRTTQGQRLLDLVKSYFPVLLKLAKSKLYDSPLLLEILRKWPDPRRLKRANPELLAKVIASHGVKNQSKLEKIIACLKKAPIHSKDKSLLTVSAIEARYLSKQLTANQELIAQLDQEIKAALAKHPDKELFTSLRGAGNALAPRLLAAFGTDRKRFKNAEEVACYVGVAPVTKQSGKSCSVVRRRACNKYLLQTFHEFASAAAKWCTWSNAYYKMHREKGMKRHAILRKLAYRWIRILFRVWSTRTAFDPERYIRSLLVKCPEIKPFLSA

SEQ ID NO: 436666 - protein, 421 aa, unidentified
MKGLRAKKADMIKEGTLIVAIDIGMTSNHGCCTTADGRSTKTFRFDNTREGLDTLWDMVLASKTRFQCNEVIIGYESTGPYGEPLIHYLKQKPATIVQVNPLHTKRMSEINDNSPLKTDRKDPRVIADVIRIGHALSVVVPEGDSAYLRRLNNARERHTKERTALLNQLQQFVFLIFPEFTRIIKTVYSKTALHLLKKYTTPAKICSVNIEKLGEEMRRRSMGKFGVEHATALINFAKTTIGIQEGLDGLVMDIQHILIQLEMVDSLIAELEHEMETTLQCIPYSRKLLSIKGLGIVTVAGLIGEIGDFTKFTTQSEIAKLAGLDLYEVSSGKRQGQRRISKRGRSLLRKILYYASMQTIRKNGIMHDYYQRLIGRGMKSIMALVAVSRKLLRIIFAIVRDDTEFTMNHESQRKEEMRKAA

SEQ ID NO: 436667 - protein, 362 aa, unidentified
MQIIGCDLHARQQTVAMLDTLSGEVVNRTLAHEGNDVREFYSTLPGPVRVGIEATGSMKWFLQLMEELGIDCQVGHPATIRAAEPRRQKHDQRDAELLLRLLVENRFPSIWQPSKELLDLRGLLLHRHQWVRLRTRIQNALQAIALANGLRRGSSLWSESGQRAIASLPLATHTAHRRSELQAMYARFEAEIEQLNQQVLEQAGQRPTAGLLMTHPGVGPITALATDVFLGDPKRFRDGKALASYIGIIPREHSSGGRQRLGGLSKQGNPLLRFLWCEAAAHAVRRDPELQRFYRRKLVQKGLGKARVAAARKLGIRLWIMLRDQIDYQEFCRRGQMQQRSGGACAGMPGERYGAKSHRLID

SEQ ID NO: 436668 - protein, 351 aa, unidentified
MPRATSSTNVIATIGIDIGKNAFHVIGLDDKGAIILRHKLSRGQVYARLANIPPCLIGMEACVGSHHLGRQLSALGHDTRLMPARYVRPYSKGQKNDFRDAEAIAEAVQRPTMKFVAIKTVEQLDLQGLHRIRERLVCQRTSVINQIRAFLLERGIAVRQGLRTLRTEMPIVLAKTDKLSQRMIHMIEDLCTDWRHLDRRIATVSKEIETLSEQDDGAKRLMTVPGIGPIISTATVAAIGTGEVFSKGRDFGAWLGLVPKQMSTGGRTILGPISKRGNRYLRMLFVQAARAVLLRPQSWEKHGLKLWIEAAARRLNRFKLAIALANKIARIAWGVLHGGRNFEVRPMNQVA

SEQ ID NO: 436669 - protein, 364 aa, unidentified
METVRFVGLDVHADSIAIAVAEPGRGEPDGLATIPNDTVMLLKRLRKLGRVRCCYEAGPTGFGLHRDLAAAGIDCIVVAPSLVPTKAGDRVKTDHRDAAKLARFLRSGDLTEVHVPEQATEAMRDLERARDAAKRAERAARHQLGKFLLRNGRRWPGKTAWTSKHLEWVRAQHFEQEAQERVLDDYLKTVQDCSARVERLTKSIVELVESWSLRPLVKALQALRGVNVVAAAVLAAELGDLARFESAPKLMGYLGLVPSEHSSGETRQQGRITRAGNAYARRILVEAAWAYRFRARKSAAITARSQGVSEEVQRIAWKAQERLCARYARLTARGKNKNRTVVAIARELTGFIWAIGRQPKLLEA

SEQ ID NO: 436670 - protein, 322 aa, unidentified
MSVTVLGIDIAKQKFDVALLADGKTKHKACKNSVEGFKILMIWLEKQGIKKIHACLEATGTYGEDLAIYLHEAGHAVSIVNPTRIKGFAQSELVRTKTDKIDAGVIARFCLAMKPETWVPPAPEIRSLRALVRRVDSLIDMRSQEKNRISTAHESVIVLIKEHIVYLDQEIEKIRKQIADLIKQNPHLKQRKDLLDSIPGLGKVTVPHLLAELDNLDKFTHVREMVAFIGLAPKETLSGSSIKCKPRLCKIGHARLRKALYMPALVSIQCNPVMIAFYNRLKEKGKNGKVIVCAIMRKLVHVIFGVLKSGKMYDPNYKSTFA

SEQ ID NO: 436671 - protein, 359 aa, unidentified
MQTQVKELDFTGHNIYAGIDVHKKSWQVSVYSEELFHKTFNQPPKPEILHGYLAKHFPNGTYFSVYEAGFSGFWAHDELQSLGINNIVVNPADVPTTNKEKKRKTDKIDSHKLARQLRSGDLEAIYTHNRKILEDRNLLRMRRTLVKDLTRNKNRVKADLYFFGIDIPEQFTKNPSYWSKRFIKWLEEQEEHQRWTGTASFQILIDQVRSLRKQLLEVNKKVRALSREDCYQKRVALLGSIYGIGLVTSMTILTEIDDIHRFANLEKLRSYVGITPTSHSSGDKDLHGEMINRGNKFVKAAIFESAWIAARRDPVLHMHYVNFCKRMKPNKAIVRIACKLLDRVHYVLKNEVPYESGIR

SEQ ID NO: 436672 - protein, 355 aa, unidentified
MNDAKYIGMDVHQATISVAVRDSRGDLVMEAILETKAETILQFIHGLRGSLYVAFEEGTWAAWLHDLLQPHVACVLASDPRKNALLKAGNKSDRIDARKLSELLYLNKLSPVYHGEQGIRTLKELARSYITITRDLTRVMSRLKAIYRGWGIPCAGQQVYAPRYRAEWLAKISEAGVRRRAELYYQQFDVLAALRHGTRRELLAEARKHPAMGLLRQIPAIGPIRAALLIALIQTPNRFRTKRQLWAYCGLALRTYTSGEYRFVGGQLKRSKKVLAVRGLNINHNHDLKNIFKAAATRAAATAGPLQGFYQACIARGVKPHLARLTLARKIASITLLVWKKGVRFDAEHLKQQAA

SEQ ID NO: 436673 - protein, 339 aa, unidentified
MIVKTVGLDLAKDVFQVHGISETGRKVFNKKIKRVKLLQFFESLPRCLVGMEACGSAHHWGRELRKLGHDVRLMPATYVKPYVKRGKTDAADAEAICEAVRRPSMRFVEIKSTDQQAFLAVHRSRDLVVRQRTQVVNMIRSILREFGHVLPTGVEAVNQFSKRQMDGDQFEMPELATGILGTLCYQLLGLNARIEGYTRLIKQHALLDANCRRLTKIPGIGPITASAMVATIGDGSQFRTGRDLAAWLGLTPLNKSSGGKERLGKITKMGDRYLRKLLVIGMTSRALQARNHPERADRWTANILAQKPFRLATIAMANKSARVIWAVLSKGQQYRQPVA

SEQ ID NO: 436674 - protein, 349 aa, unidentified
MITIGVDFHKRTSSYHVLNEKGQMLKKAKLLNDQETIRTFLQSLPGPKQLAMEATRSWGLYHDCVYDLVDEFHLGHPKKMKAISESETKNDTQDAELIARMQHSGFLPHAHVPTLDIRQLRSLLRFRHFLVNQRRSIRNQVQTLIDRNLWVGERPKSFKNVFCKRGLQWLAGLALPERERFILNQSLQSFQDLSQKVKELEVFIQDQTLQLPGLSHLRTTPGFRLSKVNAFIVLTEASDIMRFKKARSFVHYAGLIPREFSSGDKHRTGGLIRSANMHLRTAFIESTLSAIRQDKGLRAYYKQVKIRAGSGAAIVATARKLATAVYFVLKEQRAYRPESFNPSAVACHS

SEQ ID NO: 436675 - protein, 411 aa, unidentified
MNPVVGLDIAKGESQVQAFLDKKKPYKSSFKVSHTLEGLDILHQFLREIENLKGVKPPIVLEATGHYHTPVVQYFEDRDYLLIIINPLISYRAKSSSLRKVKTDKIDAYHLCELYYKEDLEPYKKRGIHLLNLRNLTRQHENLTEIFVQAKLQFQAVLDQVFPEYKGVFGDLYSVVSLLTLLEYPTSNDVLETCEETIAARIKENCNSRSHSWAKTKAKELKASAARNPFQRTLYQSHILTLKMYINMLLEYQKHLSTFQAEIDALAKELIEYKIIQSIPGIGEKIAATIISEIGEIDRFNHPKKLVAFAGIDPSIFESGRFKGTVNRITKRGSSRLRRALYLAVKCAIRDCRKKKTTKDIIPRNKRLREFFDKKREEGKPYKVAVIACANKLLQWIYALLKSHSTFQDIA

SEQ ID NO: 436676 - protein, 344 aa, unidentified
MDHFAGLDVSVKETSVCIVDDTGRIVREIKVASEPEDLLRVLANPDYHFKRIGLEAGPLSQWLYSALAESGLPVICVETRHMRAVLKARINKTDRNDARGMAQMMRAGLYRPVHVKTLRSQKLRMLLTHRKLLQSKAIAIDNDLRGTLRNFGLKVGVVGTVRFEARIKELVENLPDLGLLVEPLLIVRRVLREQLAILHRRLLAIVREDEVCRRLMTVPGVGPVVALTYRATVDVPARFRNSKAVGAVLGLTPSKYQSGEINRSGAISKCGDEMMRVMLYEAAQVMLTRTNKWSWLKAWAMQIARRRGMKKAIVALARRLAVIMHRIWVDGTEFRWTREEAAAA

SEQ ID NO: 436677 - protein, 419 aa, unidentified
MAFKIFRKNCCGLDVHKTWIYACIGITDPNNRTEYKQARFSSFSNGLKELAEWLAKYSCTEVCMESSGKYWIPVFNILEKTCWVTLAHPKYTKPQKDNKTDRKDAKWICDLFMCDMIKPSFIPPPDIRQLRDLLRFRMKLTYQITGMKNRALNCLTVSNLKLDDVFSDVFGKSSRSIIKQILEHPGETFDVTPFVDKRCKHPIKEIQAAIDGAICPEQATKLKICLDFIDEQEKRIAELDSEIFRLAEPHKAVLDFIRTVPGLSKEPLTAIRILSEIGADMSVFPTSKHLVSWAGCCPRNDSSAQKVRSTRISRAGSFLKSILVQIVNALIKSKDHHEFLERYRRIKAHRGHKKAIIALCRMLLTAIWNILTKLEPYSAKGYLADKLTEHSVVISKSEGLALLRKRGYIFKDEITDVIC

SEQ ID NO: 436678 - protein, 332 aa, unidentified
MNAVSTLGIDLAKNTFSVHGVDANGVVTVRRTISRAKLAELVARLPPCLIGMEACSGAHEWARRFGAAGHTVRLMAPKFVAPYRKSGKNDGNDAEAICEAVCRPNMRFVPIKSVQQQADLSVHRVRQGFVEERTATLNRIRGLIAEFGHVLPIGVEQLRRQVPDLLDRLPVRVGRCVRDLLEHAERLRSKALEYEREIRMSVQDNELARRAHTRPGIGPITASALVATVGNGHDFRNGRQFSAWLGLVPRQYSTGGKTRLGHITKRGDPYLRTLLVMGARSVLQRAYRERDPLSRWALALQQRRGYHRACVAIAAKNARVAWALLAKESAAA

SEQ ID NO: 436679 - protein, 412 aa, unidentified
MKDLLEISCGLDIHKEKIVACILTGPLGKPTHSEIREFTTLIPDMLALRDWIISENCHHVAMESTGIYWIPIYEILEDAFSGDITLLVVNARHMKNVPGKKTDMRDSEWISTLLRAGLLNASFIPKKRIREFRDLNRYRKSIIRDITSQKNRVEKFLQSSGFRLSSFISDIFGASGRNIILHLMEHGRIDKISLDSYLKTKTRKRIDEILMSVNGTLSEHQKSFLKILMCHYDSMKEHLIEIETHLQEDMIPFALQIEQLNTIYGISTTASCAIIAEIGTDMKPFKTAEHICSWAGLCPGNNESAGKRKSTSITKGNPYIKSMLCEIAWVIAGKRNTYLSAWYWRIKQKKGARKAIVALARKLLVIIYTMLKQGTNFDENCFEVRRKNCEQKQLSRYIRELEKHGYTVEAQV

SEQ ID NO: 436680 - protein, 347 aa, unidentified
MKVLIGVDPHKASVAVAAVDEAKGELLERASFPQDRAGLRALERWVSRFPERRWAMENARGLGRHLAMRLAGSGESVVDVPPKLSARVRVLSTGNARKNDGLDALATALAASRNERLAPVGPEAASEVLRLLSERREDLVAERTRALNRLHGLLRDLLPGGVAGKLSADRAARILRGMRPKGGNSDRLRRRLASEVLRDVRMLDRKIADLNGRVEAEVEASGTTLTEIFGVGPILAATILGTVGDVARFLTKAHFASYSGTAPVEASSGKVVRHRLSLAGNRKLNYALHMVATSQARSDAPGGSYYRKKLAEGKSPKEALRCLKRRVCDAVYKSLVADTQAPSRSAA

SEQ ID NO: 436681 - protein, 342 aa, unidentified
MYYIGLDVHKKTISYCVKDASGRVHQEGKLGATRCELDIWMRTLPQPWTVAMEATIFTGWIYDHLHPHAAQIKVAHPLMLRAIAAAKKKNDRVDASRIADCLRCDFLPECHMASTEIRDRRRTLRYRYLLVRQMVQTKNRISGLLMETGVTHNKQRLHKVGYFRELLASNEEVSESIRPLLRLSRDTIARLQKTERALVSSLQRDPLLTQRIKRLRTVPGVGPITALTWALEMGEISRFRSIRQAISYCGLCGDERSSAEKSIRTPISKQRNKNIQFVLIEAAKLAPRQDHDLALLYAREKEKGNANRATLAVARKMVAYLLAVDRGKRDFVPVEDHSNAAA

SEQ ID NO: 436682 - protein, 319 aa, unidentified
MNKSTLFFGIDISKDCFDVYSDQMGYNSYSNTKDGFKIFLKVLGKTSHCVMEATGCYHHKLAMFLYEKGIAISVINPLIIKRFIQMKLRRVKTDKSDAFMIYNYAYEQSLEQWEPEEAYIVKAKELLSLIQTYLRQSTALKNKLHALENRGHSKGIMMTSIKRQLRQLKKEHELLEKELETLIKSNEPNLFSRLNTIPGIGKKTAVLMMVSTSNFNSFNSYKQVSSYLGLAPNERSSGSSIRGKSRISKTGDGLLRNHLFMCSFTASVHNPQCKALFDRIVAKGKSKKLALIAVCNKLIKQAFAIAKSGLPYDSNYAVK

SEQ ID NO: 436683 - protein, 492 aa, unidentified
MVTFAGPLFVLVAIPIRRVPALRNSGRRLPARRWTMAKKRSKETRTSNGMLPVMRPDAAGIDIGATEIYVAVPADRSGENVRSFPTFTQDLYALAEWLKQCGIKTVAMESTGVYWIPLFQILEERGFEVCLVNARHVKNVPGRRTDVSDCQWLQFLHSVGLLRASYRPEQEVCAVRSLLRHRESLVQMAATHVNHMQKALDQMNLQLHHVISDITGQTGLAIVDAILAGQRDPQQLAKLRHERIKASEEIIAKSLVGDYRHEHLFTLRQSLAAYRSYQKLIDDCDSEIRQQLARFDSIGSSQPPAASKSEAPKPSSRKFSDDGLLKFELKRVWGVDLTRIPGIRTGIAQTLLGEIGPDFSKFRSASAFASWMGLCPDNDISGGKVLWVGTRKVKCRAATALRMAAQSLHHSKSALGNFYRRMRAKLGAPKAITAAAHRLARIIFHLITTRQDFDDSKFAAGQLRDQKRQEANLKAKAKALGFQVTPLEQAAR

SEQ ID NO: 436684 - protein, 358 aa, unidentified
MQTQSNKLDFNGQNIYVGFDVHLKSWKVTIMTEKLTHKTFSQSPKPELLNNYLIKNFPGGVYHSAYEAGFCGYWIHNKLKSYGINSIVVNPADIPTTDKEKVQKEDARDSRKIARSLRSGDLIAIHVPSLKTLDDRSLIRTRSALVKDLVRNKNRTKSFLYFHGIEIPESFSKQTVWSKNFINWLNDIEMAEQSGKNALLAIVGASKDLRASVLRATKQITELSKTNEYQDQVTLLRSVPGIGLLTAMTILTELETINRFESFDRLCGFIGLVPSTRSTGDNEVVGGVTPRGHSVLRHAIIESAWVAARIDPALTKSYHDYCKRMEPNKAIIRIAKKLLNRIKFVLKNKKTYVCAVVK

SEQ ID NO: 436685 - protein, 441 aa, unidentified
MSEYFLGIDVSKGYADFILLDNKKNIIEKNFQLDDTFEGHHHLYSFLSSFIANTPDAYIITAVESTGGYENNWVNLLLKLQEDLPVSVARLNPFGVSHSSKADLKRVITDKISALCIAEYLINHRSKVSFVREDYFAPLRKQWIFIKLLVKQKVQLYNQLESLLYSANPELLVFCKHGKAKWVLQLLKKYPSVANLSRASVSALTKIPYISAEKAHTIINNAKSSVASQIDPVTTTLLKNIVEQILSIDKSIAEQVKLLEKNCSLPEIELLKSFTGIGTYSAVGLMLEIKAVERFPSAKKLASFFGLHPVYKLSGDGIGGIHMSKKGRKEPRLILFNIARTAITYNPLIKEIYQKHLKSGMTGLAAIGVVMHKILRIIYGMLKHSSLFNPAIDKLNSEKTIKPVIKPLMLKHRRYQSFDSSAPISRKQNRKREEQMKSHNG

SEQ ID NO: 436686 - protein, 399 aa, unidentified
MERPIISCDVSKGSSHIRGFIGLSNPVGNPFVVRHIKSELKQIKELAKSLEKQTHQKVAFVFEYTGVYHESILAYVLSIGLDAYPISPLESAKVRKSNIRPVKTDSKDCTNIAEAFYKREEKHLNKKYVPDQSNVKALSRHRKSLMNELRVIKCTYRRYLDLIWPCLDVYYSKVDGTIIKTIVSKYHHPNVLKRRTSQQIAEILENNGHCSFKRGLTIADKLKDYALDSVSGVNEKSEYVNCLTETLNRIIELENKIEETENKMDGLLRKGQLYGLIKSIPGVGEKLSMVISSEIGDYTRFKTAKQLVAYIGLDPHIDQSGDDNGEHRSITRKGNSILRSALYVAVNCMIGQYDNQITKFYYQKKSSGLPHKVAAVATCRKLACTIFGMFTKGVCFETK

SEQ ID NO: 436687 - protein, 418 aa, unidentified
MQTELSQFKVIISIDWADKKHNVCVQATASGKRQSYQVPHKAEKLDEWARSLHRQYGGPIAIALELSKGPIVSALQKYDFFVIFPIDPTTLANYRRTFTPSGAKDDPTDAEYALTLLLTHTEHFTALQPQSVEMRTLMALVEQRRRLMNDRVRITNRLRNALKQYYPQALEWFDRIDTKLFCDFIKRWPSLAQGRRARKATLERFFRDHNMNRKALLERRITAIKSSLPLTEDEAIILPYRLQALTLVAQLGVALESIRTYDDEIAALAPQHPDYGLFDRLPGAGPSLAPRLLVAFGEQRERYSKAAELQKYAGVAPVTERSGQSTWVHWRWQCPTFLRQTFVEWSAQTINKSYWAGLYYYQQREKGCSHQAAVRALAFKWIRILYRCWVTHTPYDEAKYLKALQERGSPLLKIAEAA

SEQ ID NO: 436688 - protein, 349 aa, unidentified
MTTMTAPTTRVTAGADTHRDQHVVAALDERGGELGVRSFPTTAAGYRQALAWLRSFGAVERVGVEGTGTYGAGLTRYLHAEDVAVVEVNRPNRQLRRSHGKSDPVDAVAAARAAQSGEATGEAKTRSGAVEAIRALRIARRSAGHGRTRALSQMRALLVSGPDDLREALRGSTVSKLVTTAARLRPADPTTAVGATRFALRELARRVQSLEAECERLDAVLQPLVAATAPDLVACFGVGTDTAGALLVSAGDNPQRLRSEAAFAHLCGVAPIDASSGLTIRKRLNRGGDRSANHALWRIVMVRMVFDARTRAYVARRTAEGRSKREIIRSLKRYVARELYRCLPHPEPA

SEQ ID NO: 436689 - protein, 338 aa, unidentified
MYYTGIDLHKKTSYLTTINEEGQVVKQANLINDESLILNYFTSLDGPTKVVIESTGSWYWLYDLLDGNGFEVILSNPTKTKAIAAAKIKNDKLDSHMLAQLLRTDLISTVYVPSIATRKLKELLRHRARLVHDTVRMKNRIHTILIKNNCSIPFRDIFCQKGMLYLQKVALPQHHKEQLQTYLLLYHQLMDQITPLTESIHKMAQSHPIAKLLITIPGIGPITAMTIIAEIENITRFPSYRHLSSYAGLVPSLKASAGKQRIGKITKQGSPYLRTALIEAAQCIARMKKCRINLFFRRIIVRSGYKKAIVATAHKILQIVFYVWKNKTPYQEVYHARA

SEQ ID NO: 436690 - protein, 387 aa, unidentified
MSKKIVAPFYVVAMERAEADPSAARFWVGLDVGYKNTAVCVLDCDGAIVHQVSMKSSATEIGRYLRKNFKSHVTLIGIESGGLTPHLTTKLRAQGFQVVVLDARQVHRVLSVKRNKTDTNDARGIAEITRTGREYLTEVYVKSNLCFEIRAYLTMRDRLVKQRRETEAMIRGLVRVYGGRIEGGTETAASYRSRAIDQMCLIADTEGVDLRPRVLPLLDLCEGFYVEANRIERELELLAASNPVCRRFMEIPGVGTITAVSFYSAIEDPTRFRHVDDVAAYLGLTPRVYQSGESLTHGGISKMGNQLTRTHLVGAATVMLSNTRSFSTLKDWGLKLSKRIGFNKAKVALARKLAIIMFSLWRDGTHFMAKAADVPEHRALMQSRLPA

SEQ ID NO: 436691 - protein, 349 aa, unidentified
MGEVSTIGVDIAKSVFQIHGVDADGAVMIRKRVGRAKVLEFFADLPPCLVGMEACATAHQWARELKKLGHDARLMPPTYVKAYVKRGKNDATDAAAICEAVTRPSMRFVPIKSVEQQSALMLHRTRDLLIRQRTQLINALRAHLAELGLVAAKGHEGLHQLVTAVAESGDERLPSNARFACQSIVAQLHAVQTQINGIDTRITQAHRANADSKRLDAIPGFGVILSTAVVATMTDPKAFKTGREFAAWIGLVPRQNSTGGKERLGSISKQGDRYLRRLLVLGAISIVGTARTRPDKYPWVTELLGRRPAKVVAVALANKMARTAWAVLARGETYRAPTRSSSAAIAAAA

SEQ ID NO: 436692 - protein, 343 aa, unidentified
MQSISTIGLDIAKSVFQVHGVDAAGQAILRRQLRRRHVLAFFQKLSPCLVGIEACASSHHWSRELQALGHTVRLMPPAYVKPYVKRQKNDTTDAEAICEAVTRPNMRFVSTKTVEQQSCLMLHRVRHLFIRQQTAVINSIRAHLAEFGIVAPVGRRGVEQLLEVVADTADRRLPEVARACLAALGSQLRALKAQILEFDRRIMVWHRSNATSMRLDAIPGVGPALATALVASIAEPGAFRSGRDFSAWVGLVPKQNSSGGKDKLGSISKQGDRYLRSLFTAGALAVIRYAKIHGTRHRPWLTGLLARRPTKVVAIALANKLARMAWAMMVRNERYKEPAALAA

SEQ ID NO: 436693 - protein, 454 aa, unidentified
MQKQDSYDYYVGIDCAQNKHDFAMKNNQDKFLIKKGHFSNTLQGYEKFLNTVLSKCLDKDKILFGMEVTGIYGTNLYERLKSDGYHVVMIFPDSVKNYRDYKRLNKTDKIDSACIAELLLNGDAQIVHAEKNGYTDLKAYIRRRNALKVTCTQETNRFLAKVCLYFPDLLKVFPSGRATLKAIFSIYPTPYSIIEADFNELVSVLQKASKNKFGVDKANELIHAARNSIVVRKSISDGELYNIHSLIDSIDSLESEIRNLEKIIDSKAEEFPAYHVLLTLTGCGKITAATIVAEIGDISRFHKASQIVSLAGLYGDNSKSGSSVNKRGKISKKGSRYLRHAIYMVAEFARRNNPIFKAYFTKKKNGDRTKHILAMNAVANKLCKVIYSLMKNQSTYIIQYRDLAKLSKSTQNEFFQNAETDFSAKTRRKKYLYEDEYGELHEFVFKSIKTALIE

SEQ ID NO: 436694 - protein, 424 aa, unidentified
MKVTFQTCCGVDVHKSFLVATIIKTSSGIEPSYQKRRFSTFNNSILEFKKWLLENECLYVCMESTGKYWIPVFNILEDEINVTIANPKWVKAVKGNKDDTKDSKWIGDLFRLGLVRGSYIPCKKIRILREFTRYRYKLVSCRSSEKNRYQNTLTVCNVALDSVVSDIFGKSSMSIIDYLLEQSGTSINHEEIASKLLRSLKSKEDAVIESIEGYQMTDSQKYRMHLVRAHMDYITAAINDVDSEIESLIASDPDYENAVELLCTIPGVKYDSAITIISEIGIDMSQFCSSKRLCCWAGLTPGSNESAGKKKSVRITRAGVYLKPALVQCAHAAVKSDKSPYYKKKYESLVKRRGKKRAIIAIARMILTAIYQMLSTGEQWNPSDLYKVDMPEALLEKQKQKAIKQAQKLLIREGLLPPTEPIAS

SEQ ID NO: 436695 - protein, 346 aa, unidentified
MEIHVIGIDLGKTVFHLVGLNQGGEVVVRKKFSRAQLLRFTSNLHVHLIGMEACGGAHFLGRALRAQGHEVRLMPAQYVKPYVKTNKNDFIDAEAIAEAVERPKMRFVPIKSDEQLDMQSLHRVRERWIVRRTAVVNQIRSLLLERGVTVRKGRKHLVAVLPGILEDPETDLSGPLRVLLAQLQWEMKHLENQIEEVDAVIVRTSGQDEACQRLLAIPGIGPLTATAIVSAIGNGAEFKKGRGFAAWLGLVPAQYSTGGKQKLLGISKGGNCYFRKLLVHGARAVLQTKDKQSSGLSTWLTQLTSRAHSNVAAVALANKLARMAWAVLAKGEAYRPPLLAAELVGQ

SEQ ID NO: 436696 - protein, 340 aa, unidentified
MKLYCGIDLHSNNSVVVILDEVDKVVYQKKLNNDLTSILEQLSIYKDKITAIAIESTFNWYWLVDGLMEAGYTVKLVNTAAVQTYSGLKHTDDKDDARWLAHLLRLKILPTGYIYPKEERAVRDLLRKRSQLVRQSTTNILSLQNILARNTAQSLSSYKIKKLDDEQAEKLLDDPNTTLALKCNLNVIRCLQSTIAEIETTVLQQARIRAEFKQLLTVSGIGEILGLTIMLESGDMSRFPKVGNFSSYCRCVKSERLSNGKKKGEGNRKSGNKYLAWAFIEAANFAIRYNDKIKAFYQKKKAKTNGIIATKAVANKLARACYHVLKDQVPFDVNKSFSRW

SEQ ID NO: 436697 - protein, 428 aa, unidentified
MPYKIAGIDVHKRMLAVVVSDVEVDGEYAFERRQFGSNPAQLRLLADWLLEQQIEEVVMESTAQYWKPVWAALERYWTPTCKKREGAGAMSGTQHLAQAQSNRARQGRKNDFADAERLVKRLVANELTLSFVPDPEQRLWRTVTRTKYQLTRNRVQLQNRLEALLEECHIKLSSLVSDLLGVSARRMVKALADGETDPAALAALANYHLRATQEQLRDALGACQELNPVYRRLLKLALEELQLIEKQISQLDQEIADLLRPYQDQVQRLAEVPGLGVDSAQQIIAEVGPIAATFPSAGNLSSWVGACPGDDESAGVSHSHRSPKGNRQMRRLLNQAANAAVKYKGGIFEILYRRYVPRLGHKQTIGVIAHRLCRLIWKILYQGVRYEERGPDVRKKSQRYRAARMIRELQSLGYRVEQANSQSADVPA

SEQ ID NO: 436698 - protein, 412 aa, unidentified
MDVYGGIDWAEDHHDIALVDRDGQLLARRRIGDDAAGLAALLALLAEHGDTPDDPVPVAIETPRGLLVACLRATGRQIYPINPMSVARYRDRHSVAGRKSDHGDSVVLAGVLRTDLHAHRPLPAGTELAQAIAVLARAQQDAVWDRTTAHNKLRSHLREYYPGFLAAFVPVSGGIMRPEARTILAAAPTPADAAKLTLAQLRGLLKKAGRSRGIDTEAARLREAFRAEQMRQLPLVEAAMGRQALALLGQLDAACTAAADLEHAVTESFNLHPDAGIITSFPGLGALTGARVLAEIGDDRSRFQDAKGLKAYAGAAPITRASGKTRSVTHRRIKNNRLNAAGYNWAFSALTASPGARAHYDRRRDDGDRHAAAQRNLFGRLLGCLWHCLITGQDYDETIAFPATAKKISQAA

SEQ ID NO: 436699 - protein, 423 aa, unidentified
MGQWGARGVVSLTDRTSIDGNTKVDKAQTAWAGIDVGKTHHWVCVLDAEGNKLSSMKVANDQTEITATIATVGALADRIVWAVDIIGAPSAMLLALLIQAGQSVRYASGRVVAAMSAAYSGEGKTDAKDAYVIAETARIRRDLTIIDPGTDLVRNLELLTGHRADLIADRVRMINRLRDVMTSVFPSLEREFDYSSCKGALVLLTGYASPERLRRVGETRLAGWLQRRRVRNYAAVAARAIAAARAQSVTLPGQEIAAAMIAELATNTLALDQRLTELDAQIAATLDEHPQTEIIQSMPGFGPILGATLLVAAGDLAAFPSAGHLAAAAGLVPVPNDSGRRTGNLHKPRRYSRPLRHVFYLSAQTSMMRDGPNRDYYLKKRDRGRTHTQAVIALARRRIDVLWALLRDERIYTAIPPTLAQAA

SEQ ID NO: 436700 - protein, 387 aa, unidentified
MVMEAVDQPAEPAPHRPWGVAGIDPHKRTFTVAVLDERGGLHGVASFDTSEQGLAVALAWLGEVGFDLDRVGVEGSAWLGNQVATFLAAAGYDVREVQASRTAERRRRRRRAKTDAEDAQAIARETLAHPDLPPAGKQHAPDPDWEELVALRNQRRSLIAQRRRLLNEAESVLVGLPLVVRAVLPDTSQVRPRLRALTQGAADQLELTGADRVHLAWLAASAADIGRLDQRIGQLDQRIPAVLARHCCTLTEEVGIAAVGAMELLVEVGDPTRFTTEARFARWCGAAPVAVSSGEGDGEPERHRLDLGGNRRVNSVLHTMHITQARCYQPAKDYLGGKRAEHKTAREARRAHKRLLANVIIRRMWADHQRRRSPTLNLSKPTTPKAA

SEQ ID NO: 436701 - protein, 310 aa, unidentified
MGQVFVGIDVAKAAVEVCVRPTGEALAVPRDEVGLAQLVERLTALGPALVVLEATGGYEASVAAALADGGLAVVVVNPRQARDFARSTGKLAKTDRVDARLLAHFAEAVRPPVRPLPTAAAEELGALVARRRQLVDMIRAEKTRAQQARSREVQGRITAHLQWLERELADIDDDTRRLIRSTPVWRETDDLVRSAPGIGDVTASTLIADLPELGHLDRRRIAALVGVAPMNRDSGAWRGHRMITGGRAQIRQHLYMATLTAITHNAAIRVFYHRLVAAGRPKKVALVAAMRKFLTILNAMVRDRRQWKNA

SEQ ID NO: 436702 - protein, 435 aa, unidentified
MEEVEDEPLFCDRVAGIDIGKATVMVTIRVPSEARAKGRQQETREFGTTRRELLALADWLRCWQVERAGMEATSDYWKPVLFTLEQEGFDCLLYQASQVKALPGRPKTDKLDSVWLARITEQGSLAGSFVPPEEIRRLRTHTRYRRKLVQMRTAQKERCEKLLEDAHLKLSSVISDIHGVSGRDMLRAIAAGERNPKVLAQMARGVMRSKIARLEQALDCSFFTGEHAFILTMMLDSIDSLTAQAGVLDARIADMCQPYQRQLEQLDEIPGSGTTTAQDLIAEIGTDMNVFPTAGHLASYARQAPRVKESAGKRKGKNATGRGNPYIGGALGEASISAGRTQTFIGEKYRRLTRRMPKRKAQVAIMRSQLVIAHALLSDPDARYQDLGPDYYERKADIRRRARNHARALERLGYKVTLEAIDPGTGELHLIATAG

SEQ ID NO: 436703 - protein, 393 aa, unidentified
MICVGIDVAKDKHDCFILSSEGKVLADVFTIQNNAEGFDTLLQTIRRCARPADKIKVGLEATGHYSYNILGFLLNEGLDTYVINPLHTNLYRKSLSLRKTKTDRVDARTIAAMLMSDVDLKSYTDTAYHNEELKSLTRYRFDKVRERAKLKQSVSRLVTILFPELEKLVPTLHMASVYALLSEFPGAKQVAGAHLTHLKAVLHDASKGRYGRDMATTFRDAARYSVGSVMPAKSLELRHTIRLIHELDAEIEDIEVAIQSMMDEIQSPITTIPGMGVRMGAMILAEIGDFSRFDSPDKILAYAGISPSTYQSGQLSLSGAYSHMEKRGSRYLRYALYNAAKYVCLWDPVFAAYLAKKRTEGKHYNVALSHAAKKLVRLIYAMEKSKRPYSTAA

SEQ ID NO: 436704 - protein, 444 aa, unidentified
MLRFVGCDVHKRTAVFTLLLEDGTLFARYTVPVTREALTAFAERQLVGEDRLAMEATTNTWAVAGVLRPFVKEVVIGNPLRVRAIAEAKIKTDKVDSRVLAELLRCDYLPKVWQPDPETQRLRRLTHRRAALVSDRTRLKNRLHSILHHTLVPLPEGDLFSRKGLAWLRQVPLAQEEALARDSDLRLLEQTELEIAELDERLVREAWQDEKVRLVMSIPGIDYTVAQTCLAAIGDVSRFANAKKLAAYLGLNPSTRQSGEHCYHGKITKQGNAHARWLLVQAAQHLGQYRGPLGQAMRKMIKRKNRSVAVVACARKLAVLLWHVLKSGEPFRYAPARSLETKYSRLRVRATGQRRRGGVAKGTTRSAQYGHGRTRVVPSLPQVLAQNGLPAVAPLSKGERVMLERKRLDEFYRELQTPSRIQTNTRTTQVEEREENVKSELTQS

SEQ ID NO: 436705 - protein, 344 aa, unidentified
MKLYTALDVSLRWVSICIVDEAGEVRHEAKVAADVDTIVVSLRNFSEDVKMVGFEAGALTQYLAYGLQAAGFEIVCLEARQVNAALAAMRNKTDRNDARGIAQILRTGWYSRVHVKSLASHQIRALLSSRKAILRKCIDLENEIRGLLRVFGVRLASKVPHGAYDAVVREHVESEPLLARALVPMVEARQMLYRTYLKLDNEVKAIVRNDRVCQQFMSVPGVGAITALTFKAAVDDPRRFKSSRTVAAHFGLTPRRYQSGESDNPGRISKAGDPDVRCALYVAAHSLLCRSETWSALKAWGVRLAKTRGHRRAVVAVARKLAVILHKMWIDGSQFRWTSVQASG

SEQ ID NO: 436706 - protein, 428 aa, unidentified
MKNERAESSDASSIQPDAIYVGIDWADAKHDICLLEPGSDKSATTQIENTPEALHEWIAQLLSTYGGRGRICVAVEKARGALLYTLMRYSGDLTLYPLNSKVTGKLRDALRAGGAKNDAWDSRLLAEMVKNFHHLLPVWKPDEEQTRKLAALCEDRRKAVNQRTKLVQELKSLLKSSFPQFLDLLDGDCQSPLAVALLQKWPTLSSMQSARPAAVRRFLIAKKCRRMDRIEQALGQLASARAVTQDPAVIEPAALRVRVLSAQLQVLLPFLAQYDKDIADLFDQHPDAPVFRSVPGAGEAMAPRLAAAFGSDRSRFANATEFSSYCGIAPITKSSGKTTLHRRRRACSKFLRQSLHEFSAASIPFSHWAKAYYQTQRQKGKGHHHAVRSLAYKWIRVLFACWKNSTPYDENTYINTLKNHGVALAETL

SEQ ID NO: 436707 - protein, 340 aa, unidentified
MTAVTFGVDLAKSVFHVHGVDKCGDVVVSKRLSRAQLKRFFTNHSPTRIGMEACAGSHYWARLFAGLGHDIRLIAPQFVKPYVRGSKNDSNDAAAICEAVSRPKMRFVAIKTPEQTSILMLHRVRDRLIGQRTALINQIRGYLAEYGIVVRKGANSMRRELPLILEDAENDIPWAAREMFADLHEELRAVDDRLARQNRRLKAVFDADPQCRKLATVEGVGVLTATAFVATIGDPAVYKNGRQVAAWLGLTPREHSSGGRQRQFGITKRGDSYLRKLLVHGARSALRVTPRRLDRKSRWVERLRARSHENVAAVALAAKNARVLWSLLAHEGSYEPATAA

SEQ ID NO: 436708 - protein, 381 aa, unidentified
MKIPASGTRTRSLLNLPVMNKNNTESIASKKSGNRELADRMLVAVDTHAAYHVVGRQIDSAAPQPTQRVLPQSFVAFALKQLTLAREVHVVYEAGPFGFTLARTLLAHGIKCLVVTPKKLDPYHKRVRTDKTDTRELLADLDRYVRGNTRALRVVRIPTVEEELLRARNRQRDALCRDSARVAARGRTLLLHFGYRVSNMWWKQQAWDRLSTTVPQDILHMLEQYRTVILELQKLIKPLEKTITADAPKALPVGMGKLTFALLLREVLTWDRFKTRRQVGGFTGLCGGVLQSGSTRQDLSITKAGHRRMRTLLIELAWRMLRYQPQCGLVKKWAPRLAACGKNKSRRKQIIVALARQLAVDIWKWQTGRTTPQALGWALGA

SEQ ID NO: 436709 - protein, 363 aa, unidentified
MTVYIGVDFHPYEQSVAYASDEDGEIGYRRFLHSDKQSIRAFYRKCGADAVIGVEATGCLWWFEKLLAGGGQKLKIGDPRMIRRAALSRHKNDFRDAETILDLLMRGAFPSIVPRSEASREVLDLLHYRQTLVQKRTSIANQLQAFARGKGLARFRMPAVKGRRKLVAAPVTEIETLLVTSRLVLFDEITAQMKALESRLEQLAAADERARLLMTHPGIGVINALALVHTLGEVRRFRRKEEVVAFVGLDPLEKSSGQTKRIGQISKHGSRLARHLLGQAAQACRDHRIRKFYLEVSRRRGRPKAKVAAARKLLINCYVMLRDGIDYEEFQRRGEVGLCEGSGEVRAKASVSGGLMARPAISI

SEQ ID NO: 436710 - protein, 407 aa, unidentified
MEVVYRCCCGIDVHKKVIVACLVNGGEQELREFGTTTSEIKTLANWLTESGCEMIAMESTGVFWKPLYNLFELMDLDAMIVNAAHMKALPGRKTDVKDAEWIADLLRHGLLKASYIPNREQRELREITRYRKSLTEERCREVNRLQKILEGANIKLDSVVKDITGKSARKLLQRIIDDDIPDSDEVSKLVHGRMRPKLDQIVASIEGITTPLQRKLLAQIIDHIDDLNRRIGELDKLVQEYMAEYEAAIEAIDEIPGIARRSAEVILAEIGLDMGRFPSAAHLCSWAGVCPGNYQSAGRRKHGKTTKGNKALKTILTQCAKSAKTVKSSYFFAQYQRISARRGKNRATLAVAHSMLIAIYNILKNKTAFHDLGSDYYDSFNRDRKINSYLKRLKALGWEPDAIPSSA

SEQ ID NO: 436711 - protein, 369 aa, unidentified
MKKNSTVKQSPKRAIARKEGPITIGLDLGDKTSRYCVLGDQAELMEGSVATTKKAMAQKFAGMRRCRVAMEVGTHSPWLSRLLTSLGFEVIVANARQVQLISASTRKNDRMDARLLARLAKVDPELLRPIRHRSEEAQASLLAIRVRASLVEARTMLVNAARGFVKAQGDRLPVCDTDALDVEKMEGLPEGLRETLRPLLEQVESLTGKIKESDTKIEQIARTQYPETALLQQISGVGTLIALTFVLTVEDRERFQKSRDVGCYVGLRPKQSESGQSQPQLRISKEGDVYLRKLLVQGAHYILGRRGPDTDLKRWGLKLAERGGKNAKKRAIVAVARKLAVLLHRLWVTGEVYEPLRHSQTARSSTQAA

SEQ ID NO: 436712 - protein, 324 aa, unidentified
MVAPALGIDVSKDRLDIEIAVCGKPRSKCFGNSPEGWGELMAWLKEQNIKQVHACLEATGRYSLGVALALCEDGHIVSIVNLAQIRDFARTKLGRNKTDGLDAGYIREYAAIFKPQPWTPPSPAMRRLGELQTIRAGIISGLTEWKNRCGSGLANDTVLALARATIAHFADQLATVDKTIAQTIDHDRDLSSKRDLLLTISGVGEVLAGLVLAELPGTDILRSSAQAVAYVGLNPRSHRSGSSIDRPTRISKIGNATLRSALYMPALSAMRHNPVVAALANRLKAQGRLKGKQIAVAAMRKLLVLCFGVLKSGKPFDPALAMPN

SEQ ID NO: 436713 - protein, 347 aa, unidentified
MLSEYVGLDVSKEETSFCVKDCSGKVLASGKVASDPQSLFEGLREHCLCPDTIVMETGSLSNWLARELLKLGLKVDVIDARQAHAVLRLQHNKTDANDAAVLADLARTGFCRQIHVKSDEASRMRVLLKAREHMVGQHSSRQNTIRGLLASLGHRLPKGAGKFARRVKAVLENHRDLAVIFDPMLDDMAALQKGIKQLDRAVAAAAKHSAACRLLMSAPGVGPVASVAFAATMDDPVRFAKSRSVGAYLGLTSRRLQSGEMDYSGRISRHGDKMMRALLYGAANSFLSVVRRAHPLKDWARRVKRRSSHKKAVVALARKMAIILHRMLITGEAFKWPQENQKEAASA

SEQ ID NO: 436714 - protein, 343 aa, unidentified
MDMIGIDLHKRESQLCVLSETGMTETRIATSRGRFTAVLGQRPPARVLLEASTESEWVASHIESLGHEVVVADPNFAPMYATRTRRVKTDKRDARTLAEALRLGAFRPAHRLSPARRHIRAELAVRETLVRARTRLVNVAKALVRRDGLRLPSGMVEHVPRRITELAPPPQLAAELLPLTAVMVPLTTEIAAADARITQLGRVDAIITLLATAPGIGLLTASAIVAVADDIARFPSAHHFEAYLGLVPGERSSGDKRAVGRITKAGNSRARYLLVEAAWRIMRSPRDDTAALRAWATRIALRRGKRIAVVALARRLAGITYAMWRDNSPYDGARIRMPRTNTE

SEQ ID NO: 436715 - protein, 348 aa, unidentified
MKNKSFVGIDISKNVIDVSIFREDTNIKMFPHEVFNNTRKGFGDMCSWLKKSRVVLSQALFGMEFTGCYSLDLEKFLTSKNYSFCMLSTRIVKHHPMGTIDKRDKNDSAKIADFLYRYDGTECAKPYKLPSKAMQQLKQLVNERKFLVEQRTNFMNRMQMFETKEDSAMYESYIKKLNHDIEKIDQEECELISKEEDVFDTFQNLLTIPGIGFVNATNIIAITRNFTAFDTARQYARYVGVAPCSHTSGTSVKWRARPSAHCNGQVKADLSMAALRAVEYDVEMQMFYNRKLGGRKDSDTKRKALNAVKFKLIRRMFAIGKQKRKWEVLNTSDDRKNLHIEKSKASEL

SEQ ID NO: 436716 - protein, 348 aa, unidentified
MSQRNQYVGLDVSLKETSICVIDEADKIVWRGRVDSTPKAIASAVKQHSPHAVRIGLESGQLSNWLFQELQAAGLPVICVDARHAKAALSLKVNKTDANDAVGLAQIMRVGWYREVTVKSLDCQAVRALLVARAQIVSQITTLKNSVRGILKTFGRVLPKGLRSQFPVRVRAAIDGHPVLEAIIEPTLRVLEAARAQLLVYDRAVIQRARSDSTARQLMSAPGVGSVVVLAYITAIEDPARFKRSSSVAAYFGMTPRRYQSGEVDYAGRISKCGDGMVRCLQFEAAKVLLSRSARPSALKTWGETLGKRVGAKKATMAVARKLAVILHRMWTTDTTFQWSAEAGSSAA

SEQ ID NO: 436717 - protein, 470 aa, unidentified
MSKKLFVGIDVSLKSNQVCLMDHDGSVMGKSLSFDNNLPGTLAMVEHLNSVLSNGDFEKLTIGMEATALYWFPLFNFLNNSSRVFVEKEAEIIPLNPKVVSHFRDAYTDMDKTDIKDSFVIADRLRFGRVHSGRIPSVDFLALQRLTRFRYHLVQYESRLKNYARSFLFLTFSEWNRVKAFSDVFGATAKKLLKKFCSAQELSELSIEDLKELLNEFSKGHFKNLDEKARLVNQTVKDSFPIPPELAEQVHLLIKQTLQQLELLEKHIARLDKKIEKLMNKFHNPLMSIKGIGPVLAAGIFAEIGDISRFPGQAQLAKYAGLTWRKNQSGNFNGDITPLTKTGNPYLRYYLIQAAQCLVNHNPEYREYFTRKFNETPRHPHKRALSLTARKLVRLVYALLSKNQLYLAKERQLAKDREVNSASVPEVQAEVLEVSEKTAAKKVKTQRLPHASRTLPCGQEHMRGRRAVNT

SEQ ID NO: 436718 - protein, 338 aa, unidentified
MYYTGIDLHKFSSYLTTVDSSGAVVKQENLKNVAHNFVQYFNSIPGEHQTTVESTMTWYWLNDLLTSLKIPLVLAHAKYVKAIAYAKVKTDKVDSHTLAQLLRMNFIPVAYKISNDKRTLRDALRARLKIVQRHTSVTNSMHLLLAKYNYDSPTQLTGIPQFQYEQLSEVEALLDEQMLDLEKQLYPFLIPNDDIQRLLWIPGIGKMNAFTILLEIDNINRFPDVKNFFSYCRLVPSARNSGGKSKQRSSKDGNKYLKVAFSDAAIHAVQYYPVIRKYHNSLLRKKNKNIAKTIIAKEIAEIVYHVLKNKSNFNNKFRGQELQHKKSLQWPRVVNPYA

SEQ ID NO: 436719 - protein, 346 aa, unidentified
MKIVGCDFHPSFQQVAILDISTGEVRELKLMHATGEAERFYRELESPVLIGMESMGNSLWFERLMEQLGHELWIGDAARIRASYVRRQKTDKRDAGHILTLLLEKRFPRIWVASNQERDQRQLLLHRQRLVSMRTRVKTELQHLALNQGLQKKRSLWSARGRADLEKLPLEGWTKRRRMDLLKVLDMLEGQVTELDEAVGKVAFANANARLLMTQPGVGPITALAFVLTIGDWSRFKRGKQVASYLGLIPSERSSGQKRRLGAISKQGNVFLRTMLVEAAQSAVRHDEQFKKEYAHRCHQKPKGVAKVAAARKLAVRLYWMLRTQTPYARAVHNEGSPSHPVVGAS

SEQ ID NO: 436720 - protein, 582 aa, unidentified
MSAATTLYLIGVGIDTSRLGHRVSFMRPDRQPAAKPLTVLENQAGYHALRERLEQLHRQHPHAQLNVRIDAAGQYATNLECFLRGLDLPLSISIGEPKRNKDYQKAHFPKRTSDDTESQAMARFAVVEQPAATPAPAPQFVLLREVAGRLQAQVKQTTQATNRLHNLLARVFPELATLADDLSAGWVLALLDKYPSAERIGQARLASLQKIPYLPADKAQALQHAAQQSVGSLRGPIAETLVGDLVAQLRQREQTEHKMRQLLIAAHADLPAGGHRQLVTIPGIGDATAAVLTAKIIDMDRFGTPENLVGFFGCFPDENSSGVDKFGKPLPAGTLRMSQKGNDLVRHYLWNAARSAICCNPAIRALYRRLRAKGKRGDVAIGHCMRKMLHLVFAVWKTNRPFDEKHFAWEQPSDTPVSTTTPNPSTVATLPNETAVGHKREIPAKQVVTTATPSVVPAPASGNPPTSRSATAARPRVDYAFLRQQITLEQVLTHLGLLTQLRGRGQQRRGPCPVHGHPTDREPTFSVHLGKNVFQCFQKDCAVHGNVLDFWATFHRLPLYDAALSLAATFHLPRNREEEPVK

SEQ ID NO: 436721 - protein, 419 aa, unidentified
MTNHAAEHLATIPAGTLFAGIDLSLDDLVVVVLNAASVQLDRFRADNSASGYEQLQQRLQRTVEKHQASGVWVGMEPTNYYWKQVGYDLECHQIPFRLVNALTVKRHREGDHLDRSKDDWRDAFTIADLLRTGKFTETQLPRGVYAELQTGYTAYQRLRRDRGRQATLLITTVRQLFPEFEQIFINISTGTASAVIRAGLEPHVICAASENVYVASVRSHYTGKRFQEARVRRLHALAAHSQGYPEATTALRLMAQQQIETIQVLDQQAKQLLQTLLVLFHTLPEAPYLLSIQGLPAPSALGLVAYTGDLRQYSHGSALIKLAGTQPTPNLSGRKTYSMTPFSHQGRSGLRTVAFFITLRLLTRNEAIQYHYHRLTTRTEHPLPKMQAVGACMNKLLWYVWHVANRREQYDCTRWRSLR

SEQ ID NO: 436722 - protein, 422 aa, unidentified
MRFYTRQHKHSCGIDLHARTMYLCVLDQTGAVLLHRNIPCDPVVFLDTIAPYRDDLVVAVECIFTWYWLADLCARETIPFVLGHALYMKAIHGGKAKNDKIDALKIATLLRGGMLPMAYVYPRDLRATRDLLRRRLYLVRKRGQLLAHIQNTHHQYNLPEPSRKILYKVNRDGLAERFADPAVRRSIAIDLELVDHLDRLIRDLELDLVRTVKVHDPQTFFRLKSLPGIGKILSMTLLYEIHDIARFPRVQDFASYARLVKCARESSGKILGTGGRKIGNVHLKWAFSEAAVLFLRANPRAQAFLQKLRRKHGKAKALSILAHKLGRASTSCSRGKPCSTCTSSWRPDGGERVSPMPNSSRGGRADSACRASISVWCRDRRPATSPRNEVRDDDGRRRPSTEQTRRALGRRVPVDQRGPYKC

SEQ ID NO: 436723 - protein, 448 aa, unidentified
MSKSKTKKEEVKMISRLTVINPTAAGIDVSDSEMMVAYPVNSERLEIRVFGCFTRDLHSIARCLKANGITSVAMESTGVYWVALFLLLQEYGFEVCLVNAKHAKNVTGRKEDESDAEWIQKLHSCGLLRASFQPDNMMRTLRSMVRHRKNLVRTSSNYINRMQKALELMNIKLHTIISDIDGKTGLLIIEAILAGERNPEVLADLRDKRIKASREEIIKSLEGYWTKEHLFELRQCYQLYCAHREMIRECELEIEKQLIEQIASINDGVIPSIPIKKKKTSGKHKVPFNLTGYLKSILEVDVTQVFGISEISALTIMSEVGSDMTKWKNEHHFTSWLGLAPNTKKSGGKIISSRITKKKHHAGQAFRIAASSLYKSYTPLGDYYRRIKSKAGAGKAVVATARKLAIIYYKMVANKEAFNPQALEQYQQKYKEKKINQLKKKIALLEAA

SEQ ID NO: 436724 - protein, 369 aa, unidentified
MVPTMPKRIALSNPDRAGEPLLVFGGVDTHADTHTVAAISHLGAMLGHQSFPATAKGYRQLYGWLADHGTLMRVGMEGTSSYGAGLAAALTGHGVELVEVNRPARTTRRARGKSDPIDAEAAARAGLAGVATAVPKTHTGVVEEIRVIFVARRGAVQARTAAINTLHQMIITAPLQLRAQLQPLTRTQQITGCAALHTGDITSPTRATKLALRRLARRIGHLTAEITDATNDLTTLVQAHAPHLLTQVGVGSLSAAQLLITAGDNPDRMTSPASFAALCGTSPIPVSSGKTNRHRLNRGGDRQANCALHTIVLSRLRYHPETQAYAAKRQTEGKTERDIRRSLKRYLARRLFTLILTASQATDNTLIAA

SEQ ID NO: 436725 - protein, 391 aa, unidentified
MIYIGIDVAKDKHDCFITNSDGEVLFKAFTISNNLDGFNELYQKIESVMDDVTKVKVGLEATGHYSYNLLGYLIDKGLPTYVINPLHTNLYRKSLSLRQTKTDKVDARTIASMLMSDVNLKSYSDTSYHNEELKSLTRYRFDKVKERAKLKSSVSRLVCILFPEMEKLVSTLHTASVYTLLEEFPGAKQVARAHLTRLKSLLETASKGRYKRDMALEIREAARNSIGSRMPAKSLELQHTIRLIRELDTEIVEIEEQIQSLMDELASPITTIPGMGFRMAAMILAEVGDFTRFDSPDKLLAYAGMSPSTYQSGQLKNCYPHMEKRGSRYLRYALYNATKYVCRWDPTFAAYLAKKRAEGKHYNVALSHAAKKLVRLIFAMEKSRRPYCLAT

SEQ ID NO: 436726 - protein, 421 aa, unidentified
MRGVRSKKVKAVKEGTLIVGVDISMTSNTGYCTTTDGRDTKPFRFDNTREGLDKLWSIIVMSKKKFQCNEVIVGYESTGPYGEPFVHYLMKKPVTVVQVNPMHTKRLKEINDNSPLKTDDKDPRVIADVIRLGHALSVVIPEGDAAYLRRINNTRERHINERTALLNQLQQLVFLLFPEFKIVIKNIKIKTALHILKKYTTPDTIGELHKEELGEEMRKKSMGKYGITHAESLINHAKNTIGIKEGVTGLALDIRHILMQLEMIDGFIAEIEIEMEKVLKRIPYSSRLLSIKGLGIATVAGLIGEVGDFTKFNTQSEITRLAGLDLYEISSGIRKGQRRISKRGRSLLRKILYYAAMQTIRKNGIMHEYYTRLTDRGMKKIMALVAVSRKLLRIIYAIVRDESEYAVDYESLKRKVIKKAA

SEQ ID NO: 436727 - protein, 392 aa, unidentified
MEPVIGLDVSKGSSVFQAFTGRNEAWGETEVMVHEAKGFGRLKACVEQLQEQTSQEPVVILEATGHYHRGLVNFLVQQGIRHCIVNPLQSKRARGTKLRKVKTDAADAWHLAEMYYRGEILPHRTPEDVYTELQHVTRQHEFVTGLYVQAKLNTRALLDQVFPAFEGIFYNLYSETALRVLECCLRGQEDRVYETMEKTAGQSHAKWWVEEKAQRVEEALSEWHQVKVSSSQVYILEGMLSLLHSLQEQLKRLEKQMQELSMGMPETELLRTIPGIGEKLAATLVAELGDIRQFESPKQLVAYAGLDPGVFNSGKFTASSNRITKRGSKRLRRALYLAVQCSLRRGDCSKLRPYYDKKKKEGKPYKVAVIACANKLLHHIYAILRKGQPYQV

SEQ ID NO: 436728 - protein, 348 aa, unidentified
MIAIGADVHKRRCTLAMLGEDGQLRMLPSMENTRENWLELLTKLPPGAEIALEVSTSGHFVMSVLEEAGWRERAHWVHTAGIDSLKKQKYDRLDTKRLARKLSVAERDPLPEAWFPPAPIRELRLRARQRCWTAVGRAQCRNRLSSLLQMYGLQPAGSAFTGRGRAWLEKQKLPAAARECVERTLRLHDFLEAERESSEASLVTASASFAEIAQLKTIPGLGHILAAVIWSEIGDLGRFASADALVNYTGLAPSLYESGEVSVHGGITRQGPVWLRWALITGANVVTRSKGPLARRYWRLRRRKPPNVAKTALACSMARCVYGVLKHGGAYQEARWGRKAGIEMKQEA

SEQ ID NO: 436729 - protein, 317 aa, unidentified
METKQVVESFVGVDVSKGALDVCIEPLGQSLHVGNDDAGVAQLCKRFKEVSPALIVMEATGGLETRLASELAACGLPVAVVNPRQVRDFAKACGQLAKTDRVDAAVLCAFAKGIRPPVRTLKDGPTRELNGLVTRRHQLVGMRVQESLRLNSAPSGALQKNVKKHITWLSKQIAQIDDDLSTRLRQSDAWRIKDDLLQGIPGVGAVTTSTLLAKCPELGQLNRHEIAKLAGVAPLANDSGKHHGKRHVWGGRADVRTTLYMAALSAKRFNPAIKEFADRLQRAGKPAKVVTVACMRKLLTVMNAMLKNNSPWRPKVT

SEQ ID NO: 436730 - protein, 358 aa, unidentified
MITQANGKVDKSIRTFATTTAALLALADWLASLQVSYVAMESTGVLWRPIYNVLEDQFELILANAHEIKALPGRKTDVRDCEWIADLLRHGLIRPSFIPAKPVRVLRDLMRYRKSLVYQHTQQINRLHKVLETANLKLTSVVSDVWGKSGQSMIKAIMQGESDAQALTELARGTLRGKLPQLQEALEGRIQPHHRVLLQQIFAHLQFLESSMQQVLKEIEAQMDPYQEVVELLMTHPGVQAVAAMGVVWEVGIDLSRFPSAKHFASWIGVCPGNHGSRRQTQTWENHQGQCVSARVIGRNRLGDKSYQRQLLIGEVTSVSSSHWQNQSDRGGLSHRCRELLSYDHQASSVSGAGSELF

SEQ ID NO: 436731 - protein, 440 aa, unidentified
MNPFSVSSPPSNVAAWVGLDWADQQHVVCLYEVGTGQTELSCLEQKPEALQSWLGQLRQRFEGRPVAVVLEQARGAVIYALLSVDFLVLYPVNPQSLASYRKAYATSGAKSDSADAVLLMEMVRNSPQRFRPWTPDDADTRSLQLLTQNRRQLVDQCTAFTNQLTGWLKSYYPQALELAGELDSLQACDFLEKWPTLEALQQARPAQIRKLYLDYGKPRPESLQQRLEQIRQARPLTTDPAAVLSGTMMVRALIEQIRPLLATLERFDQQIAALFRKHPDRLLFESFPGAGAVLAPRLVAAFGTDRDRFESAQDMQQLSGIAPVTEQSGKQRWVHWRWACSKFLRQSFHEFADHSRKWCGWAKALHQRLRRSGKGHHAAVRMLAFKWIRILFHCWKTRTCYDEQIYLKSLEKRNRTLWAETQALPPRKRKWPKGKSVENL

SEQ ID NO: 436732 - protein, 330 aa, unidentified
MTNVSELTTEALFVGIDVSKDTLEVALGENAKTQTFGNDQAGVAALLDQLKPVARRIAVVLLEATGGLEQVAAAALCAHGFAVIVVNPRQAHAFAKALGHLSKTDSIDAKALAQFARTLHNSDKRERLLYRLPTPEQELLLAMVTRRAQLIGMRVAESNRLASAHVSQRKSIERHIKILDKQIGQIDDDAQRHLRSHFQDKLALLKGLKGVGVGTQTMLMAALPELGSLKQREISKLVGVAPLNCDSGKFKGKRITWGGRSHVRAALYMAALTASRHDPVIKAFYERLTLAGKPKKVALVACMHKLLTIMNAVIKSAQPWQASYPQPNNV

SEQ ID NO: 436733 - protein, 397 aa, unidentified
MYENTFLGGVLMIYIGIDISKYKHDCFIATETEEHQFSFENSQSGFNELLGHFKPLVKQEMIIGLEATGHYGENLKSFLTLHGYSFMEINPFLVKKFSEAHSLRKTKTDKKDAHTISTYMRSVDYKAYHHQSYHISALKSLTRLRFKLISDRTKHYNMMTKVLDVIFPEYKPFMREQGYSETTLYILKHFSSSERIAKMNDVHFDKLRKLSMGRFNYPKFVKLKELAKSTIGVTQDHHLFKLKTSISYVEKLNRDIDETEKRITSLMDRYPTKIQTIKGIGIISAAVILCEYGDITLFSNPAEMLSYAGLDSTIKQSGTMSSTGKLVKRGSKYLRATLINVCMMVMIYNPVFYVYYTKKKQEGKHHRVAMVHLAKKLVRVIHHLETNHVDFDSSKLI

SEQ ID NO: 436734 - protein, 343 aa, unidentified
MAYFAGLDVSVKETSVCIVDDAGKIVREARVASEPEALLQVLTNTIYRLRRVGLEAGPLSQWLYSVLAEAGLPVICVETRHMRAVLKAQINKTDRNDARGIAQMMRVGLYRPVHVKTLRSQKLRMLLTHRKLLQSKAIAIENDLRATLRNFGRKVGMIGTGKFETRIRELVESLPDLAVMVEPLLIVRRVVREQLGVLHRRLLAVVRDDDVCRRLMTTPGVGPVVALTYRVTVDVPARFRNSKAVGAVFGLTPAKYQSGENDRTGAISRCGDEMMRMMLYEAAQIMLVRSAKWSWLKAWAMKIARHRGMKKAIVALARRLAVIMHRIWVDGTEFRWTREVAAT

SEQ ID NO: 436735 - protein, 409 aa, unidentified
MNISTLFVGIDVSKASNTVRFMDGAGETLSLFDIPNNIEGADKLHEKLRHKLLHTDFSKVTIGMESTSTYADHLAAYLRHDEFLQKWECEVYVINAKNIKNFKKSYPELPKTDSIDTLIIADYLRFGRLQKSVCHDEKYLALRNMTRARFQAAQNLSREKTRFLDTLFLKFSSLQSEKVFSNTFGATSLAAICDFLSVDEIIYTPITELTDFVNKKGKGKFANPEAVASALQAAARSSYRIPKTVNDSLNQLLAIRLVGIRAIESQVKSLDKAIESFMAAFQNVLVSIPGIGPVYSAGLMAEIGDVHRFPGQASLAKYAGLAWKRHQSGEFEAANTKMITTGNKYLKYYMLEAANTVRMHDTEFADYYRIKFREVHKHQHKRALALTARKLVRLVYSLLSTNRLYVPRW

SEQ ID NO: 436736 - protein, 339 aa, unidentified
MKLYAGFDLHSRSSHLAVLDQEGKKVFKGKLDNDPQLMTLALEPYREGLVAIAVESTFNWYWLVDALMETGYQVRLANPAAIQKYKGLKHSDDSSDAQWLAEMLRLGILPQGYIYPREHRPVRDLLRKRMHLVKLRTSLLNSLENIIARNAGVSLPAKKIKQLTCDHVAPLLDEDDDLALCGQVSKEAIDYLTRQINKVEKVVERKVPLKQEYTLLKTIPGVGIILSLTITLETGPIDRFPQVGNYASYCRKVPTRWLSAGKGKGKGNKKNGNKYLAWAFSEASEMSRRFDPKIKAYYDRKASRTNLMVAHSALAHKLCRAAYYIIRDQVPFDSDKLFA

SEQ ID NO: 436737 - protein, 422 aa, unidentified
MNQLSGGQFTACVGIDWADAKHDICLQATDSEHREFDCIPHKVDRIEQWALSTHKRFGGPIAIALELSKGPIVYALQKYDFLVLFPINPSTLAKYREAFTPSRAKDDPTDAELALDLLLRHPDRFKPLAPQSAAMRTLVTLVEQRRGLVNDRVRITNRLRNALKQYYPQMLEWFEHIDTLLFCDFLTRWPTLAQAQRARQSTLERFFHAHNMRFSHVLDTRVKAIKAATPLTMDAAVITPHRLHALVLAEQLRVSLQAIRRFDDEIAQLAPTHPDYALFSALPGAGPSLAPRLLVAFGEQRNRFSSAAEVQMYSGIAPVTERSGRKHWVHWRWQCSTFLRQTFVEWAAQTINKSFWAGAYYRQQREKGCSHRAAVRALAFKWIRILFRCWQARTPYNETTYLNALKRRGSMLLNSPPVAEIA

SEQ ID NO: 436738 - protein, 412 aa, unidentified
MEGETVIAGVDTHKDVHVLCLLDGLGRKIWSGSFGADPEGYDRLAEAIGDPGSCMVVGVEGTASYGAGLTRRLVELGYNVVEVLRPKRDKVRPGEGKSDPLDAERAARKAASGRGCSVPKSQDGWVEAVRQLYVARRLAVATSTSCVACAKSMLTTAPSALRERFRGRERPKDLMPLLARGRKAGDALEESVLASLRSVAAVWKEARSQVESLDERIRALLEANAPALLGVEGCGTTTAAALVVAAGDNPGRLKGEAAFSMMCGASPIPASSGKTDRHRLNRGGNRQANWALYEIAIKRMAYDERTRRYVARRTSEGKSRREAVRCLKRYIAREVYHVLMDPNPDGAAPEGPELAKMRKAMRVTQKKAAAELGLSAATLGHLERGKRRSTKLERRYYELLCELKRTLPQTAS

SEQ ID NO: 436739 - protein, 380 aa, unidentified
MKKHRYVGLDVHKESISIAVAEAGRRGEVRDYGRVGGSLIAVERALRKLKQSEGDKEVQLHCVYEAGPCGFILYRRLKQIGIDCAVVAPSLIPRKPGERIKTNRRDAIKLARSHRAGDLTPVHVPDARDEAIRDLCRARTDAVRDQRRSRQQLKALLLRLGYRYTGKSSWTEAHLRYLRELEMSHPAQKAVLEEYLIAISQAGERIARLSTQIELHVASWRMKGAVEALMAMRGIQLIAATVLISELGDLRRFAHPRQLYLGLVSREESTGDRQHRGAITKCGNTHARWFLIECAQHYALPPKVSKELSKRQEHQSQGIKQLSWKAQIRLHRRFFALMQRGLCRQKVVVAVARELSGFIWALLRQVPLDLGNHGSPNPSS

SEQ ID NO: 436740 - protein, 468 aa, unidentified
MPRARAHPHHRGRGATLPPELRRINLNAAGIDIGAASHYVAVPEGRDPEGCDVRAFGAFTADLYVLADWLTRCGIETVAMESTGVYWVPLFELLSARGFEVRLVDPRQLKRVPGRKTDVLDCQWIQQLHTFGLLAAAFRPDDQICVLRSYLRQRAMLVTYTAQHIQHMQKALELMNLKLAHVVSDIAGLTGRAIIRAILDGQREPRALARLRDPHCKADAETIARALEGTWRPEHLFELRQAVELFEFYQKQIAACDQQIEAQLTQFADKRGGQPLTDAARRRKARRTALSFDARQHLHRLTGVDLTQIDGIDAPPALTVVAEIGLDMTRWPTEKHFASWLSLAPGSKVSGGKQSSGRTKPSASRAAAALRLAASSLYHSRSALGAFHRRLKARLGAPKAITATAHKLARLIYRMLRFGTDYVDRGQDYYERRYQGRVISNLMRRAQALGYTLTKNESSPPTSSPAPA

SEQ ID NO: 436741 - protein, 416 aa, unidentified
MDTMYERCCGLDIHKKTIEACFRSGKKKTHMSFGTTSAELRKLTMWLVENDCQSVAMESTGSYWKPIFNILELSGTDMEIIVVNARHMKNVPGRKTDVHDAEWIAELLQYGLLRPSFIPDREQRELRELSRYRKSLVGERAREINRLQKMLEGGNIKLTSVVSEVTGYSSRRLLDRLLRSDEPMTEEVISELVHTSLVGKSKELGIALDGLLSELQKELLIKVLDHIDDMSRRIADLDDFCRKQMKKYEDALDKLDEIPGIARRTAETILIETGLDMSRFPTAKHFARWAGLAPGNNESAGKRSSGRTTKGNPTLKSTLIQSAKVAARKKDSFFKARYQKIAARRGANRASVAVAHSMLIAIYHILKSGERFKDLGEDYYNQFNKEKKKKYYLKKLTKLAVNLKEATLFISIQAAT

SEQ ID NO: 436742 - protein, 393 aa, unidentified
MICVGIDVAKDKHDCFILSSEGEVLADVFTIPNNAEGFDTLLQTIRRCARPEDKIKVGLEATGHYSYNILGFLLNEGLDTYVINPLHTNLYRKSLSLRKTKTDRVDARTIAAMLMSDVDLKSYTDTAYHNEELKSLTRYRFDKVRERAKLKQSVSRLVTILFPELEKLVSTLHMASVYALLSEFPGAKQVSEAHLTHLKAVLYDASKGRYGSDMATTLRDAARCSVGSVMSAKSLELRHTIRLIHELDAEIEDIEAAIQSMMDEIQSPITTIPGMGVRMGAMILAEIGDFSRFDSPDKILAYAGMSPSTYQSGQLSLSGAYSHMEKRGSRYLRYALYNATKYVCLWNPTFAAYLAKKRAEGKHYNVALSHATKKLVRLIYALEKSKRPYSTAA

SEQ ID NO: 436743 - protein, 440 aa, unidentified
MQSRLERRCIGLDVHREFAQVAIWQGGVVRQAGRFPATPEGVRAFAQGLGPADEVALEVTGNTWAIATVLASRAGRVVVSNPAKTRAIAEAKVKTDKVDAEILAQLLAADYLPAVWLPDAATSALRRQVLRRAQLVRQRTRLKNQVHAILHRNLIPRCPAADLFGHKGRAWLADQDLPPDEQAAAVALLRQLDFHAQELHLLDTDLGQVGLSRPEVLRLMTVPGIDATVALSIVAAVGDFTRFRTPEKLVAYLGLNPKVRQSGGQPARHGRITKAGAAHARGMLVEAAWSTSKAAGPLRAFYQRVQARRGMHIAAVATARKLAVLCWHLIIKGEDYAFAQPSLVAHKRRKLELRAGHASARGRKGTASGYSLTAVRTAERQLAAQAETAYRTMVAAWQPRKPTTPTRASKARAAGSAVSVAATNGARLFSPSSGNAARQG

SEQ ID NO: 436744 - protein, 321 aa, unidentified
MTYIGIDVSKDSFVAAYPAKSGYTTKSFQNTASGVHKFISSLPNECHCVMEATGNYSMLLLYLLQEKGIPASMENPQKIKHFARAMLSTTKTDEIDAKLIALYGEKMNPASYKIPSESVLLLKQKRTVLRQLKKQLTMMTNMQHSFAALPKQDPASKVALEQTIKFLRKQISKLEEEITNISNKEFRRQMALLTSIKGIGDEIASALIIATGGFTYFSSAKQISRFLGLCPTYQQSGTSVNVKGHINRNGDTYLRSQLYIAAVSSIRFNTACREIFERLKANGKSGKVAIIAVANKLIRQAFAVVTNNRPYEDGYVSSLAK

SEQ ID NO: 436745 - protein, 465 aa, unidentified
MLITRGFGHHMQLRIILLFRLHQSKIGKERDNMIKINYLSTLFVGIDVSSKSNVVYAMDFDENKFISSSFSNNQPGADELAGMIHDCMVHHPNLNTIIVALESTSVYSIHIANYLSSCETLMPYKPYVYCLNPKATANYRKSYVAMDKTDPLDAYLIADFARVGRTKKCEPWRGGQFLALKRLTRHRLHLAECITREKTYMVSNLYLKFSELQLLDGGNQPFSNIYGSTSSAVLTEFMSLQDIIDSTEEELLQFLAKKSRNRITDISRTSDLLKKAASDSYRLDKCMYEPLNVSLASSFHCIQTYQKEIKLIDQAIEKCIRGMNPNALTILKSIPGIGPVWASGMIAEIGDISAFHSSDALAKYAGLTWPKSDSGDFTSEDNHISKAGNTYLRYYLGEAANSVRRHSCEYGEYYLKKYTEVTKHQHKRALALTSRKLVRLVFGLLAKNQLYTGEKLDAELHTESN

SEQ ID NO: 436746 - protein, 347 aa, unidentified
MTIVEAARAVTGGVDTHLDVHVAAALDSVGALLGTEAFPTTPAGYQALLSWLESHGEVAKVGVEGTGSYGAGLSRFLARAGIIVVEVNRPNREERRRSGKSDPLDAIEAARSALAGKAKSIAKSKDGAVEAIRALVVAKRSARVARTAALTQMRHLIVSGPDHLRSRLRGLNVHHLTAEAARLRPSRHGELVLAATKAALSSLAHRVQGLDDELAELDRRLEALLEDLCPDLLGLFGIGPDTAAALVVCAGDNPERLRSEPAWAHLCGVAPIKTGSGQTSGRVRFDPAGDRQANAALWRIVMVRIAHDPETTAYFLRKVKEGRSKPEIIRVLKRYVAREVYRYLPRG

SEQ ID NO: 436747 - protein, 341 aa, unidentified
MNEISIIGLDLAKNVFQIHGSGPDGRVALRKKLNRGRLLEFFAQLPICVVAMEACASAHYWGREIGKFGHEIRLINPSYVKPFVKRQKNDAADAEAIAEAASRPTMRFVSVKSAEKQASSMAFKVRDLLVRQRTQTINALRGHLMEYGLIVPQGIKHIPLLHEQIATNPDLPEVARVLCKGLLEQVVFLSEQIAVLEKELRTRARQDELASRLMTIPGVGPICATAIEALAPSAETFSRGRDFAAWIGLTPKQNSSGGKDRLGKVSKMGQRDLRRLLVLGATAVVRWARRYGAPAGSWLARMLLKKPPKLVAVALANKLARTAWALMARGGVYQAPASGTV

SEQ ID NO: 436748 - protein, 318 aa, unidentified
MPPAASVFVGIDVAKAELVMAIRPSGERWTATNDDAGIQRLLPRLREAAPALVVLEATGGYERAAVAALAAAGLPLIVANPRQVRDFARATGQLAKTDRIDADTLALFAERVRPDPRALPNESAQALDALLTRRRQILGMVSAERNRLEHAVPAVRRGIVQHIRWLERQLHDVDDDLDRTIQASPAWRAKENLLRSVPGVGPVVSRTLIGDLPELGTLPGKQIAALVGVAPLARDSGTLRGKRLVWGGRAPVRAALYMAALVATRRNPVIRAFYQRLLTAGKPKKVALTACMRKLLTILNAMLRANTVWRHTAQTATT

SEQ ID NO: 436749 - protein, 378 aa, unidentified
MGGDSTVVGLDTHKVAIHVAMLLPDAIQPVQWQIANEPAAVRHLARKLRRAAEGEVRCCYEAGPCGYALQRQLEAAGVSCTVVAPSLIPVKPGERIKTDRRDARKLAELFRAGLLTAVAPPTAAEEAVRDLCRAREDAVEDRLRARHRLGKFLLRRGLIWRGGKKAWTQRYRDWVRGLRFEDAADQAVVATYLLAIEQVEERVRTLEGQLEAVAQAEPYRERVGWLRCFRGIDTVTAVTLLAELHGFQRFTTPRALMAYLGLVPSEHSSGEAQHRGGITKAGNLHARRLLIEAAWHYRHPPAIGKALRQRRQGQPARLLAVADRAQQRLHRRFSRLSARGKMANKVVVAVARELVGFIWAALTPAAAVRTPRRAARTA

SEQ ID NO: 436750 - protein, 390 aa, unidentified
MFYLGIDIAKNTHIASLLDNNGNTIFKAHSFSNSVKGTDSLLERLEKYSINDILVGMEATGHYWLSVYSYLLEKGFNIIVINPIQTDGWRRATEIRKRKTDIIDSIMIADFIRYGNYETTSLADEKYLNLRNMTRFRHYLIEQTSDLKRKIIANLDQVFPEYSSYFSNIFGQTSKEILLNFNTAEDFKNLKAKDFKKVLKNITLKNSASIKLNNLKEASKTSFGINFALNSYSIQIKCLIEQIKVIETQIELLENEIELIVKDLNTPILTIPGIGPITGATILAELGDINKFSSDKKIVAYAGLDSTVNQSGESNGQHGHLSKRGSSHLRKALFQAAFIACTNDTIFKDFYDKKRIEGKHHLVAVNAVARKMCHIIYAVLKKNEPYVEQR

SEQ ID NO: 436751 - protein, 320 aa, unidentified
MEMTQDGYSLVVGIDVSKAKLDIAWGSNGPLETIDNTNKQIAQLLINKIEDPANTLIVMEATGGYESRLVDLLHESNLALAVLNPRRLRDFATGVGYDAKTDPIDAKLISFYGQVVKPRPHAAQTDDEKKLEALVTRRRQLLGLINQEDNRLQQTRDPEIQQFIRESLKTLKKQLKQIDSLLARSVEADQKNARKIEILRSVKGVGPVSVSTFIAELPELGTLNRGQISKLVGVAPMNNDSGQKTGKRKTSGGRSSVRRVLYMATLVAVRFNPRIKAFYVRLLAAGKPKKLALVAAMRKLLTILNTLIKKDQLWIDRTTT

SEQ ID NO: 436752 - protein, 346 aa, unidentified
MMIIGCDFHPSWQQVSWLDTATGESGEAKLVHASGDAKSFYQQLAVPALIGMEATGNSQWFIELVQDLGHEIWIGDAAQIRASYVRKQKTDKRDAAHILKLVVEGRFPKLWTPDREQRDLRQLVLHRHKLVEIRSRVKNELQHLSLNKGMQRKAKLWSQAGQKLLRELPLKPWAACRREDLLELLEMLNQQMGKLDQAVQLAADEHPQAQLLMTQPGVGPNTALAYVLTIGDVRRFQRGKQVASYLGLIPREESSGGRQKLGAITKQGNRLVRSLLVEAAQIAVRFDPGMKKQYLHRCHRKPKGVAKVAAARRLAVRLYWMLRTEKPYPEIVRIESSPRVALVGAS

SEQ ID NO: 436753 - protein, 427 aa, unidentified
MISASIERCAGIDVGKKFLAVCVMVGPLEGEPRVEIRKFGTIRAELDGLRDWLKQEGITHVVMESTGSYWKPVFNVLEDTVKVYLANPQEVKNRKGHKTDNKDGWWLAHLLRHAMIRPSFIPPRAIRELRDLTRRRKRLLGAGTSERNRVQKVLEDANVKLGNVLTDLFGVSGQLMLEALLRGRAKPEEIAQFAKGRAKKKIPEMIAALEGHQMSDHHRRMIRYSVDHMRFLEAQIEQLDKDIAERIREAGLEPQWQLLQSVPGIQETSAAAILAETGEDMTRFPSEKNLSSWAGICPGNNRSAGKNRSSHTTGGNRWLRGTLTECAWAAAAKKNCFIKDKFWRITTKSGGKKAPAVVAIAHTLLILIYHVLRTGQPYQDKGLPVLDQGQKQRLIRHHIRRLGKLGIAVCSSRPGSPATAASPPTGT

SEQ ID NO: 436754 - protein, 468 aa, unidentified
MRPYSIIPGTLIVALDIGKNVHWFGCFRYDGRLTEVVAPRKVRSDTEGFAHFVAVVDPLRDSGHYPAALIGNEHTGHYHEPWAWLIDQHFSSHTQPDAACPVTYRWLNPLLTKKRQEETSVRQHTTDRTAVLAVAQCLADGLGHPAHLLTGTDAQLRELVRSYDQVSRQLRYLERQIIAQVDRLWPGAIANVAQFRKAHPDLPPPTPIVETHPLERDRLAVLLRFCPNPYDALNLGADGLIRLFHDHHYRAGPKTVAAILAALRHSPLPPKDVAACYAARLHADYQRFSTWLAACQQLADQIAALVPTTDARFLVSVPGIGPLLAASYLAYIGKAAFFPSANQIWALAGYDLVTEQSGDAVRIGHITKRGSPALRDTLFQIGFHAARRCPPIGETYLAARQRGLRETAATIHAAHKANRLCFTLLREQRPYTPASPAQEAQFQKHWRSFQQRTATQRQHQEARMRIAT

SEQ ID NO: 436755 - protein, 343 aa, unidentified
MQTITTIGLDIAKSVFQVHGIDAGGQVVIRRQLKRRHVLTFFEKLPPCLVGIEACASSHHWSRELQALGHTVRLMPPAYVKPYVKRQKNDMADAEAICEAVTRANMRFVPTKTPDQQSGLMLHRTRHMFVRQQTAVINSIRAHLAEFGIVAPVGRKGVTELLRIVADPNDKRMPEVARACLAALGTQLLALKEQILEFDRMILAWHRSNQTSKRLHYIPGVGPMLATALVASVADPRAFRSGRNFSAWIGLVPKQHSSGGKERLGSISKQGDRYLRSLFVAGALAVIRYAKIHGTGHRPWLTALLGRRPTKVAAIALANKIARMAWAMMAKGERYKQPAALAR

SEQ ID NO: 436756 - protein, 310 aa, unidentified
MDATFVGIDVSKDRLDVHVRPSGEAFAVPRNGKGLSELVERLRSIAPALIAVEATGGFETIVAAAIAGAHLPLAVVNPAQVRYFAQAVGRRAKTDPIDAAVIAHFAEAVKPEPRELPDEAARLLAELVSRRAQLIEMVVAERQREKRASSVRVRKSLARHIAALEKELPVIDRDIDMMVRGSPLWREKEDLLVTFPGVGNTIARSVLADVPELGRLDRRKIASLIGVAPFTRRSGKWKGKSMIGGGRPAARSAIFLAALSAIRCNPVLRAFYQRLLAQGKPKMVALIAVARKIVTILNAMLRDKKQWQPA

SEQ ID NO: 436757 - protein, 368 aa, unidentified
MKDVTTYVGIDAHKKDLFIAMLVGTQATPLTWTVANEPNAIRRLVRKLEREAPGPVRSCYEAGPCGYALQRRMTTTRVVCQVIAPALIPRKPGERIKTNPRDARKLAELLRAGLLTEVQPPTPEEEAVRDLCRARDDAREDLQRSHHRLGKLLLRRGLHYSGRNWTRAHRQWIDSLEWAHAAERVVVDDYLLAIDHLEARLIELDARLTAIAATEPYREPVAWLRCFRGIDTLTAILILAELHDFRRFQSPRALMASVGLVPGEDSSGEKHRRGRITRTGNALVRRLLVETAWHYQHRPSVGVALTRRRKGQPTRVIAIADKAQQRLCRRFRRLAEHHKPAPKIAVAIARELAGFLWAVLQPASVSAS

SEQ ID NO: 436758 - protein, 354 aa, unidentified
MAETLKTAVAVIGIDIGKNSFHVVGLDRRGAIVLRQKWSRGQVETRFANMPPCLIGMEACVGAHHLSRRLKALGHDARLMPAKYVRPYSKGQKNDFRDAEAIAEAVQRPTMKFVATKTVDQLDLQALHRVRERLVSQRTGIINQIRAFLLDRGVAVRQGLRFLRTELPRILAAPSDVVSPRMARIIEDLAGDWRRLDERIEDLSSEIEAVARHDAGCERLMSVPGIGPIISSAMVAAIGTGDAFTKGRDFAAWLGLVPKQMSTGDRTILGKISRRGNRYLRVLFVQAAWVVLIKPKIWERYGLKPWIEAAKKRLHHNVLAIALANKLARIAWSVLARGRAFEVRKMDEAANQPA

SEQ ID NO: 436759 - protein, 340 aa, unidentified
MFTNFVGIDVSKSKFDLALIKGQDKDHVIQGVFDNTLKGIKSMNNFLEREHKVQLSETIFCMEFTGVYGYPLTDFFVKKDCHVWIEMPVNIIRSLGLQRGKNDRVDAYRIALYAYKNRDDVKLWKPQREAILKLRDLLALRERLITAQKSLQMPINEKISMGDKKGAEILRKGCQKSMSSLENEIGQIDKNLDDIIKEDPQLKELFQLATSVPGIGKLTALFMICFTNEFSMYTNPKQLACYCGVAPFEHSSGSSVRGRTRVSHMANKVLKRMLHMGAMSVISRDPELRDYYQRKVAQGKNKMLVINAVRNKIIHRLCAVIKRGYEYQFENIFKERLVLS

SEQ ID NO: 436760 - protein, 340 aa, unidentified
MNNISIVGIDLAKHVFQLHAVDGSGHKVFSKKIKRDQLRTVIANLPPCIVAMEACGSAHYWAREISQLGHEAQLLPPQAVKPFIQGHKNDARDAAGIAEAAARPATRRVTVKTPEQQSLQALHRVRSRLVRARTAVGNELRGLLNEFGIIVAQGHRVIRQGEIRRLLDERHDQLGAALCDVIHDLLNEWQALDTRITEYDKRLGTYVQATPSMKQLMSVPGIGPVNATLLFSHMGDPKRFPNGRQFSASLGLVPRQYSSGGKDVLKSITKHGNSEVRRQLVHGARAALRQFQRQEHPDRLAQWVIRLAARVGQRKAIVALANKMARICWSILAYQRPYQA

SEQ ID NO: 436761 - protein, 344 aa, unidentified
MEQVSRIGMDTSKHIFQLHGVNAAEEPVVRKKLRRGQMVAFFEKLEPTVIAIEACGASHHWARLLASFGHKVKLIAPQLAKPYVKRGKNDAADAEALCEAMSRPTMRFVPMKTAEQQAALMLVGVRERLIRNRTQLANAIRGYAAEFGLTAARGMANLVPLLDRIQADESLPALAQALFTSQAKEYEQLQAQIDEIDAKLMAWHRADECSRRLAQIPGVGPIGAALLVMKTPAAEMFRSGRDFAAWIGLTPKDHSTAGRVRLGVITRAGDEGLRSVLVVGATSVVSQVRTGRGKGALAAWLTQLLKRKAPKLVAVALANKMARIAWKMMVSGQAYVRATTASAA

SEQ ID NO: 436762 - protein, 361 aa, unidentified
MFTERTSVGLDVHARSVVAAAIDGVTGEVFRARLTPSNEQVVGWVQSLPGSSAATYEAGPTGFGLARAMAAAEIRCEVAAPSKIQRPAGDRVKTDARDAMLLARLLRMDEIVAVAVPSVEQEDARDLVRAREDVRGDLMRSRHRVSKLLLRQGIVYYGGHAWTGTHLAWLRAQHFDTPGLALAFDAEHEAVLAAEARRDRLDEAIGAMAADGQFTPVVRRLGCLRGISTLTAFGLAVEIGDWDRLTGASIGAYLGLVPTESSSGQFRSQGSITKTGNTHARRLLVEAAWHHHKPYRTPGATMRARWELAPAASRARGHAGNRRLHERWLRFTERKKRPVVANVAIARELAGWCWSLAVMDP

SEQ ID NO: 436763 - protein, 361 aa, unidentified
MCKSIRIEIDGRHCVGLDVGDRSSYFHVEDARGNVVDKGKVRTDPDSVRELFGKMESARIALEVGTHSAWLADLLTRLGHEVTVANPNKVALIAKNYRKGDEVDAALLCWLLRVDRRLLFPIQHRGLQGRAHLTEIDARDTFVKARTRMINFVRGKVKTFASRVPSSVTPSCFHKKAGRYIPACLQSALTPMLELIGELTERIREQEKKIKELCREQYPETKYLESVNGVGPITALTFILVIEDPSRFDTPREVGPYLGLVPRRHSSGKLDPELSISKAGNGALRRLLVQCSHHILGPKGRDSDVRRWGAALAARGKKGAKKRAAVAVARKLAVILLSLWVNEQKYRPLKRKTAVKKGKAA

SEQ ID NO: 436764 - protein, 350 aa, unidentified
MFVGIDVHKHTHAAALLDERGGERGILTFANSPAGYQRLIGWLADRDAARAVIGVESPGSYGRCLVGALAAAGHEVLHVPAWRTHRERRRQGPGKTDPGDALAVADVVRRKRTELGPALQPELVRAISMLELQRRRFVLDRTQAIQRLRSDWTQIDPVAEAEVVHLDRQRELRRLKRISFGESMVARIAATTIHQLAADIEGLNGRITELEAEIAALLEQHGNPVEDLLGAGNQIAAALISHAGDVRRFKDAAAFARYCGAAPIPCGSGQTAARHRLHRGGNRQLNAALYRIAIVQQRHHPDAKAFLARKLREGKTPREARRALKRHLANVVYRRLLTWADTTPAMNLLT

SEQ ID NO: 436765 - protein, 329 aa, unidentified
MQLHTVGIDLGKTVFHLVGLNERGDVVVRKKFSRKQLLHFTANLQVKLIGMEACGGSHFLGRALREQGHEVRLMPAQYVKPYVKTNKSDYIDAEAIAEAVGRPKMRFVPIKSDDQLDLQSLHRVRERWVMRRTAVINQIRGLLLERGITLRQGRRHVDAALPGILEDACAKLSGAVRVLLAQLKLELDHLQMRVDEADAVIQQTAGESEACRRLVAIPGIGPVTATATIAAIGNGAAFKKGRGFSAWLGIVPGEHTTGGKQKLLGISKPGNSYLRRLLVQGARAVLQQSAKQSSGLSAWLARLTTRAHSNVAAVALANKLARLGRTRQE

SEQ ID NO: 436766 - protein, 340 aa, unidentified
MTQYKRIAIDTSKAVFTLHGIDHQDRVILQRNLRRAQFLPFFEKLPPTEIVLEACGGAHHWGRELPALGHSVRLLPPQYVKPFVKRGKNDRNDAGAICETGARPGIHPVPIKTVEQQAQGMMLKVRETLIGQRTALSNTLRGLAAEFGITTAKGLGRLAELLATIAADPALPVEAKDSFIILGEQLGRLDEQIKMLEKKVAAAHKANPLSTRLATIPGLAAIGSLMVATRVNADDFASGRHFSAWMGIVPKEHSTGGKQRMGGISRAGDERLRQLFVLGATSVIKAVTRPGGSKLASPWLLKLLERKPRKLVAVALANKMARTAWAMMKSGEVYRRPAAA

SEQ ID NO: 436767 - protein, 394 aa, unidentified
MFYLGIDIGKRTHVASIMNAEGKVVLKGFSFLNSLEGAHALLDRLNAFSATPDDFLIGMEATGHYWLALFSFFDEQGFYTHVINPIQTDGWRKGTEIRKRKNDIIDSVLIADLIRYGSFQETALANETMFSLRQLTRYRSYLVGTAIDFKRKIIAILDQNFPEYETVFSKVGIFGKASKAVLLEFSSPEEFNQVSAKVLAEALGLASRNRVGTAKAEALKSAAAHSFGIRFAKEAFVFQMRSMIDQLIFLEDQIKQTENEIEQLMASLDSVIETIPGIGPVLGATILGEIGDIHKFSNPKKLVAYAGIDASVTQSGEYLATHNVMSKRGSPYLRKALFQAALIASRHDPVLKAFYDKKRAEGKHHLTALGAVSRKLCYIIHAILTKNDPYEIRQ

SEQ ID NO: 436768 - protein, 371 aa, unidentified
MGKNHRIKFVGMDVHQKSISIALADDGPDKEVRLYGTINNTPEAIDKVIRKLVSTGAELHFVYEAGPCGFGLYRHLTGNGFNCIVAAPSMVPKKSGVRIKNDTRDAIALARLLRAGELTPIYVPDTEDEAMRDLTRARNDARIAAQKAKQRLHSFLLRNEFIYHGKKKWTKAHFNWLAELKMKHPAQQVAFQEYIDAVNECSERMTRLDEQILHAAEEWRWAPTVKALQALRGVSLLTAVNMVAEIGDFNRFHNPKELMAYLGLVPSEHSSGARIRRGGITKTGNSHARRICVESAWSYRYQARVTQHLRTRHEGLPQDILQIAWKAQLRLCTRYRRLRARGKAIQVVVVAIARELVAFMWDIARRIPAVA

SEQ ID NO: 436769 - protein, 407 aa, unidentified
MIFVGDDWAEAHHDVYICDDTGARLAARRFPEGVEGISGLHGLIATHAETPAEVHVGIETDRGLWVQSLIEAGYQVYAINPRAASRYRDRHSLSGAKSDPGDAKMLAELVRTDRHNHRLVAGDSDVAEGLKVLARAHQNLIWERTRHTNRLRCALREYFPVALAIFESLADRDALAVLAKAPTPAEAARLTPGQVRSALKAGGRTRNIEVRAQAIVTGLRAEALTAPEPVVTAFAAATRAQVAIITALNTQIAALDTELAAHFEQHPDADIYLSLPGIGVILGARVLAEFGDDPNRFDSGKSRKNYAGTSPITRASGTRSVALARFVRPARLADAIDQWAFCALTNSPGARAYYDHRRTQGDSHHKALRALGNRLVGILHGCLAHRSTYNETNAWAHRNDHPLKIAS

SEQ ID NO: 436770 - protein, 384 aa, unidentified
MPVFIGIDYHKAYSVYSVLDLQGDSLGQGRIDHAHPEDFSALVRRWPGCRVVFEAGMNWHWLFEILESELSSERIVLANPFKTRIIAEAQIKTDKVDARILADLLRGKLVPSVHIVGRECRQIKEVLRQRCFFVRQRTMLRNRIHRLLGAQHEVKLPQCSDLFGRKGLSFLEKLELPAPARLLLAQQLALLKELAVRIHEDEKALEGLVQETPALNYVRSLPGMGPILAAVVVSEIDGIERFPSAQKLCGYAGLCPSTHSSGGKTFQGKLLRHCNKWLRWAFVEAAWVAIGCSAYFGDFYKRKRALGKKPSLAILATARLMARITWQLLTQRRAYTSVVETQYLRSQPAERIASVAVGVAKEVQKPLKDRSNFPRRRLSPAAPK

SEQ ID NO: 436771 - protein, 352 aa, unidentified
MVKNVELSELAVVGVDIGKDVFHLVGFDDDGTLVLRKKIKRLALITTFEKLPRCVVGIEACMSAHFVSRTLRKLGFEPRIIPAKYVKPFNKGQKNDYNDAEAIAEAALRPNMHWVSEKTQDQLDLQALHRVRSRLVSKRTATINQIRAFLLEQGITVRTGVHSLDKSLFAILQNREDEISPRMRDIITGLYEDWIWLDGRIDTTTAEIESISQSEANCQRLMSIPGIGPIISTTMVASVGTGEAFDRGRDFAAWLGLIPRQYSTGGKTFLGRISKRGPTYLRMLFVQAANVILMRPQNWPKFSFGPWLEEVSKRMHRNKVAVALANKLARIAWSVLRSGKNFDTHCAQLEVN

SEQ ID NO: 436772 - protein, 357 aa, unidentified
MVTGLKHQMEKRSMEHFAGLDVSVNETSVCIVDDAGSIVREVKVASEPDALLAVLKSGVYRFRRIGLEAGPLSQWLYSALGEAHLPVICVETRHMRAVLKAQINKTDRNDARGIAQMMRAGLYRPVHVKTLRSQKLRMLLTHRKLLQSKAIAIENDLRGTLRNFGLKVGVAGAVKFEARIRELVKDLADIATLVEPLLVVRRTLREQLGILHRHLLTIARDDEVCRRLMTIPGVGPVVALTYRASIDVPARFRNSRAVGAIVGLTPCKYQSGESERTGAISKCGDEMMRVMLYEAAQILLMRSTQWSWLKAWAMQIAKRRGMKKAIVALARRLAVVMHRIWVDGTEFCWTREEAVAT

SEQ ID NO: 436773 - protein, 347 aa, unidentified
MNTVTRFVGLDYHQNSIQVCVMNQEGKILVNRKTINDAAKVEKIIRETVPQDSEKVAITAKISIEACAGAANLSEELMLNTGREVRLAHPGIVNRMKQNPDKSDKTDAYILADLIRIGYLPKVWLAPKEIRQLRTLVRYRAQKVKERTKTKLRLRSILRDVRQKAPSGVNAWTIPWMNWLRTLELDEVNTFVRDEHLEDLEKLNQKIKEVEKQLRCITKKDVVMKKLMSLEGIGFITAVTMRAEIARFDRFHSGKQLSRYCGVTPRNASSGTKQADAGLVRAGNSNLRIVIIQAAQRLVNSSAHWRGFVERLRTKGKPRNVIVASVANRWLRRLYHEMQPEQLAIVA

SEQ ID NO: 436774 - protein, 349 aa, unidentified
MHSTTVAVDLAKNVFELAVADRDWRINERLRLNRSRFNSFFVHRHPCRFVMEACGSAHHWARRLAACGHEVRLLPAQYVRVYVKRNKTDRADAAALLKALRCADIRPVPVKSLEQQQILALHRLRSQWMSARHRYINALRGILREFGTPIALGVAAAKTQIAQALADPRSELPPGIGPILAQMLDEIRAVERNVDLIERELTSLSRTDERVQQMRQIPGIGLLTSTAIRATVGDIQRFPSARHFASWLGLTASEYSSAEHRKLGAISKRGDVYLRTLLVHGARAVLLAAHRAHRSGRPLDRLRQWALQCEQHRGHNKATVALANRLARIIWATWKHQRPFDGNWSRATA

SEQ ID NO: 436775 - protein, 341 aa, unidentified
MAHCIGIDLHKATSYVTTVDETGRILDQRNLRNEPETLRAYFGAQPADARLVVEATGHWMWLYELLEDRYPDLVLAHPLKTKAIASARIKTDKLDSTVLAQLLRADLIPAAYIPPRAVRDTRELLRYRAALVTQRTVLKNRIAAIVTKTGLKLPTKTAVGVKSRRVLATAPVRPCYRAALDGWLRLLEALTTEIRQATATIEAQAHADPQAQRLQTIPGIGPYSALLILSEIGEVHRFPDSRHLCSYAGLVPSVHASGGKTRLGRITKQGSKWLRWILVETAVHAVNGAPQFRSLYWRVRRKHGTHTARVAVARAVLKTIYAMLKTEQVFEARSRRVAVAG

SEQ ID NO: 436776 - protein, 397 aa, unidentified
MIAVGIDISKAKSTVAVIDSDGTVLASPFTMAHTQPEMEAFVTYLKGLGEPTTILMEYTGHYHYPVLKKLQDEGFPVCIVNPYQMKKYGDVEIHKAKTDKKDALRIAAYALEKSYKLVPYSSMEQKYEDLKFLSRQYSQRITYVAKLKVQLIALLDQTMPGITRILPLNSRNPEKCALLLFIRRFKSFDEIQRIGKARFLASYDVLAKKASERSASSKGLSIYELAVDSITTRGEDPYIWLSQNQCVDLLSATQNAADEIISQMRNIAETIPEYKVLRAMRGVGDRLGPIILAEIGDIRRFHSGKALNSYAGNDAPPYQSGQFESRNRHISKRGSSALRKACYEVMQALKLTKPQDDPVYLFMLKKEQEGKPFNVAKMAGVNKFLRIYYARAMELYK

SEQ ID NO: 436777 - protein, 331 aa, unidentified
MKNFIESAGIDISKLTIDVYLHQMRIHRQFANNKTGFKMLLKWISSLKLNPGEVLFCFEHTGWYCILLSYYLHDRELDYCCVNPIEIKRSIGLKRNKTDKDDAQNIAHYAWLRRDELKASTPPPVKIIELQRMMSLREQLVKQSTALKNLRKGMEQLVSSPSTDVSVNSLDQTIQYLKKQVLRIEKEMEKLINSDESMGKNYKLSRTVKGVGTVLAVQMLLHTHNYSRFNSWRQFSSYCGLVPCQYQSGTSIHGRSRGHPISDRKMKSLLSMAAISAVQWDQELKEYYQSRVEKGKPKMLVLNIIRNKLVSRIFATVKRGTAYVEIKMIAA

SEQ ID NO: 436778 - protein, 416 aa, unidentified
MTEERRWYAGVDWASESHHVFLTDDRGAKVGERIFRHSGEGLAEMAAWLLSASGAAAPGRINVAIEVPHGPVVETLLERGFSVHAINPKQMDRFRDRFTLAGAKDDSRDAEVMASALRTDPRCFRELAIADPVVIELREWSRIAEDLGAERNRLTNRMREQLWRYFPAMLEFESDLGAEWLLDLWEAAPTPAKAARIRETTIANILKRHRIRRFDAAQLLDALRKPPVQVAADTTEAASAHIATLVARIRLVNRQLKDAHQRLDVLTARLIPTAEIEPGQRKQHDVEILASLPGVGRTVLATLLAEAFDALQRRDYAALRSLTGVAPVTKRSGKSCIVIRRQACHDRLGNAMYHWARVAVQHDTKSRAKYAALRSRGHSHGRALRSVADRLLNVACAMLKTGTTFNPALAVQKPSC

SEQ ID NO: 436779 - protein, 394 aa, unidentified
MNPQAVGWDIHRKFSKVSLMEITAEGEMQVKERARLEHIDRGGMRQWLGRLPRGTPVAMEAAFGWPWIADLLEEFKLDPRLGHPPALKVLAPHEAKSDRCDSDRLAKFQLVGILPESYLAPPEVRQIRERTRYRMALSALRSAVKNRIQALLHRFGILHGHSDLFGKQGRQFLKHLELPAASRSVLEGSLQLLDEIVRQIKAVEKWMEENLQEDQTIGLLQTIPGIGLILAHVIRAEIGEIGRFPSARHLRSYSGTAPVSNDSAERHGVRHCSPACNHALRWALIEAVTGVLLTKGLRGLRLRRLHARLTHGGHANKNQAKVALAGELAERVFIVWKKRTPYQEEPAPRPGAVRPRPAKSSRPQEHTKHANMRPDQSRHPIARRSTSRAGQALS

SEQ ID NO: 436780 - protein, 380 aa, unidentified
MDVHSTNFTLCSFEPGYGFEADKIFGQTQIKEDIFNSTVKYINKLKSMRPDVDVVCGYEAGCLGYNLHRKLKAKEIESVILAPTTMAVSRNCSKKKNDYRDAITIAKCLASSAYKAVYLPDEKDEDVRDFIRMRDDHKTALKQIKQQLNAFCLRHGHHYDKTKWTGLHLNWLRKLELSKFQRETVEEYLATYEALTSKIAALDVRIEDIATEERYAEKVNKLKCIKGIKTHTALSFVCEIGDFNRFKSADKFAGFIGLVPGECSSGNTERMLGITKAGNRHLIRLVVEISNTYRRGTVGRKSAALKERQKDMPKDVVAYADKATNRCQRKYQRMMFKGKNSNQAVAAVARELCCFIWGMMTGHHSRTAQAEASVYRSELD

SEQ ID NO: 436781 - protein, 356 aa, unidentified
MSRDIKYIGMDVHKEAIVIAVLNGSGKLVMETIVETKASSILQFIHGLRGELHVTWEEGTWAAWLYDLLQPQVEQVLVCNPRRNALLKEGSKSDQVDAQKLADLLRTGMLRPVYHGENGLRTLRELGRSYQTISKDLTRVMNRLKALYRGWGIPCAGTQVYGPRYREEWLNKIPQAGVRRRAELLYQQLDGLQGLRRHLRPEFLAESRKHKAAKLLRQIPCIGPIRAARLIALIQTPHRFRSKRQLWTYSGLGIETHDSAQFRFVRGQLQRSRKPQQIRGLNRNHNHEMKEIFKSTATRASCGRGPFHDFYAALLAKGMEPEMARLTLARKIAAITLTLWKKGARFDAEQLKTQAA

SEQ ID NO: 436782 - protein, 361 aa, unidentified
MELHVGLDVSLESTSVCIVDATGKKVLEASVASDPEAICIALRPHVSAIARIGIEACSTGIWLARELSNEGLPVTVVEARHMRSALSAMRNKTDRNDAHGIAQMMRMGWFRAVHVKPLETQRLKTFLANRRLLKRKLVDLQNHLRGALRTYGLKVGQVGAGRFDGRVRELLEGNGDYMFTTMIESMLDVRAVLFESFRKLHRILLLIVKHDPICRRFMTVPGVGPVSALSYKVTIDDPTRFVRSRTVGAHLGLTPRKYQSGTSVDWGGRISKMGDVDTRGALCEAAASMLLRVQSYSALKAWGMRIAKRSGMMCAIVAVARKMAMILHRMWIDGTDFEAKSGAKITKKRKRDPQTGRLLAC

SEQ ID NO: 436783 - protein, 343 aa, unidentified
MTISILGIDIAKNTFQLHGADNSGKAVHKKRLARCKLAAHVANLPVCTIVMEACGGANYWARVFQGTGHSVKLISPQFVKPFVKTNKNDANDACAIVEAASRPSMCFVPIKQVEQQDIQSIHRVRSRIVKNRTALINEIRGLCLEYGVVLIPGASRVKSSLCAAIANSDNELTPSSRESMQFLYEELVDVEARVKTLDTRIRQICRQNENCQRILKIPGVGELTATAIVAAVSDPREFRNGRHMSAWLGLVPRQSSSGDKQTLLGISKRGDRYLRTLLIHGARSVLSHYKDRDNDYNRWIGRKKATLSHNKAAVALANKNARIIWSMLNTGEEFDMREQATAA

SEQ ID NO: 436784 - protein, 343 aa, unidentified
MEHYVGLDVSLKQTSICVVNQVGSVVREGVVDSEPEAIAAFVRSKAPGALRVGLETGPTATWLWTELKQLGLPVICIDARHARAVLKMQVNKSDRNDAAGIARIMQTGWFKEVRVKDPDSHSVRALLASRALLVKIKRDVENQIRGLLKNVGLVIGRAKFNVFAVRAEELIEDRPELIAVVGPLLKARQAIEQQTDDLDRKVLKLARYDAQVRRFMTVPGIGSITALCFKATIDDPTRFKRSRSVGAYVGLTTRRHASGEIDWTGRISKCGDAMLRSYLFEAAGVLLTRVPKWSALKAWGMRLAKRNGLRKATVAVARKLAVILHRMWIDRTEFNWSKEEVAA

SEQ ID NO: 436785 - protein, 362 aa, unidentified
MESMRWVGVDVHAKESVAAVLDQATGEISTHRVTGRPDEVLEWLATLTQPFRAVYEAGPTGYGLVRRAQVRGLDVVVCAPGHILKNANDHIKVDKRDAVRLARLLSAGELRLVRIPQPDEEQLRDLVRSREDVRVDLTRIRNRIGKFLLRRELYPPKQAESWGVLHRKWLQQLRFEDRASELVFEDALHAHEILVARREQLEQALAEIAESSIWSGTVARLRCLRGIDTLSALGLVAEVGDFRRFVHPRFLSSYLGLVPSEHSSGEKRRQGGITKAGSKHARRLLVEAAWQYRHRPHISHHISQRQQGQDQRVIDIAWRAQRRLYKRWQRLYEERRKRSTVVAVAVGRELAAYCWEVATLTG

SEQ ID NO: 436786 - protein, 423 aa, unidentified
MMKLKYSICCGLDVHKNVIVATIVTTNKDGISEYLQKSFSTINSDIQRFHNWLIENNCYHVCMESTGKYWIPIFNYLENDIDVCLTHPKYVKAIKGKKTDKKDSKWIADLYKFDLVRCSFIPPKDFRQIRELSRYRFKLVCMKSSEKNRIQNCMTISNVGIASVLSDPFGKTATEIISYLLEHTADSMDEKAVRKLIKKGAKSKSDEIIEAIKGYTIETDQAKKLELARGHLEYLDDMITQTEVELYVRIKPYYEFVEFVSTMPGMTELSSTIVLAETGVDMDIFDDAKHLCSWCGLSPANNESAGKKKSVRIAKAGDYLKPMMVQCALAAIKSKKQPYFAIKYGRIKKRRGHKKAIIAIARMMMVCIYHMVSEKKPFTPTDYEELMDPQNHVESVVLNENNVFAYLESLGYDSSKLVKRNDN

SEQ ID NO: 436787 - protein, 344 aa, unidentified
MKPDLQMKVDKHFRQCVGIDVAKDTFMACLSMLDIATDEGRSSKTVEFANNRHGFNQLVKWSRKEAVREAKLTFLMEVTGVYHEKLAHHLQKLGFQVYVVLSSRARKYAEYEGIKTKTDSMDAYALSRFGCAAHHLVPWTPPKPIYAALRMKTRFASHLNKVRTTIGNQLHALSNSFEKDAALERMYKSLIDKIDKELEDNDKAIEELIDTDAELKSRIEKVCSITSVGMKTAVTVIAETGAFEFITSQKQLVSYAGLDVVSSQSGPNDPRHHISKKGNVYIRTALYMPAINACMYNKRVSELYERVKEKNPNARMVAVTAGMRKLLIQIYTIWKKNELFDKQR

SEQ ID NO: 436788 - protein, 414 aa, unidentified
MQNINIFVGIDLAKDTSKVCILESSGKVVLKPFSIPNNIEGMGEMLSKLKTYTHDEVIFGMEATSNYWENVLSFLSLKGYAAVLLNPYQVRKFCQALGNKIKTDTSDSVAIATLLKTKDFEEITVSTEDAINLKELVKTKYSLETRVKDCKKAILSMLNLVFPEYSQHVAHPFSKVSMHILKEYPTATHMTRDGSVSRLLKIFRKYQGCNFSKDKAKALIDSARASFYSGKASPARGLSLKVHIEEIAFLQDKIAQIEAQIIAILCPKDKDTGPTDYEILNSIKGVGINTIAAFMACVGSVERFSNSAKLISYIGFYPRIFESGSYRKQNPSIQKAGPKELRYMLYLTSVASIKHNPQLRKYYLDRVSAGMPAKKALIKVAVKIAKIMYSLLKEKQIYDPVKVFYQNNICPLVA

SEQ ID NO: 436789 - protein, 358 aa, unidentified
MTETPPAVSLTVYVGVDTHKDTHHAAIVDSVGRQIGDREFPVTASGHRQLLAWLASTGIVARVGVEGTGSYGCALTTVLREAGLTVVDVDRPDRRARRHGKSDPIDAYAAATAALSGRATTTPKTHDGNVEAIRFLRNARRSAVKARAEAMTTLKAMIVTVPEPVRESLHGLTDAQLLRTCARMRPAPITDGNITAAAVTSLRSLARRILELTDEERALTKQIRTLVAHTAPELLDRVGVGAETAAQLLTTFGDNRDRIVSEAAFASLCGVAPIPASSGKTHRHRLNRGGDRQANRALYIIVITRIAHDERTHNYVARRTTEGKTTREIIRCLKRAVAREIYRLLTSPPNPHPPLDET

SEQ ID NO: 436790 - protein, 354 aa, unidentified
MRTYYVGMDVHQASIVIAVLNGAGKVVMESIIHTGAETVRGFLKQLRGKVYVTFEEGTQATWLYDVVRPLVTEVLVCDPRHNKLLQSGNKNDRVDAQKLAELLRNGALKAVYHGDHGMRTLKELVRNYDCLVSDSTRVMLRLKAIYRGRAISCAGHDIYRSDRRAQWLEKLREPGARQRASFLYAQLAALKPLRHEAKLVMVKEARRQAAYPWLMSLPQLGSVSVAQLMAVVGTPHRFRTKRQFWPYVGLAVVTRSSADHEIVNGVLRRSRRPLATRGLNRNHNHLLKKVFKSAATSACHSGPFKAGYDARVAQGMDPSLARLTIARQLAAITLAVWKRGEKFNMQMMKQQLAA

SEQ ID NO: 436791 - protein, 403 aa, unidentified
MKSVLAVDVAKDKSMVALITEYGEILIEPYEVIHNLNNFNELEDKISRFNLDNVTIIMESTSTYHKPIQRYFKENNYKVDVINPILGKQNKRNLRKTKTDKEDCYNLSDFYFKNTFKIHPLNTDDIYDNLNNLSRQYLHFTESLVRSKNRFKQLISSTFPEYIKCFVGSDIFGKTSMNFIKEFPHADIIKEKRIDALAYNLYKSGNKCSSYKRCENKADKIKQLAKNSYPGVSKDSKEVSNLVSIVDSILFIEKQLKDCEIDMITLASKTKYFELINSIYGIGELATSQIIAELRDINRFSNVKQLNAYCGLDPTIIQSGKSINYHGPISKRGNKTARKVLFISCCSIIRTTILHNKENDITNYFRKKQAEGKHFNECIIACSTKLLRIIFAMCKNNSKFKNH

SEQ ID NO: 436792 - protein, 503 aa, unidentified
MDVIVERPAALDVHKEQVTACVRAPAQDGKRMQEVREFKTTVGGLLVLHDWLKAHGVTQVAMEATGVYWKPVWAILEDDFDCILVNARHVKNLLGRKTDVKDAEWLCQLLEAGLLNRSFVPPKPIRRLRNFTRYRAAQTKERQREANRLHKALEDTGIKLDCVATDSLGKSGRAMLDALCQGTTDPHVLADLAKGRLRAKLPALREALEGRFDADHALLIGAILAHLEFLDEQIERLSEAIEEQLRPFQPAVGVLRSLGGIETRTTQNIIAEIGTDMSVFATAGHLPSWGGQCSGNHQSAGKRRSGKTRRGSKWLDDALKNAAMAAIRTQRQLPPGPIPAAQAANRSRPRARRGQARNPVRDLAHAHKRGAVQRPRRRLLPQTRPRTPDQTPRRPARTPRPQGHTRGAAAGRLNPKRWRDPTAIFPPGGEDDDREPPGPLIVTDSSEHVQAADLRQLEVEQHDRPQVRVLGAVLGQEVVDRFRAVLGDEDFVGDVVAFERAQG

SEQ ID NO: 436793 - protein, 317 aa, unidentified
MRFYNAQHKFYCGIDLHARTMDVCILDHKGEILVHRNMKAGPDPFLQTIAPYREDLVVCVECLFTWYWLADLCAREGIPFVLGHALYMQAIHGGKAKNDKIDAQKIAVLLRGGMLPQASVSPAKMRATRDLRRRRMPLMRKRAELLTHLQQTNSQYNLPEIGKKLAYKANRDGVAERFADPAVQKSIEVDLALISHYDHLLNDVELTLVHTAKHHDAHTLYRLQSVPGIGKILSLVILYEIHDIARFPRVQDFVSYCRLVKCAKESAGKRYGTSGTKSGNAYLKWAFSEAAVLFLRDNPAGQQYLARLEKKHGPGKA

SEQ ID NO: 436794 - protein, 424 aa, unidentified
MSPKKQDISTVSVVHPICCGLDVHKQTVVACVLWAGKDGREQSEQKEFGTLTDELIALKEWLMAHECPVVAIESTGVYWQPVHNVLEGSHRVVLVNPRHIKGVPGRKTDISDSKWLAALLRHGLVKGSFIPPKEQRQWREMTRMRKSYVQTVGDFKRMVHALFHRANIKIDCVASDLFGASGRNLMKLLCRCESAPSLSEVLGCLRGSLTEKAEELHRCVQGFFEVHHREQLKILLETIEALERQVFSLDETIARAMKPHNDLLRRLEEIPGIKETASSAVVAEAGITLVDFANAPAFASWIGLCPGNNESAGKRRSGRTRVNRNHLRTMLIEIAWVAVKKKGSYYKDKYYRLRGRLGPKKGIVAIAHRIAKAIYHIIKEGVAFKDLGEKYLAEQNKEAKLRYIKKQAQLLGHDLVAVTNKVHC

SEQ ID NO: 436795 - protein, 342 aa, unidentified
MSFYCGIDLGARESQICVIDKRVKKVLELKTPNKLELIKQMLEPYKAELEIVVESTFNWYWLVDGLQAAGFKVVLAHTLGLHMITAAKVKTDRRDAFALAKLLLAGMIPTAYIYPAETRPVRDLLRRRSRLVQVRAGEYGSLRRLLLRQGILSRQQQEIKRADEADLEKWFAHPLVRLHASQELERISLYSQQLAKLEATILERAEKQWGFEHVQQLPGIGPIIALTIFYEMGELGRFATEKDFSSYCRVVPGVAQSGQSNRRGRGSKQGNPYLKWALSQAAVHAVRCYPGVRRYYERQLRRHRGQARQMVVYNIIAHKLAQGVYHVLKERTEYREELLFGR

SEQ ID NO: 436796 - protein, 340 aa, unidentified
MSSVTCFVGLDYHQDSVQVCVLDVQGRMLLNRACDNNWQRIVETVRPLGVVKRAAIEACCGAADLGEERVARAGWHLELAHPQYVAQLRKSPDKTDFSDGRLLADLTRVGYLPRVWLPPAYDRDLRQLVNHRQALVNQRRAVKLRIGAALRQHRAKPPAKISRWTKAWIAWAPTAPQLSEPVRWIIRELLEELEHLNRKVLAADLRLRQATADDAMVQKLMEQPGIGEVTAWVMRAYIGPFDRFNSGRQLSRYCGLSPLNVSSGTRQADAGLVKGYNRTLRATIIQAAQRLKRTEPRWIKLSEQMRRRGKPACVIVAAVANRWMRGLWHRMLPEKNLMLN

SEQ ID NO: 436797 - protein, 377 aa, unidentified
MTTTPTTVCPKMAVAVEIAAKKWVVASYAGGARKPRRKVLQEEAAEARFAALLAELKQARLRLGVVEDAKVLVAYEAGQEGFWLVRALRTHGIAAEVIDPVSLQVDRRARRAKTDRLDAEALVRALWRYMEGDRKALRMIAIPDPVAEDAREWQREQDRLQAQRRSCRDRIMKKLRTQGVWVHGNGWRAVLRAGQLHGFDGELLHPTLQAALRVELDRLEAAEDRLRQWQANLGNLDVRSRERMAALQRLRGIGPIGAPGLALQLYWRQFDNRRQVGSCTGLVGTPYDSGTMRRDQGISKAGNPKLRALLVELAWLWLRYQPDSALSRWFGERTRGAGKRGKRIMIVAVARRLAIALWRYLQQEVVPAGARFKPEAV

SEQ ID NO: 436798 - protein, 428 aa, unidentified
MMTHHDRLQSFHELRKTVRSSDSMLVVGVDVAKNKHHAFFGTPTGKTLWKKLLFDNSIHGFKSLRAMSDNLMAQHGLQDCVYGVEPTATFHKPLAEYLIRQGQQVVYVSNVAVKNNRKTRDGRWDKNDTKDAANVADLVSRGRCQFYDLADGDVLELRSLIAYRTKLKKLEHALRMRLRNQLVAQYFPELDQLIPQGGQDALILDLIRRNFAPARIAETPFETFRVQHRVQQRHISQERRLRTIYELSKESVGCTLPAAAAWEGQMLVAQLEQTRKIKKELEDRLKTTGQHFPAYSHLLTLPGFGPIVTTMVLAAIGDAHRFTNRKQVLRLAGLDLSASRSGTKSDSAIPVISKQGKAGLRYALFQAATIASYKDETVRNHFTRLLEGREQERGIKMKMRVKLAAKLLVVAWTLMKHNEDYDPDHFTS

SEQ ID NO: 436799 - protein, 420 aa, unidentified
MNCVGIDVSKGKSMIAVMRPFGEVVVSPFEVRHTASELSELARLLKNLDGETRVVMESTGNYHAPVAWLLHGAGFYVSVVNAMLVHDYGNNSLRRGKTDKKDAVKLANYGLDHWLTLPRYVPEEDTRLMLKTCYRQYQQYSKVQTMLKNNLISLLDTAFPDANRLFTSPPRADGSEKWVDFVATFWHCECVCGLSKKAFTAKYQKWCRKHGYNFSQDKALDIYASACGRFGVMPKTNTAKLLVEQAISQLQTTSAALAALKQEMQSLAASLPEYPVVMEMFGVGPTLGPQLIAEIGDVRRFHSKKALVAFAGIDAPPYQSGQIDVRSRSISKRGSASLRRTLFLVMGVLLQCAPMDEPVYQFMNKKRSEGKPYRVYIRQQVLAYLLRFCESLFGFPGTRLISLRYTIWLAAVSILSCSAA

SEQ ID NO: 436800 - protein, 337 aa, unidentified
MQMPYSAVGAAVCIGVDVDSRLLNLTRASAATLDTPVTTIANTATAIKAWLKTLPPGCRIGMEATGKYHRTLAELAVRAGHTVFVFNPAQVASYLRSLRSRGKTDVLDTRGIARYVLNESADCHPYVPPGPFHAKLAVLIGRRHQIDKQRTSLKMSLADVPECAAQIRTLKNAFKRLLATIDAQINAAFAGEHELQRQRQRLCTIHGFGPLVSAAVAARLSRVPYANSDAVVAAFGMDPRPRDSGQFKGRRCLSKRGNAEERRLIYLAAVSACNNPLFRAIRDTLLLKGMSAIQAHCVIARKLLRIAFAVWTSGQPFNPGLIGKAVDSKRAMSPEHL

SEQ ID NO: 436801 - protein, 391 aa, unidentified
MIYVGIDVAKDKHDCFITNSDGEVLFKSFTIPNNREGFETLFQKVQSVSDDLTKVKVGLEATGHYSYNLLGFLLDKGLPTYVINPLHTNLYRKSLTLRKTKTDKVDAHTIASMIMSDVNLKSYSDTSYHNEELKSLTRYRFDKVQERAKLKTSVSRLICILFPELEKLVATIHMASVYALLSEFPSAHAVASAHLTRLTNLLSESSHGRYGKDTAVMFREAARNSIGSNMPAKSLELKHTIKLIQELTSEIDEIETEIKSIMDEVNSPILSIPGINYRMGAMIIAEIGDFSRFDSPDKILAYAGMSPSTYQSGQLDNCYSHMEKRGSRYLRYALYNATKYVCHWDESFGTYLAKKRAEGKHYNVALSHATKKLVRTIYAMEKTGQSYSSAS

SEQ ID NO: 436802 - protein, 403 aa, unidentified
MVFVGVDWAEAHDDVCVLDEEGQMLGKRRVPDGLEGVRQIHDLLAAHAEQPNQVVIGIETDRGLLVGALLAAGYQVYAINPLSASRYRERHVTSRAKSDPGDAKVLADLVRTDRHNHRPVAGDSELAEAVKVLARGQQDLIWSRQRFANRLRSTLREFYPSALEAFKDLDSAQALAVLERAPTPWQGRQLSRTKIVSALRQAGGERRLEERAAQIQAALRSEQLQAPASVGSAYGVIVKSTVAVLTQINRELAELEQELSQSFEGHPDAEIYRSLPGLGIVLSARVLAEFGDDPNRFDHPKSRKAYAGTAPITKASGTRRVVLARVARNRRLADACYLWAFTSLRSSPGARRYYEILRGRGQTHHQALRALANRWVGILHGCLRHRTAYRENVAWPTSLEIAA

SEQ ID NO: 436803 - protein, 334 aa, unidentified
MIHVGVDLHQRFCYMTALDSRGKQLNAQAVPNETAALQAYFRQFKKPVRAVVEACSFWPAFRRAVGQQVELHLAHSQQVKAIAAAKLKNDRIDSATLAHLLRCDLLPEAWMADETTRELRLQVRTRATLVRQRTRLKNQVHAILHQHGLKHGVTDLFGKAGRNWLEQAPLSKKARGAVTTYLELIDGFTAHVRQQDQEVKEFVGTDPRAKWLMTIPGIGPYSAMLLLAEIGDIGRFADKGALSNYAGLVPWVRESADKRRSGGITRVGSPWLRWIMVEAAQVAVRTSVPVRQYFERLRKRKHRNVAIVAVARKLLVAVWAMLQHGECFDEARFR

SEQ ID NO: 436804 - protein, 361 aa, unidentified
MPTQMNNLNFEGQNIYAGFDVHLKDWKVTILSEEMMLKSFTMPPKPKVLSDYLLRNYPGANYYSAYEAGFCGLWAHYQLCELGIKNIVVNPADIPGTQKDKLQKEDKRDSRKIAYALRSGNLTPIYTPSESTLNDRSLVRSRKTLVGDMIRFKNRIKGFLHFYGIDMPEEFSNSRKHWNRRFMVWLQSIHMKELSGEIALKHQINEALYMKELLKCILLDIKHLSQTDKYRENVRLLRSIPGIALITAMVILTEVEDINRFPNSERFASFIGLIPMTKSSGEKQKVGEITFRAHDFLRSIIIESSWVAIRYDPALLMAYQKLIKRMEHNNALIRIAKKLSNRIYTVLKYNKTYEFGKTDNL

SEQ ID NO: 436805 - protein, 361 aa, unidentified
MRIIGCDLHARQQSLAMLETTTGETVNLTLKHEGNEVRKFYSQLPRPVLVGIEATGSMHWFLNLMEELGIECRVGHPATIRAAEPRKQKHDRRDAELILKLLAENRFPAIWLPTKELLDLRALLLHRHQWVRIRTRIQNALQAIALANGLRRGPSLWSYDGQAKIAFLPLPPHASYRRSALQAMYKKMEEEIENLTKQVAEQAEQRCGARRLMTHPGVGPVTALATDVLLGDPGRFVDGKALASYVGIIPREYSSGGNQRLGKITKQGSPLLRFLWCEAGAHAVRRDPELKRFYRRKLVQKGLGKARVAVARKLGIRLWIMLRDEIDYEEFCRRGQKPQSGAACAGMLEVGYGANRHRPID

SEQ ID NO: 436806 - protein, 429 aa, unidentified
MIMGFTKPIEHFNLQRKKVITMNTLYVGIDVSSKSNVVYLMLPNGDKHSNFSVANSHEGSTLLVKKIYSALTSHSLDTVLIGLEATSVYGDNLVYFLREDATLAPFNRKIHVLNPKQVKKFHDAYNDLPKNDYVDSFVIADCLRFGKINKEVYMGEYRYKALQNLTRARFFAVQNLVKEKQRFMNVLFKKYSTMTQEKVFSDAFSTTALAVYDEFESAEALANMDLHELTDFIIEKGKNRFPDPDAVAKAIQKAARSSYRLPKTVNDSVNQVLSISITSMKALESQIKEFDKAIKAQMELLPNVLISIPGIGPVYSAGIMAEIGDINRFNSQAALAKYAGLAWKQHQSGGFESEVTRLIPSGNRFLKYYLCEAAFSLVRCDKEYSDFYHLKYKEVNRYQHKRALALTARKFVRLVFRLLKDNRLYTSAE

SEQ ID NO: 436807 - protein, 341 aa, unidentified
MGQASTIGLDIAKRVFQAHGADASGHVVFRKRLVRVKLLEFFAAQPPCTVAMEACAGAHHWGRELGKLGHAVRLIPPAYVKPFVKRQKNDTADAEAICEAAQRPSMRFVPVKSEEQQANGVVFRARDLLVRQRTQCINALRGHLSEYGLVVPQGITHADALIVHIEDPKSSVPESARAILMVLVGSFQALEAQIQVLDAEITRRAKADPVARRLMTIPGVGPIAATAIMALVPAPEGFRAGRDFAAWLGLVPLQRSTGGKQKLGAVSKMGERTIRRLLILGASAVVRWAGQRGAPEGSWLGGMLARKPKMLVTVALANKTARVVWALLVKGGVYRAPAPVA

SEQ ID NO: 436808 - protein, 344 aa, unidentified
MLYVGLDLSRKRVDFDARRRDGELVERGSLPPDADGLRLLVRRLGDADVVAVIESMNGARFVHDQLELQGWDVRIADAAKAKGLAPLACKTDAIDAGVLAELARRDLVPEIWLPSPEVRAERERARFRLHLVKHRSALKNRVHAILIAYGIPSPSSDLFGEAGRRLLARLELPQPWCSTTAASIALIDVLDEQIAACERELRTLGADHRYVPLLMTTPGIGWILAYTIASEIGDIRRFATPAKLVGYSGLTPSVSQSGEHDRRGPLRKNGPNYLRWALVEAAHTASRNPVYQPTLERHRARHGRKKGTKTAALTIARKLAEATWHMLTKNQPFAPAGAPARLAA

SEQ ID NO: 436809 - protein, 350 aa, unidentified
MPRKFDTAVVTIGIDPGKNTLHLVGLDARGEIVLREKVARTKIVSRLANVPPCLIGIEAGMGTHYVTRQLLALDHDVRQVPPVYAKPFRQTHKNDFRDAHAVAEAVQRPTTRCVPPKTDEQLDLQALHRVRYRLVGQRTAIINQIRCFLLEHGITVRQRLHWLRHALPDIVAQRTDVLSPRMVRILEDLAQDWRRLDDRVEAVSGEIDALSKNTELCLNLMTIPGIDPIISSAVVAAIGDGAAFARGRDFAAWLGLVPKQISTGDRTILGRITKRGNRYLRMLFLQAARVVLLRPKNWMQHSFGPWLAAAAQRLHHNVLATALANKLARIAWSVLVQHREYEARLSVATT

SEQ ID NO: 436810 - protein, 355 aa, unidentified
MDSKKYIGMDVHKEAISIAVLNSSGKLVMECVIETKAITILDFLKGLRGSLHVTFEEGTWAAWLYDLIKPHVTELVVCNPRRNALLKEGSKSDRIDARKLAELLRSNMVRSVYHGEHGVRKLKELARSYLAISKDLGRVMSRVKAIYRSWGIPCTGKQVYAQRYRSEWLDKIQEAGVRRRAEFYYQQLDALRPLRQQVRQELLAEAKKHEAWKLLRAIPFIGPIRAALLMALIQTPHRFRTKRQLWSYSGFGIETHSSAEQRFLQGELRRAKKPACIRGLNRNHNHDLKNLFKSAATVAAVKAGPFQEFYDALVAKGIRPEMARLTLARKIASITLIIWKKGARFDAQHLKPQTA

SEQ ID NO: 436811 - protein, 394 aa, unidentified
MRYAGIDIASETHVLAIVAADGTVAVKPTAFAEDDLGYQNALTLLGTPGEVLVSMEATGHYWKNLFAVLVAAGHAVALLNPLRTHRFAGVDLERTKTDAIDALAIARFAAQKRPPTTPLPDALAEELRELVQLRQRLMQDFGDRVRQLHRLVDLGFPEFTRYVRTLDSELATAILRDYPTAAAFRGVSARRLAAVRYDGRHQVGPNLARTLIDAARRSVGQHHSATYRLQIRYACDDLDTLRGRLRTLDRDLDGKLRQHEVGRLLTSIDGIGPQTAARVIATVGNPAHFRSGTALAAYVGTIPALKQSGKRQSLRGGHTPIGNAQLRAALWMPTLSAVRCNPWLRAHYQRLIARGKLPKVALLACMRKLLLVIYSVAKHGQPFAPRLQPPQAAT

SEQ ID NO: 436812 - protein, 354 aa, unidentified
MLAELVDHVIGVDPDRDWITVAALDSRTAGVITTDRFPATRDGYLDAIAWADAHTEESERAWVIEGTASYGRGLTMALQRLDELVIEFDRPMRKATKDGAKSDALDAIRAAREALGRDKLNQPRANEGIREAIRVHTVARGAAVRARTAAVNELKAFIVTADEQLRSELRGLRTAKIVVRCSRFRDSAKRPIDERCTRNAMRALARRVQHLEAEIAEHDAAMKTLIDRAAPQLIAERGVGYVTAAAFYLAWSHPGRCHSEAAYARLGGTAPVEVTSGQNQDRHRLNRGGDRQLNRALYFVAVTRQRCCPVTKDYMARRTSEGKTEREATRCLKRFIARRVWRLLEHPELHLDKT

SEQ ID NO: 436813 - protein, 344 aa, unidentified
MGEVSTIGLDIAKSVFQVHGVSSDGEVVIRKRVSRAKVLEFFASLPSCLVGIEACPTAHHWSRQLHALGHTVRLMPPSYVKAYLKRSKNDANDAAAICEAVTRPSMRFVPMKSEQQQSGLMLHRSRQLLVRQRTMLSNAIRGHMAELGVISAKGRNGTAELLKIIANETNDCIPAAAQFSLDVLARQYAATTAEIGVIEKRIHAWHRSCEESQRLEEIPGIGPIVATALVAEVGDWKAFSSGRNLAAWIGLVPKQHSTGGKDRLGGISKQGNRYLRWLLVAGAMAVIRYARQHGTKRLWLVRIMERRPIKVAAVALANKIARIAWAIMVHGERFKEPRLLPVAA

SEQ ID NO: 436814 - protein, 324 aa, unidentified
MLPTLGIDISKDSFHLELSINDKLRHRKFANRKEGFGELCVWLVKHKATQVHACLEATGPYSEALAIYLHQQGHTVSIVNPVQIKAFGQSELRRNKDDRPDAGLIRRFCEKQRPAPWTPPPVHLRELQALTRHLENLIETRQQQINRLEATNTKNVAKSLRKLVAHLDAEIKRTEQQIDDQVDRHPDLKQQSELLESIPGVGKRTAAKLLAEITDISQYKSARQVAAYAGLTPRNNRSGTIRGKTRLSKTGNARVRKALFFPAIVAKRHNPIVRAFCERLSSHGKNKMQVIGAAMRKLIHIVFGVLKSGKYFDPTHELLLNSVS

SEQ ID NO: 436815 - protein, 347 aa, unidentified
MLHAGLDLSRKKIDVCLLSEEGEHLDQLTVPPDADSLRTLARRIAEVHAEPVLAVIESMTGARIVHDTLEQEGWGVEIADAQKVKGLAPLACKTDKIDSQVLATLSHRDLVPAIWLPDPRVREERELARFRLHLVKHKTALKNRIHSTLINFGRSCPVTDLFGLEGRRLLERLNVPEPWRGNITASTVLIDELEQQIEAINRRLKEGHADHPYIGLLMSVPGIRWVLAFTIAAEIGEIERFASSTKLVGYTGLCPRVNQSGERDHRGPLTKHGPRYLRWGMLEATMHALRHPAYAERYQRNKRRLGEQRGAKVAQVDIARKLTHAIWHMLSRNEKFAPRGADFRLAA

SEQ ID NO: 436816 - protein, 340 aa, unidentified
MEEVSIIGIDLAKRSFQVHGARPDGSVAFRRKLSRGKLLDFVVSPPRCAVAMEACASAHHWGREMTRLGHDVRLVPPVYVKPYVKRHKNDAADAEAICEAAQRPTMRFVAVKTEEQQARAMLFHTRDLLVRQRTQTINALRGHLAEFGVVAPQGPAHIGRLASSLDDPGSGLPSAVRRLGGLLLDRVADLDEKIGGLEKEIRASARQDEAAARLMTIPGIGPIGAMAVQAFAPPMESFRRGRDFASWLGLVPRQHTTGGKPRLGRISKMGQRDLRRLLISGAMAVVSWAVRRGRTNDPWLARMLARKPRKLVAVALANRMARIIWALMTKKEDYRTPAAA

SEQ ID NO: 436817 - protein, 444 aa, unidentified
MKVIYKQVAGLDVHKKTVVAARMRVTEEDRVEWETKTFGTTTPDLLEMHDWLSEWELTHVAMESTGDYWKPVFNILEDSFEVWLVNAEHVKHVSGRKTDVKDSEWLAELMLHGLLKPSFIPPKPQRALRELTRYRTRLVEERARVVNRVQKLLEGANIKLSSVASNIMGVSARAMLEEIMAGQTDVELIADLARGQMRSKIPELEKALTGIVQPHHRFVLAQQLDHIDFLDEKVETLSLRIEQQLETMNWPDEPSPPDAGEGAEEGTAVADESELPVTWNAAVALLDTIPGVNRRVAEVMLAEMGLDMSQFPTADHLASWAGLAPGNHQSGGKRYSGRTTNGNKPLASIMVQAAWSAVRIKNTFLKSRFHSLAARRGKKRAIVAVAHSMLVSAWHMLANQQPYQELGGDYFDQRKKETKVSYLVRRLEKLTGGSVSIELQSAAA

SEQ ID NO: 436818 - protein, 340 aa, unidentified
MAIEMKVVGLDVAKNVFQVQGVDRRGETVLRKRLRRSQVAEFFRHQTPCLVGIEATQGAHYWSRVLQALGHEVRLVAPQFVKPYLKSQKNDANDAEAICEAVSRPNMRFVPNKSIEQQDLQALHRIRSRMIGSRTQLGNQIRGLLAEYGIVLPLHLSQVRKALPELIEEDNALLSGFGRQLLASLYEELCGLEQRIAAMEERIHQVHRSNPLCQKIAAIEGVGPVIATAVVAAIADGRVSHNGRQFAAWVGLVPRQYSSGDKQRLSGITKRGDPYLRMLLIHGARSVVYRASNKNDRRNQWIAEKQRKLGTAKTCVAVANKNARVIWALLARDEPYRCAA

SEQ ID NO: 436819 - protein, 408 aa, unidentified
MIFVGDDWAEDHHDIEVLDEAGATLARRRLPEGLEGVSALHVLLAEHAAEPADVVIGIETDRGLWVGSLVSVGYEVFAINPKVASRYRERHATSGAKSDRGDARMLANLVRTDRHLHRPVAGDSTLAGAVKVLARAHQRLIWSRHRQVNALRATLREFYPGALVAFGSELAHHDAVAVLGRAPTPAQGRALSASAIASALRQGGRQRNVETRATAIHEALHSPQLETPATLASAFGASVTASVGVIAEMTRQLATLEAEMAKAFDSHPDAEIIRSQPGLGDVLGARVLSEFGDDPARYQDAKSRRRYAGTAPITKASGTKKVVLARFVRNRHLADACYLWAFSSLSASPGARRFYDERRTKGDSHHQALRVLSNRLVGILDGCLRHRTLYDEDVAWGHRVPVEKSSAA

SEQ ID NO: 436820 - protein, 316 aa, unidentified
MNTKTNQSINVGVDTGKFQLDIYIRPLDIYFTVENDEKGIKEAVKKIKKYKPERIVIEATGRLEMPFIIACAEANLPFTIANPVHIKRFAGALGQRAKTDKLDAQLIAHYSEAIQPKLSKLKPDTMQAMSNLVTRRNQLLNMQTMEKNRLQIMPKELAMTIKPVLTLFKNQIIKIEDKIVKIIESCPEYQAKNMILQSMKGIGKIAAASLISNLPELGYINSKQASALIGVAPMNRDSGRYKGQRKIQGGRPQVRTVLYMAMMSAMQSNPVFKATYQRLLAAGKPKKVAIIACIRKMIVILNSMLRDGVMWEAPKV

SEQ ID NO: 436821 - protein, 433 aa, unidentified
MLKINYMSTLFVGIDVSSKTNAVYAMDFEENKYISSSFGNNQPGADQLVNMIAECMQKHKNLDTVLIVLESTSVYSVHISSFLSTSEVLMPYKPYVFCVNPKAASNYRKSYIGMEKTDPTDAYLIADFGRVGRTKKLEPWRGGQFIALKRLTRHRMHLSECITREKTYMVSNLYLKFSELQLLEGDDKPFGSLYGAASSAVLTEFLSPQEIIDMPEEDLLTFLAQKSRNRISDLSKTSELLRKAARDSYRLGKCMYEPLNISLASSFNCIHAYQKEIKLIEQAIEKCINGMNPNALIILQSIPGIGPVWASGILSEIGDITAFHSSDALAKYAGLYWPKGDSGDFTSEDNKMSKAGNPYLRCYLGEAANSVRKHIPEYADFYARKYAEVTKHQHKRALALTSRKFVRLVFGLLVKNQLYTGEKLDTEYNIESN

SEQ ID NO: 436822 - protein, 357 aa, unidentified
MTSMTEIHADVSLALFLGVDTHLDTHHAALIDSHGRKVSDHEFGTDAAGCTELLAWAARYGVITTAGVEGTGGYGAGLTRHLHQAGVTVVEVDHPDRRARRRYGKSDPLDAYAAAAVQSGRATTIPKDRDGDVESIRLLHNARASAVKARAEAMTQLKSVIVTCPDSLRTQLRALTKAKLIRTCAALRPDPITTGGVLAANKTTLRRTAKRILDLSAEIKEHDRDLRMLTRRAAPDLLALVGVGFETASQLLVTVGENRDRIHAETSLARLCGVAPLSASSGKTKRHRLNRGGDRQGNRALHTIVLCRLKHDPRTKAYVERRAAENKSDKEIMRCLKRYVAREIYRVLNPKNGVDES

SEQ ID NO: 436823 - protein, 314 aa, unidentified
MNSNMIGIDVGKYGLDVYISKTNSSLKFNNTIEGITKLIKRLKKFKCIKLIFEPTGGYELLLARLLKQGKLRFSMVAPKKIRTFAQASGISAKTDKLDAKVLAKFGEKMNPDDTVFKEDHHLKLTETSKRRCQVLENIIAEKKRLEVLMDESLRTRINNHIDYLGIELNELEDEIEALIESNKDWKKKSELLNSVPGIGKVVAQTIISDLPELGSLSNAEISSLVGVAPMNKDSGTQRGYRRTIGGRERVRKVLYMSILSAIRFNPRIKDFYQRLKANGKKSKVAMVAAMRKLLTLINTMIKNKMNWDEFQENA

SEQ ID NO: 436824 - protein, 338 aa, unidentified
MSKLFECIGVDVSKNTLDVALFRGEIDWNQCHVRVSNNESGFKELKKWLRNKQVDKKRLRVCMEFTGLYTQVFRMWLESESITYYMVDPKRMHHFTPPLNIRGIRQIKTDKTDAFRIAIYCSFFHESLVPSKLPSPAYFKLKRLLAERRQYLKQSTLYKQQLHDISIYDSVSSRIRKQDELKSLKDKIKQTEVEMKAIIESDTLIKKNYKLLLSVVGVGFVVAVTTIVLTENFTSFTNPRKYACYIAIAPFPYESGTSVRGATRVSKQGFRQAKADLSICVLPAIRFDPEIQEYWHRKKAEGKHTGVVFNAIKFKLVLRMFAVVKRGKPYVNTKGYKR

SEQ ID NO: 436825 - protein, 434 aa, unidentified
MSRKETVQPELEFVAFVGIDWADQKHVWCLQGAGSTERESGELEHKPEAVEAWVGELCRRFGSGPIAVAVEPVKGALVCMLRKYECLHLFPVPSTMSAAMRKALYPSGAKDDPRDADLLLDLLVQHRDRLRHLKPDNEETRRVQNLVEERRKLVEEKTAQVNRLIGYLKIYFPQMLEWFGRLDTKLVCEFLERWPSLEELKKVPAAELRKFFRQRQGRHHELTEDRIQGIVQAMPAIQDRAVIEAKGAVVQVIAQRLRSLLEGIANLDRKIEAAAGAHPDFFIFESLPGAGAALAPRLLAAFGSQRDRYGSADEVQKHSGIAPVTETSGKKKWVHFRWACAKFLRQSFHEWAGHSIAQSLWARAYYQQQRERGQDHHAAVRALAFKWIRIVFRCWQDRVAYDENKYLAALAKRGSPLSSVLAATTTALCNPCGC

SEQ ID NO: 436826 - protein, 298 aa, unidentified
MGKSIRNLSTVTRVGLDLAKRVFQIHTLDAKGEIVVVRKLTRSQLLPFFATLPPCGVAMEACASAHHWGRALIELGHEVRLLPPAHVKPYVRRNKNDAVDAAAICEAAGRPGQRFVPVRSIDNQAELMRHRARELLAGQRTAALNALRGHLAEIGVVGPQGAQHAYDLKRLAIDGFDANGQVLVPDCVRVALRPLVGQIDALDEAIGAIDKEIAASVKADETAKRLMTIPGVGPVTASAIVAAIQDAGAFASGREFAAFLGLTPRQNSTGGKTRLGRITKMGDRYLRKVVPNDCHGLL

SEQ ID NO: 436827 - protein, 387 aa, unidentified
MTQPGRPAPTSAALDYDSTIIGALEMSEKKWVLAVQLPGVKRYTRHVLEASGKELASLIERLKARCAAAGHPIARVILTHEAGRDGFWLARFLVRRGVEVHVMQPSSLPVDRRARRAKTDVIDVEMLLRTLMAWLRGEPRVCSMVPIPTETDEEARRAHREREDLTGERLSILNKIDSILATLGVKGCRALRRDRRKQLASLRQPDGDPVPQAARIRIERLLDRLELTLRQIKEVETARDAVLKKPAPADEAERMIRSLVDMRSIGPELATLLVREAFSRPIPNRRALGSYAGLAGTPFSSGGNEREQGIGKDGNRRVRAAMVELAWLWLRWQPDSTLSAWFRERVGKAGGRIKRIMIVALARKLLVALWRYAKDGVIPEGAKMKIA

SEQ ID NO: 436828 - protein, 345 aa, unidentified
MDQIIRIGMDTSKHIFQLHGVDAAERPVLRRKLRRSEMLGFFVRLSPTIIGMEACAASHYWARQLRELGHEVKLIAPQHVKAYVKRNKNDGRDAEALCEAMSRPTMQFVAVKTEEQQAALMLMGVREQLIKRSTQLGNAIRGYAAEFGLITAKGFDKIEPLLVRIAQDGSLPELARDMFAIQGRDYARVQLELKAIEARLRAWHRANADSRRLASIPGVGLICAAALVLKAPDPHAFPSGRHFAAWMGLTPKDHSTAGKTRIGKITRAGDEMLRSVLVSGATAVIQQAKKGRGHPAPWLVVLLARKSPKLAAIALANKIARIAWKLLTTGESYDGRRMFDASAVA

SEQ ID NO: 436829 - protein, 328 aa, unidentified
MTMNPAPRVFNHIVAFDVAKESLAIHVLPGDERQAIANKPKAIRKLLIAQIRRNAKLGLGPLLVVCEATGGYERHLLEICAELGIAAHKAHGSRVRNFAKYLGLIAKTDPIDARVLALFGLKTENLRLHTPLTPALTALIDLRARRDQVQAMLLAETGRLEHVRYAGVTRSLKEHIASLRKSLTALEAQIAAHIQANEALARKAALMRTLKCIGPGTVAALLAYMPELGALSRTQAASLAGVAPFDERSGKLSLPSHIEAGRAAVRRALYMAALTATRHNPIMKSFAERLKRNGKCAKVVITAVMRKLIVTLNAILRSEEPWRHAQTA

SEQ ID NO: 436830 - protein, 395 aa, unidentified
MTSPTTPSHNNAISIGIDFHKRYSVFCAIDSADRILEKGRIDHSTPELFIHLIQRHPGCRVVFETTMNWAWLYELLEPHLVHKDIILADAFKTRIIAESQVKNDKVDAHILARLLRAGMICEVHIPSKAARQRKEVLRQRSFFVRQRTRVRNRIHRLLGAQHNLQLPQCSDLFGKRGLGFLDKLDLPAPAGLLLKQQLDMLRNLQSRIAEDEAALKTMHEDSPELTFVQSIPGMGPILAAVVVSEIDSIKRFGSAQKLCGYAGLCPSTSSSGGKTHQGRLMSRCNKWLRWAFVEAAWVSVGCSPYFGDHYKRKRALGKKANTAILSTARRMARITWQLLTEKRAFESLPPSQKTKDQAGGALKGSPVSVKGLETAAISTPLSPAAPIMDWMVAEA

SEQ ID NO: 436831 - protein, 335 aa, unidentified
MRAVGLDVHLDFCEVAIVEEGEVRSAGRIETKPEQIELFAGSLGPEDRVALEVTGNAWEIARIIEGHVAQVLVVSPSDTGIRQARAKTDRLDARTLARLLAAGSLDAVWRPDRQTWVMRRRLSRRGQLVWARSRAKNEIHAVLMRQLVGRPPFSDLFGVKGRAWLAELQLASEERESVDSAMRQIEFLDSEIAEVERLIASDALESPEIRRLMGVPGVNVIVAASFLAAIGDIHRFQNPRKLVGYLGLDPRVRQSGPGPATHGHISKQGSVRARHALWRRAGARSASLVRCTRSMSASEHDAGTPSRSSPRQESSRASSGHCSRVKRTTPTPSHH

SEQ ID NO: 436832 - protein, 337 aa, unidentified
MNYSGIDLHSNNSVVSVIDETDRVVAERRLPNDLPKILALLAPWRPELAGVVVESTYNWYWLVDGLQAAGFVVHLANTTAIKKYDGLKHSGDETDARYLAHLLRLGILPTGTILPAEHRQVRDLARKRMQLVRSRTSHILAVENITARQSGTRITSNQVKQLDQAAVGQLHLPDDVALAVRANVAVIATLSAQIAIVEKRLQEKVAPRPDYALLTTVPGIGQTLATVIVLETGTVERFASAGNFASYARCVDSQRMSNGKKKSEGNTRNGNPYLCWAFIEAANFAMHFSTEARQFYERKKARTNSVIARKALAHKLARACFHMLKERKPFDVNRCFA

SEQ ID NO: 436833 - protein, 436 aa, unidentified
MIETCCEWSLFRGVSAELSTGAGSIEERCAGMGDIVEVAWVGIDAGKVSHHATLVDADGTIVWSRQVRNDQAAVEQLIAKAAATATTVRWAVDLTSAGAALLLALLIAAGQRVVYVPGTVVNRMSDTFAGEAKTDARDSYVIAETARLRRDLTELITPNELVAELALLAAHRADLMADWVRGVNRLRELLTRVFPALERSFDYTTRSALILVSRYSTPDAIRDADADQLAAYLRSEEAHRPSIPGMVAKAHAAAAAQTVRLPGEAATAALITRQARKLLDLDREIKDLDKQITERFRAHPQARIIESMPGMGPILGAEFIAITAGDLAAFGTAARLATYAGLAPVPDDSGKRKGVRHRPRRYHRRLRHVFYMAAFSSLKTDGPSREFYARKRSERQRHTRAMIALARRLVDVLWALLRDNRTWQPQPPTPLPATAA

SEQ ID NO: 436834 - protein, 341 aa, unidentified
MEKVSIIGLDLAKNLFQAHGVCTDGSVGFRKNLSRNNVLMFFAAQPRCVVAMEACASSHFWAREIGKIGHEVKMIPPIYVKPFVKRQKNDTADSEAIAEAASRPTMRFVAVKSEEKQALGMAFRVRDLFVRQRTQAINALRGHLAEYGVIAPQGIAHLGRLIRVVVDPDNGMQGSVVALANMMLDQIKGLQERIDILEKEIRTRSKRDDVASRLMTVPGIGPICATAMEAFAPPAETFSKGRDFAAWVGLTPRQHSSGGKERLGNTSKMGQRDLRRLLIIGAMAVVRWAVRKGAPEGSWLARMLLRKPRMLVAVALANKMARIAWALMAKGGIYRNPAAVV

SEQ ID NO: 436835 - protein, 403 aa, unidentified
MEGPLISLDVSKGKSNYRFFENGTDRKGKKGVIRHDIQGFDSIRDEAEKMEKRLRIKPSVIFESTGVYSDVVEKYFTDKGFDVYVISPLLSASMRKEGVRPAKNDSLDTLSIAKVFYSKDDLRKCSENDKKAERLREMSYELDMMNRRIRPMKCQFLRLLDKVWPCLDEVSDYSSRFMLDFIIAFGHPENIKTVKGVLSVIRKSEMGTAGRKDKIAQDLFDYCHTHLSAVSKDSSYVELLKRMAIELKAMAKKKSELIDRMAEEARNKDEFARLLTIPAVAKTTALKIMARVGDISRFRNAEALVAYCGLDPRVYQSGKMTGEHRTITKKGDCILRSTLFLAVKLMVMLYPDTKVARFVAAKAKNGLFYKQAVVAGSAKLARIIYSMLTHHENYVEFNADIVA

SEQ ID NO: 436836 - protein, 356 aa, unidentified
MDETARADVIVGVDTHKHVHAAVAIDALGARLGATTIPVGERGYRALEAWARSLGPIRAFGVEGTGSYGAGLSRFLVAQGHAVLEVNRPDRQLRRRKGKSDPLDAESAARAVLGGQATARPKSGTGTVEMIRHLKVARDTAVKGRTQAMVTLKAIIVGAPAALRERLDRITGKMALIRHLAALRPGPITSTAASAKASLRAIARRWLALDEEIRGHDAHLETLTAARAPELVQAHGMGAGTAAAMLLLVGDNPERIRSEAAFAKLCGACPVPASSGKTTRHRLNRGGDRRANAALHRVVVTRMRGHQPTLDYVRRRTREGKTKPEIMRCLKRFVAREIFGYLCATPKPAAPSFEAA

SEQ ID NO: 436837 - protein, 386 aa, unidentified
MQTVANRPEAPNAIRNDLGAIFISLELSRSTWLITSLSPDGGEKMSKHSVPAGDIYALLARFSEFKQKAFARTGKSFPIIVIQEAGLDGFWIHRVLQNEGIESHVVDPASIATSRRRRRAKTDRIDGEALLRTLLAYKRGEPRVCAMVKAPTPEEEDRRRLCRERKILIAERVKHVNRIKGLLFCQGVSGYKPLRRDRRQRLDELRTGDGGLLPKHLKAQIGRELARLEQLLEQIMAVEAERDALFAAAPAPGPPAMLLNIKGIGPEFAAILWSEGLFRHFDNRRQVASYAGLAPTPWQSGSVDREQGVSKAGNPRLRTTLIQLAWLWLRNQPQSALALWFKDRVSRNGGRLKKTTIVALARKLLVALWKYVTAGVVIEGAIVKSA

SEQ ID NO: 436838 - protein, 486 aa, unidentified
MAKEMSAYERLTGGSRKQRKELQRRLYADDPGLGVIHANAAGIDIGNESHFVAVPVGRDAAPVREFGSWTADLERMAAWLKSCGIETVAMQSTGVYWFAVYDVLEKHGLQVFLVNARHTKNLPGRKSDVQESQWLMKLHTYGLLRNSFRPPEEIRPIRAVWRLRDRHVEEAARSIQHMQKSLTSMNVQLANAISDIGGVSGQAIIRSILAGERDARKLARLRDRRIKASEEEVARSLEGNWQEDQLFELQQAVDEYDFRQKQLSECDRKLQTYLAVLPSRPAPAADTGTVTPPPSAPGKKKKRAKKIGGGNTPQSFDLAAELNRITGVDAVRIEGVNLMTIQTVVAELGTELGNWWPTEQHFASWLGLSPKRDVSGGKVIRHTHENNPNRVAGILRMAATSLLRSDSYLGARYRNLRTRLGAPKAIKAMARYLACIIYRLFTKGQAWVDRGAEQFEQNRQKRDLAKLQAQASSRGFRLVPTTDQLA

SEQ ID NO: 436839 - protein, 300 aa, unidentified
MTASIGIDIHKASLVVVCHDGPTWTVKRTEPDLTTLAIKRRTLQPEVIVLEPSGGYEQLVLDVLRQHPWPVARVAPRQVRAFIRGMGVQAKRDRLDARMRARYGTMAAPRLTIAPTPVQQRVAAWSAWRRTLRADIAAKPHQRQNQPAEVVASIDRVIRELEAECAAVTATIADLGATAPEWARTRAILGSCPGVGAITVARLLAELPELGQRPAKQRAALVGVAPITQQSGRRAGRSGLWMPTITAISHNPVITRSAARLRADHKPDKVVTIACLHKLLTILNAMVMHDECWQPRPTAA

SEQ ID NO: 436840 - protein, 407 aa, unidentified
MRLFVGDDWAEDHHDVEVMDQAGKVLARRRLPEGAAGMAQLHQLIGGFLGEDADDGEVLVGIETDHGPWVMALIAAGYRVFPVNPQQSARFRARHSVSGAKSDAGDAHVLADMVRTDSHQLREAAGDSPEAAGIKVLARTHKTMIWERTREVQRLRHQLLEYFPAALEAFADLDAPDALELLGKAPDPERARRLTRAQVSAALKRARRRDIPDKATAILMALRGEHLAQPPALAAAYAATVRSLIAVITALNEQVKILQGQVEEHFGRHPDAEVYLSQPGIGAILGARVLAEFGDDPHRYRDGKARRNYAATSPITRASGKKKVVVARFVHNDRLIDALNAQAFAALSASPGARAFYDQQRATGHGHNDALRRLANRLVGILHGCLKTGTLYDETTAWSHHTQNLAA

SEQ ID NO: 436841 - protein, 337 aa, unidentified
MNNSVIGLDIAKNIFHMYTFVENKPKKKKLKRAELLAFFANYPVSLIGIEACGGAHHWARELIKLGHEVILLNTRYVKSFVVGNKNDFNDAAGIFDAVTRPNKRTVMIKTIEQQDIQLVHKVRQGLVGKRTALVNQIRGLLSERGIIISQGINQVREQLPLILEDAENDLTVMAREVFAEQYEKFAALDKEVKAQDRRISALCNSNALSRRFLDVPGVGPMTASIVASDIGNGKGYLSSRDYAASLGVVPGQHSSGGKQVYLGISKRGNRYIRTLLIHGARAVLKNCHKKKDKLSLWLQALIERRGFNKAAVALANKNARILWAMATRDKEYDACLV

SEQ ID NO: 436842 - protein, 354 aa, unidentified
MIMIGADYHPAFQQIAFVDTETGELQERRLEQPEGAEKFYRELAAQGKRVRVGMEASGHARWFERLLAELNIELWIGDAGEIRRKRERKQKTDRQDAQHILRLLLKDDFPRIWVPSWENRDLRQLLWHRHRMVQARTRMMNQLQAVALNEGLRCKKKLWREAGRKQLEAFRLAPWASRRRQDLLELLDRLNPTIAALSQAIEQEVEKCPEAQRLMTHPGVGPLTALAFVLIIERADRFQCGKQIASYLGLVPLEDSSGNRRRLGHITKQGNSLLRFLLVEAGQVTVRSLPEWRSKYVHLTMRRGRKIAKVAMARKLAVRLYWMMRQGWDYEQLKKFGSHSGQPGHRHGVKSNIE

SEQ ID NO: 436843 - protein, 400 aa, unidentified
MVSAQLQVAVDVGSQRHRVAVGDIAGELLEEFDVQHTAAGLAGFFTRIEHWEAKSGWPVAVAMEGYNGWARPLDRQVLLRGWRLFNVNNLKLARYKEIFAAPAKSDAIDTRRMLELFRLRGQLRVAREVLQEVAPVALENDKLKRITRRRRQLVGEKGRMLNRLQADLQAVCPGLLSITGEADNLWFLSLLGCRDDLRKIARLRRGTLLSLDGVGSQYASVIEAWQPEAVFSEETPWVGPMIVADARRILALKREIKALDEVIERLVRDSELARRIDTIPGFGPTSSGELAGEIGTLERFRGEASLAVYLGMATLDDSSGKQRGSKPPRQVNTRAKAAMMIAAMRHIEQVAASRTYYDKKRAQGKTHNQAVRCLGRQLVRVVWSMLKRGRDYELRAPAVA

SEQ ID NO: 436844 - protein, 338 aa, unidentified
MKNFNWYIGIDISKNTLDLCLFDGQSIRKETRIENTVRCFQKEIQKWQKEFGLVLDEVLFCAEYTGKYIYPLVESYQLISLHLWLESGAQIKQSLGIQRGKSDKIDARRIAEYSWRHQDKAKLLGLKDHEIITLKNLLAECRGYTEDRAKYRGQLKDDKGFMSKPDYRAKKARLEILVKVLTKQISALEVQMHGIVQKHASLKNQHDLLVSVTGVGPKLALETIAATEGFTRFGDARKMMCYAGIAPFRYTSGTSIQSKSKVSHRANKRLKSLLHLAAMSVIRLEGELKDYYKRKIAEGKAAMQVLNAIRGKILLRMFAVIKNNRPYQKNYRNALQMS

SEQ ID NO: 436845 - protein, 460 aa, unidentified
MSRQKLAGMQRSVPKKGDWKALEIVHPDAAGVDVGGSEHWVAISPNRDPEPVRRFGCFTADLREMGRWLVEKGVRSVAMQSTGVYWMPVFEVLEQQGLEVYLVNAQHTKNVPGRKSDIQECQWLLKLHAFGLLNNSFQPTDEIRIARTLWRQRSNLVTEAASVVQRMQKVLTEMNVQLSNVLSDISGLSGMKIIGGILEGERDPWELAALVEPEVKATPEEIAKSLEGNWREELLFVLRQHVELYRIYQGKIDDCDLQTRKHLELLGSKVDLKTQPIGRRPKGKKNSKNAPGFDLRTELYRITGIDWSQINGIDVLTAQTVITEAGADLSAFPTEKQFASWLGLSPTNEQSGAKILNRRTRKVVNRATVAFRNAAVTLLRSQSYLGAQYRRLRTRLGAPKAITAMARKLACLFYRLIKYGQQYVDKGTEYYEARYREQQIRALAKRAQKLGLQLVTPNSA

SEQ ID NO: 436846 - protein, 343 aa, unidentified
MDQYVALDVSLQKTAVCVLNVSGRVLIEADVPSEPAALIAFIQTHAPGAARVGLESGPTSPWLWHSLRAAGLPVVCMDARHAHAALSVRPSKSDRNDARGLAEMVRMGWYREVQVKSLAAHERMALLGVRRRLVDMRVEIDGQIRGILKTFGLVVGSGNKGAFAQRARMLAQDHPVLSALIDKLIEVREVAVAKVAALDKEIRRFVRDDLTLRRFMTVPGVGPVTALAFRSTIDEPNRFKRARDVGPYLGLTPRRYQSGETDRQGGISKCGDRFTRTCLYEAASVLLTKVQRWSPLKAWGTRLARRIGSKKARVAIARKIAVILRCIWTDGTEFWWTKETATA

SEQ ID NO: 436847 - protein, 343 aa, unidentified
MGNTITIGVDLAKSVFQVHGVDAEGSIVVRRQLRRRQVVPFFEKLSPCLVGMEACATSHHWARAIGQLGHRVRLMPPRYVKAYVKNQKNDAADAEAICEAVSRPTMRFVEIKTTEQQSVLILHRTRQMFVRQRTTLINAIRAHLAEFGIVAQIGRNGVESLLRIIGEHEDSRLPEVARSCLRALVAQLHLVKRQILEADRRILAWHRSNETSRRLDSIPGVGPLVATALVASVPNPQAFKSGRDLAAWIGLVPKQNSSGGKERLGGISKHGNRYLRMLLTVGALAVIRYAQTHGTAHRPWLARLLERRPTKVAAIALANKIARMAWVIMARGERYREPTLQTT

SEQ ID NO: 436848 - protein, 460 aa, unidentified
MNPKRSKSRNGGKMPMVHPNAAAIDVGATMHMAAVRADRARKPVRSFGTFTADLHRLVDWFTECGVETVVMESTSVYWIPIFELLDARGFTVFLVNARDARHVPGRKTDVSDAQWLQRLHSFGLLRASFRPKGQIAELRAYVRQRERLLEYAASHIQHMQKALTEMNLQLHHVVADITGATGLRIIRAILAGERDSEALACLRHYSCHSSAETIAKALTGSYRAEHLFALEQALALYDAYHEKASACDARIEAVLKELSIHRGHGHGPAPQASRRRNRTDQANALAFDVREALFALLGKDITTIDGLGPYLSLKLIAECSDDLSSWPSAKHFTSWLGLAPSNKVSGGKMLSSRTRRSGGRAAALLRLAAVTVGRTDTALGAFYRRLSARIGKAKAVTATARKIAVLFYNAVRYGMDYVDPGASSYEARYRTRVVNNLHRRAKAFGFVLQPLEPQVGAAVS

SEQ ID NO: 436849 - protein, 426 aa, unidentified
MRVLYDRVAAIDVHKDMVKVAIRVPGAKRGTRKTDVLEFRTFYGVLQEMARELRRRGVTHVVMEASGVYTDPVYYALRELDFEEVMVINPAHAKALKGHKTDAKDAIRLLDLYECGLLSGSYIPDPDLREVRDLARYRMKTVQARTSEIQRLQKTLETAGIKLSSVVSDVTGGSATAMIEALISGERRGSVMAGLAQTRMRTAGKMADLSMALAGRFTDHHALMCRLHRDRITIFDDAVKDLDAKIAPLVARYAREAELLKTLPGFGDVIVAGWLGAIGPAPHQHFATASRLASWATLCPGNYMSAKKSKGGRTGDGGAYIKPLLTQAAWAAVRVPGRLQARFHRLVRKFGGPRNKGAQKRAITAIAHTLLKIAYSVLKTGKPYADLGADFYTRRESPDARQGYLMRQLQKLNPGCVITIIPAEAA

SEQ ID NO: 436850 - protein, 408 aa, unidentified
MQVLYPRCAGLDVHKDSVVARIRCVSEPPHDEVRSFATTTSALLELNEWLSAHQVTHVAMEATGVYWKPVWHLLEGDFELVLANAQHIRNVPGRKTDVNDATWIADLLAHGLIRSSFVPPAPIQELRDLTRTRKQLVREISQHSSRIQKILEDANLKLGSVLSDVLGKSGRAILRALIDGETDPEKLADLAQGTARKKRTELVEALHGRIRDHHRGLLKVHLGLVTALEQALANIDTTVGKTLAPIHKSARLLTTLPGVSDLTAQVMVAEIGVDMARFPTAAHLISWTGLCPRSDESAGKRRSTRVRKGAPWLKVALVTAAWAAVRVKNSYLQAQFHRLRSRRGAKKAILAVAASMLTAAYHMLKNGVEYKDLGAEHFTRRDRDKMIQRLVRRINDLGCQVQLLPQAA

SEQ ID NO: 436851 - protein, 341 aa, unidentified
MKVSTLGIDLAKNVFQLHGVDHEGHTILRKKLTRAKFVQFVIQLEPCLIGMEACSSSHYFARLFTRYGHEVKLIPPQYVKPYVKTNKTDAADAEAICEAVTRPNMRFVQIKTEEQQAVLALHTERGILIRERIACANSLRATLAEFGITIAAGQSHLTRELPAILEDSENGLSPFVRTSIYRQSKHIRELEEQVKQVEEALASWYRTQEACQRMAKIPGVGMLTATYVVAAVGNARQFSTAKQFASWLGLTPKEHSSGGKQQLGGISKRGDGYFRYLLVHGARALTAWVNRNGAVEENSWLQGLLERKHYNVAVVAMAAKTARIMWSMLSHHTEYQPRQLA

SEQ ID NO: 436852 - protein, 387 aa, unidentified
MSRNARVPVPATTLDQDSTLVVVLELSARSWLVGARVPGIGRMSRYALAPSAEALAAWLDTAKARAGTAGRMVVRVVLAYEAGRDGFWLARYLEARGVEVYVIQPSSVLVDRRARRAKTDALDVEMLMRTLLAWLRGEPGVCSMVPIPDVAEEDGRRPVRERQKLIGERLALLNEIEGLLATLGITGYRPLRQDRRARLAALRTPEGDPLATNAAARIGRILDRLELVMQQIAELEQARDAVIAKAAAASEAETMIRGLARLKGIGAELATVLVWEAYVRSFPNRKALGAYAGLTGTPFASGSTTREQGISKAGNRRLRSSLVELAWLWLRYQPDSKLAAWFRSRTGSVGSRMRKVMIVALARKLLVALWRFCRAGVLPEGAALKAA

SEQ ID NO: 436853 - protein, 336 aa, unidentified
MNGSTGRWVGIDVAKSKLDVALLDERGKFKNHVFANDAKGHALLIAWLLDRVGAAAQVRVCMEATGPYGEASAIALADAGFVVSVVNPARIKGFAQSELVRNKTDRADAALLARFGQTMQPEPWVAPPHEVRELRTLVDRLHSLKEMHQQEANRLEAAMNQPGMRASIESHMQWLQSSIKELERQIDDHIDGHPSLRADATLITSIPGVGKTTAAKLLAYLGDVRRFKNGKALAAFVGVTPRLKLSGSSVRGRSMISRSGHAQVRHSLYMPALVALKHNPLVSVFGIRLKAAGLAPKAVIAACMHKLVLLVYGILKSGRPFNPNFGANRLDFQDGI

SEQ ID NO: 436854 - protein, 342 aa, unidentified
MGEVSIIGLDLAKNVFQAHGAGADGSVVFRRKLSRAQLLKFMAAQPPCVVAMEACASAHHWGRAIGDLGHEVRLIPPAYVKPFVKRQKNDMADAEAIAEAASRPTMRFVAVKSEAQQAAAMAYRTRDLLVRQRTQTINALRAHLAEQGIVAPTGPAHVGRLAVIIEGEDGLLPEAVRDLARLLLDQIAGLAEKIAGLDAELRRRVATDDTARRLTTIPGVGAVTAAAITTFAPPMETFSKGRDFAAWVGLTPRQHSSGGKDRLGRTSKMGQRDIRRLLIVGAVAVVRWAARKGAPEGTWLGRMMARKPKMLVAVALANRMARTAWALLRRCEDYRDPAMAAA

SEQ ID NO: 436855 - protein, 351 aa, unidentified
MAMLADTVELVIGVDTHKDTHTAAVVVAATGAVIVQTTVAAAPAGYRQLLAWADHHSGLRVWAIEGTGGYGAGLTRFLATHQEQVVELDRPKRAARRHGAKSDPLDATRAAREALGRDRLAQPRAAGQRAALSVRLAARRSAVQAATDAQRQLHALVTAAPDALRGRLRGLTTHQLITTCGRLRQRADWDIETSATAVSLRTLARRIQLLNREIADHTRAITALVRAWRPELLTRTGVGPIVAAIVLCAWSHPGRCPSDAAFAMLGGAAPIPASSGQTVRVRLNRSGDRQLNQALHLIVLTRLRYDPATRAHATRRRAQGKTNREIRRCLVRYVARQLYRLLETNPAFDPT

SEQ ID NO: 436856 - protein, 338 aa, unidentified
MEYYCGIDLHSKNSYVVVTDGEDRVLYAKRLANDLEVIVDVLLPFQAGLVGVVIESTYNWYWLVDGLAAAGFRVHLASPAGNKPYTGLKYSDDRWDAHWLARLLRYGILAEGYIYPKAQRGLRDLLRRRMFLVRHRSAHLVSIDNQVVRQTGRKLGGEAVKKLTPVRLGELIDDGDVRLSMECGLAVLDCLEQRIVMIEKLALRRLRETPELRHLRTVPGIGQILGMVILLETGDIGRFAAPGNYASYCRCVGSQRLSNGKRKGEGNRKNGNRYLAWAFVEAAHFAIRYDARARRFYDRKKAKTGTFSALKAVSHKLARACYFVMRDGVPFDSKRCFG

SEQ ID NO: 436857 - protein, 354 aa, unidentified
MTADTILAIDLGRYKSVACAYSRSTRAHAFRTFDTAPDDLGQLLARHPGAVVVVEAWANAGWVHGRAVAAGHPVKVANTAAESWKFQHLKRKTDKDDAKRLAELEAIGQLPTVALPDPATRQRRMLIAFRQELVGRRVACQNRVRALFAGQGLATPRGHRAWTAAGLEGIEAQARPLADCGPDELWRGMLHLALAEYRALAERIGEVEGALDRLAGSDGRTKLLETIPGVGRRTAEAVAAHLGDPGRFASAKQVGAYAGLVPRQYQSGVTDRKGRITRRGPGLLRKLLVECAWCMLRYNPWARAQYVRLTAGGATRKKPAIVALARKLLVRCWAMLRDGKPWRADPAPAAGASG

SEQ ID NO: 436858 - protein, 338 aa, unidentified
METYAGIDLHSSNNFIGVINDKDKILYGKRHANRLDDVLRALDPFKDSLKGVVVESTFNWYWLVDGLQEHGFPVHLANPSAIQQYEGLKHTDDQWDSFWLAHMQRLGILPEGYIYPKEHRAVRDLLRRRLLFVQHSTSHILSLQSMISRNLGFKMSNNEIRKLKPEDIDGLFTCPNLVFMANNSLSAIKFLKKISLDIEKKVKSQVKMRKEFLMLNTIPGIGNILGLTISLEVGDIGRFPKVGDYSSYCRCVESKRISNGKKKGENNKKNGNKYLAWAYVEAAQFARRYCVKAQSFYQSKEAKTKPVVAIKALSNKLSKASYYIMRDQVAFDEEKLFG

SEQ ID NO: 436859 - protein, 332 aa, unidentified
MIFVGIDVGCKELVFVIRHQGKSSKAEIVTNTFKGHQAIIKKLEKLSDSVRICVEATGVYHLDLVLALSRAHLDVMVINPKTSHNFAKVLMKRTKTDNVDAEILAQYAERMDFTPWQCPSSKALEIRACSRHLEELSYQCTRLRNQIHAMKSNGTTPVYLLKDNQQALVSLEKRIVSIRNKAVQVIEQDELIKMRYELLLSIKGIAQKSAVQILGELLVLPEDMSARQWVAHTGLDPRQFSSGSSVNKKPRLSKAGNQHLRRALFMPALSGVRWEGNVKAYYMHLANDNGLKKIQAVCAVMRKLLHAIYGMFKTAKPFDGTRFYKIPSEKTA

SEQ ID NO: 436860 - protein, 342 aa, unidentified
MLNHYREGEVVEEITTVGIDLAKNVFSVHAVGSQGEVVVRRTLSRAKLSELIAQLPPCLIGMEACSGAHEWARRFAASGHTVKLMAAKFVMPYRKSGKNDGNDAEAICEAVARPNMRFVPVKSLEQQSDLTLHRVRQGFVEERTATLNRLRGLLTEFGHVLPLRASEVHRRVPQLLGKLPTRVAACARDLLEHAARLQAKTLEYEHEIKIHVRSNALACRAQTRLGIGPITASALVATVGNGHDFKNGRQFAAWLGLVPRQYSTGGRIRLGHITKRGDPYLRTLLVMGARAVLQRAASLTDPLSRWALAVRERRGYHRACIAIAAKNARVAWALLAKEPSAA

SEQ ID NO: 436861 - protein, 366 aa, unidentified
MTNLSNWIGIDDHADKWTIAQYRGTSGEPEREWELKPSESGYRKLIGWLKEMRGSVRIVYEAGPCGYELYRRLRRSGLDCQVAAPSLTPRKPGERIKTNGRDARKLARMLRAGELTLITVPNSRQESIRDVVRAREAANKDVLRARHQLSKLLLRQGYRYRDGKPWTQRFWAWVDQIELGEQYSREVLSQHVRVIGRRVELVAEYDRIIESVARESEYTPMVKALGVLRGVDWLTAMTILVEMGDLRRFATAPQLMAALGLVPSEFSTGDKTQRGSITKTGNAHARRVIVEAAWHYQRSFTRPGPRIRRRRLGQPTARLDIAERCDRRLHRRFTRLTSRGKRSTIAAVAVARELAGFIWAIGQIAY

SEQ ID NO: 436862 - protein, 365 aa, unidentified
MNTIYIGVDFHARQQTVCYLKTEDGELVVIELKHQNKDEVRGFYGQFSGRVIVGIEASGYSPWFERLLESLGHEVWLGDATEIRRRARWRQKNDRRDAELILDLMLHDEFPRLHRPAPASSEILRMLRYRQKLVKMRTIGKNSLQALALQSGLSLRTKLFTKAGKQELCTTAMSPVMEQQRDQWLVLLETFDQRILETMLWLKQQTQGDERISRLRTHPGIGLLTALGLVHTLWPVSRFRNQRKVTAYAGLEPMERSSAERKHFLGISKAGSRLLRYLVVEAAHTAVKKDDELKRFYQRLSARRGRPKAKVAAGRKLLVRSYIMLRDEIDYAEFQRRAVAARLARQSTRPNMPDKLIGQPASPAN

SEQ ID NO: 436863 - protein, 357 aa, unidentified
MGSGFCGTVIGMDLGRKYSWCRAVSRETGEILEDARLRTRREEFLSFLQGLPRPIRVVMEATGNWQYPYECLEGLVEEIQLAHPLKTKAIASARIKTDRIDATILAHLGMADLVPQAYIPPREVRDLREILRHRAFLVYLQTAVKNRIHSYLSKQGIEPPFTDLFGKSGLAWLRTLEIREPYRSLLDQDLRILESLRQEIKKVTQTIEALAEEDPRVRLILPIRGLGKYSVMLILAEIGDVHRFPDEKHLVSFAGLCPSTFQSGKVFYHGRLTKQGSKWLRWILVETAQHYARAPGRLGDLYRRVERRRGSKVARVVVAREILVSIYHCLKKGVVFEENPGGGRKRLSQHAPKCSGC

SEQ ID NO: 436864 - protein, 338 aa, unidentified
MVYGAIDLHMRYSQIRIVDAEGRVLREQRVPTSAERVVAAFRGHEAMRILLETGTESEWVAQTLETAGHEVIVADPNYAPMYGEIRRKVKTDRRDVVALSEANRRGWYRATHRVSPAQRALRQVLRSRRQFVQMRSGTIALIRSLLRQEGCRLAPCRSERVPARLAALKLPLHLAETVAPLSRTVETLTTAIAGVDERLARSTQADPVVQRLQSVPGVGPVVALTFRAFVDDVGRFARAGQVSAAIGLVPREDSSAERRHRGHITKAGPRELRSLLVQAAWACWRSRASATLRAWVERLAARRGRRIAVVALARRLSRILYALWRDDTEFRPAVLAAA

SEQ ID NO: 436865 - protein, 348 aa, unidentified
MSISMMGIDTAKSVFQLHGVDAQGKVQLKRKLRRDELIAFLEQQPRCTVAMEACGAAHHWARVLSGLGYEVKLIASEAVKPFVKRGKKNDPADAAAICAAASRPDAKFVVVKSLEQQGVLALHSVRSLLVKQETMLANAMRGLATEFGLVVPKGMAKLQELVALVEEDKGIPEQARGVFAELREHCRVTTERIEELERQIVVHARHNDTARRLATVPGIGPITASLIAATVGDSIGTFKSARHFAAWLGLVPRQHSSGGKTRLGKITKAGDRQIRTLLVLGATSMVHRAEQWNSAVGAWVRGLLERHPVRHVTVALANKMARIAWALMTRNEVYRAKGGVAPAAAATA

SEQ ID NO: 436866 - protein, 346 aa, unidentified
MNSTTVAVDLAKNVFELAVADAEWRIVERHRLNRTRFARFFVHRAPCQVVMEACGSAHHWARRLVAEGHTVRLLPAHYVKPYVGRSKTDRADAAALIEAARSSQIRAVPIKTLEQQQLQSLHRLRSQWLSTRQRYLATLRGILREFGIVIPLGPSVAKAQVGATLAAADSAIPEGLRPALAQMLQEIAPLEEKILSVERQLATLTRADERAQQLREIPGVGLLTSTALLSTVGDIQRFPSARHFACWLGLTPSERSSAERRRLGKISKQGDVYCRTLLAHGARSALLAAHRAQRAGKPLDRLRHWALNCERVRGHNKATVALANRLARIVWATWKYQRSFDGNWAA

SEQ ID NO: 436867 - protein, 320 aa, unidentified
MTYIGIDVSKDSFVAAYPTKSGYTTKTFPNTTTGVRKFVNSLPADCHCVMEATGNYSMLLLYLLQQANIIVSMENPQKIKHFARAMLSTTKTDEIDAKLIATYGEKMTPAPYKIPMESIILLKQKRTVLRQLKKQLTATINLQQSLAVLPKQDPASKVAIEQTVKFLRKQISKMEEEITNLSTKEFGRQVKLLTSIKGISVTIASALILATGGFTYFSNAKQISRFLGLCPTYQQSGTSVNFKGHINRNGDTHLRSQIYVAAFASIRCNAACRETYERLRARGKSGKLAVVAVANKLIRQAFAVVTNNQPYIDGFVSSYA

SEQ ID NO: 436868 - protein, 342 aa, unidentified
MDHYAGIDVSLECSSVCVVDASGKIAREGKVASEPEAVIAYFGSLRLSVVRIGLEAGPLSQWLYAAMKEAGLAVELLETRHVRTALQTMPVKSDRNDARGIAQLIRLGWFRPVHCKSIGAQETRAVLTARKLVQSKLLDVENSVRGILRGFGLKVGKTTNRSFAGRVEDLVVNHASLHMIAAALLSVHAVLLRELKAFDKQVRSMARVDVKAKLLMSAPAVGPIVALTYASAIDDPGRFTSSRRVGAHFGLTPKKYQSGETDYTGRISKIGDATVRTALYEAAHIMLIKPIKGCAPLKSWAMRIARRSGMKKAKVALARKLAVILHRMLASATPFNAAMAAA

SEQ ID NO: 436869 - protein, 376 aa, unidentified
MKIENTLNGYQRLLSTAGQDYPLVAGFEPTADYHRNIAYWLAEQKVECRLVSSLASARARDMMFNSWDKNDRKDATVIMYLLQNGMSKLFYDPLINNTMDIQELSNTYYQVSLARSRCYHSFLNHYITLYFPEVEKYHHTSRAQWLCEVLLKYPTPRSICKMRKTTFVKRAWDVVGRKVNKQQFLEEFYETAEKSIGLPVEIDSVAVSTFKLQLQRYLDLTIQRGQLEKQAEQFLSHRRDYLRLRTIPGIGPIVALIILAESGDLTRFKHYRQYINFCGFNLSAIQSGQSKGKSKLSKRGNARLRYAFWLAGNAAIKMQENSFRAKYQRYIKSDPDNADLKRKARTAVAVKVARVAHALVKNDSDYRGYHEYECGT

SEQ ID NO: 436870 - protein, 319 aa, unidentified
MAQNDHIVVGIDVAKDKVDACIRSLSQRHTFPNTAQGYRKMIAWLHKHKVNKAVMEASGGYERDWARVLRLAGIEVRIVDPKRVRSFALSAGRLAKNDTIDAEMIAWFAGTFSAAPGQPHDAAREELRALVKARKHLLDLQTRLKSQNEHDAPEAVQKAHARILKSLATEIARLEAAISAKVKGTPDFAERAEIIESVPGFAETTSASLIAGMPELGQVSDEIAAALIGLAPYDDDSGKRRGERHIKGGRRWVRNAIYMPCLGAATQNNPVLKVFYQRLIAKGKEPKVALVACMRKLIIILNTMIARRQKWDPSRYALN

SEQ ID NO: 436871 - protein, 605 aa, unidentified
MLPHSGSPSQLSTPPADTGGSPNPTRIGVGIDTARYGHYAVFLRADLQPAAADLAFAESGAGYAELRTRLEQIAQRHAAVAWHVRIDAAGQYADNLQHFLHFLAAAAPSDRSTFTLSLGDPQRNKNYRAAIYGSKKSDPTEAAAAARFALTERPAGVPPMSTELRTLRQVAGRLQATVRQRTRLINQFHKLLALVFPELALLTKDVAAGWVLELVHRFPTARRLAAATPDQLQDIPYLAHDRIDTLLTHARTSVASLHDAALQELIRDQVRQLRDVHARQKRLENTLIAVYRRLPQPNHLDTIPGIGPVTAAVLTAFILDIDRFETPGKLVAYFGILPIEAASGIDRDGKPRGPKRYVMSKRGNDLVRRYLWMAGLCAVGHNPAVRPLYARVVARHPQHKAIAIGHAMRKLLHLAFAVWKSGKPFDPEHYPWGAASAASDEAAAEDARLRVPKSNPNDMPLSPKQPAAGLTLSAKPAQTEVTAAANANGSPTPPRREPLVDFDHLKKQLPMTRLLDHLGLTSRLKGAGLQKRCTCPIHRGDARGRTFSVHLGQNVFQCFDQACRHKGDVIDLWAALHGLSLRQAAVDLIATFQLEAAPPTEKRNG

SEQ ID NO: 436872 - protein, 346 aa, unidentified
MKHYAGLDVSLRETSICVIDERRKIVREAKVASEPETIAAWLEKTGLEFEAVGLESGLLSPAIHDGLLAAGLPVVCLDARHLKAATSAMPVKTDRIDARNIAYALHAGWYRAVHVKSQATHKQRALLRSREMLIKCRIELENHLRGILKAFGLKVGTPVKSGFEARVRELVDGDAVLAPVVDAMLGVRRELLQRLDDLHRLLLATVRSDPVCGRLMSVPGVGPVTALAFRTAIEDPTRFAKSSLVGSYFGLTPRKYASGETDRNGSISLCGDKMVRSLLCEAANVLLTRVQRWSWLKRWGVEVARRRGHMRARVAVARRLAVIMHRMWVDGTTFRWTRDEAAEAAA

SEQ ID NO: 436873 - protein, 411 aa, unidentified
MEVVHARCAGLDISKKDAKVCVRVAGAGRRKSVETVTTWGSMTNQVLALREHLVEQRVTCAVMEATGDYWKPFYYLLEDAGFEVMLVNARHVKNLPGRKTDVSDATWLAQLGAHGLVRGSFVPPEPIRQLRDLTRARTAITRERGREAQRLEKLLEDAGIKLSAVASDILGVSGRQMLEALIAGNHDPASMADLAKRRLRSKIPELTEALTGRFSEHHAFLARVHLDLIDRHTDAIDTLTARIEVMIEPFQGFRDLICTIPGISTLTADVVIAETGADMARFPTAKHLASWAGTTPGNNESAGKVKSSKTRPGNPYLQGALGAAAMSCAQNPRTYYGARYRRIASRRGPQKANVAIQHSMLIAIWHMGTTGTLYDDPGADYFSTLHPERAKNRAIHQLEAMGYRVTLDHAS

SEQ ID NO: 436874 - protein, 342 aa, unidentified
MAWWQGVDTHKDVRVGVVLDRLGRRLAARSFPATDAGNTRLAGWLAGLGQVTDAGVEGTGSYGYRLARLLADAGLQVREINCPDRSRRRRKGKSDPVDAENAARAVLAGEATAVPKDRRGFTGELRLLLLTRRSAVKARTQTSNQIKAFLLDADDQLRARLNGLRKARFGRACAALEPGDGLHRALAALGRRWLALDAEARDLEKQIASLITRHAPGLLARHGVGAVTAAQLLVTAGANPDRLRGDAALAALCGASPVEASSGKTCRHRLNRGGDRAANNALWVIAHVRTISDPRTRAFVAKRTATGNSRREIMRMLQRYIARELYPLIIDALRTATIVGLT

SEQ ID NO: 436875 - protein, 341 aa, unidentified
MSVYVGIDVHRKRSQVAVIDAGGEVLANRNVPNGVETILGVIGGLPPGTPAAFEAAFGWGWLLELLEDYGSGPHLVHPLQGKAIASARLKNDKAGAAILAQLLRADLLPEAWIAPPAVRQLRALLRHRAQLVRLRTLLRNRIHAVLAGHGHDRPAGCWTGPGRAWLAALELPAVSREVAGDDLALTGALQAPAGRLDWEVHQQARSGPRVKVFTQLPGVGPLTALVILAEAGDITRFGSARKLAAWAGLTPTVRGSDRTVRHGHISKQGSAWLRWILCEAAQTAKRSPQFAASYQELARRRGKKIATTAIARKLLTRAWHLLTEAEHAAAGRQAAISPPAA

SEQ ID NO: 436876 - protein, 423 aa, unidentified
MEVQYRVCCGLDVHRDTVVACLLRTEGPLALRQQTRTFATTTAGLVALGEWLTAAGCGDVAMEATGVFWKPVFNVLENVTHVVVANAADIKGRPGRKTDVQDAQWIAELFQHGLIRPSFIPERFQRELRDLTRTRTTLTDERSAVVNRLHKVLQDANLKLSSVVTDVLGVSGRAMLEAIVSGATDPAALADLAKGRLRNKEAALKDALTGKVTAHHQRLVRLHLAHIDFLNEQIGQLSAQIAEVLHPFDADLTHLDTIPGVGRTTAEILLAELGTSMDQFPSAAHAASWAGMCPGNHQSAGKRKGGRPRKGSVWLRRALVEAASAGVRTKGSALAAQYRRTAARHGHQKAVFAVGHTILRLTYHMLKTHEDYLPQDQTVLDERRRAQLERQALAQLATLGYDVTLTPKHESPPPDDDAKQSAA

SEQ ID NO: 436877 - protein, 400 aa, unidentified
MDGPVISFDVSKGSSHMRAFISLDKPLGKVIVIKHDFDGYQQVRDLYQKLREKAGREPVVIYEYTGVYAFPLLTFFVSEGYTIYQIAPLESAKKRKSEIRSTKNDSMDTRTIASIYYGDRRKPLVPFRIQDQKYEDLKEMSRRYQFEVSIAVTEKNRYHRCLDAVWPCFDEVIDYESDISLDVIIEFGHPANIKTAKGVFSAMKKNHPGRSGKREKTAERIVEYTKNHNSGVSMNSYMVRELQEFARRVKEGKRRIDAVLDDLIALALTTDEFRLLQTIPSVKARSAVSIVAEIGDISRFTTVKGLIAFAGLDPTVNESGKKDSKHLQITKKGNKYLRTSLYLSVTNICQWHPESFISKFVDSKIKDGLPKKAAKVAGCAKLLRLIYSMFNNGTCYSEKE

SEQ ID NO: 436878 - protein, 320 aa, unidentified
MESVLGIDIAKAKFVTALLTPDGKLRHKSCANTVAGFEELALWVRRHGVTHVHACLEATGTYGDALATWLHDAGHTVSLVNPAVIRAYAGTQLTRSKTDRIDADLIARFTATQQPPPWTPPAREIRELQALVRRLDALHGMRGQEANRLAAGVVVADVRTSIEAVLANLDAQIALVTRLIRNHINRHPGLRSQRDLLTTIPGIGEATAAVLIAELFDKRYASARQAAAFAGLVPRLLESGTLRGRSRLSKLGPGRLRKALYLPALAALRFNPSIRQLRTRLLAAGKPKMVVVGAAMRKLIHLAYGVLKSGRAYQPTCAHP

SEQ ID NO: 436879 - protein, 361 aa, unidentified
MAMQKRITKKDQFFNNINLTVDDDVYVGIDVHKKSCHVAIWLNDAIALTFVTPTDNLAIAQMMQKLTPGLKQIVYEAGPTGFSLARMLRAASLPVAVIAPSKTLRPAAQQSKSDRLDCRKLAEFAAKDLLVEVAIPGKQQEADRQIVRLRNQLGDKRIHIKQQIKSLLLQHNIKEPPGLTRWTRQSVIRLQTIELRPEIRFTLDIMLDELSYLESQIKRVGLQLKKTFGKDRHAREIEILRSHPGVGPITARQFRAEVFNPDRFSKSTQLTRYLGLCPCVSQSGQKRIDGRLMKAGQIKLRANLVEAAWAWVRVDPAAKKTFQRLLCNTGEPNKAITAMARRLAVHLWKMLSDGKLYRKAV

SEQ ID NO: 436880 - protein, 361 aa, unidentified
MKNSSQHLIAEVPRRRSRVEMTIGIDLGDVWSHYCTLNQDGDVVDRGRFRTTPKAIEKWFSDVPPARVAMEAGTHSIWISEQLQELGHEVIVANVRELRAISHSDRKSDQVDAEKLARYARLDPEILRPISHRTVEQQEALTLIRARDLMVRLRTAAVNAVRGLTKSCGHRMPASSTRCFAKRSVAVMPPGLAQALGPVLEQIAEMTLKIKLYDRQIQELGQVKYPETQALVKVPGVGRLTALTFVLTLGSKERFEQSRDVGCYLGLRPRRSQSGDRDPQLGITKAGNVYLRSLLIECAGHILRPQGKDSSLRQWGLHLAARGGKQARNKAVVAVARKLAVLLHRIWITQEPYVPFYANAA

SEQ ID NO: 436881 - protein, 367 aa, unidentified
MIVNEVAKNVEKIISIDTAKNSFQVLVVNQKTGKKKNTKVQRSKFVEYILKQGPCLIFMESCSASQHWARLFEGHGFTVKLIAAQHVKAFLRNKRVKNDERDAEAIYTCGIQPDTKFVRIKTVEEQTVALLHTLRKAAVSQRVELSNRIRGILAEFGIVVARGRGSFNSEIEALFNECEKIHDVNLRVAISSLFEDYHRLEQREKELSEKIEALNKDNELVKIALTCPGVGSLTASAIVAEVGDASQFRNGREMAAWNGVVPSQHSTGGRSTLGGITKTGNRYLRALLAQCACTIIQNASRHIEQGKATHLDRFALRLKLNGKPVKKIMIAIANKIIRILWAMLTQRKTFENKANEISDTSAELQLA

SEQ ID NO: 436882 - protein, 345 aa, unidentified
MEYYAGIDVSLESASLCVVDATGRIVREAKLASEPDILIGWFRGLGLAVTRIGLEAGPLSQWLYAGLRDAGLAVELLETRHVRDAFKAMPVKTDRKDARGIAQLMRLGWFRPVHCKSLPAQEVRALLTARKLLQTKNHDVEMSLRGVLRGFGLKVGPTTPRTFVSRIRELVAGHTTLSAVAEALLAARGTLFEQWQKLEKRLRSLAREDGRVRRLMTAPGVGTIVALTYASAIDDPARFRSSKSVGAHFGLTPKKYQSGETDVTGRISKIGDGGVRTALYEAANVILTRPVKGSTLKSWGMRLAARAGMRKAKVALARKLAVVLHRMLADGTSFLADKAAVAAAR

SEQ ID NO: 436883 - protein, 409 aa, unidentified
MKLFVGIDVSSQDMKACVMNFAGEALTAFTVENNLTGASYLRDQIVKIAQKNSISEIQIGMEATSVYSWHPAMFFHEDESLREFNTKVFTINPKLIKKFKESYVDLDKTDQVDAWIIADRLRFGRLPLTAVMQEQFIALQRVTRMRYHLVHDLTREKQYFLQHLFYKCSSFTTEVDSSVFGNAMLELFQEQYSLDEICSMDLQELASYLQEKGKRRFTDAECVAKSIQKAARSSYRLSKCVEDSIDLLLATSIESIRSTTKQIKELDKAIQKIIDGIPNTLQTIPGIGPVYCAGILAEIGQIDRFSDQASIAKYAGLTWSKHQSGKFQAEETKMIRSGNRYLRYYLVEAANSVQRCEPEFRAYYLKKYHEVPKHQHKRALVLTARKLVRLIDALLRNDQVYTPRRKVNN

SEQ ID NO: 436884 - protein, 349 aa, unidentified
MIIIGVDFHPEFQQIALVDTDTGELEERRLHHPDEAEAFYRALVSQGKTVRVGMEASGHGRWFERLMSELHIELWVGDAAEIRTKRVRKQKTDRQDAQLILKLMLKDDFPKIWVPSWENRDLRQLLWHRHRMVQARTRIMNQLQAVALNEGLRCKKRLWRTERPRLESFQLAPWASRGRRDLLELLDRLNPTIAELSQAVEQEVEKCPEAQRLATHPGVGPLTAMAFVLIIGQADRFQCGKQVASYLGLVPMEDSSGNRRRLGHITKQGSSILRFLLVEAAQVTVRSLPEWRSRYFHLMMRRGRKIAKVAMARRLAVCLYWMMRQGWDYQQWVEFGSYAGQPGNRHGVQ

SEQ ID NO: 436885 - protein, 354 aa, unidentified
MKASMIGLDIAKSVFQVHGEDAGGEVVLQRRLRRSQVKDFFAKLAPARIGIEACGSAHYWGRELSALGHEVRLIPAAYVKPFVRRNKTDARDAAAICAALGRPDMRFVAIKSCDQQAARGLERSRDLLVRQHTQLMNSVRSQLAEFGLVAAQGRRGFAALAAALAGDAAGIPALLVETLRLLVQQIDRLGVAIALLERQIVRAARRNPAMRRLMRIPGVGPLTAHAVVTAIDEGKQFGTARDFAAWCGLTRRVDQSADKRRERGISRQGDNGVRKLLVLGASALLRQRRACPDRATAWQRGILARRPVKVAVVAQAARNARIAWAMLRSGASYRPAATAATATTTAATTATAAA

SEQ ID NO: 436886 - protein, 318 aa, unidentified
MMSTQHNYAGIDIAKRNFVIAVSSLSKTKTETNNPKGIAHTIEYLKKHNVALVVMESTGGLEIPAAKAIHRSGIAVIIANPRQTHQFAQSQSLTKTDAKDAKMLAFFAQMTAQKEGWQTMLYQPPTEAEEVLEALVNRRNQLVDMRTAEKNRLHQVHETQVESVKQLIAHFDRLIDELDKQIDDHTHTHFDGKAQVAEQIKGIGSITTATLMAMLPELGRLSHKRLASLVGIAPHTRESGETKFKSRCFGGRSAVRKALYMATVVATRFEPLIRDFYQRLLSKGKPYKVAVTACMRKLLTILNARMRDYFAENGIRTA

SEQ ID NO: 436887 - protein, 368 aa, unidentified
MNTVKFIGMDVHKKTITIAIINKGRNQQPRIYGTIENQLEALDKFCRKMVSTSSRLHFVYEAGPCGYGIYRHLTEKGFDCMVAAPSMIPKKSADRIKNDRRDAAMLARLHRSGELTAVYVPDAQDEAMRDLTRAREDAVIAARKAKQRLNAFLLRNGLTYAGRSKWSNAFFNWLSDISMPHAAQQVALQEYIDTVHENLKRVDRLTDQIRQLVPAWRLAPVVSALQAARGVSLIVAATVLAELGDLSRFDRATQLMAHLGLVPSEYSSGESIKKGSITKTGNGHVRKALVEAAWAYRMPARVSRALLKRQQPVPERVCQIAWKAQLRLCTRFKRLTARGKTKQKVVTAIARELSAFLWAMAKQLQPVV

SEQ ID NO: 436888 - protein, 359 aa, unidentified
MEVVHPRCAGLDAHKRIIVACRLTPGPRGHPVRQVESFRTTTRGLLELSDWLAAVGISVVAMESTGSFWKPVYNVLEGSFELLVVNAQHLKVVPGRKTDVRDAEWIADLLRHGLLRPSFIPERPERELRELTRYRTTLLQQRTAEVNRIQKVLEGANIKLASVASDVVGTSGRAMLEALVGGEADPEMMAAMARGRLRDKDDALLEALEGRVGPHQRFLLAALLRHLDAIDGLVAEVSAEVEARLRPFEAEIVRLQTIPGIGRRTAETILSEVGPDMSRFPSSRHLASWAGLCPGSHESAGKSRSGRARKGSPWLRSMLVEAAKAAGRSQTYLGAVHQRLMISARPTSTNAIVNGRSID

SEQ ID NO: 436889 - protein, 449 aa, unidentified
MHGVHIGGQRAGAFLDLVGGVDPKRVLLVGIDVAKATWFVVASNLLGEVVVDGVRLVADRAGLAELERVLGAASARVNAAMVVVGIEAAGHQHQTLTAHLLDRDELVVRLLNPAQVAAVRKQQGNRRRKTDWLDAAAICELLARGEGALVHLDGSAAAALRPLWSGRKDLVDTRSRLRQQAGALVDCLWPGCSAKDTVAGVTPVLCDLFATKAGRVLLELLAQGWTPARVAATSVAALRGLFAVRGCRLTRPLATRLIGRAQAALPAHPAATAGKAVTLAALLGTIDTLDHQIACLEAAMAPLLAHTQGAKLTQLRGVGVVAAAGFVAFVGSTDRWAEWSKVWRAAGLDPARSQSGPTDARLGISREGSAWGRRAILDLAAAVCQQPGPWRDRLRTRTTQQHKPAKVALTATANAIGRTLFALMASGADFDPGFEAKRAAARKAGGQAA

SEQ ID NO: 436890 - protein, 484 aa, unidentified
MKAQRAKASRSSHQRRHPQGGPIKAAAKMPVIHPHAAGIDAGSVQHVVCVPEDAVPEGESNVREFGAFTADLDKLVEWLLACKVQTVAVEATGIYWLALAQKIEDAGIELVLVNARHAKNVPGRKTDMKDCQWIQCLHSYGLLNGSFRPSQDICRVRSLMRHRENLGRLGGRAIQHMQKALQQMNVHVHHALSDLNGETGLRILDAIVAGERDPKKLVELRDKQCSKTSKEELEKAMEGDWREEHLFVLRQSLETYRHVVRQLSQCDQEVEKALAAVVLPEPAEAPEPAPKNPQAKAQPKPKKKFQGRKGGMSVKRDMTAELQRVCGVDLTQIVGLNVLGVLIIISEIGLDMSRWRDAKAFCSWLGLCPGNKISGGKVLDSRTVHVINRVSILLRTVAPTVGRSDSWLGVFHRRMKARLGPAGANTATARKLACLVYHLLRYKEEYIDVDQLVFTEKIRKQRIARLRKHAEELGLEVTEKQQAA

SEQ ID NO: 436891 - protein, 354 aa, unidentified
MMIIGCDYHPGFQQIAWLDTETGELRERRLAHREEAEAFYRDLGAHGVSVRVGMEASGQARWFERLISELRFELWIGDAAEIRTKRLRKQKTDRQDAQLILRLLLENRFPRIWVPSGENRDLRQLLWHRHRMVQARTRIMNQLQAVALNEGLRCKKKLWREAGREQLESFRLAPWASRRRRDLLELLDRLTPTIAELTQAVEREAENCPEAQRLRTHPGVGALTALAFVLIIGRAERFQCGKQIASYLGLVPLEDSSGQRRRLGHITKQGNSLLRFLLVEAAQVTVRSDPEWRSQYFHLAMRRGRKIAKVAMARRLAVRMYWMWRKGWDYEQMTKFSSHAGQPGHRQGVPLNTE

SEQ ID NO: 436892 - protein, 373 aa, unidentified
MAASSGSMHYVGLDVHQRRSSLCILDGNGKTVKQLEVRGDWSKLLERVAEVPRPFSVCYEASCGYGYLYERLSPMAQHVSVAHPGQLRLIYNSKKKNDRVDASKLAKLLYVDMVPQVHVPNADVRAWRGLIVYRHRLMDRRVGMKNRIRALLRGLGIICPAGKKLWSKKGIKWLKDQPMAELHALQRDMAAEELQELNQKIARAQRQLDKIADAHPAVAVLKTIPGVGTRTAEAIVAYVDDVKRFSGVRKLGSYFGLVPCQDASAGKERLGHITRDGPPVVRKLLCEAAWRGIRSSPALKSYFERVTHGDPDRRKIALIATAHHLLRCMGAMLRTGEVWDESAATRSPRPPLSPPEDTKRPLQALSSEVKRHT

SEQ ID NO: 436893 - protein, 411 aa, unidentified
MDVVHERCAGIDISKADVKVCVRVPSSARRRRSEIRTFTSMTNDLLAMRDWLVAQSVTVVGMEATGDYWKPVFYLLEDGFEVQLLNARHMRNVPGRKSDVADSEWIAKLIEHGLIRASFVPPEPIRQLRDLTRYRTVVVRERVREAQRLEKLLEDAGIKLSAVVSDILGKSARAMLEALVAGERRPQVLAELALGSMRGRKPLLAEALTGRFGAHHAFLVRAMLDRVDEADAMIARLNRQIEAQVAPFRRVITLLDGIPGISTRVAEVIVAEIGADMSRFPTAAHLASWAGMCPGNDESGGRRKSGTTRPGDAWLRAALGEAAMAASHTKGTYLAARFRRVASRRGKKRAIVAVGHSILIATWHMITSDTEYRDLGGDYFIERTGKTRVTQRLVGQLSQLGWRVNLTPATA

SEQ ID NO: 436894 - protein, 366 aa, unidentified
MIFLGIDLHSNCFTCCFIYDDGKKLKVAFQLNAESLLDFFKLLTLNTYVMVEASTNTFKFVELIKAKVKEVYVANTYKLKLISLVKKKTDKIDAEKLAIILKMQITSNEELIKSVYLPEQTVQDLRSLFTTYSLIKKQITQIKNRIHAIFKQNLHPFTREKIFSISARNEIKKIELGEVADYQIKYLFEVLENLEKKFNEIDESIKVIGQKYYKEIDILTSMKGISIITAIAIIADIAEVKRFPNSKHFTSYLRSAPGVDSSNEEVRITKTTKHGRKLSVSLLSQSLNHFRDNNIKIKKWYNKKVEVESHKRGKIRMGICRKVFAEIYQMLKKGEYHYFMDAENHSKKMNEYDLFCKRSILFKKVA

SEQ ID NO: 436895 - protein, 302 aa, unidentified
MNKVTIIGIDLAKRVFHAHGAAADGSVVFRKRLTRAQVLPFLAGRPRCVVAMEACASAHEWGRAIQELGHDVRLIPPTYVKPYVKRQKNDMADAEAIAEAGSRPTMRFVAVKTEEQQARSMVFRTRDLLVRQRTQSINALRGHLAEHGVVAPQGPAHLKTLAAAMDGAGRSLPQLVRDVGGIYLEQIEQLNRRIADLEKVLRREAQFGTETRRLQTMPGIGPITAMAVEAFAPPMATFKRGRDFAAWLGLVPVQHSTGGNSGSVERRKWGSETSAGFSLLAPWPSSNGRLAAGLKRALGFTG

SEQ ID NO: 436896 - protein, 423 aa, unidentified
MDVIHQRVAGLDVHKKMGVACVRITAGNRVSRECRSFATTTAGLLALLAWLTESGCTHVAMEATGVYWKPVWNILGDGSFELIVANAAHIKNVPGRKSDLNDAMWIADLLACGLVKASFVPPADLQELRSLMRTRKQLVREQTSHTQRIQKTLEEANIKLDAVICDIIGRSGRRMIEAMIQGVRDPHELAALADRRLKATPKQLYEALHGRLRDHHRFLLQLHLGQWDALQEAIVAIDREVELHITRIDEPEPPAGQAPLCQVIANLSLSPGISILAARSIVAEIGRDMSRFPSAGHLLSWAGWCPSQNESAGKRKTTRLRKGAPWLKTILVQCAWAAVRKKGSYYQAQLLRLKRRRGPQKAIGAVAASLLTAIYHMLKNRIPHRDLGAQHFERHSPEAKAKRLAAQLAKLGYQVQLQPAAAA

SEQ ID NO: 436897 - protein, 333 aa, unidentified
MTYIGIDVSKATFVVAYSSAKGSKTKTFANTATGIHKFIQTLPSDTHCVMEATGNYSMLLLYLLNKANIMVSMENPLKIKNFARVMLSVVKTDDIDAKLIALYGERMQPKPFKMRSDSLMLLKQKRTVLRQLKKQLVANTNLQESMEALPFVDSISKKVLEKTIKFLQKQIKQMEEEPASLANIEYKKQMNLLTSIKGIGVTLAAALIVATGGFTYFDNAKQLTRYLGLSPTYQQSGTSVNVKGRINHNGDSYLRSQLYVAAFSSLRCNKECKACFDRLRSNGKPGKLAVVAVANKLVRQAFAVVTKNKPYIDGYKSVKPENTPAEGAPAVRG

SEQ ID NO: 436898 - protein, 342 aa, unidentified
MQHVAIDLGGRESQVCVRSSDGQILLEQKVATRTLGLFLQHQPHSRVVLETCAEAFRVADLALGCEHEVRVVPATLVRSLGVGARRIKTDRRDAQVLSEVSCRIDLPSVHVPSDLARHRRTMCGMREELVASRTALINCVRGWTRTELWKVPPSTSATFPQRLRDAARSRPNGLPEHVERLLKVIDSLNEQIKLADHELQELAEKDPICSRLMSVPGVGAVTSMRFVAAIDDVSRFPSAHAVESFLGLTPGENSSSERKQRTGITKAGPAAVRRALGQAAWVLRAKRPLDPISLWAKQIELRRGKLVATTAVARKLAGVLFALWRDGSRYQANYGNAAVDAA

SEQ ID NO: 436899 - protein, 366 aa, unidentified
MLTVRAPASAKLSRFTVPSRDTEKVSSLLTAQRQQAERRTARPVQIVSIYEAGLDGFWLHRWLETQEVESHVVDAASILGPQRRRNAKTDRIDGEKLLRSLAAWLGGEVGVCSMVVPPSVAQEDLRRLSRERGELVDERTRLSNRVGGLLANQGIAGFKPLKKGARQALQTLRTGDGHELPPHLRTAIERILQRLELLSEQIKAAEAERDALLRAAQVAAAPEAATAASPEMAAAPLLLRLRGIGPEFATVLPLECLNRDFDNRRQLGAFAGIAPTPWCSGSVEREQGISKAGNRRLRTILIEAAWSWQRHQPDSALTQWFRKRIKGQSARVKRIAIVALARKLLVALWRYVKHGVVPQGAVLKAV

SEQ ID NO: 436900 - protein, 428 aa, unidentified
MADLLEGTLPLNLVAIDIARYSNAVLIELSDGKRQRFRMTNSAPDFDRLLSYLQALPGNCRVALEPTGDYHRPLAHRLLTAGHEVVSINSVAQARYREAMFNSWDKNDPKDAQVILEMLRRGTYQRYVDPQIAGHHDLQELAKTYYQVSRARTKVQHSLINHGLPLYFPEMHRYWCTTRNEWFVRFLLEFPTPTHVRALDRESFVAAAWDLVGRKVNKRAKLEEIWETAAHTAALPHAPDCLAVETFRITLRRYQELNVLRAAIEARAEAELHDNIDFAHLKTLPGIGSVIAMTILAEAGDLRRFGHHRQFLKYCGFDLAKIQSGTQRGREQLSKRGNARLRLAFWMAGMAAVRMKENSFRSKYERYVHADPDDADLKRKALTAVAAKMARVAYSMIKKNQPYRQFFELGLPSGSIPLSAAVGAQATP

SEQ ID NO: 436901 - protein, 428 aa, unidentified
MKYTQNFKIEQVTEKTLVVGVDIAKKKHYARAFDWRGIELDKVISFDVNNTGFSEFLSWVNNVADENGKTKIIVGIEPTGHYWYTFTQPLIEESILLVQVNPFHVKRSKELDDNTPSKSDRKDPKVIAKLVIDGRYQIPYIPKGIYAELRNLYVLRMDQVKKITSVKNKVIRWLDMHFPEFLEVFSSWEGKTALITLKTMCTPSKIIKKDAEEILSIWRKEVKSGVGIKKAQKLLECAKQSVGIQEGIESIEFEMKIIMDEYERIAMVIADIDEKLENLVLQVHGAKNIVKIKGIGIITVAGFFAEVGDITRFTHPKQIIKLAGLNLRENSSGAYKGKTTISKRGRSRLRSLLYKAMMPMLATNQEFKALHRYNTIERENPLQKMQSLIALCGKLIRVVYKMITQNIEYDGKKMMEDIHRSEVVKDAA

SEQ ID NO: 436902 - protein, 355 aa, unidentified
MERYIGMDVHAASCTLAVISEKGRKLKDFPIETNGQALVEAVRMIPGHRHLVFEEGLQSAWLYETLSPHVDELVVAGVTQSRGLKSDKHDAYGLAEKLRVGNLDKIVFKSPRQFTHLRELSRIHMTLVKDAVRVQARIKSLYRSRGILVSGEKVYGTRHRDDWQKQLSSSARTRATRLYDHLDFLLEQKKQAEVDLLREGKKHSVVRILETAPGFGPIRAARLVPIVVTPHRFRTKRQFWSYCGLGIVTRSSSDWVQTADGGWIKARVPQTRGLSRQFNHVLKSIFKGAATTVITRSNTDPIHARYERLLDGGTKPTLAKLSLARMIAATVLRMWKDEEEYNPGRAGLPTKARES

SEQ ID NO: 436903 - protein, 370 aa, unidentified
MSVRRILAKTIDTDLEYEAIGIDLAKNCVSAALLTTDGEVVGIDRLDYSELEKSAQALSPTTFAMEPCTEMNYLVQKLEAWGHRCLVIGGKNVQNYVENHFSGQKTDLNDAQALAFLAQDTQLRTIKAKDVEQQKYASLTTLREQYIKQYRQTIVSLKGICQAWGLNISKGISGKARLKDLIENHAAFPEELKESLVDMVTHAQTAQKALNKITKTLEELAKSDKVCQLIQTIPGLGSICSCRLRATVGDIKRFKSPKDFPAYYGLVPRSIATGHNERKGKITHRGDRTMRSLMVQAAGSLVNMATKGKLKSKQLTKWILKKQKEKMPWGKLVCAVAAKLLRIVRAVLISNKPYNSKIAGVAKCSLPKGS

SEQ ID NO: 436904 - protein, 386 aa, unidentified
MQKLNDLSRSLTALEPDGTLIAVIEMSLSSWLVAGIVPGVERQPLKKLAVDESALLKLLHRWREEAEKAGRRIERIAVAFEAGRDGFWLARWLKARGIDAHVIHASSVAVSREHRRAKTDRLDTELLKRSFLGWLRGERDHCKMVAIPTMKDEDAKRPNREHDSLIGERSRIVNRMKAALVRLGIRGFNPKLKRATTRLDGLRTPEGEPIPPNALAELRRDMERRRLVNNQIRQIEEERLERIERAPCDGPHVMVRLLARVMGVGIETADMLVHEVLSRNMRDRRAVARYAGLTGSPDESGRKRREKGLARSGNARVRRGMIQLAWRFLLHQKNSALTKWFRSRTENARGTRKPMIVALARKLLIALWRLVREGIVPDGVVLRAAQ

SEQ ID NO: 436905 - protein, 422 aa, unidentified
MMEIAGLPVPVFCGVDWAEDHHDVALVDAGATRLAKLRISDDAAGFAQLTALLTEHGDSKDHKIPVAIETSRGLLVACLRATGRPVFAINPLAVARYRDRHSVARKKSDAIDAAVLANILRTDMAAHRPLPKDSELAQAIAVLARAQQDAVWDRVQAHNKLRSQLREFYPAILAAFADKRGGICSPEARTILAKAPTPAAAARLTRRRLQSLLRQAGRLRGIEAEADRFHEVFHREYLHQPPQVEAAFGQQATALLRQLEAACTNADQLEAATRESFDQHPDASIISSFPGLGSLTGARVLAEIGDDRARFTTAGSMKAYAGSAPVTRASGKSCTVMARRVKNQRLAAAGYVWAFASLTASSGARAHYDRRKEAGDRHVAAQRNLFNRFMGMLFHCLQHGEHYDEETAFPNQPAAQLPAEAA

SEQ ID NO: 436906 - protein, 335 aa, unidentified
MKFENFVGIDISKDTLDLAILTKHGELFNLQISNERQEIEQRVPQWLSEHDAQSSATLMCAEHTGHFGMKLIEISLKLGWNLWMESPYKIVHSQGLIREKNDKIDARRIARYANRYQDLATLVAVSNKSVQILSHLNAEREILVKDRAKYEGQIKQEEGFLDAIYFKSKKKRVEKAIQWLTKAIKEVEAEMDKIINSDPEIKKNFQAITSINGIGPQTAIATILATDNFNKFDDARKFACHAGCAPFKYSSGTSKNSKHKVSHKANKNLKRLFHMAAVSSLRMKGEMKEYYDRKVGEGKNKMSVLNAIRAKLIARIFALVKSGRKYEKNYNAMLV

SEQ ID NO: 436907 - protein, 419 aa, unidentified
MKVEYGNVAEDAVWAGVDTHAATNWLSVVDARGSELFSGEFATDPEGYRKLCDEIRRLGSPVAAGVECTGTYGAGLVRAMAAYGIACYEVITPGRPRRGPGCDKDDAADALRAAKQALSGENLAVPKSQNGWVEEVRNMTVAREELVKQCTSLANLALATVRKGPDEIRARLERLGTAKMMGVLAGWDEAEADPICDAVMFSLAALGRVWAEARRSARLLEERIERTPKAGNPALASMYGCGPISAAMLAIAAGDNPERMGSEASFAALCGVSPIRASSGKVERHRLNRGGNRNANKALHIIAMHRMRTDPRTTEYVERRRAEGLSDREIRRCVKRYIAREAYRLIMHPYDVPIEGKGPEMRAERIASGVSQKDAAIALGVTASTLCDLELGHHQFRELALRYRQWIDDSFPLEAGIAS

SEQ ID NO: 436908 - protein, 351 aa, unidentified
MNIKHYIGFDVHKKSISYCVKTADGQIVEEGKLRATHQVLREWAQKRTEPWHGAMEATLFSGWIYDALKPFAAELQMGNPSMMKAIGAAKKKSDQLDARKIADLVRCNLLPVCYVASAEMRDLRRLLRYRNLVVGQAVQMKNRMSGMLMEVGAEYSKQRLHGKQYFSELLDQLEEVPASVKDLLRLSRSALDVFETTQRQLLDRLQKEPLLVKRVKLLRSIAGVGEVTALTWALEVCDPRRFPSIGDAVSYCGLVSALVSSADKAKRGPISKQRNAHLQTVLVEAAKLAPRWNRPLAELHERELKRGGDRNQATLAVARKLVAYLLAVDKSGQRFEVRKPPVREMEVGQVA

SEQ ID NO: 436909 - protein, 388 aa, unidentified
MAGSVVIGMDPHKRSATIEVMGGDESVLGGGRYATGAQGYRAMLAYAKQWPQRSWAVEGSNGIGRHIAIRLVADGETVVDVPAKLSARARVFVSGQGRKTDAWDAHSVALVATRTSGLRLVVDDEQRSLLRVLVDRRRALGEDHTRMTSQLHVLLLELIPGGAKKDLSAAQAKALLATVRPRDVAGKARRRVAAELIGDLERIYARKKAANKELNELLALTGSTLSTLNGIGPSGAARLLVEVGDIVRFPTRAHFASWNGTAPLDASSGEQVRHRLSRKGNRQINRVLHIMAVVQLRNPTEGRAYFDRRVAEGKTPMEAMRALKRRLSDVIYRQMMLDSQAMTTSPGGQSGNDSDSSATGSHPNAGSSDKPLPGLVKTQPRAISLAAS

SEQ ID NO: 436910 - protein, 363 aa, unidentified
MPESTTIIAFDQHADSLMAAVLPPRADKPAMQLLSSELTHVGRFVDKVRRGGAVRCCYEAGPCGFTLYRYLSGRGIPCEVIAPGLIPRRAGDRVKTDRRDAIQLAVLARAGALTAIHVPTDADEAARDLVRTREDARRDLLRARQRLSTFLLRHGRRHTRTKSQGYYYDQWVRTQTWPWPALTETHQAYLRTVDEARARLQDLETALQAVATDPRYHATIARLRCFRGIDTLSALILAVELGDARRFASAPALMAFVGLVPSEHSSGPRRWRGGITRTGNAHLRRILVEIAWHYRHQPYLGRPLQRRQAGQSHAVCAAAWRAQRRLYRRYRYLVGHGKRPSVAVVAVARELTGFVWAALTTVN

SEQ ID NO: 436911 - protein, 413 aa, unidentified
MNYEPITAVGIDVSKGKSTVAVRRPGGEVVLTPFSVEHDAVGLSSLVKTLRSIGGDIRIVMEHTGMYWRPIALALKEAGFFVSVVNAMLIHDFSDNSLRKVKTDKADSMKIANYALSFWAELRDYSPEDETRQMLKMQNRLYLRTQKSSVVLRNGLISLLDQAFPGVNTLFDTQPRRSNGHFKWVDFVKRFWHRDCVAGISLAAFSDAYRKWCAKSGYRVSQSDAEKLHTAARDTVATFPKNDSTKLLIAQAVDSLNAVYDALYILRGEMLRLASLLPEFDIVMAMQGAGEVTGPQLMAEIGDVRRFTHKGALVAFAGMDAPPFQSGTFDSKSRRISKRGSPNLRKTLFMVASTILQHSDPANPIFQFMDKKRAEGKHFYVYMVAGAAKFLRIYYARVKAHLLALDAEASTAA

SEQ ID NO: 436912 - protein, 341 aa, unidentified
MKKNVVIGIDFSKLTLDVTFFNTDKPEEMHYQQFGNSRAGCTKIITWIKRTFKDCSKWLICGEFTGIYSMTAAMVFNEKEIDLWLENPRQIKLSSGINREKNDKVDSKEIAMYAARFMDRVKLYKPQSDVLLKIKELVNYKDRLTKIKSQLMVPAKELKRVRTEWQESLYIHVDSKEMVAEINKKIKDIERKMLFLLKSDPDLKRLYKLINTVVGVGMQTAIYLLIHTWGFTSFDNPRQLACYCGIVPFSKRSGTSIRGKAQVSHIANKKLKTLLHMCALNAIKYDPTIKAYYERKTKEGKHKMNVLNNVRNKLIHRIFNVVSTGQEYDKNYLSNLANQAA

SEQ ID NO: 436913 - protein, 340 aa, unidentified
MNATTYGLDVAKRVFQMYWVDAQTGEIVNRRFGRDELIGFLAQRPAGRVALEACGSGHWWARKIKALGHEVVLLHAKFIRPFVQTNKTDAADARAIWTAVQQPAMRTVAAKTEDQQAVLSLHRMRALLVKFRTMQVNQLRGLLYEFGVTFRAGRLAGLAEIRARMTELEDALPEAMICSLQEQLKRIDGLEQEIDRLEKRMSTWQKQEAACRAIAEVPGIGKLTATALVAMIGDAKTFKSGREFASYLGLVPRQSGTGGKIRLGSISKRGDPYLRTLLIHGARSVMCHAKVPTTWQREIRARRPANVAAVALANKMARTAWAILAHGQAYRKDYVSVKPA

SEQ ID NO: 436914 - protein, 339 aa, unidentified
MENNNNPYYKHYLSIDWSQQDVSIARMRAGSNQPETKLFPSDIKKIKEYLKGLQGKKILTIEETTGSHWLYVELLESVDKILICDPYRNSLLKEGAKNDKIDARKLCLLLRSGLLKEVYHTSNEDYKIRKLASAYIALVKSGVRIKNQNSALYRGEGLKYKKDKIKKGEEILSFVEEQQKRAIKLYEEEKKKYEEVFKELKKKNEVIKMLCQVSGIKETSGVKIYSVVIEARRFENKYKYWAMCGLVKHDRESGGKNYGKKNPRYSRILKNVYKSAALAAIGGNNDIREYYEVLLQKGYPIAEAKNQIARYIAKVTYAVMKNKKPYKAYQWRELNKQKS

SEQ ID NO: 436915 - protein, 351 aa, unidentified
MIIIGCDFHTRYQQIAMADDETGELLLERRLDHQSGEADAFYRSFSATVRVGIEATGPVHWFERLLAELGHELWIGDSAEIRAREVRKQKTDERDARLILDLLLSKRFPRIWVPTAAERDLRQLLWHRHKLVSLRTMLCNQLHFLAMSQGLCRKQKLFSKKGRSEFIGLALGPWASRRREELLKLLDQLDPAIADLDRAVLQEAQRREDAVLLMTHPGIGPVTSLAFVLAIGPVTRFARSRKLASYLGLNPSEESSGGRRRLGAISKQGNTMVRWLLIEAVYPAVRKDLALRQDYQRLKFRRGHAVAKVAIARKLAVRMYWMLRSGAAYAQLVRRQGSPGAALVDASPSLG

SEQ ID NO: 436916 - protein, 378 aa, unidentified
MRMTTDQARVTAGVDAHADTHEAAALDERGCLLGTRTFRTGSEGYRELLAWLEQFGELVVVGVESTGSYAAGLVRFLHAQGVDVVEVNRPHAHTRRRRGKSDPIDAEMAARQALSGDASAIPKTTTGIVESIRQLRVARDGAVKARSAALCQLSDVIVTAPDGLRERLSQRKRTRAKASLCLGLRPRTTHLGEPAEAAKLALRSLARRIQGLDEEIAVLDKHLGTLVATAAPRTTKLLGISTGHAGQLLVTAGQNIERLRSDGAFAALCGASPVPVSSGRRSRHRLNPGGDRDANRTLHMIAVVRLRYCQRTRAYAQRRSTEGKTKREIIRCLKRYIARETYRTLCADLHDLQQPPRPAAAVTIMCGAGPIGRTRRRT

SEQ ID NO: 436917 - protein, 402 aa, unidentified
MNCVGIDVSKGKSMIAVMRPFGEVVVSPFEVRHTANELSELAGLLKSLDGETRVVMESTGNYHAPVAWLLHGAGLYVSVVNAMLVHDYGNNSLRRGKTDKKDAVKLANYGLDHWLTLPRYVPEEDTRLMLKTCYRQYQQYSKVQTMLKNNLISLLDTTFPDANRLFTSPPRTDGSEKWVDFVAAFWHCECVCGLSEKAFAAKYQKWCRKHGYNFSEDKALDIYASACRHFGVIPKTDTAKLLVEQAISQLQTTSSALAALKQEMQSLAASLPEYPVVMGMFGVGPTLGPQLLAEIGDVRRFHSKKALVAFAGIDAPPYQSGQIDVRSRSISKRGSASLRRTLFLVMSVILQCAPIDEPVYQFMDKKRSEGKPYRVYMMASANKFLRIYYASVKAYLESLEHD

SEQ ID NO: 436918 - protein, 310 aa, unidentified
MEHRRIVGIDVSKDRLDVHVLPTQEAWASRRDAEGLAELCRRLGDTADLVAIEATGGYETIVAAALSSHGVAVVIVNPAQVRAFAQALGQRAKTDPIDAGVIARFAEATRPQIRPLPDGAARLLGDLVARRRQIVEMIASERQRLHRTELARVRKSIERLLKALERELASIDLDIDGIVRSSPIWRAKEDLLASVPGIGRIIARTLLAELPELGRLDRKQIAALAGLAPFTRQSGTWKGKARISGGRAVVRTALFIGAQVAKRWNPPLKAFYERLIAAGKPKMVATIAVARKLLTILNAILRDKTPWQNA

SEQ ID NO: 436919 - protein, 337 aa, unidentified
MELYAGIDLHSNNSVIVVLDESDRIVYQKRLPNDLTAIAATLKACGPIAGVAVESTYNWYWLVDGLMDAGHTLHLVNTAAVSQYDGLKHGGDFSDARHLAHLLRLGILPTGYIYPREERALRDLLRKRSQMVRLRTTQILSIQNLMTRNLSTQTKSNDIKRWQAEDIDALALRDEQKLALQSNLNVMQCIDVQIDQIERAILKQAKPRHDYQALRTVSGIGQTLALTIALETGDIHRFESAGNFASYARTVNSRRESNGKKKGEGNAKCGNKHLAWAFVEAAHFAVRYDEQIKRWYQKKSSKTLPVVAIKAVAHKLARACYHIMHDGEAFDVKRAFS

SEQ ID NO: 436920 - protein, 317 aa, unidentified
MKDSSSISVVGIDVSKDSLDLFHTINGQQQKIAYQQDSLKLLARQIIKLNATVVMEATGGYEKKLVKYLQSQGIACAVVNPKLIRDFARACGKLEKNDAIDARIIASFGQMMQPRTMGKIDRNREKLKLLATRREQVQSMITQESNRQQQIEDRQIRAFIQRAIQLYEKQLKKLDNEMLKVIEADQDMKEKSKILLSAKGVGPTTTANLIAGLPELGQLNRQQIAKLVGLAPLVRDSGKFKGQRRTYAGRSQIRRILYMATLVATRWNSRIKAFYLSLLERGKPKKLAITACMRKFITILNSMMKNNQTWDQNLLAS

SEQ ID NO: 436921 - protein, 343 aa, unidentified
MQAVTTIGLDIAKSIFQVHGVDGEGNVVVRRKLKRRYIVAFFQKLPRCLVGIEACASSHHWARELQALGHTVRLMPPAYVKPYVKRHKNDAADAEAICEAVTRANMRFVATKTPEQQSCLMLHRTRHLFIRQQTAVINAIRAHLAEFGIVAPVGRNGVEALLNIVADTSDNRIPEIARACLVALGAQLRALKAQILEFDRRIMAWHRSNEASKRLDEIPGVGPALATALVASVGDPRAFRSGRDFSAWIGLVPKQSSSGGKEKLGNISKRGDRYLRSLFTTGALAVIRYAKLHGTKHRPWLTALLARRPTKVAAIALANKLARMAWAMMAKGERYKEPIALAA

SEQ ID NO: 436922 - protein, 360 aa, unidentified
MFIERTSVGLDVHARSVVAAAIDGVTGELFQSRLTPSHDHVLSWLAGLPGPVAVVYEAGPTGFCLFRSLTAAGIRCEVVAPSKLQRPSGDRVKTDARDAIHLARLLRLDEVTAVAVPSVEQEAARDLVRAREDARGDLMRARHRLSKLLLRHGIVYDGGLAWTEAHDAWLRRLRLDSAGVQMAFESDYEAVLAVKSRRDRLDRAIVAMAADSEFTPIVHRLGCLRGVSTLTGFALAVEIGDWHRFTGKTIGSFVGLVPSEYSSGASRVQGSITKTGNTHVRRLLVEAAWHHRARYAIGKTMLDRWDLASPAARARGDAGNRRLHARWVRFNDRRKRHVIANVAVARELAGWCWSLAVLED

SEQ ID NO: 436923 - protein, 424 aa, unidentified
MLSPPLNLALRVPEINEPPEADKPSSTARFVGLDVHKDYVTVAILDIQLNKVLGPRRVDIHQLETWASQNLNSADNVVLEATGNAWHVYDQLQPLVASVIVANSLAIKPMMSGKVKTDNRDAVNLARLLAAGMIPAVWVPPIEVRELRTLVAHRSRLIKQRSQARNRLHAVLLRHNIVPPVGELFSSANLSWWQALDLPSSEKLLLRQVLALFEFLTALINDADQELLRLSTTEPWGSQVPYVLQIPGIGVPSAMTLLAAIGDISRFPSAKKLVGYAGLGASIHASGQINKGGSITKQGRREIRTTLVQCAWHTIGTSPYWQKQFERLEARIGKSKAIVAIARKLLVVVWYTLTDQAADRNADPEKVAFKLMYWGVDLKREGRQGLSTAVFVRRKLRVLRLGELMTSISRGGKTHQLPTVVEDG

SEQ ID NO: 436924 - protein, 375 aa, unidentified
MTKIIRIGIDTSKSVFVLHGVDAAEQPVLRKKLRRSQVLEFFAKLEPTKIGLEACGAAHYWARELMALGHEVVLLPPQYVRPYVKRGKNDAADAEAICEAMSRPTMRFVPVKTVEQQAALMLAGTRDALIRRRTQLTNAIRGYAAEFGLTAAKGLDKIEPLLARIAAAAELPRLAQELFAGYGKEYAQLKVQIQKIEAKLMAWHKDNELSRRLVEVPSIGPIGASLMAMKVTDPHAFRCGRNFSAWIGLTPKDHSTAGKTRLGVITRAGDESLRSILVVGATSVIKQVRRGKGHPSPWLVELVRRKPPKLAAVALANKTARIAWKLMVSGERYNPAAAARAGRGSPLTRGCAPRPALAARIRSRSAALPAAGTEA

SEQ ID NO: 436925 - protein, 330 aa, unidentified
MEHVTSSASVATDCYVGIDVSKDRLDLARLDQPNERLSFDNDPAGIRKIVSLMRRWNPARIAIESTGKLERPLLLALIDADLNACHVNPVRVRRFAQGMGLLAKTDTLDALVLAHFAHKAEPRISTKTPEKRAELVELVTCRRQLIEARTAHSNQRLRTDSTFASKQLDSVLNHLEERIDELEKQIAALIEEDDDMRHLDDLLRSVTGVGAVLSATLLAMLPELGRIDHAPIAALVGLAPYNDDSGHHKGQRHIRGGRSSVRNVLYVCTVCAIRTNAVIKAKYKDLLARGKAKKVALIACARKLLRILNALARDGVRYKLQNVQNLVSEA

SEQ ID NO: 436926 - protein, 361 aa, unidentified
MRYVGIDYHKHYSVLCATDERGQELKQRRIKGNTAAGFAQFFSELGEQNKVVMEACWNWGWLYDLLGQIDKVGEVVLAHPYKTRLIAEAQIKTDRIDAQTLAKLLRGDLIAQSHAPSAATRARKHLLRQRLFWVRLRTMLRNRMHAILDRQHGMERPQLKNFFSRRGQTWLEGVKLPCAEDQPLLKQDLEVAELLEQKIKQLDRAIGQSQSVEEKLLESIPGIGPLFSSVIATEIDGIARFNSAGKLAAYAGVVPTTHASGGRVFHGRLLWQCNKWLRWALIEASWTAIQFSGYFGAIYRNARTHGKNKHVAITMVAHRMVKIIWLLLKEKRPYTETLPDRSEEQVTVAPRRKALSLASSC

SEQ ID NO: 436927 - protein, 338 aa, unidentified
MTVAFLGIDLAKNVFQLHGANVDGQAVWKRRIRREGLLAEIAELEPCVIGVEACTGAFYWQRQFEALGHAVKVIAPQYVKPFVKHQKNDQNDAEAICTALMLPNMKFVPTKSEEQQDIQALHRARRRLVNHRTALVSQMRGLLLDRGIPIALSIGRARRAIPEILEDQANGLSAMSREIIGDLFDFVAQIDVRITAFDRRIDAVFKSNEDCRRIARICGVGPKTATAVVAAVGDGREFRNGRHLAAWMGLVPRQHSSGDKRLLMGISKRGDRHLRTLLIHGAGSVVRVAQRKTDPFSQWVNRLRERRGMNRAIVAVANKNARIIWAILNRNEEFRAPA

SEQ ID NO: 436928 - protein, 339 aa, unidentified
MEKLTLLGIDIAKNVFQLHGVDDKGNPVLRRKLSRTKLVEFVANVSPCIIAMEACGGANHWCRKFKAMGHVVKLISPQFVKPFVKTNKNDRNDAEAIAEAASRPTMRFVSPKTVEQEDIQAVHRVRSRLIQERVALTNQIRGLLAEYGIVISQGIHHLRKLLPEILEDAENELSHSGRQLFVELYEEIAEKDKRIKRYDVKIEAIFKSNKNCQKISKVEGIGPIIATAIVAVIGDPSVFKNGRHFSAFLGLVPRQSSSGGKERLLGISKRGNTYLRSLLIHGGRSVVRAVGSKKDRRSQWIRELTERRGANRAAVGVANKNARIIWTLLAKNGVYEKAA

SEQ ID NO: 436929 - protein, 423 aa, unidentified
MKLLYRCCAGLDIHRDTVSACIRARVRGQAEAVLEEQVFGTFTQDLERLRAWLKQHKVRQVAMESTGVYWIPVWNILERGFTLTLVNPATVRALQGQKTDQIDARRIAEYLQYGLLRGSFISPKPIRELRELTRLRVHTQQDRNRVINRIARLLETVNLKLASVASNIVGQSGLAMLRLLASGVRDPEQLAACARGHMRVKIPALVLALEGRPDQHFRWMLTALLAKLDWLDQERGRIDARIEELVVPYPDLLRRLATIPGVDRTTALVLLAEFGEDMAQFPTPGHLASWAGLCPGNAESAGKRFSGRTRKGDRYVRRILVQSAWAASRCKDCFLAAFFFRIAQRRGLKKAAVAVAHRILIIAWHILAEQGVEYFERGGDHFDRRNPERTARKLTRRLETIGYKVSSAETQFTTTASTHSQNA

SEQ ID NO: 436930 - protein, 312 aa, unidentified
MIEQCFGGIDVSQDRLDVLLLPQGTGFSVANDEAGWSTLIGRLRGLPVAAIGLEPSGGYERGVLRALLAAGLSVRRINPNRLRQFARARGALAKNDRIDARLIAEYVATMPTHVVRHDPAAARIAEIVTMRRQLCDEHVAIENQAAQLEDAMLRRLAKRRLARIETDIRLLEKRLTETIAAEADLARRYARLTSMPGVGPVLAFTLIALLPELGRMSRKQIAALVGLAPYDFDSGKLRGHRSIYGGRMPVRNVLYMAALSACRYNPALKTFHNRLAAAGKKPKVILVAVMRKMITTLNAMLRDGAGWQPQAA

SEQ ID NO: 436931 - protein, 341 aa, unidentified
MGQVSTIGLDLAKSIFQVHGADASGAVVFRKRLRRSQVRPFLAAQPPCTVAMEACGSAHDWAREIAMLGHAVRLIPPAYVKPFVKRQKNNATDAEAICEAAQRPTMRFVAPKSEQTQAAALVFRARDLLVRQRTQVINALRGHLFEFGLVGATGPAHVPQLVQAVENPDEPLPEIARPVLQILIDTLHRLDEQIALLDREIAQRAKADETAHRLMTIPGIGPVTAVALTALAPPAQTFRRGRDFAAWVGLTPLQHSTGGKQKLGATSKMGERTLRRLLIIGASAVLRWAARHGAPAGSWIARMLACKPPMLVRVALANKMARIVWALMAKGGTYQAPAARA

SEQ ID NO: 436932 - protein, 368 aa, unidentified
MDIPLWKSVPVDVTIGTPFIFQRGDQMNEVKGVVAVLGIDLAKRVFALHGVDRDGKVVLKQVVSRSTLPRLIAQLPPCLIGMEACSGAHEWARQFAQHGHTVKLMAPVFVTAYRKAGKNDDNDADAICEAVGRPNMRFVPVKTRAQQALLSLHRVRQGFVEERTGLINRLRGLLAEFGFVFAQRHGGLRAVPSALEGLPALAKRAVDDLLEHLRTLNERIAAYDLEFKHLAAQDDAAKRIMTIPGVGPITALALVATLGNARDFKNGRQLAAWLGLTPKQHSSGGKIRLGPVTKHGDGYLRTLLVQGARAAMQHASRAQPTRLSRWATNLVTRRGYHKANIALAAKNARIIWAILARGGEFQPHAAAA

SEQ ID NO: 436933 - protein, 433 aa, unidentified
MYRELQPLRQALSVELKANLSPAEPGIDPEHLLQSYLDRLTMYVGCDVADQTFTLMALDAAGEELGHCLNVPNTPAGFERAWEWLEDLRSQGRLRIVLLAMETTGVYYWAWRDFLAGRPNLARVLYNPRTTEHMTEVLSKKVRNELVDAYALAEQVRLGGTPEVVLIEDADLLTARFCSRAARDLAQQINRNKKNQLRSLLRAYNPAISQVFPRAKFHHQAVYALLQHYVFPDEYATAGVEAITTILQHHCRTAFGRKHAEQLVSLCRESLTREIGRETIRQRILHLVADISTCQKRKSYFNKTGYRLIEDRPETNLLRNAIGAGISNTLALVSEIGDVQRFQSGEHLASFLGLTTSKHISGTTLFRSKHITKQGSPNGRYAAVNLAQYLSQRVPKYIQMYQRIKNRKPPRKGHFIALVAIARDFITNVLYDM

SEQ ID NO: 436934 - protein, 344 aa, unidentified
MQVSTIGLDLAKQVFQVHGVDAEGAVVLRRRLRRSEVVKFFSTLPGCLIGIEACATAHHWARELSALGHEVRLIPPSYVKAYVKRGKTDAADAEAICEAVSRPSMRFVPLKSAEQQSALMLHRSRDLLVRQRTMLVNAVRCHFAEFGIIAPQGIRRVGELAVLLIDEDATTLPPLARQALRVLLAQLHALDEQIASLEAAIVASHRDNEASRRLASIPGVGPITASAIVASVADAHQFRSARHFAAWLGLTPRSHSTGGKERLGGISKQGDPYLRRLLVTGATCVIRYARRKAPGEGGWVKALLSRRPARLVSVALANKMARIVWALLVRGSAYRAPAVAVATT

SEQ ID NO: 436935 - protein, 463 aa, unidentified
MEGKARRTHRNHKSPSLLERVNHNAAGIDCGSAEHYVAVPVDRDAEPVRHFRTFTAELHRLADWLVSCRIKTVAMESTGVYWIPVYEILVARGIEVLLVNARHLKNTPGRKSDVTDCEWLRELHSVGLLRGSFRPDEEIVTLRSYLRHRDTLVQSAATAITRMQKALVQMNLQLHIVIRDIMGMTGLAIIRDIVNGQTDPDRLAKHRDAHCKASEADISAALTGHYRAEHLFALKQNLEIFDAYQRQIEACDAQIEACLTALAEKVAPPSAPLPSRRSRRNRRSNEPRFEVRPMLHRLANTDLSELDGIGPYTALRLISEIGTDMSRWQTDRHFTSWLTLAPNNKISGGRLLSSRTQPSASRAAAILRMAAQSLARTQTALGAFYRRLAFRIGKAKAITATARKLAILVYHALKGDLVYKDPGAAAYDARHRDSLIRRLRQRAAALGLSLVDGQTGEILDGVS

SEQ ID NO: 436936 - protein, 441 aa, unidentified
MPQPILAVGVDPAKRLHRAVAVLFPDEVVLDVELPNAFDAVANLDHRLCELANQHGADLVYGLEDHRRYGRLFCQVLTERGRDVRVVNPLWTNRQRAFYGQDKDDAIDGRSIAAVVLRRHHQLPLASDFGEVAQAIREAERSLQDLSEARTQLGNRLHLQLSDTYTAAYEEYFGKLRSPLALRFFRRFPLPQDLVDHNVEMLASLLLDLAGGKVGPHKGGNRLIAMRSKAQAILETSGAMRALPRTLALELKAELIRQLCDELLANHDRIIRLERMLREQLLPATKQTITTITGISTILAATIIGKTGSITRFRSPAAFAVYNGTAPARNSTGGRDRHKARRDCNHRLKRAFYLAARAAVLHDLLAKAYHQSCKSRGLSYVEALKRVARRMSDLVYALLKSGKAYDRSIIEHAIERRREQAAHAACKPCETKPSPLPTKKI

SEQ ID NO: 436937 - protein, 353 aa, unidentified
MDTQTHKEVILGVDTHLDKHVGVIIDEFGKYLGNLSIETNTAGYQQLLKWTQSFGCIQRAGIEGTGTYGAGLARFLFKQNIQVLEINRPDRSMRRFRGKSDPTDAESAARMVLSGNACAIPKLQSGPAEAMRIVSVARRSAVKARTQTINQLRGLLISAPDDVRLKLWSSKPAECVKNCAYLRTLGESSWLITLATTLHLLAKRWLYLTEEIKELDKTLERLTSGAAKRMRAQFGIGPQTAATLLAVAGDNPERLRSEAALASLCGVNPLEASSGKTVRHRLNRGGNREANNALWTIAMVRMRSDPRTRTYVERRTLEGKSLKEIHRCLKRYIIRELYPLILADLKDATFKLT

SEQ ID NO: 436938 - protein, 425 aa, unidentified
MHKSQYSKQLEKRKRIGDRTLVIGMDIGSDFNAACFMDKEGNVLGRYPVIYNSRKGFEYFQAMIMKTRREHKLDDILIGMEPTGHYWRKIAFFAKEQGYEVRFVRTTAVKHQRELDESSSAKSDIKDAYTIGNIVREGKYIDTIIEESVFRQLRMLAHARERILRYIVGSTHGLQAVLNDYFPELRHLFWSMKAKGLWMLLETYPFPEDVRHAGLAAITALLSKGRGKKRHIQEQAARVYQAAVESVGLKAITKADRTRLATYLEEIKRSDQRRKLLEREMKELLKEIPLAEYILSLPGMGRVGCAVFLGELGNPEHFNNPRQIIKYAGYDPKENDSGLRVGGKIISKKGRWLMRKCLFFMVLRLVHRSSFFKACYEQKKKGFHRPLEKTEALCAVVLKLIRVLFALMRDRRMFSEELPRCQKAA

SEQ ID NO: 436939 - protein, 347 aa, unidentified
MDHYAGIDVSLEASSVCVVDGAGKIVREAKVASEPEALIRWLASFGLDLARIGMEAGPLSQWLYGAMKEAGLAVELLETRHVQIALKTMPVKTDRNDARGIAQLMRLGWFRPVHCKSMAAQETRALLTARKLVQSKLYDVEMSLRGILRGFGLKVGPTTPKRFAWRIEELVAGHATLELIAKALLAAHAALLREFDMFEKRVRAMARADKRARLMMSAPGVGAIVALTYVSAIDDPSRFSSSKRVGPHFGLTPKKYQSGEKDVTGGITKIGDAGVRTALYEAANVILTRPVKGGGLKSWAMKLAKRAGMKKAKVALARKLGVILHRMWIDGTPFDARKAACAFVAAA

SEQ ID NO: 436940 - protein, 338 aa, unidentified
MAIVKVFVGLDYHQDEVQVCVLDAAGKILCNRSVRNEAETIRLTAQRYGVVEAAALEACCGAANLAQELVDGGWSVSLAHPGFVARMKQNPDKTDFADAHLLADLLRVGYLPKVWLAPERLRRLRRLVRFRQQLVDQRRDVKLRVRALLRENRLRPPGDVSPWTRCWLAWLRNDAALQDDDHWMMNQHLEMLADLNLRIADIQKQLQQWANNDAVMQKLLSFSQVGLITAAMLRAEVGHFDRFRTGKQLSRFCGVTPRNASSGQRQADAGLIRAGNPDLRRVLIELAHRLINRFDDRWCGLATKLMRAGKKKNVVVAAVANRWLRWLYHQMKSVALAA

SEQ ID NO: 436941 - protein, 420 aa, unidentified
MARAIAIKASPAAYLYVEKKSYMKTAGLDVHKDSIFCAVFNGKHYSDVEVFETFSTGIRQLGAYLKAAGVLRVAMESTSIYWIPVWNILSEMGFDLMLVNPFLIKQLPGRKSDVKDAQWIAQLLHKDMLRGSFVPGERIQELRSYTRSYSKLQQRIVRMLTKMDNILVQAGIRLGSLVTDIGGKSMLSVIDALIAGERDAVRLSKLVYASKKNKENGKLAAALTGCMKEHHRFNLQMAKVEYDLLIKQSAEYIEKIEAICLRDFPRQSALLKTIPGVSRISSAVIIAETGADMKVFENSGKLSGWVGLRPKNDESAGKYKSTAITKGNRYLKPILVQVAWAASRCKGSYFKDKFNRLSIRKSSKKALIAIARKISVVVWNILKDLTPYNPALQVIYEPAKLDARIRYHQKEMERIAKLKP

SEQ ID NO: 436942 - protein, 428 aa, unidentified
MDELDRNRLEQFRQLRREIRNSEQYLIVGIDVAKDRHHAFFGTATGKTLLKRLVFSNDQEGFRKLLDQAEALQVRHGLKEVVYGMEPTANYHKSLGEYLIHLGRPVVLVSGVTVKRNRETLDGRWDKHDGKDSANVADLVSQGKCLYYEYPRAALRGLRGLLSLKRRLKKQEHGYRVRIRNHLIAQYYPEMDREYERLGAEGLAIVRWCFPPSEMTVLEVEEFVQRVTTRSVRMEKRRRLEGIWERAGETIGCDGVPGVEHEARMMVEGLKQIREMIKETEGKIQELCKEFPEYEYLLTIPGFGPDVSSKVLGAIGDPDRFENRKQVIKLAGLDLSADRSGKNSDKAIPEISKRGKADLRYALYQAAMIASLKNRDIMIYYTNKIRGREKEKGIQIKMRVKLAAKLLVIAWTLMKKKESFDPAYLNVE

SEQ ID NO: 436943 - protein, 360 aa, unidentified
MKVQRTSVGLDVHARSVVACGLDGDTGELFERRLTPDHGEIVAWLGDLPGPVAATYEAGPTGFVLARSINAAGIRCSVAAPSKLQRLVGDRVKTDVRDARHLARLLHLGEIVEIEIPSVEQEAARDLFRAREDCRCDLMTARNRLSKLLLRQGIVYYGGTAWSRNHERWLQAQRFDHPALAMTYDTAFDTVLAITARRDRLDTAICEMAADSPFTAVVTRLGCLRGISTLTAFGLAVEIGDWHRLTGRTIGAYLGLVPCEYSSGATRAQGGLTRTGNTHARRLLVEAAWHHRKPYRPGEVMRRRWNAAAPAPRARGQAANRRLHERWLRFDERRKRPVVANAAIARELAGWCWSLAVMDD

SEQ ID NO: 436944 - protein, 457 aa, unidentified
MMETKRRREQRSMLPVHPDAAAIDIGATVHVAAVGPARDPEPVRSFGTFTGDLHRLADWFAQCGIKTVVMESTGVYWIPIYEILEQRGFEVRVVNARDAKHVPGRKTDVSDAAWLQRLHEFGLLRGSFRPQGAIAALRAYLRQRERLLDYAAAHIQHMQKALTQMNLQIHHVISDITGATGMRIIRAIVAGERDPDTLASYRDIRCHSSAETVRQALIGNYREEHLFALAQAVELYEVYQAKVATCDEKIEGVLERLKQPCRAPAKPLRAARHKTRQPNAPAFDARGALYAVLGVDLTQIHGLGPYLALKLISECGTDLSAWPSAKHFTSWLSLAPSNKISGGKILSSRTRPSGNRAAALLRLAATTVGRTETALGAFYRRLSARIGKAKAVTATARKIAVLFYNAVRHGMDYADPGASYYEERYRRRVLTNLQRRAKAFGYVLQPTEIKVVPMAVS

SEQ ID NO: 436945 - protein, 469 aa, unidentified
MSKHINKQNQTQRKKYYRKKQSDSFGVINPNAAGIDVGSEEHWVAVPKDRDEQPVRSFKCFTADLHAMADWLKKCTIQTVVMESTGVYWIPIFQILESHGFEVKLVNARHVKNVPGRKTDVSDCQWLQRLHTYGLLSGSFRPEDSICVLRSFWQHRDTLIRYASSHVQHMQKALTEMNIQLHKVISDITGLTGMRIIRAMLAGERDLVTLAHMRDPRIKSSAEQIAKALEGDYREEHLFALQQAAELYDVYQQNIQACDQQIEQYLSQLDSKIDLESNPLPASTKSNKTPKGNAPHFDLRTHLYRISDVDFTQIDGLEAVSVHTILSEVGLDPAAFHTEQHFCSWLGLSPNNRITGGRIKSSKTRKVVNRVRSAFRMAAQSLTYRSSALGGYYRRMCARLGAPEAITATAHKLARIFYHLWKNGGTYQDPGPLYYEQKYKERVINNIIRKAKQLGFQLNIEPLNDLQVS

SEQ ID NO: 436946 - protein, 428 aa, unidentified
MNENETTRYAQFCQFRKEIRGSQDYLIVGIDVAKDKHHAFFGTATGKSILRRLIFDNNASGFSTLVERADQFMRQFKLKRVVYGLEPTGNYHKPLGSWLLDQKQMLVLVSSKLIADNRQTLDGRWDKNDTKDSANVADLLSQGKCQFYERADDNLEQLRTLLLLRRRLKKDEIRLRLQIRNGLVCKHFPELDRFWGQNSQENLAIVRWCLDPRQIAQMPFGEFVRRVTTCDRGLRQARRLRAIHEVAAESIGIAMSSTDRYHARLLVGQLRLKQEQLSKVMERIEKACQGSVYYQLLLTIPGFGPYIASVVLARIGDPLRFSRRKQVLRLAGMDLSAKRSGKRSKDVVPVLSKKGNSELRYAIYQAAHTASCRNDTIRELFTRYLSGREKEPGIRKKMRVKLAAKLLIVAWAMMRNQTQFNASLLLTQ

SEQ ID NO: 436947 - protein, 345 aa, unidentified
MHIASIGIDPGKATFHLVALGERNKILLRKRFSRTQLLAYAANLPPALIGLEACAGAHFVGTALREQGHQVRLIPAQFVKPYRKSNKNDFLDAEAIAEAVTKQNMRFAQLKTQEQLDWQAMHRVRDRLVRRRTALINEIRGFLLERGITFAAQPIHLRKNLPTVIEDAEQNLSPRLRWLLDRMWQEWKQTETEIEAITDEIERISNEDARCRQLRQIPGFGPLVSTATVAAIGNGSAFRRGRDFAAWVGVVPRQYSTGGKQKLYGISKRGNIYLRRMLIHGARSVLFRVKHDTGGFGQWVHRLAQRAPSNKVVVAIANKLARIAWAVLSSGKDYRHQPLQRSAAA

SEQ ID NO: 436948 - protein, 370 aa, unidentified
MLDTTTFIGLDVHARSIKAVSLDVMTGEVRAATFGYDAGAVAEWVRSVDPRARCVYESGVTGFDLQKRLSGLGVDCVVGAVSKMIKPSADRRRKNDRNDAEFLARMLSVGNVVEVWVPDDECEAARDLTRALEDARDDLSRSKQRLSKFLLRHGLVFDERTPTGRRKGNWTRAHWSWIESIRFAEGADNDVLAYYVDAVRRAAEEKARLEGLVEAEARKPRWRKRVDSLRCLKGVDTASAADLVFEAGEFSRFRNARSFAAWVGLTPSEHSSGESDRRGAITKAGNKHLRKALVEAAWHYLTCSGRPKDLARGQAPDRGARRHAAKGVRRLVERREALLARGVHGNKANVATARELACWVWAVGLMAEEA

SEQ ID NO: 436949 - protein, 344 aa, unidentified
MDHFVGLDVSVKETSICIVDETGKIVREVKVASEPDALLQVLAKPAYRLKRIGLEAGPLSQWLFSALAEAGLPVVCVETRHMQAVLKAQINKTDRNDARGIAQMMRVGLYRPVHVKTIRSQKLRMLLTHRQLLQSKAIAIENDLRATLRNFGLKVGMVGKVRFEARIKELVENLPDLAALVEPLLIVRRVLREQMVILHRRVLAVVRGDEVCRRLMTIPGVGPVVSLTYRATVDVPARFRKSKAVGAVFGLTCSKYQSGEIDRSGRISRCGDEMMRVMLYEAAQSMLRSKKWSWLKAWAMQIARRRGMKKAIVALARRLAVIMHRIWVDGTEFRWTRGQVPAAA

SEQ ID NO: 436950 - protein, 354 aa, unidentified
MQIVGALDVHRRQITTKTLDLESGEVRRGRISPAAREPLREWLERFAGREAHFALEGTTGWRFVVEEIERAGLVAHLADPAETAAKRGRKRRAKTDKADCDLMLDLLAHARLPESWIPPQQILELRVLLRLRKALVDERTAWQQRLHAQLFHQGIPAGINLRRRLGGAALAHVPLSPAGRRLAGVGLRMLERLDGELAPLDRELSAFARRQPGCRALIARLFGVGPVTSTAILAELGDCRRFASSDDSVRHSGLDVTVYSSDRRRAPGHLSHEGPELLRWALFEAAQSAARPQSPDHAYYLVVKQRIDHNRACLSVARKLCRRAFHILRELGEEALAPVDRLLPAGDEEVPAAA

SEQ ID NO: 436951 - protein, 344 aa, unidentified
MTQTITNAEVHTLAIDLAKTSFHIHAADRSGVKIHSKPVNRSKLIQYVSNLQPCTVVMEACGGANHFARKFTAMGHTVKLIAPQFVKPFVKSNKNDALDAQAICEASQRPDMRFVSPKDTAQQDIQSIHRARSLVVAHRTALSNQIRGLLTEYGVVLPQGISILRRSLPSIIDSDNRELSILFRELLQNLYSALITVDQQVEDFNQKIELLARQDERCVRLQTIPGIGPMAATALVATLGDGSAFKDGREASAYLGLVPRQNSTGGRSTLLGISKRGDQYLRSLLIHGGRAVVRTSPKHSDYRSNWITDLARRRNVNVASVAVANKNVRTAWKILQDGNNYLAA

SEQ ID NO: 436952 - protein, 321 aa, unidentified
MKNRKNDVLYVGVDVSKDTLDVYRPDTSESIRVENSEASINDLCKKLKSKKLLFAMEATGGYELLLRTCLAKHGIDSTVLNPRQVRDFAKGIGLDAKTDAIDAHVISKFASVVEAKAMPMASDHEQKHSALVTRRCQLLELINQENNRLKQAWDDDVKKSIQEVLESLKKQMKTVDSQLAKMLEKDTANERTIEILQSVKGIGPVTISTFIADLPELGKLNRGEVAKLVGVAPINRDSGKKSGKRFIGGGRGHVRRVLYMATIVAIRHNETIKSFYQRLKAKGKESKVAIVACMRKLLTIVNLLIKNNEVWKNAESVSAKK

SEQ ID NO: 436953 - protein, 390 aa, unidentified
MIYVGIDVAKDKHDCLIVNSDGIIQSEAFVIQNNRIGFEELLFEISKYSIDLSKVRVGLEATGHYSDNLLGLLISNSLHTTVINPLHTNLYRKSLSLRKTKTDRIDAYSIVTMLRTELLRPYSQSSYHARELKSLTRYRFSLVQDCAKLKTSYSRLCVILFPELEKLVPTLHLVSIYTLLYEFPSIKTISECHLTRLTNTLSKASKGRYGKDKAIQIRNTARVSIGSLSMVKSLELQQTINRIQTLQTLIQQVEAQINPIVDSLNSPLLSIPGISYRMAAIIIAETNNFLNFNCAEQILAYAGMEPSVYQSGQLTSTHSKMVKRGSKYLRYAIFNATKYVCHWEENFAFYLAKKRNEGKAYNVAVSHAAKKLVRVMFHLVKENQVFISQV

SEQ ID NO: 436954 - protein, 412 aa, unidentified
MVTCGIDWAQDHHDVALVDADGRLVARRRIPESVAGFAELTAMLADADDDPEDPIPVAIETPRGLLVAVLRASGRPIYPINPMSVARYRERTSMSGKKSDHGDAVTLANILRTDIDQHRRLPADTELAQSITVLARAHQDATWRRNRAGNELRSLLREYFPGFLHAFADRPGGITAPEARAVLAIAATPAKAARLSKPQITAALRRAGRQRGLTALAATIHQQLRLPQLRQPALVEDAFGIQAVALLATLDAECANVDRLGEATAATFAQHADHRIITSFVGVGDLTGARLLAEIGDDRTRFADARALKAFAGSAPVTKASGRSIRITHRHVKNNRLAAVGFVWAFIAAGCEGPTRAHYLTRRDHGDRHPAALRHLYNRMLGQLYHCLQTGQTYDPIKAYRPPPTHPTRAAA

SEQ ID NO: 436955 - protein, 409 aa, unidentified
MQVVHEVCCGLDVHKKSVTACVLWASGRRRETRAFGTFTRELLELGDWLRACGVTHVAMESTGVYWKPVWNLLEGQFEVLLVNAQHIKAVPGRKTDQKDSEWIADLLQHGLLRASFVPPTPIRELRDLTRYRASLAQEVNRIANRIQKVLEDANIKLASVATDTLGASGRAMLEAIIQGEQDSHRLAEMSRGLLRNKIPELQQALQGRVTPHHRFLLRELLDHLYFVQSKMQRIEQEVAERLGPFQSEVARLCTIPGVDRVTAWGLLAEIGMSMKQFPDAQHLASWAGLCPGSHESAGKRKSGKIRKGSLWLRRCLCQGAWAVSTKKNNYLSALYRRLAARRGSKRATIAVAHKLLVIAYYILRDGTCYSDLGADYFDRLNPEGLRRRLTKRLEGLGFKVTLEPSAQVA

SEQ ID NO: 436956 - protein, 319 aa, unidentified
MTIAVPLAVAAGVDAGQRFLDVALAPSGQTFRMPNLAEGIAEIIARLERSGVRRVVLEAIGPYAEPLVKALSVAGFEVGIVNPRRIKAFREAEGGRAKTDRLDARLIARFALTMPETLRPLPTDTQLELKALSLRRRQLTEMIAMEKTRMKQVRGTLLLDSHRAAIAALSAQCQAIEAELARRIGDDAELRRVLHILKSIPGIGERVATLLITDLPELGQRDRKAIASLAGLAPHVSQSGAAPPRAAIAGGRPCVRAALYMAALVAARHHPKLRDDYNTLRLQGKPGKVALIAIARKLLVTANALVKADTPYQGKTLDT

SEQ ID NO: 436957 - protein, 352 aa, unidentified
MTRITTIGVDLAKKVFQIHGVDAEGKVVVARKLRRKEVLAFFAKLAPCLVGMEACGSAHYWGREIAKLGHTVKLMPPKYVKAYVKRGKTDAGDAAAICEAVTRPSMSFVPVKGIEQQGLSMLHSARTQLIGQRTQLINGVRGHLNEFGIIAARGLLGLAELAAIVRDKSNRRLPATARAALMILVRQIGAVSAEIAELDTALRKDNNASELGPRLETIPSVGPVIASALRARVTDARLFENGRHLSAWIGLVPENDSTGGKIRQNGLSKKGDRYLRSLLVNGAMAVVQQALKRPDKNPWVTKLLGRMTAKQAAIAIANKTARIAWAIMVHGGVYEAGHRAPQYRAEACAAAA

SEQ ID NO: 436958 - protein, 482 aa, unidentified
MKAKQKEPTEKSTGQSSQLNWRQMNRKQRRDLERKIQSADLTLQLVHPDAAGIDIGNESHYVAVPPDRDSQPVQHFGCTTAELRAMADWLKQCRIRTVAMQSTSVYWIAVYDVLEQAGLEVYLVNARETKNLPGRKSDVQESQWLMKLHTYGLLRNSFRPPREIRMMRTYWRQRNDLVRSAARHIQRIQKTLTQMNMQLANVLSDVSGVTGQTIIKAILAGERDPQKLAAFRDPRVKASEKDIARSLEGNWQEDLLFVLKQEQATFEFYRKQMAECDRQLEQYLQKMEDRSQGATLPEKKRKDRLQKKKGNQPQFDLQQQLFRMTGTDLTQIDGIDVMTATTILSEAGWDMIKWNDEHHFVSWLRLAPDNRISGDRIIGKGRLATNNRVTVALKLAASNLRTSQSYLGAQFRRLRARLDTPVAIKAMAAKLARLIYRMLRYGTKYVDHGSRHYELQQRTREIRRLKLKAATLGFPLVQSTAA

SEQ ID NO: 436959 - protein, 375 aa, unidentified
MEGAPMLDTTTFIGLDVHARSIKAVSLDVMTGEVRAATFGYDAGAVAEWVRSVDPRARCVYESGVTGFDLQKRLSGLGVDCVVGAVSKMIKPSADRRRKNDRNDAEFLARMLSVGNVVEVWVPDDECEAARDLTRALEDARDDLSRSKQRLSKFLLRHGLAFDERTPTGRRKGNWTRAHWSWIESIGFAERADNDVLAYYVDAVRRAAEEKARLEGLVEAEARKPRWRKRVDSLRCLKGVDTASAADLVFEAGEFSRFGNARSFAAWVGLTPSEHSSGESDRRGAITKAGNKHLRKTLVEAAWHYLTCSGRPKEPAKGQAPDRGARRHAAKGVRRLVERREALLARGVHGNKANVATARELACWVWAVGLMAEEA

SEQ ID NO: 436960 - protein, 379 aa, unidentified
MDHAITGTPTETVIYGALELSKNSWLLALQLPDRAQPSLYPIGGGDTEGLMAKLMAARDRWAKVSGKAPSIVLCYEAGYDAFWLARFLKARGIECLVVDAASLQVNRRARRAKTDRIDVGMLLRALIKWVQGDRHVWSVVRVPSVDEEDLRRSHRERDRLVLERTAHINRIKGLLFAQGIRGINVKSKYKTLQIDKLITGDGRPLPPRLASEITREIARLALIQEQLTALECERDQAPTSCKATEKKRVQLMSLTGIGPAIAAVMTREVYYRQFDNRRQVAGFLGLATSPHDSGDVERSQGISRAGRGQVRGTIIQAAWLWLKHQPKSAITRWFVQRTAGQSGRIRRIMIVAVARKLAIALWRFLEQGLVPQGAMLASR

SEQ ID NO: 436961 - protein, 310 aa, unidentified
MEDIIVGIDVAKDRLDVAVRPAGEAFVVERNAAGLEALVARLREFSPYLVALEATGGYETIVAAALAGAALPVVVVNPAQVRAFAKALGQRAKTDPIDAAIIAHFAEATRPEPRPLPDEATQLLADLVARRRQIVEMIGAERQREKRVTIAHVRKSIARLIKTLEKELASLDTDIDDAVRGSPAWREKEDLLASVPGVGPTIARTLIAELPELGQLGRKQIAALAGLAPFTRQSGQWHGRSFIGGGRTTVRTALFMGAMVAKRHNPVLKAFFDRLVAAGKPKMVALIAVARKLLTVLNAILRDNRPWQNA

SEQ ID NO: 436962 - protein, 421 aa, unidentified
MSKTLLAGCDVSSQLNTVCLMDPEGKKIGSQTFSNTLSGAQALESWLLTILKENDFSELKIATEATSFLDLHLVDFLASSQLLAPFKPSIYQFNPKLVRNFKRVYSDKEKTDKIDAFVITDRLRFGRLPEPYESHRPYLPLRRLTRYRFHLIQAIAREKAYFLTHLYLKFSAFSLEKPFASLFGATSLAVITEFSPDELAHLPLEELTQFIIDNGKNRFKDPEKVVETLQRAARESYRLRPALASSIDLILATILQTIRALQEALKEVDRAIEKEFKAFPNTLQSIKGIGPVYSAGIFSEIGEIRRFPREDALAKFSGLYWKKYQSGNFEAEETRMSKTGNEYLRYYFIEAANALRVHNAEYQAYYETKFKEVTKHQHKRALALTASPTESDPPLAEKLVRLVYALLKKGQLYRANYQQEA

SEQ ID NO: 436963 - protein, 305 aa, unidentified
MIGIGIDVSGARLDVASTQTQRVRTFGNTGAGIDALLAWLLKQGQLRIVVEATGGYEMAVLQACAAAGLWICRVNPRQARDFVRSTGQLAKTDQLDARGLAQMARAIEQLRPYTPLEDWRAALLPWVQRRTQVVRLLQQQSQQLAMLDHPQVRALAQGSLDALRAERDALDAQLRQRMAPHVTAALTSMKGLGPVLRATLLTQLPELGRLDRGKIAKLVGIAPLNCDSGTMKGQRHIWGGRCSVRTALYMAALSAIRFEPSIRAYFQQLRARGKPGKVALVACMRKMLTVLNARCRDEMRATARA

SEQ ID NO: 436964 - protein, 348 aa, unidentified
MEITTIGLDLAKRVFQVHGVDVAGGVVIRKALRRAQVLPFFAKLPACLVGIEACGTSHHWARELIRLGHEVRLMPPAYVKPYVKRGKTDAADAEAICEAVTRPTMRFVAVKSRERQAALSMHRARNLLVKQRTQLVNMMRGLLAEFGVDIPQGLERALLMARQVIDGAVPDVPAEAVKIIGMLSQQALDTHAQLPEIDRSLIALLRTDDVARRLATIPGIGPVGATALAAAVTDPGQFRSGRQFAAWLGLTPRQNSSGGKERLCRITKMGDKYLRKLLVVGATSLVRRARCKPGSVNPRLVDLLARKPVRVATVAMANKTARIVWATMTRGEVYQAFHTPMLASSAEG

SEQ ID NO: 436965 - protein, 345 aa, unidentified
MEQISRIGLDTSKHIFQLHGVNAAEEPVLRKKLRRKEMFAFFEKLAPTVIAIEACGASHHCARLLQSFGHTVKLIAPQLVKPYVKRGKNDAADAEALCEAMSRPTMRFVPVKTVEQQAALMLVGVRDRLVRNRTQLSNAIRGHAGEFGLIAAKGKAHLEPLLERIQADQSLPSLARELFAALAKEYAQLQAQIDEVDAKLLAWHRADECSQRLTKIPGVGPIGAALLKMKTPEPGLFRSGRQFAAWIGLTPKDHSTAGKVRLGVITRAGDEGLRAALVVGATSVIQHARRGGKLSPWLHELLKRKSPKLAAVALANKIARIAWKLMVTGENYAVKSASAAPARAA

SEQ ID NO: 436966 - protein, 341 aa, unidentified
MEIDILGIDLAKRVFQLHGADRRGQAMHRSKVSRPALMETIRQLRPRTIAMEACSSAHHWARQFQALGIEVQLISPHYVKPFVKTNKNDRNDAEAIVEAACRPSMNFVPVKSVEQQDIQAVHRVRELLVHQRTALINQARGLLAERGIIIAKSPAAFKRSIPDILSEPDGELTTFCQSLLTMLLEQFRVIENQISRAEDWITSFMKNSALCQRLATIPGVGAITATAIVAAVGDAKAFKNGRHLAAWIGLVPRQHSSGGKNRLLGISKRGDGYLRTLLIHGARSVLIRVACKSDARSRWLQELIARRGYNRATVALANKNARIIQAMLSHETNYCPAMVAA

SEQ ID NO: 436967 - protein, 310 aa, unidentified
METITFPQQVKRGCGLDVHKKTVVATIMGEDLRTETREFGTFTSSLTELRDWLLSNGITHVAMESTGVYWKPVYHVLEPTLMTIWIVNARHIKYVPGHKTDKKDSAWICKLLLAGLLKPSYIAPREQRELRDLTRYRKKLIEQIASEKNRIIRILEDCNVKLSSVLSDTSGVVATKLIDRLCSGEEVSMEFIESVYHEKIQASRSDIYEACHGFVEAHHIFMLQTIKKNIAHTEESIVELNTRIKVLLSPYENVLSLLYKVPGLSRKTVEDLIAEIGLDMAAFPNEKHLASWVGLCPGNNESAGKKKADA

SEQ ID NO: 436968 - protein, 338 aa, unidentified
MKVYVGMDLHATNTYVGMVDEENTVLYKQRFRNELPLILAALDPFKEDIQGVVVESTFNWYWLVDGLMDQGYRVHLANVSAIKQYEGLKQIDDKRSAFWLANLLRLGILPTGYIYPKEERPTRDLLRKRLQLVRHRTSHVLSVKNILARNLGVRMKSEDVKKITDAEVKRFFPDREMQTMVLSSVGLIRHLESEIDTIENMILKKLKIRKEFAKLMTVPGIGKILTLTIMLEVGNIRRFPTVGDYSSYCRCVKSIRTSAGKIIGYGNRKNGNKYLSWAYVEAAQFARRFHETVRTYYEKKMAKTNRIVAIKALSHKLTRASYYVMRDQVDYDPALLFR

SEQ ID NO: 436969 - protein, 339 aa, unidentified
MPYGRRRAAADGVDAHIERSRAVLDRQFIAGPGGYAAALAWARQEAGEAGLAWAIEGTRHYGLGLARYLTAAGEHAGEIDASKHAGKRRNGKSDALDAVRAAREMLARPVAAQMRAAGDREALRLLMCDRDNAVASAKTARTLLTSVIVTAPATVREQLRHLSRDRRATVCASLTSPPGADRQTRVLYQTLARLGQRITTLARTAADLQKQISALVEDMTPGLVAAEAGLGALTAAQLLLSYSHHGRIRSEAAFGMLPGTAPVPVSSGRTDRHRLNRLGDRQLNRALQVIAVARMRSHPPTQAYVQRRLTEGKTLREIRRCIKRYSPATSTARSETSPV

SEQ ID NO: 436970 - protein, 353 aa, unidentified
MSNIKYVGMDVHKSITVIVVLDAIGQVESRSQVKTKAENLCDFFRGMSGKVEVVFEEGTHSAWLYKLLKPLVASVTVCDPRHNKLIEDGNKSDDEDAQILAQLLRLGAVKAVYKGDDQQQQLKEICRAYDNLVEDSTRIQNRLKALYRSRGIACQGHALYRADQRSDWLAKLSEEAARFRAESLLEQLESISQLRKQAKQRLMAQARNHADYKILVKLPGFGPVRVAQLIAEVGTPHRFRTKRQFWPYCGYAVVTRSSADYQVVEGKIVKQRKKVSTRGLNRNHNPQLKQVFNGAALTALRHEAIKAYYQRLIDHGTRPELARLSVARKLSSIALTIWQRREEFDAKKAFAQD

SEQ ID NO: 436971 - protein, 322 aa, unidentified
MSVSNQRCAGIDVSKSTLDIAISNIARSFTVPNEDGGFNQILKELKRNETQLILMEATGGLESGVAGYLQSEGFDVVVINPRQARDFARAMGYLAKTDQIDARVLLQMAKVINQHPEREKYIRPLPDAHRQLLAAMVVRRRQLTIMLTAERNRLHPSHPQNHESIRFIISVLKSEMARIEAEISAYISKNFSELSALLSAVKGVGAATVAVLLAEVPELGTLSRREISALIGVAPVNRDSGTMRGRRTVFGGRASVRTALYMSALVGTRHNPVIKEFYTRLVAAGKPKKVALTACIRKLLTILNAMLKNNEAWDPLYHQHAS

SEQ ID NO: 436972 - protein, 403 aa, unidentified
MGATCGIDWASDWHDVHIADEHGALLVAEQFSHDERGISALIELLRSSEVECCAIERPDGLLVGRLLAAGIVVLAIHPNQVKAARDRFRAAAGKNDRFDAFVLCELARTDRHRFPVLAPSSDETLALKALMRTREDLVDARVALANQLRAQLQAFWPGAERIFADIDSPIGLAFLERYPSPVDARSLGEKRLESFIARHAYCGRRTPAELLARLRSAPNAIVGELEQDARRSAVIGLVAALRPIVEQISQLTSQIAGATRTHPDGTIFLAFFRDPKSVVTAAGLLAEIGDNRARYPTNDSLAADAGQAPVTIQSGKRSNATFRWACDKRLRKHMSVLADSTRHWHPWAREVYQRARTRGCTHPHAIRILGRAWSRILWRCWQDHTPYDPAQHKALNQLLAQKG

SEQ ID NO: 436973 - protein, 313 aa, unidentified
MIISLRCVGIDVSKHYLDIFDEAVGVSERIANAPQAITELVARWRCDALVVFEATGVYDLELREALRQAGIRFARINPARARDFARASGQLAKTDPIDARMLAAFARAMRPATEQVTTPARNALARLTKRRDQLVHMRAQEKNRRSEAEDRAMVERIARLIEILDHEIAEIEAAISALIKAEPEIFEDAQLMRSVPGVGPVACMQLIAQMPELGRIGPKEAAALAGLAPFNVDSGAYRGKRKIGGGRKRVRDALYMAALNAVRRAGPFKVFYARLRQAGKPAKLALIAVARKLLTILNAMIRDRTSYRPAPST

SEQ ID NO: 436974 - protein, 325 aa, unidentified
MEHKNNYCGIDVSNETLDLYFKNKDGKQQHLQVANSSSGFRKMLKESGKETHFVMEATGVYHMNLIFFLQRENVVFSVVNALKIKRYIQMHLERNKSDKKDAKRIYEYGVDRAPEIYSMPDASYFECRSLNNSIHDLTKEITKFSNQVHSLKKCPFDTKTVEKSFQKIIRILKAEKQSLESALQVKLIEWEEETLKLVTSIKGIGSKAAAELIIYTQGFKDMNSYKQLISYSGLSPTEYRSGTSIRGRVRICKQGGKQLRHILYMCALNAKKTNAQCRALFDRLVEKGKNKKVAVIAVCNKLLKIVFGVVKNRKMYQDNFVVKSA

SEQ ID NO: 436975 - protein, 301 aa, unidentified
MNETRLRDCVRPSGDTFALARDGEGVAALVERLRAAIPQLIVLEATGGFEQVVAAQLAAARLPLVVVNPRQIRDFARATGRLAKTDRIDAAVIAHFAEAVRPPVRQLPDKQAHVLDELVTRRRQVIEMMTAEGNRARQIDNKRLKKRIERLRSILQAELTAIDADLDEIIRGTPIWRESEEFLKSVPGVGNVVARTLIAELPELGTLDRRKIAALVGVAPFTRDSGTMHGRRSVCGGRAPVRTALCMAALVASRRNPVIAAFYQRLVAAGKCKKLALTACMRKLLVILNAILREHAPWQAA

SEQ ID NO: 436976 - protein, 415 aa, unidentified
MEPIHKRVAGMDVHRMEHVATILLEQEDGTVSNETHKFGGFKRDMRALVDWLRSHRIQLVVMESTGIYWKSVFSHLETAGIPALVVNAFHVKNVPGRKTDVSDSEWLAQLARFGLLRGSFIPPKDLRELRVVSRYRRKLVQSLTGEKNRLHKVLDDAGIKLGGVVSDIDGVCARKMVEGLIAGKTPAELSALGHGKLKSSDELLQASMDGDLSHRHRLVLSTALNHLRYLEQQVAQLDRYLIEAMKPYAWAWRLLQTIPGIDEMSAAMILIEIGVDMQRFGSASRLASWTALCPGNHETAAKRKSGKIRHGNPIVRYLLCEAANAARRTKTVFQAKYTSLVIRRGYKKTVIALAHKLIRTIYFVLTRRKPYHDTTVDYEAAIVTRNAPRWIKALKKYGYWPKAAAANPATATAMV

SEQ ID NO: 436977 - protein, 370 aa, unidentified
MKTLNKYIGLDVHKDTTVIAVAEEGREGEVRLYGTISSDLHALEKALRKIGGEGVRLHVVYEAGPTGYVLYRRLEQLKIACIVVAPSKVPQAPGVRQKTDRRDAEQLARLHRAGDLTAIHVPDAVDESIRDLTRARADAVHDLTRVKQRLKSFLLRQGYRYSGKANWSEAHQRYLRELVLPLPALKAVQEEYLLAITQALQRVERLDDLIAAQVPEWRMYPAVQALMCLRGFQLTAATVLVAELGDVRRFTHPRHVMAFLGLVPHEHTTGTSRKLGGITKAGNAHARWILTEAVQHAFLVPKVSSQLTVRQRGQPTAYRELSWKVQTRLYKRSRHLVGRGLMKAKVTVALVREMAGFIWALLVQVPVPKP

SEQ ID NO: 436978 - protein, 419 aa, unidentified
MDEFAAYLGIDWADTKHDLCLLDARTGAKTRLVIRHTPEALAEYFTSLRARYPGRQIAVALEQSRGPLLFALLQYDFLVLFPVNPSTLARYREAFSPSRAKDDPTDAAYLVELLQQHRDRLKAWRPDDEQTRTLRYLVEHRRRLVGDRTRLSNRLTSLLKCYFPQVLAWFPDIRTELVCDFLLLWPTLAAVQRVKRTTLLNFFRRHHSLRPDTLEKRWLAIKHSVPLTTDSAVLNSSVVLSKALAAQMKCTLQAIKDFDREINKLCAAHPDFPLFQSLPGAGKVYASRLLAVIGSDRERWSTAAELACLSGIAPVIERSGKSTWIRWRYFCPKFMRQSFHEFAAESVRHSFWARAYYEQQIVRGKNHQAATRALAYKWIRIIWRCWQTNTPYNEVHYLESLRKKGSPLLAFAAPIPKSS

SEQ ID NO: 436979 - protein, 414 aa, unidentified
MPNPSNPPTVLATLDIAKHTHWFAVFTADLTPLIPPHSITTDATALQEVIDTLTTLAQTRPIALAMEPTGIYHLPWLHALTAALPSTVTCLLVHTTAVHQARAVLTAGRQRKTDARDCYAIAAAVRDGHGRPWSPPSPQQTHFRTWAAQEAATTAAMAQLAHALQRLTDLLWPGLVARRTAACKPLVSSRPWTRQSIQAILLHYPDPHAWRSLSVAAIQARLKALDVRCGPMRAQQLAAILAAQVVLPPDQTRSLASRLSTLMQQYCLHAAQLAALHAEAETLVTASWAAVLCSIPGMSPVLAARYAAAVGDIHAIRSAKALWSLAGLEPSIYASGTTARIGRSSLAGRVPLRQALIRIGASLGRHCPPVRACLQAARARGKPITVALIHAANKANRILFAMAMSQQPYQALGR

SEQ ID NO: 436980 - protein, 424 aa, unidentified
MNFKMQNKQNQLIERITDQHLVVGVDIAQHVHVARAVNYRGIVIGKPLSFENNEEGFTRLLNWIKELKHMKNLDTTIVGMEPTGHYWINLSKWLVKQNMDVVTVNPHHVKRNKENRDNTQSKSDKKDALVIADMVKNGYYAFVRSTSESFEKLRVLMANRDVIVKRLVRSINQINRWVDVVFPELRQVFKDVSCKGAIATLRLFPTPAEICSLQPQDIVTGWKSCMKRHSGHKKARSLITLAKCSIGTKQALDAYKLHLEQLVEEYDLASSQLERVTQEVTNVLEQIPFVKQILAIKGISEISLAGILGEAGDLSGFAHGNALLRHAGLHLAEASSGKWKGQIVLSKRGRSRLRRYLFLATMSLVMNNPEFKALHSNNVKVKKIKKMKSIMKLCGKLARVLVGIARNGSVYKPEMVFPLEQPAA

SEQ ID NO: 436981 - protein, 357 aa, unidentified
MSSEKYIGLDVHQATISVAVMDSQGKIIMESILETKASTILEFFAGLHGSLFVTFEEGTSAAWLYDLLKPHVTEVLVCNPRKIPLHKQGNKSDKIDARKLAERLRLHDLKPVYHGETGIRMLRELARSYLTIVKDLTRVMSRLKALYRSWAIPCAGRDVYYRRHRNQWLEKIPEPGTRRRAEQLYEQLDLLQRLRQQSRRELLAESRKHTITAKLRQIPSLGPIRSALAVALIQTPNRFRTKRQLWTYSGLGLETRDSGEYQFVKGQPQRRKKQATIRGLYKDYKHDLKGLFKGAATRASVQPGPFQEFYQRSLAKGIKPTMVRLTLARKIAAITLTLWKKGAPATPLGWLYDSETE

SEQ ID NO: 436982 - protein, 347 aa, unidentified
MNFYTRPHKYYCGVDLHSRTMYICVVGQDGAVLLHRSLPCDPGRFLLAIAPFREDLVVAVECVYSWYWLADLCARESITFVLGHALYMKAIHGAKAKSDRIDSGKTAVLLRGGLMPVAYAYPADMRATRDLMRRRLLFVRQRGSLLAHIQITHHQYNVDPPGKRITYRSNREGLGEGFEDPSVRHSIAADIALADHYEVTIGELELAVLRQARIHDPNALALLTSVPGIGKVLALTILYEIHDISRFPSVRDFASYCRLVKCERSSAGKSLGTGGNKIGNAYLKWAFSEAAVLFIAKSEQGRTVLKRLERKYGKPKALSVLAHKLGRAAYYMLARKQAFDPQRFVAA

SEQ ID NO: 436983 - protein, 311 aa, unidentified
MNSEAYIGVDVSKDLLDVKVLPSNKAQQFSNDDPGIKKFITFIKKIGPQLIVFESTGGLEMLAVSSLVEKHLPTVVINPRQIRDFAKATGRLAKTDSIDADTIARFARDIRPEIRPIKDEHTQLLSALNARRRQIVDMLVAEKNRLYSAPKPNIKSIQKHIQYLERTLEDINKDINKTIKKSPTWHENDRILQSFKGVGPVLSATLLCDLPELGTLNRKKIAALVGVAPLNCDSGRFRGKRRIKGGRADVRRKLYMAAVASIRHNPRMKNFYHKLIDAGKPPKLALTACMRKILTILNAMIKNRTYWIATS

SEQ ID NO: 436984 - protein, 394 aa, unidentified
MTAAYTGNVSTPGSVLHLAFELGWTHWKLAFTIGYGQQPRQRTIKARDLAALAQEIAKAKKRFQLADAAGVVSCYEAGRDGFWLHRYLTAQGIANVIVDSASIEVNRRKRRVKSDKLDANKLVTMLLRYHAGEKKVWSVVRTPSVADEDGRQLHRELQELKDDRTRHSNRIKGLLASQGLDLEVVDELLPTWVGAAQLWDGSALGADLQRRLVREYERWQFVHRQVLELSRERRRRILCDMTPHVDMVRRLLGLAGIGVNGAWLLVYEFFAWRKLQNRKQAGALVGLTGTPYQSGGSEREQGISKAGSKRMRKMLVELAWCWLRWQAQTALSQWYARRFGTGKGSARKIGIVALARKLFIALWRYLERDEIPAGAKLVDWRCKLQKQKVKRPAA

SEQ ID NO: 436985 - protein, 378 aa, unidentified
MRLSAGAKPAILTPMQNQSDSNSTEPHATIKLGIDAHAKWYYVARQVDGATPQPVQKMTFDGLLHFIAKQLRLANEVFTCYEAGAFGFHLHRKLVEMGVTNYVVQPQDWDERGKGVKTDRIDALALCQRLDRYTRGNLKAFSIVRVPTEDEERERAFTRQRQQIVRERQRLQAMGRSLLASHGIHVKGKWWKGKTWRAIQAEAPEWVIGRLEVLSRLIAPMEIEEKKMTLAIQAEGIQNQAKIPRGVGPLTFEVLRREVGDWSRFTNRRQVSSYTGLCPREHSSAGKRKTGSVNKSGNPRVRAMLVEMVWRMMRWQPGYHALLKWMHILGDASRSAAIRKKAIVAVARQLAVDLWRLFTGQTTAEKLGLIYLPEADAA

SEQ ID NO: 436986 - protein, 423 aa, unidentified
MTRRCIGLDVHRDFAQVAIREDGLVRQAGRIATTPESLRLFADSLASSDEVALEAGGNRHAIVRLLERRVARVVVSNPQKTRAIAEAKVKTDKVDAEILAQLLAADYLPGVWVADEDTQARRRQVARRAHLVRQRTRLKNQVQAILHRNLVPRCPAADLFGKMGRAWLARQELPADERQAVGALLRQLDFHAEELALIDAALAKIALGCEDTKRLMTIPGVDVAVAMSITAAVGDFSRFSEPNKLVRYLGLNPRVKQSGGQPASHGRITKQGRAHARGMLVEAAWVAVKTPGPLRAFYERIRARRGMQIAVVATARKLAVLCWHMIDRGEDYAFARPSLTAKKLRALELKAGRPARRGQKGSAAAYSLRKVRARETRMAEQGERADAQMVADWQAKAAKKGVAATNGAPLSRPSTGQAARQGS

SEQ ID NO: 436987 - protein, 297 aa, unidentified
MIVVGIDAHKRTHTAIVVNQLGRTLATKTTGTTSKDNLTLLRWATEHDNERIWAVEDCRNMTRRLEQDLLAASERIVRVTPKLMAATRDSARTYGKSDPINALAVARAALREPDLPTAQLDGPERDMRLLTDHREALISERTRAINRLRWRLHELDPQWDPTARSLDRVSAYNTLTARLDQFSTTVARLAEALVEHCLHLTAHINQLEAEITTLAQQCAPTLLTIPGCGPLTAAKILGETADIRRFRSRDTYARHNGTAPLPVWSSNRARHPTQSYRQPSTQRRPTPHRPHPSPLPP

SEQ ID NO: 436988 - protein, 345 aa, unidentified
MPIVGGLDIHRKQITFDYLDTATGEVKRGQITPADRAHVRAWLARFAGRGEVAFAVEGCTGWRYIAEELAAAGLEAHLAEPADTAALRGRKRHAKTDKTDARHLQTLLAEGRLPECWIPPPHILEYRALLETYYDLRAEHTAWVQRIHAVFFHQGAPRLGEGALRTEQGLAGLRAAAAAHLSPAGQLQVATALDMIAAVESRLGPMRHQLRDAARHLVGAKVLAARLYGAGPVTALALTCWLGGAGRFSSSRKAVRFTGLDITVWSSDRKGPPGRLSRQGPPVLRWAVYEAGKTHARASAPGHGYYAQVKDRKNGKRAALSEARKIVRQACHILAELGDDALTAT

SEQ ID NO: 436989 - protein, 341 aa, unidentified
MDKITTIAIDLAKHVFQVAAENARGEEVWQKRLRSRAALHAFIEGLSPPLKVGLEAGLGAQAWARVLAARGLEVHVLPAQRVAEHRSGAKNDCNDARAILRALHDRSIHPVPVKSTVQLTMQALLRVRAGWQRRHTAVANQMRGLLLEHGVAIAQGDAALTRALERVLPDAQVPIPDRLRALLAELAGEWEGLSQRVQAMDPELAELARADPVARRLCTIPGIGPVTATALVCKGLDPVRFRNARQFAAYLGLIPDQHSSGTKLRLGRMSRRGDRYLRGLLVSGAHAVLRHARRDALDAGHRRILHWQQRHGSKAIAVRLANHNLRVVYALLRDHADYHAA

SEQ ID NO: 436990 - protein, 356 aa, unidentified
MNKRSRLNFSGQAIYLGLDVHQKSWSVSIFTKHGEYKTFTQPPEAEVLIQYLQRHFPGARYHSVYEAGYCGFWIHDQLRQRGIENIVANPADVPTRDKERRSKRDRIDCRKLARGLRGGEIEGIYTPPRWRLEDRSLIRTRLSMGRKQARCKNQIKSMLLFYGVAIPEQREMGHWSRRFIQWIEELRMERSSGDLALQLHLEELCHLRQILAKLNRSILALARTEEYRSWISLLKTIPGISTLTAMIVLTELHEITRFRSLDQLCSYVGLIPDTQGSGEKEHVGGITQRHHSSLRWLLIEASWIAVRKDPAMMEAFNDYCKRMRKTKAIIKIARKLLNRIRYVLKNQAQYVTGVIE

SEQ ID NO: 436991 - protein, 416 aa, unidentified
MKRNKTKKLGKVNGNTLIAAIDIGKKANYGYFRAPDGQDVKPFAFYNLRDGFEKFWTKLLEFQKDHNLDGIVVGFESTGPYAEPLLHFLKIKEVTLVQTNPMHTKRLKELTGNSPNKTDEKDPKVIADVISLGHALTLVIPEGPAAQLRRLSQARERAIKSRTSMSNQLQHLLFVIFPELSWRMKSKSVLHLVENYPTPQSIVGMGLDALCAILKKVSKGKLGRERAREIFEAAQKSVGITEGRESILKEIGHLVSNIGNENRFIDGLEKEMKHYLGKVPYSHSILSIKGIGKVSAAGLIGEVGDFRKFSTISEITKLAGLDLYEISSGRKKGQKRISKRGRSYLRKILFFAAINVVRSEGILNAQYREMLGRGMAKIKALIAICRKLLRITFAIVRDNTVYVSDHQHGCQSKLAA

SEQ ID NO: 436992 - protein, 375 aa, unidentified
MSNLSEAFVGLDTSKLRNSVAIAEGGRTGEVRFLGEIDNTPAAVRKLVKKLATKYDRLSFCYEAGPTGYGAYRQITGLGHDCIVAAPSLIPKKPGDRVKTNRRDAVTLAKLHRAGELTAVWVPDCGHEAMREVTRARETAMLDLRRKRQQVSAFLLRQGLHYAAEKKTWTKAHMDWLAGQKLEHAEQRIVFEEMMLAVREAQARLERLADAIRVAVPEWSLAEGVTALMAMRGMDLVAAATFLAEIGDLSRFQGPRELMAYLGLVPSEASTGDTIKRGPITKTGNRRARRMLVECSWSYRHPPRVGRTKQEKVAAAPQAVREIAWKAQCRLHNRYRSLIRRGKLKTVANTAVARELAGFLWAVNRAITKTGAAAG

SEQ ID NO: 436993 - protein, 340 aa, unidentified
MINNFLGIDVSKERFDVSLSFISKKGKRETRKRKFKNDDTGFQGLLNFLQKHNVEEVKACMESTGCYSEALAEFLHNAGYFVSVVNPACIRFYAKSKLTRQKNDQTDAEIIADYCQRQEPSRWTPPSPEKKKLKHLYRCSNVLKDELTLANNHLEKKERLPKEVANAWEDLAMNIEQKIETIKNSIRELLKQHKELLEDFQLLLTIPGIGEETAIAILAEIPGIKAFINARQLAAYAGTIPQNITSGSSVHAKPRLSKTGSRTLRKAMYFPAIAAKKHNPIIMASCERLKEKGKHAMAIVGAAMRKLLHIVFGVLSSKKAFDPDHIKNYRAKRLTEGLVL

SEQ ID NO: 436994 - protein, 344 aa, unidentified
MDKFDVAGVEVSAKILVVALKVNGQLRTPEFANTAAGHQQLIGFLLKHSRRVRVCLESTGLYGLDVALALHAEPEIEVRVANPRSVRHFAQAMMQRSKNDPLDALLLAEYAQRMPFQAWQPPSLPGRQLCALTRSIHQLTEMCTMQKNRLHAAAATATTPKFLIRELQRSLAQLQKSVQRLTQKALQLVRSHAQLRQQLELLDSLPGVGELSALYLLGELVLLSPDFSVREWVAYAGLDPRQYKSGDSVEKKIRISKVGNTHLRRALYMPVLVAARHDPHFRAHYRHLLAKGKLGMVALVALMRKLLHGIFGVLKSLQPYDGSKLFTLPLILDSKPTMKEKIAC

SEQ ID NO: 436995 - protein, 420 aa, unidentified
MELLVECCAGLDVHKDLVVACIRHPGPDGERKTEIASFSAFTADLLALRDWLSAFGVTRVAMEATGVYWKPIFYVLEDAMECWLLNARHMRNVPGRKTDVGDAEWICQLTEHGLVRPSFVAPKEIRDLREFTRYRRTLAEERTREAQRLDKVLQDAGVKLSSVASDVLGVSSRAMLAALVEGTRDPAALADLAKGKLRAKLPALRTALEGRFGPRHALLVSEILSHLDYLDEAIGRMTSAIEEAIAPFAEARDRLCSIPGVDRRIAESIIGEIGVDMGRFPTAAHLASWAGMCPGQHESAGKQKGGTARHGDSWLQRHLAVAAMAAVSSKDTYLRAQYRRLSPRRGKQRARKAVGHFILVACWHVLASDDATYRDLGPDWFDRRNNPAIRARRKLSELRALGCELYPNDDGTTTVVLPAA

SEQ ID NO: 436996 - protein, 391 aa, unidentified
MFLLGIDIAKLNHVASCIDSSTNEVVFSNFKFKNDFKGFSALLNKIKSFDAKNLIIGLESTSHYGENLINFLFIHDFKVALINPLQTSHLRKANIRDAKNDNLDSLNIAKSLVFTKLNFVSKKNIECFSLKKLTRFRSNLIKQRSKAKIQLTSLLDLLFPELQYLFKSKIHSKAIYSLLKKHPSTEEIAALKDDEISNLLYASSKGHFKKEKSIELKSLAKTTVGIKDTSISLHLIQLIELIELYTKQIKDIEIKITDIVNNLDTTLLSVPGISVIACAIILGETNNFENFSSSKKLLAFAGLDPKIRQSGNFNASSCRMSKKGSPYLRYALIFTAWNIVRHSEKFNKYYSLKRSQGKSHYNALGHVAHKLVRILFTLIKKNISYQEEKLE

SEQ ID NO: 436997 - protein, 355 aa, unidentified
MKSRKPEDLGEVTVIGVDIGKDTFHLVGFDQAGQRVLRKKIKRLALKPTFEDLPRCVVGMEACMSAHFVSRMLRELGFEPRIIPAIYVKPFNKGQKNDYNDAEAIAEAAMRPNLRTVTEKSQDQLDLQAIHRVRSRLVARRTATINRIRAFLIEQGITVRAGRHRLQSSFEAILENRCDEISPRMRNTLLGLHGDWLWVDERIKAISSEIEEISRSEENSANVMTIPGIGPLISTAIVAAIGKGEVFDRGRNFAAWLGLVPRQFSTGGRTILGRISKRGNSYLRMLLVQAANVILMRPHRWDAIGLGPWLRGVVSRMPHNKAAVALANKLARIAWSVLRHGKIYTVVGDETLGTI

SEQ ID NO: 436998 - protein, 370 aa, unidentified
MGNRSMFVGLDVHKETIDVSIAEGHRGGEVRHYGVIASDLEPLDKVVRALRAPDRQLHFVYEAGPCGFGIYRHLTTRGEHCVVVSPSMVPKRSGDRVKTDRRDSLTLARLHRAGELRAIDVPDDADEAMRDLVRAREDAVVVGTQAKYRLTAFLLRQGRRYPGREGWTLPYRRWLTDLSFPTAPQHITLQAYRDTIDETERRIARVTEQLRQLAPTWRWAPRVAALQALRGVSFVTAVALVAELGDLTRFGHPRELMAYLGLVPSEYSSGPRVRRGAITKAGNPHARRLLAEAAWAYQGIPRIGRQHAYRQEALPKVVCDIAWKAQLRLTTRFRRLVARGKAKPKVATAIARELTGFIWAIAQEVAPASQ

SEQ ID NO: 436999 - protein, 356 aa, unidentified
MNTPHYIGFDVHKKTISFCVKTAAGEVVEEGVVVAQRPALQQWATARRQPWRGALEATLFSGWIYDTLKPYSAQLEMAHPAKMKAISAGKKKSDSIDARTIADLVRCNLLPACYVAAPRIRELRRLLRYRSLVVSESVRMKNKMAGLLMETGAIYVKEKLHGKKYFATLLEELEEVPESVIDLLRTSRGALEMFESTQRRLVRELLADPELAQRVERLMTIPAVGEITALTWALEIGDPHRFRSGSEAMSYCGLTAALKSSAGKQQRGPISKQRNHWLQSTLIEAAKLAPRWNPHLAALHARELERGHRNRATLAVARKLVTYLLAVDKSGQSFQPRALSPEDGAEKEEAQKIKSA

SEQ ID NO: 437000 - protein, 314 aa, unidentified
MEGCQVYVGVDVSKSQLEVAIRPSGEHFSEANDARAVRRVVQRLTPLGCTRIVIEATGGYEAPLAAALYAAGLPVVVVNPRWARDFARSIGRLAKTDTIDAQVLAQYAALPQLKVRALPDAQTRELKALCARREELIDMLVAEEHRLEHAPPRLRRDINGHIDYLRKRLKHLDHDLDQAVRNSDLFRRQSELLTSVPGVGRVLCVALLARLPELGRLNRAEVAKLVRLAPLNHDSGRLRGARMIAGGRAALRRVLYMAALSAVRANPVLRAYYRHLRDAGKPGKVALVAVMRKLLVFLNAMVKTQTPWRSPCPA

SEQ ID NO: 437001 - protein, 375 aa, unidentified
MRDHSEAFVAFDTSKLRNAVAIADAGRTGEIRFLGEIENTGAATAKLVRKLAAKYQRVTFCYEAGPTGYGLYRLITSLGHECIVVAPSLIPKRPGDRVKTNRRDALSLVKLLRAGELTAVWVPDRHHEAMRDLTRARETTMMDLRSKRQQVSAFLLRQGLHYSEGKKTWTKTHMNWLASQKLEYAEQRLVFEEMMLAVRQAQERLERLEQAIRVAVPDWSLAEVVTALMAMRGMDLISAATFLAEIGDLSRFQHPRELMGYLGLVPSEASTGDTIKRGPITKAGNRRARRMLVECSWSYQHPPRVGQEKQEKVAAAPRAVREIAWKAQCRLHGRYRALVRRGKLKTVAITAVARELAGFIWAVSREITTARAASK

SEQ ID NO: 437002 - protein, 355 aa, unidentified
MSSEKYIGLDVHQATISVAVMDSQGKVVMESILETKASTILEFLAGLRGSLFVTFEEGTWAAWLYDLLKPHVSEVLVCNPGKIPLLKQGNKSDKIDARKLAERLRLHDLKPVYHGETGVRMLRELARSYLTVVKDLSRVMNRLKALYGSWGIPCAGRDVYYTRHRSQWLEKIPEPGTRRRAEQLYQQLDMLQHLRQQARRELLAEGRKHTISAKLRQIPALGPIRSALAVALIQTPHRFRSKRQLWTYSGLGLETRDSGEYHYVRGQVRRRKKQATIRGLNKDYNHDLKSLFKGAAPWASVQPGPFQEFYQRALAKGIKPTMVRLTLARKIAAMTLTLWKKGEDFDIHKLNSQAA

SEQ ID NO: 437003 - protein, 465 aa, unidentified
MGAGKMNRKQRKELGRRLQSANPGLEVVHPRAAGIDVGNGAHYVAVRPEQDAEPVRRFECFTADLHRMADWLEACEVKTVAMQSTGVYWIPLYEILEQRGFEVYLVNARHTKNLPGRKSDVQESQWLLKLHTHGLLNNSFQPTAEIRVVRTYWRQRGEHVRGASTCIQRIQKVLTQMNVQLANVISDLSGLTGQAIVRAILAGERDPRKLAELSHPRIRAGREQIAKSLEGNWRSELLFVLKQEMEMYDTYQHKIAECDRELEATLKQFAAPERASTEQPKIPNAKKTKRIQRNAPGFNLTSELHRITGVDLSRIDGVNAIVAQTIISEVGLDMTRWKTEAHFASWLGLCPDNRISGDKVLARGTRHVINRAATALRMAATTLIKSQSYLGAQYRRLRTKLGAPKAITAMAHRLARLVFRMLKYGQEYVDKGTQYYEQKHREQQLHLLKKKAATLGFQVVETGVT

SEQ ID NO: 437004 - protein, 420 aa, unidentified
MNAVGIDVSKGKSMVAIMRPFGEIVSAPFEIKHTASDINSLVELINSVEGESRIVMEHTGRYYEALAHQLSEANLFVSAINPKLIKDFDNDSLRKVKSDKADAVKIARYALDKWQNLKQYSVMDELRNQLKTMNRQFGFYMKHKTAMKNNLIGILDQTYPGVNTYFDSPARSDGSQKWVDFASTYWHVDCVRKMSQNAFIDHYQNWCKRKKYNFSQSKAEEIYGKAKELVPVLPKDDITKLIIKQAVNQLNSASTTVESLRTLMNETASKLPEYPIVMAMKGVGASLGPQLMAEIGDVSRFTHKGAITAFAGVDPGVNESGSYEQKSVPTSKRGSSDLRKTLFQVMDVLIKTHPQDDPVYQFIDKKRAQGKPYYVYMTAGEQVSKNLLRTSERISFISSRILIIIIIFRPALVWWSYFDT

SEQ ID NO: 437005 - protein, 403 aa, unidentified
MYSSFVGIDIGKWNHQAAFLEVSGKETARSLAFQNTSEGFQSLSESLAPLDKGQTVIGLEATGHYWLALFSFLVDNGWTVKVINPMQSDALRKMNIRKAKTDRKDCVVIADVLRFGRYTETVLPDEDLLQLRELSRCRVAHVELLGDLKRRVLGILDRVFPEFASCFSTVFGSAPTELLQECTDPEELADYDIDKLIKLLEKESRGRHSREKAEELKAKASRSVGTRFGRDALKFELKMLLEQLDFIKGQVKEFDKFLKKLMKNHELIYTIPGISVTLGSAILGEIGDVKRFGTPQQLQAFAGMDPSVTQSGNFQGTQAKMSKRGSPYLRRAVYLAANAARRFDPVFKDFYDRMIARGKHPKQALAAVGTKLLRVIHAVMTSQKPYNPQKLLPPAARISQLNP

SEQ ID NO: 437006 - protein, 345 aa, unidentified
MDQHQQYVGIDLHRRRSVIVRRNDTGETLDATRVDNADTAAFTRAVMAAGEHPVVVLESTYGWYWAADWLAELGCEVHLAHPLGNNWGNRRVKNDVRDAEDLAYLYRLGRLAEAWIAPPAVRELRESVRHRVKLVRLRANLKSQTHAVLAKEGIYVPMTDLFGVAGNELITTCELGPAYRNRVESLRELMDVLEREITQVEDDLYRRLRHDAGYRAIQAISGVGPVLAAVFVAEIGDVTRFSSPNKLASWCGLTPRHRESDTTVHRGSISKQGSRLVRWAAVEAAQKQRRGSRLRDDFARITANHGDTAAARKIARVAVARKIVTLVYYGLRHGVITSLAADEAA

SEQ ID NO: 437007 - protein, 408 aa, unidentified
MADKIAGIDVHKKVLMVVVMDARTPESKPERRRFATMPSELRRLSTWLQERGVEEAVMESTAQYWRSVWLELEPHMCLHLAQAFSNRAPRGRKRDFKDAERLVRRLIAKELILSFVPDGEQRIWRNLTRMKLQLTRDRVRIQSQIECLLEEMRIKLSIVVSDLLGSSGLRILHALANGETDAKSLALLGDDRLKCTEEQLVEALTGRSHPMHGQMLGLQLERLRLLDEQIAKLNSLIAQAMKPHQDAVIRLAEVPGLGIDSAQQVIAEVGVTASTFSSAAEFTSWVGTCPGKEESAEENSSSRSAKGNKYMRRVLNQAAHAAARSKGTHFQAVFRRLLPRLGYQSAVWAIAHRLCRLVWKILHQGIRYIEQGIESEPKLLIYRAKYLAKQLRKFGYNVQITPANRAPA

SEQ ID NO: 437008 - protein, 349 aa, unidentified
MITIGIDPHKRTHTAVAVSGVGELLDELTIPAEDGGHRRLLAWAQGLHAGEARRFALEDCRGVNGRLERFLLKAGEHVLRVPPKLMADARKGGREVGKSDPIDALAVARAALREESKLHPASTDSKARELKILVDHREALVHDRSIYSTKLRWHLHDIDPALEPAVRTLDRPAVRRSITQRLARLEQTAQVRVCRDLLARIGEITRRERELAAEIGDLAERYAPGLFEVPGVARLTAGKLIGEIGGIERFKTDAQLARHAGCAPIPASSGNTQRLRFDRNGNRQLNATFYRIALTQIRIHPEARAYLARKRAEGKTTKEALRCLKRHLVRTVWRAMQPPSSPTTFPALS

SEQ ID NO: 437009 - protein, 401 aa, unidentified
MWTHNNNFKEFSMIYLGIDVSKFKHNCFLADEDDFDKGCHFEIKNSKEGFEYLLRKLSDFNKDKIRIGLESTGHYHLNLSRFLLDLNFNIHFFNPYQTSLYRKADSFRNTKTDKVDAFFIAKLLRATCSNPTHNELYHNYELKSLTRYKSSLKNDRAKLKNTIVGHLDLIFPELDKVCKDVFCKYTLEVLKEYPSVDKIANANLTRLTNLIKKASNGSHSKDKAREIREAARKSIGINSPAVSFRLVQDIKALEFLIEQIDEVNEQIKALLDEMDNPIMSIPGVGIEIGPSLIAEIGNIENFESPSKLLAHAGLDPSINQSGTMNSSYSSMSKRGSSYLRDALFLAAFLICQNDETFRLYYEKKKSEGKHHSVALTNVARKLTRVIFYLLKNNQKFVSQSS

SEQ ID NO: 437010 - protein, 406 aa, unidentified
MQGPVITVDVSKGSCHYQPYVSNGHPMRKPKVLHDTVEGFQSLSDLIDTMKDRYECETIPVIFEATGVYHHCLQKYLDDHQIPYYIISPLMSASYRKTTPNSNKTDDLDCSHIAKAYYGECNLFPYDKLSKSFHNLRELNRYYECELNHLRMRKNTFRKYLDIVYPRLDKCFKGHSSLYDEIPMEVIKQYPHPSLLLKHKEETIVKKIEKKTSHNASFIQNIVHEMYECSMHCYSGADVTDVESMILPELVDDLQSQEERCDEILKQLVSEAQKTPYFTSIVSIVGIGDNLAARIIAELGDMNRFSCRRAITAYAGLNPKIRQSGDMDGIHLAISKKGNKHLRCLMYLAVSCNYRLKKGDVLYEFNQKKRQQSFSPLKPKAATIATAHKLLLIIYALCTNGTVYHS

SEQ ID NO: 437011 - protein, 346 aa, unidentified
MEKLYLGVDLHKRSCWVTVLEADGRLIESSKLGTQKRELEEYFGKVGKPAAVAVEATFNWYYFLNVVEPLGLELHLVHPWKTRAIASARIKHDKLDSRVLAELLRTGFLAEAWIAPRQVREERQLLRHRARSVQWATRAKNGVHGVVNRQGIRPPMESLFGPKGRAFLAELELAPMDRWEVDDHLLRLDVLKGQIGELDREIRRRGRANRVAQALETIPGIGPFIALLLVAEVGDIHRFPTAKHLASYTGLVPSLYASGEHRWGGAITKQGSTLLRWALVQAAHQAARSARFSAYYQRQRERLGAAKAIVALARKLAVISFYRWRAAESSGVHLGWRMVGASTHNV

SEQ ID NO: 437012 - protein, 366 aa, unidentified
MKKSSTVRVNGNMIFKGHKLTIGLDLGDRWSCYCVLDEAGEIILEQKLPTTPEAMKQTFERIPRSLIALETGTHSPWVSRLLRELGHEALVAHAQKVQLISKSKRKDDRHDARTLARLARIDPELLGPVRHRSAKAQIHLTVIRARAELVSARTALVNAARGLAKSYGQRLPKCGTAQVSRELAAELSVELREALEPLLAEVESLNERIKEYEVRMEKIARESYPQVELLKQVKGVGTQIALTYVLTLEDPYRFPKSREVGCFLGLRPGRRDSGESQPQMHISKEGDPYLRTMLVQGAHYILGPFGEDSDLRRWGLKLAARGGKNAKKRAVVAVARKLAVLLHRLWVSGEVYEPLRNSHEALRAVA

SEQ ID NO: 437013 - protein, 318 aa, unidentified
MPEYNYVGVDIAKDKFDVSLAIGGRRKNSTFNNTPEGHQKMMDALKKSQTDAWVCMEATGIYGEALADALSVHKIKVSVVNPTQIKYFTKALLQRNKNDEVDAEAIARYVEQAQPKVYTPKTKAQKNMRELVQILDCLTCQLTQWKNKHHASRTAMARKEMEKEIARLEKRLRQIAKRIQNLVAKDPLLKNNFDLLTSIKGVGEKLAFAWLAHIPDVTCFATAKQLAAYIGVSPQQCQSGLFRGQTKISKIGNSHMRKALYMPALSAKRTNEHLKPFIHRLEATGHTNKQIVCAIMRKLVHVIFGILKSGKPFNPDLC

SEQ ID NO: 437014 - protein, 337 aa, unidentified
MCKLTVFVGIDYHQDVVQVCIMDRQGKVLANRSVGNSVEEVAAVVAPHGSEVHAAIEACGGAAAMADALVTQLGWVVDLAHPGYVARIKQSPDKTDFSDARLLADLVRVGYLPRVWLAPFALRELRHVVRYRQQLVAQARSNKLRVRGLLRENRAKLCDVTPWTKKWILWLRTTKDVGPESRWVLDQLLGQIERLQSDIVTAEKRLEQLTADDPVVAALLNQKGVGVITAVTLRAEIGRFDRFRTGKQLSRFCGLSPRNASSGNRQADAGLIKAGNPQLRTVLIELAHRLKRWDPRWAKLAFTMRMRDKKGSVIAAAVANRWVRWLFHQMQAINQAA

SEQ ID NO: 437015 - protein, 419 aa, unidentified
MSFKILKNNCCGLDVHKTWIYACIGITDSNGRTEYKQARFSSFTKGLQELCDWLVKYNCNDVCMESTGKYWIPVFNILEKNNLWVTLSHPKYTKPQKGNKTDRKDAKWICDLYMCGMVKPSFIPPADIRQLRDLVRYRFKLTCMITGEKNRAQNCLTVSNFKLDDVFSDVFGKSSRSITEQILQHPGETFDVAPFVDGRCKTPIEEIQAAVDGAISMEQAVKLRQCLNHIDELEKHQAEIEREIFRLSDKYESILNLIRTVPGFDKNPLTAIQVLSEIGGDMSVFPTAKNLISWAGCCPRNDQSNHKIKSTRISRAGSYFKPVLVQVANALIKSKKHPEFTTRYRRIKARRGHKKAIIAICRMILTAIWHILTDLKPYTPEGFLESRPVNASKVLTTSQALNLLKQRGYVIKDDTVSVT

SEQ ID NO: 437016 - protein, 341 aa, unidentified
MDYYAGIDVSLEASSICVVDGSGKIVKEAKILSEPEDLIAWFKGLPFELERIGLEAGPLSQWLYAGLKEAGLAVELLETRHVRDAFKTMPVKTDRNDARGIAQLMRLGWFRPVHCKSMPAQETRAFLTARKLVQSKLLDVQMSLRGILRGFGLKVGRTTKAGFARRIRELTEHHPALKTIAKALLAVHAVLLKELDGFEKQVRKLARGDNRVRLLMTAPGVGPIVGLTYVGAIDDPARFSSSKSVGAHFGMTPRKYQSGETDVSGRISKMGDKGARAALYEAAHVILTTPVKGGALKSWAAKLAKRVGLQKAKVALARKLAVILHRMLADGSAFEAARAAA

SEQ ID NO: 437017 - protein, 351 aa, unidentified
MKTKDTTRSKLFIGIDVHKRSWKIRTATDLFDGSSLTIPPDAFSLKKYVDRHFKGYTVYCCYESGCCGFSHYRHFISFGWHAKVVNPADVHRPAKAQFQKTDKIDARMLCKELKDGRLKGIHVPSIEREQLRCLFRRRNELVKEHRKIKTQIKMQLLYLGIEIPKPFDNSHWSHNFRDWLRNLTFEYPTMDYCFETRLITYEYIDKQKRDVSTKLRAYCRKHYKKDYYLLRSVPGVGGIVACGLLCELGDLRRFKNFKQLASYVGLVPWVHQSGDNLKTSGLTPRANRLMRSYLVEATWQALRFDPVMQAYYRSHSGKDVKRILVKVARKLLSRIHAVIRTEIPYEVGVVS

SEQ ID NO: 437018 - protein, 318 aa, unidentified
MAIQVVTRDYGVDVSKGSLQMAADQGPESIPNEPKSIRRWLKSVPAGSCFAVEATGTYHVVFVQQAHQLGHTVYLIDGFRLNRYRDSIGGRAKNDVLDAVLLRRYLQREKADLRPWEPAPKGYTELMRLLHRRERLVTARVALEQSLGDMPESRSTIQALLRQLRRLADRLERRIVATVRTRGWGEDMRRCQQIEGIGPLTSAALATVFQRGQFRNADAFIAFLGLDVRVRDSGKQHGKRKLTKKGDSELRRLLYNAAMSASSTPQWHPYYERHLARGLTKIQALVALGRKLARVAFALMQNQSDYQPKTPQEACIAA

SEQ ID NO: 437019 - protein, 314 aa, unidentified
MSTQTLAGIDAGKYHLDVALEPGGISFRVPHTEAGISSLIARLQDHAPVQVLLEAGGPAVAQLAGLLAAEGLPVVVVNPRQVRDFARATGQLAKTDRLDAKALCAFAAAVRPEPRPLKDETAQLLSALVARRRQLLQMLVAEKNRLGTAPPGPVRRNLKDHIRWLERCLEGTDRDLRAQIQDSPVWRARENLLAGVPGIGRITAQALISDLPELGQLGPRQIAALAGLAPFNRDSGTLRGTRHIWGGRAPVRTALYMATLAAIRSNPPIRDCYQRLRTAGKPPKVAITACMRKLLVILNAIVRDNTPWREVANA

SEQ ID NO: 437020 - protein, 368 aa, unidentified
MITRFHGIDRHKKYSTVSVLDRDGRETRFLRSCQMEAYLDELGPEDAVVMEASCGSFYWADRVEATGATCYILDPMRFRIITDSWNKTDRQDARNMAKALWVFLVTGEFGIPTVYKPSETIRTLRRLFASYNLLNRQIRMLKNTIQAVLTEDGVTVSSNDRSRLFKGKESVAEILADRRLSEVIVDALQIQVDLLRTITESKEQLGRRIVEASAPLDEQIRLLITIPGITPLTASAFLADVGDVHRFPSLRRMNAYLGLVPRCHDSGGKSRPGHITRESRKLSRTILTQSIYQTIKGTPGWERYYEDLKARRGSGRARIAMIRRLCGVMRRMLLQGERFHWLKEELYRRKLVEYQKTLEEHKKERDAA

SEQ ID NO: 437021 - protein, 318 aa, unidentified
MLNESFVGIDVSKDWLDVGWEPAGQSERLAHDEVAMVGLCERLARERPCLVVLEATGGLETHLASALAAAGLPVAVVNPRQVRDYARACGRLAKTDRIDALVLAAFARAIRPQVRAPRDDETLELGALLARRRQLIDMRVQEKLRLERASPVQRDSIKEHIAWLTERIARLDTDLTHRLRSSSLWRDKEDLLKAIPGVGTITRVTLIALLPELGKLNRREIAALVGLAPFNRDSGQHRGERVIWGGRAQVRRVLYMASVAAIRSNPVIRAFYQRLRAQGKPGKVALVACMRKLLTIMNAMLKRNTPWNPNALDLEHSC

SEQ ID NO: 437022 - protein, 401 aa, unidentified
MKYGVGIDVSKGKSTVAVMSIEGEIIEEPFEITHDIKGLNILEDKLKKIPKEDLKIVMEETGTYHLPVLGYLLDKEYFVTAENALKIKKYLDQGLRKAKTDKKDAYKLSEYACVNWYKLKMSRENDEIYNNLKFLSRQYLSTISIQVQQKNYFSSICDLLFPGYYQLLDDSNFVLGLKTFKKYFHPDIVKNQNEKSFIEEIDKMAKKLGHKSAGIKLASQIYSLAQRTIAPRPNNKYSQLSTISCIDSLISTINAANTIITEMNKLARELPEYDIVYSLPGCGNKLTSRLIAEIGDIRKFKNAGSIIAYAGLDAPPYQSGKFESTNRHISKRGNKYLRKTGYEIMKAVKSHTKNENVVKSYIIKKESEGKLKKVAKIAGLNKFLRIYYGCVKKRYKELNIW

SEQ ID NO: 437023 - protein, 354 aa, unidentified
MFYIGIDIAKHNHEVSIIDDNGKALGKSFSISNSQKGVDKFNTYLDSFNITSENCVIGMESTGHYWINLFSFLVNLKFNVFVINPIQSDAFRKMYIRKTKNDSKDSYIIAQIMRFGEYSSSNISDENIFALRQLSRYRTSLVDECSSWKRKIISILDQVFPEYSNLFSDTFGVTSKELLSKYPLPENMLELSTEELTNLLNKASKGRLGNEKAQEIKESAKNSFGVSFAKQTFSFQIKQIINQISFIESQLKELDNEISNMLKELNSEITTITGIGDVLGACILSEIGDISRFEKASQLVAFAGLDVAVKQSGEFLGTEMKITKRGSPYLRRAIWLAATVASFKDPALSVYYNS

SEQ ID NO: 437024 - protein, 320 aa, unidentified
MICGVDVSSSDLHARIGREGAECSFANNREGIAELAEFCRQQRVQLVAMEATGGYEKQAFMQLWARGFPVAILNPRAVRRFAEGMGLLEKTDRIDTGVIAWFAEVKGSRPCTPASAEQEHLKALVTRLRQLTELQTSQRNQRLLVQDATVLASFTQILALLAAQIRTLETTIAEMIAADPLWQQLDQAFRAIKGVADRTVSRLMAEMPELGTLSNKAAAKLAGLAPLARDSGSVKGKRPIRGGRAGVRAILFVVASVVRRHEPDFAAFDQRLRAAGKPKKVILVALAHKLLVRLNAKARQVRSGLATVPERAPNLGVAVS

SEQ ID NO: 437025 - protein, 387 aa, unidentified
MAQVNDLSRSLTAFDPISTLVVIVEMSKAKWLVSGAVPGVERQPLKKLEPDATALLRLIERWRNEAVRAGRPISRIALAYEAGRDGFWLARWLIARGIEAHVIHSASVAVSRERKRAKTDRLDAAMLMRVFLGWLRGERGHCGMVAIPTMEEEDARRPSRERECLVNERSRLTNRMKSALTRLGVRGFKPHLRKAPERLAGLRTAEGTGLPANIIEELRRDMARLALLREQINAIEKARAARLERAPDTGPHAMVRLLARVIGIGIETADMLVREILSRRLRDRRAVARYAGLTGSPDESGLKRREKGLAKAGNARVRRGLIQLAWRFLVFQKDSALARWYRTRTEGPSGARKTTMIVALARKLLIALWRLVTTGEVPDGVALRPAP

SEQ ID NO: 437026 - protein, 388 aa, unidentified
MRRSNQDRIVGLDVHPDSFAGAILQGMNPWKARVVSTSTRVALPLLEKWALHHTREEDILVMEASGNAFCVAERLRALKRKVVILESHRAGKVGKTYCATDRVDAIKIARIYLSALSPVVWQPDAKTRERREVFSAYQAVVKEGMRLKQQIKSMLNEHCVRLEKGFRLSHPSAIARLLQRRKWTPAQKMLLSQLHAGLVGARVRRQHLRHYMAQEILGEKELLRLTRLCGINLITLYGLIAAIGDIQRFANARKLSTYFGLNPTVEQSGNYEGSGALKRHGRGAIRALLVQSAKKLLQVNNPLQKWGLAIAARRGRNKAAVAVARKLCVAVWHVMQGHVIGAIERMDTLHTKLRKLATELGVPTIKQLGFETKEAFVQKKLYVLRSYP

SEQ ID NO: 437027 - protein, 411 aa, unidentified
MPKLHVGIDVSLKAHHIQFMDEAGQDLASFQVSNDPHGADTLIHKVLETTQTKHMDRVVVGMEATANLGWHLAHYLKQQLEDHAPHLDAQIHVLNARRVARFKKAYDHLPKNDRIDAWVIADHLRFGRLPQAMTDTIRYEALQRLTRTRFHVMQTMSRDKTFFLNQLFLKFSGLRQDNPFSDTFGATSLAVIQELEPEQIAAMPLEDLVALLVDKSRNKFDDPKQIAQELQKVARRSFRLDKVMQDPVNLSLSVTLNLIQHMDAEVKKLDRAIARLMKAIPNTLESVKGIGPVYAAGIIAEVGDIRRFKNHNALAKYAGLVWNQYQSGEYEADETSRMRTGNKYLRYYLIQAADQVRRHDSEYAEFYRKKHDEALKHQHKRALVLTARKLVRLVFTLLSTNQLYTPPERRR

SEQ ID NO: 437028 - protein, 469 aa, unidentified
MSKSKEQKHKNRKHRKVGTSHLEQLHINAAGIDIGAEFHYVAVPPGRDPEGRDVRHFSTFTVELHRLADWLRRCNIDTVSMESTGIYWIPVFEILDSQGFDVRLVNPRNVKNAPGRKTDVLDCQWIQQLHTYGLLQGAFRPANHICELRAYLRQRAMLLSYASHHIQHIQKALEQMNIKLNEVISDITGVTGMKIIRAVISGERNPVKLASMRDAHCKNSETIIAKALEGNWRSEHVFALRQAVELYDFYKQQIIACETEIQRHLESFEDRSDGSSLEKPRRKSRGSSNQFHFDVRSYLYRMTGVDVTRIEGIEASTALNIIGEIGIDMSPWPTVKHFTSWLGLCPGSKITGGKIFSSKTKPSANRAAHAFRLAAYSLQRSKSAIDAFLRRKKAQKGAPKAITATAHKIARIFYNMLKYGTEYVDLGQEYYEQRYQDRVIANLKRKAKQFGFELVTIEENKLLTGLPAS

SEQ ID NO: 437029 - protein, 352 aa, unidentified
MPMLAEVVDAVVGADTHRDTHEIEIAHPTGAPITTTSIDNDSSGYAELLAWIVDHAPGPRVVVAIEGTRSYGAGLARALTEAGLTVIECEQPSRTARRGRGKSDAIDAHLAVLSALQLDADRLPTPRADGDREALRVLLTARDELTTTGTAQTNRLKALLLVGDDTDRELARGKLTENDLATIVRRKQRRDATREQAVRHGELRRLAVALREGRRELKENRAQLQTIVDDLAPGLTDRRGVGPVCAAQVIVSFSHPGRCRDDAAFAALGGISPLEASSGQTTRHRLNRGGDRALNKAIHTIANTRMRDCPDTRAYVERRTAEGKNKKEIRRCLKRYIARWLHRFLTTAMAAA

SEQ ID NO: 437030 - protein, 416 aa, unidentified
MDMEREVVCGADIHKQFLLATVLSNDGKKFQDRFDANFEGLLNFRQWLLDLGCQKLAVESTASYWLPIYLVVGKDVEFILANAYQIKHVPGRKTDVLDSEWIAELCLKDLIAPSRIFSEDERDLRSMTRTRESYVKMRTQNKNRIHQELESACIKLSSVLSDIFGKSGIHIIRGILKGSSIEDILDSIPSKKLKAKRKEIQDAIRMNMSPAQVDLISLLLDSVDILNREIESIDKQIQDLISKRQDDLKIAMSIPGMGFTTASAILAEIGDFKDFRTGDKLAAYCGLVPSVYQSAGKLITGHITKHGSPHVRRMLIEVAHAISRTKADSNLKRFYFRIKGRHGAKVAIVALARKVICILHHLIVNREMFEDEGMNKSKRNKPGRSFSSPEPTITDAIQILVRAGYAIQKRSEREGG

SEQ ID NO: 437031 - protein, 364 aa, unidentified
MAVSGLSPKELTKEAPNIMLHVGLDLSRRRLDFDLSCEDGSRIERGAAPPDADGLRGLVRRVDVYQEPVCAAIESMNGARFVHDRLEELGWQVELADAQKVKGLAPLACKTDRIDAWVLAELSRRDLVPAIWLPSPTVRQERERARWRLHLVRHRTALKNRVHATLIAFGKPCPVSDLFGSRGRQLLARLDLPDPWAQTVSASLSLIEDLDVQITDCERELRVLGADHEYVPLLMSAPGIAWVLGYTIAAEIGDINRFASPTKLCGYTGLCPRVNQSGEHDHRGSITKNGPKYLRWALIEAAVHAVCSPVYRERYQRTATRLGRQRGKKVARVDIARKLAEAIWYMLTRSQSFAPAGATTPLAA

SEQ ID NO: 437032 - protein, 320 aa, unidentified
MEKVLFDQVVKVGCGIDVHKDIIVATIRKSEKVYETKEFTSFTSSLTELREWCKSECVTYIAMESTGVYWKPVFNILESGDFEIILVNARHVRNVPGHKTDKQDSQWLSKLLVSGLLKASFIPPVEIRDLRDLVRYKKKVVAQASSEKNRIIKILEDANIKLSSVLTSVDGAVGTKIIEDLIAGKTDINELMKHYHGKIKASKTEFRLALEGRLTRHHQFMLQVIQESIAGKEKLIEKIEGQIDEMAKQYSVEIELLQTIPGVAYESAVSIISETGADMSQFSSEEHLSSWAGMSPGNNESGGKKKAQPPSMGTNTYKQS

SEQ ID NO: 437033 - protein, 362 aa, unidentified
MRGNRNVNQKRMAEPTSESTIGLDLGDRWSRYCVIDSRGVVVQEDRVRSSPEALEERFRVILPSKIVIEAGAHSPWVSRLLERLEHRVIVANPRKVRLIYQSDRKNDRLDAQMLAKLGRVDVSLLAPVQHRSLEAQNDLTAIRGRDALVSARVQLINAVRGLVKSMGGRLPASTTAVFAAKMASLIPLPLKPTLAPLLKSIQHLSEQIRRCDRQVEELARKKYPQTKLLQQVKGVGPLISLAYVLTLENPARFQKSRMVGSYLGLQPKQSQSGDSSPQLGITKSGNGFLRRMLVQAAQYILGPLASDCRLRRWGLELCCRGGKNSKKRAVIAVARKLAVLLHKLWVTGEAYEPLYGIESATA

SEQ ID NO: 437034 - protein, 339 aa, unidentified
MDQISIVGIDLAKSVMQVHGVDAAGAVVVQRRLRRGQVMGFFARLPRCVIGLEACATAHYWGRELKALGHEVRLIPPAYVKAYVRRNKNDAADAAAICEAVSRPSMRFVVLKTAAQQAAGGLYKVRELLVKQRTMTINTLRGLMAEFGIVVPQGPHHVGQLKAKLADGAGLDIPAPLPAGLLALATNLESLEQQLAAVEKEIIAWGRASKTCRHLITAPGFGPILASAMAAMVADPRQFRSGRDFAASLGLVPRQEGTGGKVRLGPISKRGNGYLRRLLVNGAMAVMISQRGRRDPWLMKLVARKRPKVVAVALANKMARIAWALMMRQEDFRAAPAQP

SEQ ID NO: 437035 - protein, 495 aa, unidentified
MIRFTKHISTFLSDNLLAWLAFGQTDLPEITQRRRYFRNVERFFGLDIHRDYMVATAVDHELQVVYGPVRLTWDRFPAWIAQHLTQLDAIVVEMTTNTWKVHDLLVEHVHSVTVVHPPHVKVITQAPVMNDKKAAEALAILHAAGLLRSVWVPDQTVRDRRQLVAQRWDRVRAATQAKNRLHAILFRHQLDKPEASLPFSANQRDFWKSLPVSQVEKLAIELDLATIDLAESQRERLEGLMTQEALTDERAPFLVQLPGLSTLGALTILAAIGPIERFPSAKDLVGYAGLGGRVHNSGQTHSTGKITKRGRRDLRHTLVNAAQVAVRTDGFWKREFERLEPRLGRSKAIVAIARKLLVVVWHVLTKREADRHADPAKVARGFLNVVYKDIGARHLPDGQTAPEFVRRCLDRIGLGKDLQRVRRGKHEYLLPQSSLPDAPPAAQPIGRGRRQNTKAAQAKRLADAARKREALAARRTQPRQPRSDKGVKRGPRTKK

SEQ ID NO: 437036 - protein, 313 aa, unidentified
MNENPCYVGIDVSKESLEVALRPSGKQQTFQNDDKGVARLVQLLGTEAPALIVMEATGKYELRVARALAEEGLLFNIINPRQSRAFAKATGILAKTDRIDALMLARFAEVLQPEARSLKTEETEALGELVTRRRQVVEMITAEKNRQGTASKRVRRDIQAHIRWLEKRLKDLNDEIDDLIRKSPLWREKDKLLQSVSGVGPVLVSTLLGALPELGTLNRKQIAALVGVAPFNRESGRHRGKRTILGGRGPVRSVLYMGTLAAIRANAVIRAFYQRLVQAGKPRKVAITACMRKLLVILNTMLKNGTCWKYQPA

SEQ ID NO: 437037 - protein, 297 aa, unidentified
MSPSRTRFIGMDVHKDTMAVAYVAQEHGAEVTSLGTIGTRQCDIDQLIRKRQSKATHLIFIYEAGPCGSWLYRYLRKKDDDCWVVAPSLIPTKAGDRVKTDCRDAMQLARLARSGDLTAVYVPQVQAEAMRDLTRAREDALSDCKDATFRLKAFLLRHDIRYTGRANWGPAHLRWLSEVVCPTPTQQIVFQEDVRAVQEHTERLQRLEHELHEHVQAWRLSPVVEALQALRGVQCTVAVTVVAEMGDLTRFDTPRELMQFLGLGPAEYSSGEQRRQGTMTKAGNTHARRVLVEGAWA

SEQ ID NO: 437038 - protein, 308 aa, unidentified
MDIYVGIDVSKDRLDVHVLPGGEAFAVARNGEGLAALNDRLRPLAAQAIAVEATGGFETVVAASLAGAGLPVVVVNPAQVRAFALALGKRAKSDPLDAAMIARFAEATRPPLRPLPDAESQALAELVTRRRQIIQMMVAERQRATRLPKRLKKSCERVVRMLENELNTLDQDIGDTVRGSPAWRDKEDLLASVPGIGPTIARTLLAELPELGTLGRRQIAALAGLAPWTRQSGQWRGKSCIGGGRAAVRTALFIGAMVAARHNPDLRLFHQRLIAAGKPKKLALIAVARKLLTILNAILRDNKPWQLA

SEQ ID NO: 437039 - protein, 412 aa, unidentified
MKEKVEFEQVIERGCGLDVHKETVTATIKGEGIKQETRKFSTYTRSLISLRDWLLKNGITHVAMESTGVYWKPVFNILGEHFQIILVNARHVKNVPGRKTDQLDSQWLAKLLMAGLLKASFIPIKKIRELKDLVRYKTKLTRQVSSEKNRFVKILEDANIKLSSVLTDIFCVTGMKMIREIIECDYDPDKLLYHVHGSVKKSRSEIKEAITGYVTDHHRFMMQTILESIEKTEDIIAKIDSQIAEQTKEYGLEIELLETIPGVGHDGAIGIISEIGADMSVFPDEKHIAKWAGMCPGNNETAGKKKSSRASYGNAYIRALLVQLAWSASRTKKTYLSSKYKSLVRRMGKKKAIVAVGHKILIASYFIIKDKVAYNELGEEYLSNFRKDKLVAYYKKILQELEPNLEFETKVA

SEQ ID NO: 437040 - protein, 483 aa, unidentified
MRLRITNNPTPTVDVFSFSFEFAGALEIVNEYSGFAATSARYIAFAELKQCKSHLITLSLWEVFMSSLTQEFTAFIGIDWADTKHDICLQPANSQQREFDQLPHQIPAIEQWAYSLQKRFGGTIAVVLELSKGPIVYALQKYDFFVLFPVNPSTLAKYREAFKPSRAKDDPTDAELALDLLLCHGDRFKPIKPQSVEMRTLTYLVEQRRQLVGDKTRFVNRLCDTLKQYFPQTLDWFEHRDTVLFCDFMTRWPTLTQVKRARKASLETFFKTHNVRFDTVIATRISGIKAATPLTLDVAVLTAHQLQAMAQVNQLRITLQAIDQFDDAIAKLAPTLPDYALFNALPGAGPHLAPRLLVAFGEQRERFTSAAQLQQYSGVAPVTERSGKKCWVHWRWQCPTFLRQTMVEWAAQTINKSFWAGAYYRQQRDKGCSHQTAVRALAFKWIRILYRCWQNRTPYDESKYLNALKRRDSPLLKQVATTS

SEQ ID NO: 437041 - protein, 326 aa, unidentified
MLYVGIDIAKNKHDVTALNVPGKTVLKPLTFSNNKAGFELLDLSLRQLNQDCLIALEDTGHYAFNLLNFLHEQGYKVYTYTPLLIKEFAKSLSLRKTKTNKKDAHGIALKLLSDPNREQFQHDNRQVELKILARHIHRLKKKQSDWKVQYTRCLDIIFPELDKIVEKHSEYTYQLLTCYPNPQKRLEAGFDKLIEIKRLTASKIQDILSVAPRSIGTTSPAREFEIIKHYKRLIDKAETCVNDLMAEFNSVITTVTGIGNRLEAVILAEIRNIHAFDNPAQLQAFAGLDSSIYQSGQIDLAGRMIKRGSPHLRWALIQAAKACPRS

SEQ ID NO: 437042 - protein, 419 aa, unidentified
MLAECLEAGGGRRASRVEEVPARAREILELAGRLTADGVELVVMESTSDYWRIWHYLLESCGLRVWLVSASQARQLAGRPKTGRLDAQWIARPAEMGLLRPSFVPPPQIRALRDLARTRLQLVRDRTREWQRMEKLLEGALVKLSSALSSPARTKTARIILEAIAGGERDPKALAALAAGNVKGGRAAIERSLEGMMIGARHPALIRVHPDHITLLDRSAAAVEDGIEAALAAIPAAWGVTADGVPSPDPGPAAAAPAAADRLAEIPGVTPQPAAMIIAETGLDMTVFPTAGRLVSRAGLAPVSRQSGPRTGKPKKGQGDAYLRGYCTQAANGAAGTQTFLGERLRRLTRRIGANKARCAVARSILVIIWHLLANPEARYADLGPDWHARKTDKDKKILAHLRQLRALGVDVTITPAAP

SEQ ID NO: 437043 - protein, 433 aa, unidentified
MIAAILERCAGIDVGKSVVAVCLMTGEAAAEPRVEYGTYGTFTADLERMKEWLLVAGCTHVLMESTGSYWKPIFNVLEDRLKVYVANAEDVKGRKGHKTDKQDSWWLAHLFRHGMVRTSFIPPRAIRDLRDLTRRRRKVLGMATSEKNRIAKVLEDANVKLGSVLSNLFGVSGQLMLEALLEGQATPEEMAQFAQRRAREKIPQIAASLEGHRMSEHHRLLIRMSLEVLRCLESQVMFLDEEILRRIERHGYVRQLELIESVPGIQREAGVVVLAETGGDMSVFPTEQHLSSWAGVCPGNKRSAGKDFRGRTTRGNRWLRSTLTQCAWAVAHSKEGALREKFWKVAAGGAKKKAVLATAHAQLRLVYRVLATGQPHSQLPGAPRDEARRLRMIRHHVRCLGRLGISAGPLLAQVSRAYKTETRLEVSPRRRKQ

SEQ ID NO: 437044 - protein, 348 aa, unidentified
MAMTIVEAARAVTGGIDTHGEVHVAAALDEVGGLLGTESFNATPDGYSALLSWLAGFGAVGKVGVEGTGSYGAGLARFLARAGVEVIEVDRHNRQNRRRQGKSDPIDAVEAARAVLSGSVRGKAKSRNGAVEAIRVLVVAKRSARQARVKALTQMRQLTFTAPDQLQCRIKGLPTPQFIAAAKGLRPTRSADPVTAATKASLASLAHRIGELDEEIAELDARITPLLEAHAPELLNVYGVGIDTAATLLVTAGDNPERLRSEAAWAHLCGVSPLQASSGKVARHRLNRGGDRQANRALWIIVISRLASDPETQAYMERRVKEGRSKREVIRMLKRYVAREVYRQLPRG

SEQ ID NO: 437045 - protein, 367 aa, unidentified
MQDYIRNQSEFRISDCDLFVGLDVDKASISVSVHDGENLLKSLTVPYNPQNLLSFIDKHYPEKRVAFAYEAGPTGFGLYDAIVGASHPCLVISPGNIPAAPNNRVKTNRLDSIKLANLLSGNQLKGIRVPSEPIRHLRSLVHLRYTYMQDIRAYKCRIKAELLKEGLEFPRACKGSQWTKAVMLALRNLDCSPIIGYKISSMLDQIEFLMGQMNLAEVALKGLVNGDADLKACIGYLMSCPGIGWRIACYVLARFGDWRCLEISKQAGAFFGLVPTENSTGDKTDRGSITKCGDPRLRSMLIQGAWAAIRKDSELKSFYDRICASHSKKVAARVAIVAVARKLAERMHCVLKQQRPYELRVAAKVAA

SEQ ID NO: 437046 - protein, 344 aa, unidentified
MNEVITIGVDLAKNVFQVHGVDTDGAVIVCRQLRRAQMLPFFKKQPPCLVGMEACATAHHWARELIELGHQVKLMPPHYVKPYVKRNKNDAADAAAICEAVTRPTMRFVSVKSMEQQSVLMLHRTRELLVRQRTMLINAIRAHMAEFGIVAPGGVPQVKKLLSIIADKNDTRLPLIARTCLESLARQYLSLHEEIHAAEKHIHAWHRSNEASRRLETIPGIGPIIASALTASITDPEVFKNGRELAAWIGLVPRQNSTGGKQRLGKISKQGDQYLRWLLVAGAMSVIMHAKRRGSTNLPWLADIIARKPAKVAAVALANKNARIVWALLRQGGTYQKPGTVPAV

SEQ ID NO: 437047 - protein, 316 aa, unidentified
MNKKTQVEINVGIDTSQSQLDIYVRPTGDYFSVENTPEGAKQAARKIRKYQPTRVLIEATGRLELNFVCAAHNAGLPVVVCNAGQVRQFARSTGRLAKTDKLDAQDIARFGEALQPVLTVLKPDKLRDISDLITVRRQCLDMSTMQKNRLLRMPKSVQRPIQRILKAIQKEIVRIDQKLDKLVDAIPQWRDQRDLLMSAKGVGRVVAYTLMSELPELGRLNRKEIASLVGVAPMNRDSGTYRGKRRITGGRGKVRTVLYISMWSAIQYDPKIKAMYERLVAAGKPKKVALVACMRKQLTILNTMMKNGTHWDEKLA

SEQ ID NO: 437048 - protein, 349 aa, unidentified
MRFYNQPHRFYAGVDLHARSLYLCILDQAGAPVVHKNLDARPEAFLAAIAPFRDGLVVGCECMFAWYWLADLCAAHNIPFVLGHALYLKAIHGGKNKNDKLDSLKLATLLRGGTFAQAYVYPQAMRATRDLLRRRGFLVSQRAQHIAHIQNTATQYNLEPFAKKLTFAANREELQIAERFADPAVRWAVEADLALIDALDVEIHRVETHVLKAARVHEPQTFARLRSVPGIGPILALTILYEVHDIARFGDVGPFLSYARLVPGRHESAGKAKGSPHAKIGNAHLKWAFSEAACLLVRHSERGKQWLARRTKKHGKPAALAHLAAKIGRTVYHLWRRSEVYDEARMFAS

SEQ ID NO: 437049 - protein, 320 aa, unidentified
MDTVLGIDIGKTKFHVTLRVADGTRRRKACANSPAGCRDLLAWMTRQGAGRVHACLEATGAYGDLLATTLVEAGHQVSILNPAIIHHYAKSRLSRAKTDPVDADVIADYTAKEHPPLWTPLPREVRELQALVRRLDALLGMQTDERNRAQAGALTPAVEQSIAAVLDHLETQIAAVRQQIHEHLDQHPGLRAQRDLLTSIPGIGEATAALLLAELFNKPFASARQAAAFAGVVPRPNDSGIHQGRRAMCKLGPGRLRKGLYFPAIAAIRFNPSLQPLAHRLRGAGKPPMLIIGAAMRKLIHLAFGVLKSGRAYDAKLANA

SEQ ID NO: 437050 - protein, 326 aa, unidentified
MQGKEASEQETKVQSNVGIDISKCWLDAHVVPGDERLHVANNCAGIRQLKRWLSHYQIALVAIEATGKWHRHLHRSLVASAIPAAIVDPYRVRMFAKAQGILAKTDQLDARVLALFAAMMAPPVRPVAPQAMAELAELVVARGSAVEAQAALKNQFAAAESTFLKRQLDRRIGRAGKDIAALDREILKRIKADGSLARRYAVLTSIPSFGFTVAATLIACLAEIGSATAKQIGMLAGLAPIADQSGDRNGVRVIWGGRPAVRRVLYLAALSAARFNADMKAFYKRLIDNGKPPKVALIAVARKLVVLANTLVSEDRTWQPRAPIQA

SEQ ID NO: 437051 - protein, 368 aa, unidentified
MPNIPKQEAQTPMAIVADTYTYVVGVDTHAATHHYAIVETRSGGQIAHGKFPTHPAGLLRAVDWISRRTSVDDNPAVDQVLISMEGTGSYGAQAAELLAARGYRVVDAPSPKRARGSGKNDHIDALVAARGALPKDSERLADRRAGHTRAALQILLTARDSMRRDRTRSKNQLTALLRTHNLDIDARKGINKVHISLIAGWRKRPTDTTLARIARTEAHRLATRIHTLDADLDSNEKAINALVRELEPTLLDLPGLGPINAAIVLAVWSHPGRIHDEAGFAKIGGVCPLEISSGNSKDHRLNRTGDRQLNSALNSIANTRMRHDETTKAYVKKRKQQGQTKPRIRRCLKRYIARQIFRHLNTTTLDKT

SEQ ID NO: 437052 - protein, 364 aa, unidentified
MLIIGCDYHPSGQQVFGIDTESGEVFADRWIAHTGKEVDEFYSALPAGTVVGVESSGNMLWFERRLAQYGHRLRLGDAAQIRTKETRKQKHDRRDAELIARLLVEGTFPDLQWVPTLAERDQRQLLMHRHKLVRMRAQVKNQLQHIAMNQGEQKKRQLWSKAGRELLEKLALDPWTGRRRDDLLRWLDLLDRDCEGLEMAVKQAAEARADARLLMTHPGIGPVISLGFVLTIGTVERFERSRQLVSYLGLNPAEDSSGERRRLGGISKQGSSFMRMLLIQGAQTAVRGDEALNRQYRRLASKKHRAVAKVMVARKLAVRMFWMLKTQKTHAELVRMRGSSSHPGVGQTDGLSERPASPRIQPQG

SEQ ID NO: 437053 - protein, 477 aa, unidentified
MLGLRRAVGTEVVHWLGANKPAYKLDPGFLEHPRLSPRAVIGPGARFLDFLFTGPHADDATQEKVMELLHRRCCGLDVHKETVVACLRLVSDGKVTTEVRTFQTTTAGLLRLSEWLAANGCTHVAMEATGVFWKPVWHILDDGEFELVLANAAHVKNVPGRKTDVNDAMWLAELLAHGLIRASFVPDTQTQEMRNLLRTRKQLVREQSSHVLRVQKTLEDANIKLDSVLSDLMGKSGRAMIEALIAGETNPAKLASLADRRVKASPEAFREALRGRVTKHHRFLLRLHLNQIDALDAAMATLDAQVEANLGPFRTAVDLVMSIPGIKNRGAHVIVSEIGIDMSRFPSDAHLISWACICPRNDESAGKRRSNRLRKGGTWLKTTLVQCAWAAVKKKDSYLQAQFYRIKARRGPKKAIMAVAASILTAVYHMLKDGTMYKDLGCNHFNRRSTDQQKKSLIKRLADLGYTVEIKPLAATA

SEQ ID NO: 437054 - protein, 380 aa, unidentified
MQQHSPTDPTGARPNDAVLFVALELSRASWLVAIQAPGRDKISRHKLAAGASAELLELVGRQRARAEHRTGGKLRVVSCYEAGRDGFWLHRLLVANGIENLVIDPASVAVNRRARRVKTDRIDVETLLRAMMAHARGERRVCSVVRVPTPEAEDARRLTREREALLEERVRHVNRVKSLCALQGVYDFEPLRPRAAERLDGLMTGDGRPFPERLKAEVRRHLERLGQVVHQIAEVEALRDKPASPLAKGVARLVALRGVGPNVASVLQAEILGRCFANRREVAQYAGLAPSPWASGRAQREQGIGKAGNARVRAAMIELAWLWLRHQPDSALSHWFRERVGQARGLVRRIAIVAVARRLLVALWRYATDGVIPEGVVARG

SEQ ID NO: 437055 - protein, 350 aa, unidentified
MRKNSKAGEGRGVETIGVDLGDKVSRYAILNEEGTLVEEGTFRNSAESIAKNFGKQGRARVALEVGTQSAWIAREFTKLGHEVIVANARELKWITSSDTKNDRNDAVKLARLARADRNLLAPVEHRGAEQQAELGVIRAREALVKSRTQLVNTARGLAKGFGLRLPSSITSSFGARALARLPQNLHAAMGGLLEQIDALGVKIKEYDQRIGEIAARHAEVKLLASVPGVGTLTALSYLLTLGRRERFEHSRDVGSFLGLRPRQKQSGERKPQLGISKNGDKYLRKLLVQCAHRVLGPWGKDSSLRQWGLAHSGTGPGKKRAVVAVARKLAVLLHRMWVTGESFKPFPTIV

SEQ ID NO: 437056 - protein, 364 aa, unidentified
MEEPAMSNDSTLVIGLDLGDQGSHLAILDQDGESIEATRLPTTQAAFQRKFSSLPPSRIALEVGAHSRWASHLLTELGHEVLVANARKLRAIYTNPRKGDRADAETLARLARLDPKLLSPIHHRSPQAQAHLAILRSRDALVRCRTLLINHARGITKSFGARLPSCSADSFPTKVEASIPELLRPALLPLLDTIASLTQQIRGYDRQIQSLCQTQFPESQLLRQVPGVGYLTALAYLLTLEDPSRFRKSREVGPALGLIPKQDQSGDRNPQLRITKTGNAYLRRLLVGSAQYVLGPFGPDCDLRRWGLQLAERGGKNAKKRAVIAVARRLAVLLHRLWKTGESYDPFYRSRRSANEPAALSAAA

SEQ ID NO: 437057 - protein, 347 aa, unidentified
MNFYNQKHRYYCGIDLHAKSMYVCIQNNKGETLVHRNMRTKPEYFLKVIKPYKKDIVVAVECMFCWYWLSDLCRENNIFFVLGHALYMKAIHGGKAKNDRIDSKKIASLLRGGLIPMAYVYPAGMRSTRDLLRRRMYLMRKRSELNVHVQNTNSQYNLPEIEGKISRKKHREGVADRFHDPSVQKSVEVDLATMDYYDKLLKDLELFILKTARNNDANTLNLLKTVPGIGMILSLVIFYEIHDIDRFPSVKDFVSYCRLVKCMSESAGKIKGTKGSKIGNVHLKWAFSEAAVLFLRGNKKGQQYLEKLEKKHGKGKALSILAAKLGRAVYFMLKRKKAFDIKKFIKF

SEQ ID NO: 437058 - protein, 391 aa, unidentified
MIYIGIDVAKDKHDCFITNSDSEVLFKAFTIANNLDGFNDLYQKIESVMDDVTKVKVGLEATGHYSYNLLGYLIDKGLPTYVINPLHTNLYRKSLSLRQTKTDKVDARTIASMLMSDVNLKSYSDTSYHNEELKSLTRYRFDKVQERAKLKTSVSRLICILFPELEKLVATIHMASVYALLSEFPSAHAVASAHLTRLTNLLSESSHGRYGKDTAVMFREAARNSIGSNMPAKSLELKHTIKLIQELTSEIDEIETEIKSIMDEVNSPILSIPGINYRMGAMIIAEIGDFSRFDSPDKILAYAGMSPSTYQSGQLDNCYSHMEKRGSRYLRYALYNATKYVCHWDESFGTYLAKKRAEGKHYNVALSHATKKLVRTIYAMEKTGQSYSSAS

SEQ ID NO: 437059 - protein, 372 aa, unidentified
MGEDSTVYVGIDVSKAKHAVAIAEAGRTGEVRYFGEIEATPAAVERFVRKLEKKHQRLHVCYEAGPTGYGLQRQISAMGHVCEVVAPSCVPTRPGDRVKTNRRDAVTLARLLRAGELTGIWVPDAVHEAMRDLVRAREAASEDLRKKRQQLQSFLLRHGRTFTGRRPGSAAYVRWLAAQKFEHPAQQIVFQDLVDAVRSAVERLAGFERHIEELVPDWAMAPVVAAYQALRGVSLIVAATFAVEVGDVRRFENPRQLMAFLGLVPSERSTGESVKRGGLTLAGNRRARRVLVEGAWGYRHPARVTETIQKRLEGLPRVVREIAWKAQVRLCKRYRHMTASGKKAPIVIAAIAREMAAFLWAIGHALDPRPPI

SEQ ID NO: 437060 - protein, 345 aa, unidentified
MNKQVFAPQATVFCGIDVSAASLSVALIAPDGSLARREFSNNASGHEALLVWLKKRSSPVRVSLEATGIYSLDLALALDAEACVELMVLNPKLVNRFQQTVCRSKTDAADAMVLAEYSQRMPFCRWQRPAASHLALRTVSRYIGSLVVEQAALKNRLCSAESTATTPRAVRVDLKRSLAAIERRVKRLRVEALKLVESEVELRERYQLLTTVPGIGPVNALTILSELILLAPAMTVRQWVASSGLDPVHRQSGTSLNKPSRISRAGNRRLRAALYMSALSASRYDRHLAAFYRALRARHKTGLQALMAVARKMLHAIYGIFKSGTPYDGRRLFPNIQTEVESIAG

SEQ ID NO: 437061 - protein, 338 aa, unidentified
MKLYGGIDLHSNNSVVALLDEQDHVVYRKRLANEVGCVLAALEPYGDGIEGLVVESTYNWYWLVDALMEAGYRLHLANTAAIVQYSGLKYSDDDSDAAWLAKLLRLGLLPEGYIYPKEERAVRDLLRRRSRLVQQHTANVLAVQNLLSRNRGHALSSNEIKRLTPAAVHALLPDANLALAVQSTLLAMRGQEAAIDLLEREACAQVRCQPAYRHLLTTSGIGQVLGLTILLETGPIARFAHVGNYASYSRCVGSERLSNGKRKGRGNTKSGNKYLAWAYLEAANFAVRYNPRIKRYYQRKRAKTNGVVAIKTVAHKLARACYHMLREGSDFDVKRAFA

SEQ ID NO: 437062 - protein, 356 aa, unidentified
MGKLTTIGIDLAKEVIAVCVLDVHGAVMERRVLRRDAFARWAEQLPASNVAMEACGSAHYWGRWFAARGHLTRLIAAEFVVPFRKGGKNDTADAEAIAIAARQPTMRFVPIKTVDQQAILAWHSVREGWKEERTALLNRVRGLLAEFGIVIARSSDRLLTALPELTEDARLPDAMRAMLLEAREQFAALHARLARCDAQIAVHARNSPAAQRASELLGVGPVTASALAATVPDAKVFRNGRQFGAWLGLTPRQHSSGGKTRLGRISLRGNVYLRTLLIQGARSTLQAAMNREPARASRLQRWIIELYGRKGYYKTLIAIANKHARILWVMLAKGERYDASAWQRHPMHQPPLAGDA

SEQ ID NO: 437063 - protein, 364 aa, unidentified
MKEEKTKTRYVGIDLGKRTYQMAAVGKGGNVTMSNGTTYTAGRQGLYKKLYVWDIVGLEACSLAFIMAKEIEAAVGCKVHVLNPGRLSIIYKSMKKTDREDALKLAHILQDFAEERLPVVSVPSDKEMKRRKILANSRRAQSYRNRLINLMHALFVSQGITSKVRKDLATGEARKEAIKELREIERDEAEYLSQCLDLCEKRIKKLDRMIAEESAGDKEIERLQSVPGVGPKVAFAFVSHVGAGRFENSGQLSNYLGLVPRVYMSGDTVRYGQITKRGNSYVRALLVQGAWALVRSRGGGKLKEQYEYMTKEKSKNKKKAIVAVARQMAVIMYTMMRDKTWYARLKYKPGKETAAELAQMATSA

SEQ ID NO: 437064 - protein, 415 aa, unidentified
MIYVGIDWADESHKIFITDDSAQCLDSFSIEHSHSGIEKLFERVRHLAKDQKQVLFALETSKGLLVSSILDAGYTVYAINPKSVDRYRDRYKVSGYKTDDFDAMVLANILRTDRYNHRKILPDSPITTELKILTREYSQLVRIETIFINQLTSCLKDYYPVALDLFCKLDQPVTLDFLQTFPTVEHLKKASVQKLCKFLSKHHYPGVVEKANEIYQKLKEPQFQVDSFIATAKSQFMITLVKQLQLLLPQVQSFKKKIEQLLDQHPDKEIFNSLPGAGVILSAKMISEFGDNRQRYKNVSSVQAEAGTAPVTESSGNCKFVHFRKSCRKSFRDTMHQFAFCSIKESSWAYERYRHYISSGKKHSHAIRCLANAWLEIISPMWKNHTPYSEQRHLLKYLKEQKYGDYRQNFNYLAP

SEQ ID NO: 437065 - protein, 413 aa, unidentified
MKVLLERCAGLDVHKKSVVACRLTRTSDGREEKAVRSFGTMTGDLLLLGDWLRAGGVTHVAMESTGVYWKPIFNLLEAEFVIILVNAKHIKYVPGRKTDVKDSEWIADLLQHGLLKASFIPPAPQRALRELVRYRLQLTQERTREVNRVQKVLEDANIKLGMVATNVLGASGRAMLEAIVSGIDDPHALAELAKASLRKKIVELEYALTGRVQAIHRLLLKLHLEHIDDLNAMIHSLGQEVDNLMLAFNTEEQIQRLDAIPGVGPEVAQMILAEVGTDMTRFPSSAHLASWAGLAPGKNESAGRNQSSRTSPGKRFLKVSLVQAAHAASGAKNTYLAALFRRIAARRGRKRAAIAVARSILVIAYHMLRDGTTYHDLGSNYFDKRDEQHVQRRLVKRLEQLGLKVTVEPASSA

SEQ ID NO: 437066 - protein, 435 aa, unidentified
MQPQPEPKPQPHTEPASPPLVAWIGLDWADQEHHVCLQAVGSSQIEQRVVAQRPEALQEWVQQLRARFPQGRVAMALEQSRGALIYSLMGYDFLLLYPVPGKTVADYRKAFFGSGAKGDPRDSELLLELLRCHADRLRPWAPEDVPTRHLGLLNEQRRKLVEDRTALTNRLGSLLKESFPQALDWIGELSNPPASAFLAKWPSLAAAQQAPPSSLRQFYRRHFRLPPQQLEKRLAEIRQAQPLTSDAAVLDSHALILPLLAAQLQTLLASVRSVEKAIAALFSKHPDYDLWDILPGAGAALAPRLLVAFGTDRQRYQNATELQTFSGIAPVTASSGKSRWVHWRWACPKFLRQTFHEFAVQSIVRSTWARAYYFQQIHRGKHHHAAVRALAYKWIRILYRCWQNHTPYNEQRYLQALAQRGSPLLVHFQIPEVVG

SEQ ID NO: 437067 - protein, 404 aa, unidentified
MERVYIGIDWADDHHDIHVTDDSAAPLDSFSIPHSYDGMKKLRERLGKSSSDPGNVLVAVESHQGLLIYALLEAGYLLYPINPKAMDRYRDRYRMSSSKSDPKDAMVLANILRTDLHLYKPLPRETVADARLKQLARSHKSLGQQKTKMLNQLTTQLKSYYPIALRLFSRLDHKITLAFLDRFPTPEKAAAASLEDLRKFFQKQGYSQQWKVTFIYESLQQPSLRAPKELEEVHQTIVLSLVPVIRSLRDEIEKLANEIGKEFKHNPAHEIFSSLPTGELTAARLNGELGSDGTRYPTREYVQTAAGTAPVTRRSGKTILIFFRWQCNKHLRAAFQDLARESVKQCAWARQYFAEQMRLGHKPSRAYRALANRWAAIIWKMLQERERFNQSRLDKSQVKALSAV

SEQ ID NO: 437068 - protein, 370 aa, unidentified
MPKSTPLFVGLDVHKDSIAVAHAAGGRPDPPVFVGAIGSRQADIDQLIRRLQGKTSALTFAYEAGPSGYGLYRYLTGKGLACQVVAPSLIPKKPGDKVKTDRRDAVELARLLRSGDLTRVHVPSVEDEAVRDVCRARDAARVTMKDAKLRLKAFLLRLGHRYEGRANWTAAHKRYLAKVVCPTPAQQIVFQELLRAVDEQVDRLQRLETELRELAPRWRLAPVVDALQALRGVQWLVAITIVAELGDLTRFDNPRQLAAYVGLIPSEYSSGQTRRQGGITKAGNGRARRALIEAAWAYRFPAKVSAHIQTRLDKLPKPLQAIGWKAQVRLCKRFRRLTARGKHSNVAVTAIARELIAFMWAIAKEVPLAA

SEQ ID NO: 437069 - protein, 366 aa, unidentified
MTKKLLKQVVGIDIAQKKIDVSLGCMDQEANTEVYAYKTFNNNEKGFAALLLWVKKHTQADVQLRFVMEATGVYHESLAHHLSNKAYTVSIVMPNKITNFFRTLEVKTITDKTMSETITLFGLEKKLDNWVPPQKVYRELRQITRERDQLIGERTMNKNQLHAEQTEAYPNEKTIKRVMARIVMLNKQIKEIIAEITEINKNDSEVAAATRLITTIPGVGLLTAIIVLAETDGFSLIHNKRQLTSYAGLDVKEKESGTSVKCKPRISKRGNKHLRKAMHLPALAAIKHTERYKATFTTIVERTGIKMKATVAVQRKLLEMIYTIYNTKEPFDIEYLQKEAKKKQELNDAKKIENSPKELLPIQADI

SEQ ID NO: 437070 - protein, 376 aa, unidentified
MEHDSTLYVGLDVHKDSITVAYALGPNEVELLGRIGTTQTDIDRLCKRLQSKADRIRVVYEAGPCGYGLYRQLAQKGFDCMVCAPSLIPRKPGERVKTDRRDAVKLARLLRTGDLSAVYVPSVDDEAFRDLARAWVSAKDDMKRARQRLKAFLLSHGVRYTGRADWGPAHRRWLSAFSFDNLWQQLALDELRRTIEDRLAQCGRLEAALREAVVNWRFYPAVLGLQAMRGVQFTTAVGMLAELGDLSRFAHPRQLMAWLGVTPSEHSSGNKRRQGSITKTGNGYARKLLVEAAWSYRHPARVSPEIQRRHEGLPKPIIDRAWDAQIRLCRRYRKLVAHGKEKNIAVVAVARELGGFIWDISRLAMSLAVPSEVHAA

SEQ ID NO: 437071 - protein, 396 aa, unidentified
MERAAQPQIPPTAMAEPATLLVSFELSESCWVLTLRQPSSGKLSRVSLPARDMEKLLGLLTAQRQQAERWSQRAVRVISICEAGRDGFWLHRWLLAQGIESHVVDPASILGPQRRRKAKTDRIDGERLLRSLAGWLGGEGDRCSMVRPPSVAQEDERRLSRERGELVKERTRLSNRINGLLANQGIAGFKPLQTGAQQALDALRTGDGHALLSQLRLSIVRILQRLVLLGQQLKAVEAERDALLKVMPADAAVSQGAASAEREKRRSLMRLRSIGPEFATVLSVECFYRQFDNRRQVASFAGLAPTPWSSGSVEREQGISKAGCRRLRSTMIELAWSWTRHQPGSGLTQWFHHKVAGQGKRMRRIAVVALARKLLVALWRYVQDGVVPQGAVLKAD

SEQ ID NO: 437072 - protein, 421 aa, unidentified
MKKKVRIVGFDCAEDEHAAVLLDVSGEFERRVDVINERGQIQESLAELMLAVGPNAQLVVVVESKRSHGRIVADVAVELGCEVWQVNTVALNHFRDLEGQPRKDDEWDAYLAARMVYLRMGGCRVAIETTEEERVLSRLTRTYSRLIEDRKRQVARLRAVFLELAPEMLHSSWEGPQPGSKAMLYLLERWPGFEGLERAQIRSIEKILHKCRYGSKAPHVAKLIRKMARGISIAAEERSAITMEFDFLVRQIRFCNESADQVYAEIAQRVERHPMGQKLLEMHGNGPVITGVLVSELLPVARTSPEPKCATYAGVTPLSRKSGKSLNKDRLTQGANKRVLHALYTSSVVATKGSSVDRAYYHKKLRDYAGHPKPHVAAFIALSRQRHKLVYKLMTTDARYDKEVLIATHLARLEQERAAAA

SEQ ID NO: 437073 - protein, 370 aa, unidentified
MKPNFEPGKWFMQCVGIDIAKGTFTACLCMYEFDQGCSTAPVVFNNDKTGFNQFVKWSRKEALKGYPLRYVMEPTGVYYEQLASHLNKLSLNVCVVLPNKAREFAKYEGILTKTDDMDAYTLGMLGCLDKRLKPWTPPSPIYRELRQMTRFVADINKVKTELRNHLEALAHSETAEKSIVKYYNKLIDEIDKQLVSNQKAIRKKIKQELGLSERIERITTINGVGFMTVATVVAETNGFALITNRKQLTRYAGLDVPAHQSGPVDPKRHISKQGNVHIRTALYFPAIVSTQCNPQMKDFYRRLCARNTQSKMIGITAAMRKLLLLIYSLWKSGEEYDPKRDKPSCSKKKKEAEPPEGQPHGIDVGTSAEE

SEQ ID NO: 437074 - protein, 353 aa, unidentified
MKVYYILGIDISKDKFDVCLRHPGQDQMLAQHPFPNSPAGFKQLQRWLRKHGVTHVHACMEATSRYGEALALFLHQQGQQVSVVNPRRIRKYADSLLVRTQHDALDADIIARFCATQKPRLWTPAPPELRQLQDLTRLRQFMVSQRTRLQNRLHTQSKTLARLLRRHVRQLDQTVQEIEAAITTFLQDHDELNRQVALVDTVSGIGLITAAVAVAELPPPGQLEHAGQAVALAGLDPRKKDSGKSVRGVAHVSKMGSRPLRAALYMAAVTASRSNPIIRAQTERLRARGKNGKTLICAAMRKLLRLIYGVLKHRQPFDPKYQGPNRAVPCAEAEASGGGGPQPAIASPPVATA

SEQ ID NO: 437075 - protein, 521 aa, unidentified
MESVAAIFSLVARKRFGVFEDPVCETASIFRRLSQAASLSQGNQTMKKHKKTKPNPEAAKPLHEPKPDAAGIDLGATEIWVAVAPDRCQMPVRRFGAFTQDLLAILQWLLECGIRTVAMEATGVYWIALYQLVADAGIEVCLVNARHVKNVPGRKSDVRDCQWLQYLHSVGLLMASFRPAQIICQTRSIYRFRQNLLTQVGQHLQHMQAALDQMNIKLHHVINDLSGQTGMAIIEAILNGERDPLRLAQYRDRRIKATQETIAKSLEGDWRSEHLFVLRLAWENGKQVQEQIKKCDQELMQYTRQLEAKTMVAQPIVPVKIMSLNVEPGVPELTPAPAVRPAKPRKKTSKNEPDGPWRENLHRFFGVDLTLIPAISVLTGITLMTELGNDLSAFKSVHHFCSWLCLCPDNETSAGKVLHKSTRRSQNRVRQALRMAASSLHHDKSYLGDKYRRLRAKLGAPKAITAMAHQIARIIWYLITHQVAFDMSIFAELEKANQKRHLNRLNSAAHQMGYQLTPIAA

SEQ ID NO: 437076 - protein, 362 aa, unidentified
MHIGVDTHKKTHVLVALDARGQVYGTHSMANTPAGWAAALQWARDRDAVCVWGIENSGLLGKGFAQFLLGSGETAVHEIVPHRTAQYRKRGRNQDKTDHTDALAMARLLQAESGYLPLVERDDASTELRLLSDHRDNLVAERTRLVNQLHAQMLQIDPCYTERSGTLTSRTGIPYCHSLDVPHADGVVQTRLLIVRQLTEQLLRLWEEVETVETALAERVRATETPLLNVCGIGVIAAARLIGELGCTPRIHSAAALAALAGIAPVAVSSGGRNGHRLNRGGNRRLNRTFHMIAVCQLRCEPLAQAYYAKKRAEGKTARSALRCLKRRLVDGVYRLLREQERATMPDASAGNALGPSLRPAA

SEQ ID NO: 437077 - protein, 347 aa, unidentified
MKAPQYYVGIDIASASFTCSVGKMEGRWQIVVRPASFANEYDSFSAYLNWLHDHGVKPDNSVICMEATGVYNEVLAHFLCANGYTVAIEPPLKVKRAFKPEGHKSDPVDSTQIAEYAYRFWDELSQWTPRKEILEQIKTLLTTREQFVVERSGHQNALQALKRKQVRTLMAEKMHEKAIEELKRHAQEIEAEIQRLIDQDPDLRNLAALLISIPGVGALLAAHMLLLFKSAPEPYNPKSLAAFIGICPYESSSGTSVRGPSTSRHYGPPALRKLLHLAAMSIATHQQQFRLYYLRKVKEGKPKQLVINNLANKLIKIMVAVARTRTKFIPNYCSVNPALLKMTLTKS

SEQ ID NO: 437078 - protein, 372 aa, unidentified
MGNASTTYVGMDVHKATVTVARWAAGATAAEVWEVANEPRAVRRLAKKLVREAPGEVSCCYEAGACGYALQRQLRREGVGCEVVAPSLVPRKPGERIKTDRRDAKKLAEYWRSGSLTVVEPPTPEQEAIRDLVRCREAVMQDRLRWRHRLGKMLLRRGLVYREGRAWTMRHRSWLRSLRWEQPSDEIVFTEYLMAVELLEERLRVLEQRLAEVAASDPYRERVGWLRCFRGIDTVSAMTVLAELHGIERFDSPRRLMAFLGLVPGERSSGETERRGGITKTGNSHVRRVLIEAAWHYRHRPGVGASLRKRREGQPAPVIALADRASRRLSARYQRLAVTLGKPSPKVVTAIARELAGFLWTALVPSQHLVST

SEQ ID NO: 437079 - protein, 345 aa, unidentified
MTNILKQATGIDVAKDELVVSFGQMGQDTSINIFAYKTFPNNKKGFNDLLVWVKKIAVKDIKVRYVMEATGVYHERLAYYLSDRAQEVSIVLPNKIHNYTKTLNIKTVTDKTASQAICQFGLERKLDAWEKPKEIFRTLKQLTRERDQLIAERTMIKNQMHAERTEAHPNRDSIIRMNQRIKLISKQEKEIQTAIAEVIKSDKELARKVDNITSITGVGELTTAIVVGEVNGFELIRSKKQLIHYAGMNVEEKQSGTSIKGKPKISKKGNRHLRKAMHLPALSAIRHDERFKAIFVRLVSKHGIKMKAVVAVQKKLLELIYTLWKTDTKYDKKYLQKLNDKNKAA

SEQ ID NO: 437080 - protein, 345 aa, unidentified
MKIVGCDLHTRYQQIAMLDAETGELTERRLEHESGQARAFYAGLAGAVRVGIEATGHTRWFERMLAEMGHELWIGDAAQIRAAMVRKQKTDTRDAAHLLELLLSERFPRIWRPTMAERDLRQLVWHRQKLVWMRNAVGNQLHALAMGEGVCRKKKLFSKQGRAELQSLRLDHWASYRRQELLRMIDQLDASLKTLDQEVAEQAEHNPAAVLLMTHPGVGPVTSLAFVLTLGSVQRFARSKQVVSYLGLNPREHSSGGRQRLGAISKQGNPMMRSLLVEAGHTAARLDAELRRDYQRLKLRRGSGVAKVAIARKLAVRMYWMLRAQASYAQLVRMQDSPWATLVKP

SEQ ID NO: 437081 - protein, 428 aa, unidentified
MADLLEGALPLNLVAIDVARYSNAVLIELSDGKRQRFRMTNNASDFDRLLSYLQALPGNCRVALEPTGDYHRPLAHRLLTAGHEVVSINSVAQARYREAMFNSWDKNDPKDAQVILEMLRRGTYQRYVDPQIAGHHDLQELAKTYYQVSRARTKVQHSLINHCLPLYFPEMHRYWCTTRNEWFVRFLLEFPTPTHVRALDRESFVTAAWDLVGRKVNKRAKLEEIWETAAHTAALPHALDCLAVETFRITLRRYQELNVLREAIEARAEVELHDNADFAHLKTLPGIGSVIAMTILAEAGDLRRFGHHRQFLKYCGFDLAKIQSGTQRGREQLSKRGNARLRLAFWMAGMAAVRMKENSFRSKYERYVHANPDDADLKRKALTAVAAKMARVAYSMIKKNQPYRQFFELGLPSGSIPLSAAVGAQATP

SEQ ID NO: 437082 - protein, 343 aa, unidentified
MQVIIGVDPHKASHTAVAIDAKECQLSAKKVRATRAQVSQLLEWAEPFPTRTWAIEGADGMGYLLAQQLVATGEHVLNVPATLASRIRLLGTGHSSKNDPNDALSVAVAALRTSGLRQVRPVGHGEVLRLLAKRNSDIGRQRCRVVSRMHALLLELDAGGIAKEIKASDVDRFLAAVQPTTPAEQIRYDVALELLADIRRLDEQLKTSHKRIATAVTASGTTVTDIFGIGPVIAAMLIGYTGDITAFANRDRYAAYNGTAPVEFSSGGRTVHRLSTRGNRNLNHALHLAAICQIRHAHSDGRAYFDRRVAEGKTKKEAIRALKRQISNSVYRHLVADTASTRG

SEQ ID NO: 437083 - protein, 366 aa, unidentified
MGWTPPRRPWCARVVVFVTTEQEATVAEVSTIGLDLAKHVFQAHGADASGKVVFRKRLRREKVLEFFAGKPACLVAMEACSSAHHWARELARLGHIVRLIPPAYVKPFVKRQKNDAADAEAICEAAQRPTMRFVAIKSETAQANAVVFRARDLLVRQRTQAINALRGHLGEYGLVVAKGPGHVIKLVEHVEDPCSDVPDAARLVLRTLVEALRFLSERIDLLDREIARRAREDDDVRRLTSIPGVGPITATALAALAPPADAFRRGRDFAAWVGLTPLQHSTGGKQKLGTTSKMGERTLRRLLIIGASSVVRKALRQGIAAESWLGRMLARKPRMLVIVALANKMARIAWAVQAKGGVYRAPAVAA

SEQ ID NO: 437084 - protein, 354 aa, unidentified
MERYVGLDSHAHSCTLGVMSAGGRRLKSLVVETNGRELVEAVRGLGGRVHICLEEGTQSAWLYELLKPHVAEVVVAVAPEKKGPKDDQRDAWARANELRTGAIETRVFKAPEHLAGLRNAVRAYGFAVTDVVRAKNRLKSVFLSRGIVTDASVYNATKRSAWLKKLSTPHRELAEWLGRQLDQLEPLREEAEGLLLAESKKHPIIRKLSTAPGMGPIRTAQVVAIVAAPARFRTRRQLWSYSGLGIVTRSSADWVQDRTGKWIRAQHVQTRGLSRRRHPRLKAVFKGAATTVIAQLADDPLHADYERMLKAGIKPTLAKLTLARKIAATVLSMWKHQEVYDPKRHRPTPEPEQK

SEQ ID NO: 437085 - protein, 312 aa, unidentified
MYHMKEELVYLGVDIAKAHLDAAIGSEKRRFANESLGHRELIKWVKQLGERVQVICESSGGYERKFVQALARGGVKISLVQANRVRQFARAAGILAKTDGIDAEVLCEFGKVMQPQTVTAAKLEQEQLRELESQRRHLTRLLVMEQNRGARLSDVWVQRLNRRLINQIKRQIDQLDLLIKKHIDQSHELSAKAVKLTAISGVGARTAALLLAQMPELGQLNRREVAALVGVAPFNRDSGRMRGKRTIHGGRRPVRHGLYMAALVAAHHNPILRQFYLRLRAAGKPAKLALTATLRKLLIVLNSALKPDPNYA

SEQ ID NO: 437086 - protein, 322 aa, unidentified
MKRLIYVGIDVSKRKLDVAVKIAGDAPSGPRRRADETWTSINDEQGIIALVERLRAIQPQRIVLEPTGGYERKALRALRNAGLPAALVKPVSARDFAKAMGHYAKTDRIDAFVLAHFAEIRQPSIEPIQTENQQRIAALRALRTDLVTTRGAYTNRLENCDSEVREHIEAFLLDVEEKIKSVEAKIAQAIEKDPEDTAKAALLQTVPGVGPQTASALVGELPELGKLDRRRISSLVGVAPMNQDSGSSSRKRSVHGGRAKVRHVLFMAALSASRFNPMIRAFAERLRAAGKPHKVVMTACMRKLLVILNAMVRTSSPWSSSQ

SEQ ID NO: 437087 - protein, 519 aa, unidentified
MASTRKSRRSSRRQAPVALGKPAGVLHPRVQQVGPDHFGIVCFDCHKASSKFLLADFYGRCLVPPTVVEHTRPALDSAIAHIRQAFDQHQLCDGLVAIERTGRYHRLVQRSFAAAGFETRILHPFVTKQYRQPVDPGNKTDDKDLAAIHRATVTGCALLEASRDEAWTTLQLVTRHRRDLVVKGAALNCQIRDHLEAALPGFAACFDKLWESPIPWHLLRHYPSVAQLRDAGLTAICHSVRQAGIRFQQRTLQAVLDWAEQAAPGEVAAGQHLRIALALYDDRQRKTQEIQALERESAGRLAQTPYVLLLSIPGINVVSAAEFAGEMGPIEHYANAKCITGRAGLRPTRYQTGQVDHAGPLVRNCNRSLRAAILGIADNLILCNHHFQHLATGWASQGKDARDIHIRVGLRFCRIAFQMVAGRQVFRHPCIQGRHYILDKLNAFHREHGTGIAEVLRDLQSAIGQLPSREYAAEAKPLQQEMQRIQEGRRRGPQLLGDILPIVFARLGVGVVQSNESGE

SEQ ID NO: 437088 - protein, 405 aa, unidentified
MPYILALDVSMGHSYSVLYKDDTCLFEDEIEHTQRGFHALLEEIQHLPERPLIVFEATGIYSRPVEKFFQDHHFSYCLLNPLEAKKQMEESTLRSWKTDKSDAHRLAQTHLKNQRQPKEVQSNFYLEMRDLARFYQEIEKKITRLRMDLHNCLQLTFPELEQFFSNRLTPYALTLIRLFPHPDFVLASTRTKIKNKLINETRKKISANRAEQKADQIIHYAQCAYPAVEKDSIHCQKTIYYAELLQDLLEQKKALATQMIKKAEGSPCFLLYQTFPGIGALTAALLLGELGDITRFKTHKQLNAFVGIDIRRYHSGKYTGQDRINKRGNPKARKIIFFPIRNMIRQQRAAPNHIVDYYYKLKKQPIPKKDKVATVACMNKLLKCMHAMVRAHTEYDYAYAVSVDH

SEQ ID NO: 437089 - protein, 345 aa, unidentified
MSKISVIGLDLAKNVFQVHGIDDDGEVVVRKQLSRRQLRTWFARLSPCLIGMESCGGAHYWSRELTALGHTVRMMAPAFVKPYLKSNKNDRNDAEAICEAVQRPNMRFVTAKTPEQQSVLHLHHARRLLIRQRVALANHMRGILLEYGISLPPGVKSLSRRLPPILEDGEHALPMLTRHLLSELKEAHDQLMERTARLEAQLKAWHASHALSLRLESIPGIGWLTATALAVTVGEGLDFRNGRQLAAYLGLVPRQASSGGKDRLLGISKRGDGYLRSLLIHGARAVIHPIRRRLKAGQPGGNRWVEQLLQRCHVNEAAVALANKMARIVWVVAARKESYQAVSPA

SEQ ID NO: 437090 - protein, 355 aa, unidentified
MTSAQYIGMDVHKESISIAVRNAAGKIVMECVIETKASTILQFIDGLRGDVQVTFEEGTWAAWLYDLLKPHVTKVVVCDPRRNALLQEGNQNDRVDARKLAELLHNNQLRSVYHGDHGLRTLKELVRSYLTITQDLSRVMTRVKAIYRSWAIPCTGKQVYAPRHRGEWLAKINEPGVRRRAEFYYQQLDALRCLRQEVRRDLLAESKKHPAWKRLCGIPSIGPIRAAVLLGILQTPHRFRTKRQLWTYGGVGIQTSSSADHHVVKGQLERKKKHVEIRGLNRNYNHDLKNIFKGAAIVAATKPGPFAEFYAELVAKGMRPEMARLTLARKIATIVLIVWKRGVCFDAQHLKPQTA

SEQ ID NO: 437091 - protein, 356 aa, unidentified
MTQPTRSTSPVTIGLDTGDRTIHYCALEAREVCGRGVCPTTREGLDEALAKWPGARVVLEAGSQSAWIARHLRSRGFDVHVVDPRRVQLISKDPRKTDRRDAELLARLESGMPELLGRVHHRGEQAQADLAMIRARDQLVRVRNSLVQCVRGLTKSFGLRLPSATTSAFGKRVRELVPAALLPAVEVVLAQVDALTASIRELDRRVARVAKERYPEVARLQQVHGVGPVTAAAFVLTIEEPTRFDDSRRVGSWIGLCPRVHASGDSNPELGISKSGDGYLRRLLVQCAQYILGHFGKDSELRRFGLKLAARGGRAAKKKAVTAVARKLAVLLHRIWRRGLTYDPFHNTNRQAALAV

SEQ ID NO: 437092 - protein, 341 aa, unidentified
MAKNVYFVGLDIACDDFVASIYQSPKQSVITKEGIENTFEGFNVFVPWLKEHALSKTNCIICMEATGVYNEAIAHYLVSQGFRVSVEPPLKVKRAFDPVGHKTDPVDSRQIAEYAYRYSDELRFWQPKDEIMEKTKHLLTAREQFTKQSTAIKNAMKAYEKHTVQVPLIVKAHGQTLREIKKHISEIDKELDRIIGQNPSISKMNNQLKSIPGFGLLLSTSLITLTGAFSDIPHHKTLAAFLGICPYQHQSGKSIYRQPHMRSFGPAYPRKLFTLAARSVATHNDVFKKYYARKLAEGKDKKLVLNNISNKLIKLACALIKNNSRYTATYRSVNPMFLDIS

SEQ ID NO: 437093 - protein, 349 aa, unidentified
MTHVGIDLHKLESQICVIDESGEVRAETRVPTRRETLARALASWPGSQVLLEACNESEWVARHLERCGYTVVVADPNYTPMYGHRHTGYKTDRRDARALASASVQGLYRRAHRTSEPRRVVRAELVTRDALVRTRSRYISVIRARLRGEGWRVRSGKAESFVARVTELPLEPELGAQLQPLLQVMDLVNQKIAEADRVLERKAKAEPAAQHLQCMPQVGPITALAFVAALDDVRRFRNAHQVESYLGLVPRERSSGEHQVRGRITKTGDKRVRWLLVECAWGILRSEKASVQALRSWTDRIGTRRGRTIAAVALARRLAGILFAMWRDDVAYDPKKLRHPHGLAEVTAS

SEQ ID NO: 437094 - protein, 449 aa, unidentified
MSRPQVIDDQEHERIYERVAAVDVAKDTGMVCTRIPHPSRPGARRATVWTVKARMGAVRQLGRQLKADGIEIVTLESTSDYWRIWFFVLEAAGLAVQLVSPFQARQLSGRPKTDKLDAMWLARLTEWGLLRPSFVPPKAIRDLRDYTRARVRLVRERARCWQRLEKLLEGALVKVSSVASKLTTLSAQDMIKAMIAGERDPRVLAGLARARMKAKHDDLVAALDGMFDDHHGELAGMLLDHIAFLDERIAALGARAAQLTAAIPQAWGVNADGTTGPDAGTAPGAPVLDAVTRLAEIPGVSEDLARTIIAETGLDMTRFRTAAHLVSWAGLCPTARQSGPRTRPGKKGQGDTWLRGALGQAVTGAARTPTFLGERYARIVRRRGKAKAQVAVARSILVIIWHLLADPRARFTDLGPGYYQTRTDLDRKLRNHIRQIHALGFDVTLTKTG

SEQ ID NO: 437095 - protein, 294 aa, unidentified
MQLHTIGIDLGKTVFHLVGLNPRGEVVVRKKFSRKQLLLFTANLQVELIGMEACGGSHFLGRALREQGHEVRLMPAQYVKPYVKTNKSDYIDAEAIAEAVGRPKMRFVPIKSDDQLDLQSLHRVRERWVMRRTAVINQIRGLLLERGITVRKGRRHIDAALPGILEDASNQISGAVRVLLVQLKLELDHLQTRIDEVDAMINKAAGESEVCRRLVSIPGIGPVTATAIIAAIGNGAAFKKGRGFSAWLGIVPGEYTTGGKQKLLGISKRGNSIAIGLTLAALLAPIGPALVELR

SEQ ID NO: 437096 - protein, 387 aa, unidentified
MPQPNDLSRSLVALDQDSTIIAVVEMSQSSWLVAGMLPGIERQPRKKLEPSPERLLALLHCWRDEAIRAGRKITRIALAFEAGRDGFWLARWLRARGVEAHVIHPSSVAVSREHRRAKTDRLDTELLKRGFLGWLRGERGHCTMARVPTSAEEDAKRPNRERECLVGERTRIVNRMKGTLARLGIRNFKPTLRKAAERLATLHTPEGSVLPPNVSAELQRNMARLGFVVSQIKEIEAARQKRLEQEPETEPHAMVRLLARVVGVGVETADILVNEVLSRPMRDRRAVARYAGLTGSPDESGAKRREQGLARAGNARVRRGMIQLAWRFLRFQKESALARWYRARTADSRIGTRKTMIVALARKLVIALWRFVTAGETLEGVILRPAG

SEQ ID NO: 437097 - protein, 419 aa, unidentified
MMYRIAGIDVHKRMLAVVVADVAVDGGYQFDRRTFGTAPEQLRPRAAWFVASGVDEVVMESTAQYWRPVWDLLEQAWVPQRRSQPGAPPTAGTLHLAQAQSNRGPLGRKKDFPDAERLVRRLVAGELILSFVPDAEQRLWRTVTRRKYQLTCSRVQLQNRLEALLEEMHVKLSSLVSDLLGPSARRMLEAIAEGATDPTAVAALANQRLRATPEALADALGACADLHPVYRRLLQLALTELRGIEAQIEALNLEMGGLLRRHQDAVQRLAAVPGLGVDSAQQIIAEVGPDAVTFPAPKQMASWVGVCPGAEESAGVSYSRRAPKGNRQMRRLLNQAANAAVKTKGSIFELVYRRLVPRLGHRQAIGAIAHRLCRLIWKILHDGVTYEERGPAVTKERLRARTAKMIRELKTLGYRVEPA

SEQ ID NO: 437098 - protein, 316 aa, unidentified
MQERSVDVGVDVSKKRLDVKVLPGGEAWSCEQTPEAHEVLAQRLAALKPRRIVLEATGGLESALVAVLGAQGLPVVVVNPRQVRDFAKALGRLAKTDRIDAEVLALFAERVQPPLRPLADAASTELAALVARRRQVVEMLTMDKNRLHSTHSARVRTSIQAVIIALQAQLRELNRDLQRAIQASPLWRARDELLRSVPGVGVVLSSTLIAELPELGALGPNALAALVGVAPLNRDSGSMQGRRSIWGGRAAVRTALYMGALVAAHHNPHLRAFYARLRARGKPAKVALVACMRKLLRMLNAIVRDHQPWQPMLTAA

SEQ ID NO: 437099 - protein, 496 aa, unidentified
MPATSLVQGRGTSDCRREHEPQIRFSPRSLPGGSVIDIVGKETAVQQIYERVAGLDVHRDSVVACFRQLGPRGGVVREKERFSTTTAGLQVLEGWLAARDVQLVAMEATGVYWKPVLYALERRFTVWLCNARNVKKVPGRKSDLSDAEWLADVAAHGMVRPSFVPPLPIRELRELTRYRKTQIDARVAEIQRLEKVLQDAGVKLTSVASKVLTQSGRLMIEALIAGEQDPARLAALAKGKMRPKIPALTEALAGHFGAHHAVACRRILGHVDFLDESIGALTEQIDARTAAFDAVYKSLLPVPGFDRLTIDVIIAETGADMTRFPTAGDLASWTGVCPGGHESAGKRRRVSTTPGNRWLRRALIEAARAAVRTKGSYFGAQYRQIARRRRPEQGRRRRRAFADRTGLAPAEHRRGVQGSRRRLLHQPSRPRTTSTPSRRPTPRTRLRRHARSRPSHRGITSRRPAPLMTSALPSRSHARKSGSSIGHFTPDRAPAV

SEQ ID NO: 437100 - protein, 347 aa, unidentified
MLHVGLDLSRTRLDVHVMDEAGAPLAVTTAAPDAGGLASLAHRVGELGGPVAAAIESMNGARFVHDQLELHGWAVEIADAVKVKGFAPLACKTDKIDAWVLAELSRRDLVPAIWLPTPGIRAERERARWRLHLVRHRTALKNRIHATLLTFGHPCPVSDLFGAAGRRLLDSLQLPEPWAADVVAALRLIDLLDGEIDEVEAALRTLGAAHAYVPLLMTTPGIGWVLGYTIAAEIGDIGRFATPKKLVGYTGLCPTVDQSGGHDWRGELAKNGPKYLRWALIEAATHAARHPVYAERYQRTKTRLGRQRGAKVARVDIARKLAEAIWWMLTTDKPFAPAGAPHSALAA

SEQ ID NO: 437101 - protein, 389 aa, unidentified
MAGASLTHSRGLPSASPRARPIRQVWEAPMFSERTSVGLDVHARSVVAAAIDGVTGELFRARLTPAYEDVIGWVRGLPGPSATAYEAGPTGFGLYRALTAEGIRCEVVASSKLQRPAGDRIKTDARDALHLARLLRLDEVVSVRVPTEAQEAARDLVRAREAARADLMRARHRLSKLLLRYGIVYSGGKAWTVAHDGWLLGQHFDRVGTQAAFEDAYEAVVLAAGRRARLDEKITAMATDSEFTPVMRRLACLRGISTLTGFALAVEIGDWDRFTGASIGAYLGLVPSEHSSGASRSQGGITKTGNSHVRRLLVEAAWHHRKPYRPSVVLRRRWDVATPAARARGHAGNQRLHARWVGYSERKKRPVAANVAVARELAGWCWSLAMLPD

SEQ ID NO: 437102 - protein, 462 aa, unidentified
MFYVGLDIHAKTIAICVLNETGQFVHRSQVRTIDQMMRILEGLPDRFEVCYEASCGYGHFHDLLCPVAARVLVAHPGQLRLIYRSKDKNDRKDAERIAKLLYLGEVPTVHVPSLEVRTWRELINCRSQMIAKRTRAKNVVRSLLRSAGISPPRQPGLWTKQGLSWLCQLTLPTLSQQLRRDLLLEEIETLNRQLRRIEQALSRWAQHIPAVLLLQSIPGVGVRTAEAVAAFVDDPHRFPNAKAVGRYFGLVPRQDQSGDRNRLGHITREGAPVVRKLVAEAAWQARRHSPTVRAYFERAQRDDPQRKKIALVATAVASVALAALSFRTLNAAALSAAKQVPAADLRSLTAYLAPLSDTTSLALGALGSMVGERDPFGAPPVGRASVVNPIPQGTVPTARRPQWVVSSILFEDSKRSAIVNDAWVGVGELLPGGARVEAIEHKYVVVTDSRGKRAVVPLQVRP

SEQ ID NO: 437103 - protein, 422 aa, unidentified
MKIVHPICCGVDVHKSFLVATIITTRGIMPEYQKKRFSTFNNAILAFKQWLLDNHCLDVCMESTGKYWIPVFNLLEDTIRVTIANPKWVAAVKGNKDDVKDSKWIGDLFRLGLVPSSFIPSKPIRILREYTRYRYKLVSCKSSEKNRFQNAFTVCNVALDAVVSDMFGKSATSITDYLVNGDSFDPAHCVSLLRRSLKTKADEVLQSIEGFQMTEEQKQRLRFVRQHLDFVERTLSGLDQVIDTMVSPFESNIALLCTIPGVDRRTSITILSEIGTDMSQFSSSKRLCCWAGLTPGNNQSAGKKKSVRITRAGVYLKPALVQAAHAAVKSKESAYYRIKYERIPKRRGKKRAIIAIARMMLTAVYQMLLTGEVFNPCDLFKVDMPQELRQKQKDKAIRQAARLLVSQGIVAQEHLSLPALSA

SEQ ID NO: 437104 - protein, 418 aa, unidentified
MNAVGIDVSKGKSMVAVVQPLGVVAVKPFEVAHTAGALENLGYSLKGLPGETRVIMEHTGRYYEPVALALHELGLFVSAVNPMLINQYGNNTLRRAKTDKKDALKIAKYGLDNWADLREYAPMEAVRQQLKNASRQLELYTKIKVALTNNLIALLDQTYPGANTFFDSPARSDGHQKWVDFAQSFWHADCVSSLREDTFIEKYRKWCKRRGYNFSTAKASDVYIESLGHIIMLPKNASTKSLIQQAIAALNAVSATVESFRAEAQRLARLLPEYPVVMAMYGVGDSLGPKLMAEIGDVRRFASKRALVAYAGIDPEPSQSGKRDTKSNAISRKGVPEIRKAVFLVMDALLKNAPSDEPVYQFLDKKRSEGKPYFVYMTAASNKFLRIYYARVKEHLDALESIDPAETCLPHDFTSANP

SEQ ID NO: 437105 - protein, 324 aa, unidentified
MKQPVSQWVGIDVSKATLDVYLRPSGEQFQVANQDSGITELVKRLQAFEIQQVIVESTGGLELEVAQAVQDAGLAIAIINPRQGRDFAKASGKLAKTDRIDAAVLAHFGEAIQPPITGLASEQDRALQDAVTRRRQLVEMLSAEKNRRTSLRAKMRQNIERHIEWLEKQIQELDKEIEQLSQAQAEWRSRIALLKSVPGVGSVIATTLIAALPELGRVNDKRISALVGVAPFNRDSGKFRGDRTIWGGRSQVRAVLYMGALTAVRHNPRLKAFYEHLLQQGKAKKVALVACMHKLLRILNAMVRDGKPWQDGTEMKATEMAGSD

SEQ ID NO: 437106 - protein, 333 aa, unidentified
MEKKHFIGIDISKKTLDVVIFASNKQHSYTSNYRRFPNDDEGFSEILSWLKENRISLQATVIGMENTGMYGFDLRLFLEKKKVDYCCFMPLHLKLSFGLARGKNDRVDAERIAYYTALHKDELVFSKLANSTILRLQELSVERKRFVVQRAGYEALLTDSKGREQTSTHLRARQMKEFLDNEIKSVEEEMEQLVKSNPEVERNYRLLVSIKGIGMANAISTLIHTDNFQAFETARQYACYIGIAPFEYSSGTSVRGRTKVSHIGAKGLKADLSQAANSAIVWDRELKEYYERKRKEGKAYGVVLNAVKFKLVCRMFAVVRRGTPFVALQTYKS

SEQ ID NO: 437107 - protein, 335 aa, unidentified
MEEVTTVGIDLAKNVFSLHGVDAAGRAVFRRTVRRDRLVETVASLSPCLIGMEACSGAHEWGRRFERHGHTVKLMAPKFVAPYRKSGKNDGNDAEAVCEAVTRPSMRFVPVKSIEQQALLALHRVRYGFVVERTAIINRLRGLMCEFGVVLPLRSVSVRRLAAQAAETLPDLARGAVGDLLQQLHHLDERIDAYDRQIEQQAKLSAPARRLMEIRGIGATTALAIVATVGNAREFKNGRQFAAWIGLVPNQYSTGGKSRLGHISKRGDAYLRNLLVQGARSVLHSAPGRADRVSRWALKLQDRRGYYRTLVAIANKNARIAWALLARDQELVTLN

SEQ ID NO: 437108 - protein, 348 aa, unidentified
MLHAGLDLSRRRVDYCLLDEDGERVEVGAAPADADALAGLVRLVELRHGPGPVSAVIESMNGARFVHDTLERLGWEVQIADAQRVKGLAPLACKTDRIDAWVLAELSRRDLVPAIWLPSFAQRQERERARWRLHLVKHRSALKQRVHSELMAFGHTCPVSDLFGVRGRELLERLEFPEPWRSGVLCAVELIDELESEVDGIERELRALGADHPYVRLLMTVPGISWVLAYTIAAEIGDITRFATPTKLCGYSGLCPRVYQSGDTDRRGPLAKHGPKYLRWALMVAATNAAKHPLYRDRYRHTKQRLGRQRGAKVAQIQLARTLTEAIWHMLTRNQKFAPAGAPLPLAA

SEQ ID NO: 437109 - protein, 354 aa, unidentified
MHLYVGLDVSLDETSICVVDANGKVCKETKAASDPDALLGVLNPFRQRIARVGLEAGGLSSWLHTELTTLGLPMIVVEATHMRSAIKAQGHKTDRNDAKGIAHMMRLGWYKPVHVKSAESQRLRILLSNRRMLKRKLVDLENHIRGTLRGLGLRMGKIGRSGFEQRVRELIEDKDPATVSFIATMLQVRDGVWQGYRALHNLLIEIVKRDPVCRRFMTVPGVGPIAALTFRAGVDDPLRFVKSRTVGAHFGLTPKVHQSGTIDIDGHITKRGDVEVRTALCEAAASLLMRVRKWSTLKAWGLRIVQRSCMMNAVVAVARKLAVILHRLWLDGRDFEDASSAVIAHRRLRGAAAM

SEQ ID NO: 437110 - protein, 366 aa, unidentified
MDDSTSSTVSVGLDVHAASIRLAAVRGDELLEERTLAYDHEALERELGRWPGARVCYEAGPTGFGLHRHLSAAGIACDVVAPGLVPMRPGDRVKTDPRDARKLARLHAGGLLEPICVPSVELEAVRDLVRAREAARIDRMRDRHRLGKLLLRHQRPMPLQSWGAGRRKWLGEQSFDQPAQQLAFATYLQTLDLVDRRVEALDRQLEEVAAAGPWAELVARLRCVRGIDTLTALGLVAEVGAFDRFASAEAFMSFVGLVPSERSSGEKRRQGSITKAGNAHARRLLVEAAWHSRRRPKVSYELSRRQADQDPAVLERAWACQQRLHRRFHRMAGRGKPRQKIVVACARELAGFVWAIATDQPLRKGA

SEQ ID NO: 437111 - protein, 421 aa, unidentified
MSNSTLSKKLASVKPGTLFVGVDLALDRNVAVVLTERAEQLGRFGFPNDRDGYDYFYRRLEAAQEGQQAPAVLVGMEPTNYFWKLLAADIEQHCPDYSYRLVNPYTVKKNREGDQLDRSKDDNRDAFTIADLLRTGKYTETQLLHGTYAELRQYVTLYSRLQRDIRRQKTLIRNIAGQLFPELPRVFKDLTGETALAMLHHHAAATAVRRMSQEAFIASVRADFQGRRLQVAKLRRAYVLAKRSVGLKDGVEALQLALRTHIETLKTLQQQLEEARTALVDVFLSLPESDYLLSVHGLGVITAAIILSEIGDPSHYTNGRQLIKLAGTQPVLNTSGRKTRSKTPMSHKGRPRLRTALFFAVMRLVQVDEAFAREYLHLQTRKKNPLTKMQALGVLMNKLLRILWALMRHRTFYNPDFQGAA

SEQ ID NO: 437112 - protein, 343 aa, unidentified
MGEVSTIGLDIAKSVFQIHGVGAGGAVVIRKRISRAKLLEFFASLPACLVGIEACPTAHYWGRRLQALGHTVKLMPPSYVKAYLKRSKNDANDAAAICEAVTRPSMRFVATKSEQQQCGLMLHRSRQLLVCQRTMLSNAIRGHMAELGVVSAKGRNGTAALLKIIADEHDDRIPAAARFSLDVLARQYAVVRAEIGAIEKRIHAWHRSCEESRRLEEIPGVGPIVATALVAEVGDWKEFTSGRSLAAWIGLVPRQHSTGGKERLGRISKQGNRHLRWLLVAGAMAVIRYARQHGTKRPWLARLMDRRPIKVAAVALANKIARMAWAMMVRGERFKEPKLLPAA

SEQ ID NO: 437113 - protein, 398 aa, unidentified
MTESSDYESVQVFIGVDVGKDTHHAVAVNRSGKRLFDKALPNDENKLRSLISDLKQHGQILLVVDQPATIGALPVAVARSEGVLVGYLPGLAMRRIADLHAGEAKTDARDAAIIAEAARTLPHALRTLKLADEHIAELSMLCGFDDDLAAQTTQASNRIRGLLTQIHPALERVLGPRLDHPAVLDLLQRYPSPEKLASLGEKKLATQLGKLAPRLGKRLAADITQALTEQTVVVPGTNAAVVVLPRLALQLITLRKQRDEVALEVEQRVLAYPLYPVLTSMPGVGVRTAARLLTEVACRAFASAAHLAAYAGLAPVTRRSGSSIRGEHPSRRGNKTLKRALFLSAFAALRDPISRAYYTRKMSQGKRHNQALIALARRRCDVLFAMMRDGTFYTPTAS

SEQ ID NO: 437114 - protein, 339 aa, unidentified
MSTSYDGQQYVGIDLHRRRSVLVRMTEAGERLETVRISNDPEYLRLVMSRAGEAPEVALEACYGWYWAADALTELGASVHLAHPLGVKGFAYRRVKNDERDAADLADLLRMGRLPEAWIAPPASRELRELVRHRAKLVGLRTNLKCQVHAVLASAGVPVMSSDVFGPGGRELLERVALPAAMRAKTNSALRLIDAITFEIDTFAGLVTARLHTEPGYAAVQTIPGVGPTLGAVFVAEIGDVRRFRRPEQLTSWAGLTPKHHESDTKVRRGRITKMGSKLVRWAALEAVQRVGPQTRIGAFRDQVAERRGRNQAKVAAARELIECVFYALRDHHVRRLAA

SEQ ID NO: 437115 - protein, 430 aa, unidentified
MMEEVDDAELVVERIAALDLGKAGLEACVRVPSPHRPGRRMQELRGYGTTTAQLLEMVAWLRHWGVQRAVMESTSTYWKGVYYLLEAEGFECWLVNAREVKNVPGRAKTDRADAIWLAKVAERGMCRPSLVHPAEIRRLRDLTRYRRALVQDRTREQQRIEKLLEDAQIKISSVLSELHGVTARAMMDALIAGQRDPRALAQLAKGRARKKTAQLEEALRGFFTDHHAAILRMMLDNTDRISAQIAALDARIEKEIGPFSHQAARLAEIPGVDAVAAAELIAEIGVDMTRFPSDAHLVSWAKFCPQTHESAGKSKSKGRGRGNPWLAGTLGRIAFANSRADTFLGARYRRLARRRGKQKAIVATGNSVLTVVYYLLSDPTATFCDLGPGYYESRINVHRRARDLATQLQALTGQHIAIRDGKAVITDAAA

SEQ ID NO: 437116 - protein, 586 aa, unidentified
MAQLSEMDTPTGKWARQTVKLKKDQNTMSKCIRKPEIVQKKKQAFNQTPSKPSGQAVYTANLIVDSSTIKIDILNSSKACPTTEFQHTPENIQAILDLFTFESVKGVRLSGKKGHCQVLAEAFLKQGIRPLIANSAKSQVKGIKGMPVINEHVAGIDIGRSVIYVAIPSDFDEDHTRVFGTFTEDLEAIVSWLKEHGINEVAMESTSVYWIPLYLLCEQHGIKPIIVNPKHVKMLPGRKTDVLDSQWLMRLLACGLLSAGFVPPEFIRDMRDLARHRQDLTGRAGDCLNLIQKMLALMNIQLGNVLSDISGKSGMAIIKAIADGQRDPAALATLADDRCKCSKEEITKSLVGTYGEAHIFIMKQELDTYEYLHKGIVRIELKIKELLENLPTKPDLPPLPESSKRRKEKRDYNRSPYCFDMRTLLYQKFGYDLTALKGVEDNTAATLIFETGGDVSAFPTSKHFASWNGTSPGNKVSGGKVLSGKAPKKVTRVGQALRNAANANYRADSGTGAYLRRLVRNGKSKTAARKATAHRLGTQVYNMMKFGQPYVEKGAAEYEKRHEERKIIGMTRALEELGYDVIKRVA

SEQ ID NO: 437117 - protein, 424 aa, unidentified
MKITIASEKVKHAGSLVVGFDVGQSKLNALSRVEVDGRLVQLEDELRNRTDTIRRCLLKYSEHAAAYGLGNVHVVCEPTGGCERKLLRTARQLGFTTEYVSGQAVHRCTTVESNDTGKSDRKDPGTIHTLAMLGRTLRVRDLSGPYLELRRLNEFYEDEDRTVVNIRTHLYAVVQELFVDWPLPPQFLYTGPGRALVEHYGCSPYRIVADGRDRFVERMRAAGPGFRIATAAKLWKAAETSVLHRHEEAVERRLADRVQALRADWERHEGRRESIKQELVRIYEQLPEAKAFSSLPKQVGRHLLARVIAETGPLRDFGHVRQLWRFAGLNLRERSSGTFKGQLKISKKGRALLRKVIYQIAFGNLIAKGGMYATWHRRKKREQANGMKSIVAVMRHFLKCLHAIACSGQPFSAERLFLSEAMAA

SEQ ID NO: 437118 - protein, 427 aa, unidentified
MSEEKSKELRVSVDVGCRRHSVAIGWPDGQVLEEFEIAHRPEGFEEFFSRIEKHQKANGCGVAVAMEGYNGYARPLDSLVRSRGYRLYNINNPKLARFKEIFPGAAKKDRIDARKGLELFQLRDHLPLAKEVLQEVTGTPQENEILKRLTRRRRRLVNERVRVVNNLQADLQAVCPGLLEITTEASNRWFLNFLLSADTLPQLARLRKSTLLKIPAVGRKYANLIQEWQKRAHFSEEAQWVGEMIHEDAQRCLELEEKIKALETKIKEVAKNSKIAKILLSIPGFGTVCTSELAGEIGTVERFGKEGGLALYLGLSTLDNSSGNYQGTKQPKHVNTRAKAAMMTALDRHRKYVPESQRYYEKKRSQGKKHNQAIRALGRHLCRIIYKMLKEERPYQIRSKKGDTQARVRSRSSHIGQIRKKKISAKS

SEQ ID NO: 437119 - protein, 381 aa, unidentified
MVVPVGTYLARDDEMVSSPLNRRRDAPGWVVSSPKQKREETMSNRIVIGLDLAKDSTAAVALGGQGREQWRRTLRRQRLLPFLGRQAPCIVAMEACAGAHYLARQAQQYGHEVRLYPPKHIKAYQRGQKNDYNDALAVAEAAQHGRLRSVPVKTVEQQDDVLVVQQRRQLKREQVRLGNHIRALLVERGLVLPKGTAALRRRLPSLLEDADNGLTPTVRRVLNGIYRRWLALLEELAWYDQELERQAREEDARQRLCEMPGVGAVIAGALKAWMGDGKQFRRGRDASAALGLVPRQHSTGGRQVLGGISKRGDRYTRAQLINGAQAVLRQAHRKDDALHRWVVRLQATRGHNKAVTALANKLVRIAWVILARGERYSPRYA

SEQ ID NO: 437120 - protein, 371 aa, unidentified
MKKYSTFVGMDVHKNSIEIAIAESGRNGEVRSYGKIDGTLSALDKVVRKLVSKGDHLHFVYEAGPCGYGIYRHLTTKGYDCSVVAPSRVPRKSGDRIKNDRRDACILARLDRAGELTPVYVPCAENEAIRDLTRAREDAKADEKRSKQRLKSFLLRHGFRYAGTANWSKAHIRWLSDIKMDHPSQQIVLQEYIDTIGECSYRVQRLTDQIRQLVPQWRLSPVVKALQALRGVSLIVAATTVAEIGDLNRFDNPAELMSYLGLVPSEHSSGEKTRRGSITKSGNGHVRRVLTEAAWAYRLPARISRSLLKRQEELPRKICDISWKAQVRLCSRYRQLWARGKPKQVVVTAIARELCAFMWAIAGEIEIPSTT

SEQ ID NO: 437121 - protein, 387 aa, unidentified
MEVRVVNTPSAGRNNDPVHCFVAIELSKSNWVVGFQTPLTDKASRHQVKAGDAKGLIELIERVRMRVGRQLSRPVEIVSCYEAGYDGFWLHRVLEAYGIHNHVLDPASLQVSRRARRPKTDRIDAERMVRALICHLRGEPEACSVVCVPNVEQEDAKRLHRERRRLIAERVQHVNRIKGLCATQGIYDYSPLRKDRLARLDGLRTGDGRALPTRLKAEIVRELKRLELVIEMIATVEAERDAILTNPASTHVNAGKIKMLAKLRAIGPEFATNLVGEVFYREFANRRKLGSYVGLGSSPFCSGSVDRDQGISKAGNSTARSMMIELAWTWLRYQPGSALSVWFRERVGNLKGRPRRIAIVAMARKLLVALWRYLETGLVPTGTALKA

SEQ ID NO: 437122 - protein, 314 aa, unidentified
MDKTICGIDVSKDRLDVAVRPSGERFVVARNGAGLDDLVGRLKILKPYLVVLEATGGFETVVVAALAAAGLPVAVANPAQVRAFAKAIGQRAKTDPIDAGVIAHFGEATGVTPRPLRDQATQQLADLVARRRQIVEMIGAERQREKRANSRIKKSIARLVKALERELSSVDTDIDDAVRGSPAWREKEDLLSSVPSVGPTISRTLIAELPELGTLGGKQIGALVGLAPFTRQSGQWRGKSFIGGGRTSVRKVLFMGAMVGLRHNPVLKAFFERLIAAGKPKKVAIIAVARKLLTILNAILRDGRPWRGTVEAVS

SEQ ID NO: 437123 - protein, 374 aa, unidentified
MSRTIIYLGLDVHKDSITIAVLPEGAPAPSRVERLPNDLAKLRRFCERLAAEGDLRACYEASGAGYVLHRALREWGYPCDVIAPSLIPTKPGQQRNHDKYDAAQLARLYRAGELTCIRIPSEAEERVRDLVRCRETLQREVLKSRHYILKFLARRGFVYREGTNWSTAHYNWLRRLAAASSPLVAEDQIVFGEYLGLLEYKLSRRDELDRRIGELALTPALAPAVNRLQCFRGVQRHVAMVLTTEIGDWRRFSSPRQLMAYLGLVPKERSSGDRERRGSLTKAGNSHCRHVLVQAAWAYRFQPKVGLALKARQRGHSPVVIAHAWKAQHRLHTLYRRLAFRTKPQIAVVAVARELVGFLWAVMQDQDVTKSVAA

SEQ ID NO: 437124 - protein, 433 aa, unidentified
MLKLNYMSTLFVGIDVSSKTNAVYAMDFEENKYISSSFGNNQPGADQLVNMIAECMQKHKNLDTVLIVLESTSVYSVHISNFLSASEVLMPYKPYVFCVNPKATSNYRKSYIGMEKTDPTDAYLIADFGRVGRTKKLEPWRGGQFISLKRLTRHRMHLSECITREKTYMVSNLYLKFSELQLLEGDDKPFGSLYGATSSAVLTEFLSPQEIIDMPEEELLTFLAGKSRNRISDLSKTSELLRKAARDSYRLDKCMYEPLSISLASSFNCIHAYQKEIKLIEQAIEKCINGMNPNALLILQSIPGIGPIWASGILSEIGDITVFHSSDALAKYAGLYWPKGDSGDFTSEDNKMSKAGNPYLRCYLGEAANSVRKHIPEYADFYARKYAEVTKHQHKRALALTSRKLVRLVFGLLVKNQLYTGEKLDTEYNIESN

SEQ ID NO: 437125 - protein, 369 aa, unidentified
MPHVTSIGLDVHARSVAAAAFNPFTGEVVHRDFGTDAAEIAEWALGFEEPRACYESGPTGFHMARELRALGLDCAVAAVSKMQRPAADARRKNDRRDAEFIARMLATHNIVEVPLPDAAVEAARDLDRALDDATAEYRRARQRLNMFLIRLGHVWDERNADGTRKGSWTRAHWRWISGIRLEGPQRDVLEYYVTAARCAESDRRQLEKKVLALARTDRWRPVVEALSCIKGIDTLTAFRLAAEAGSFTRFRTAPAFASWCGLVPSERSSGETERRGGITKTGNRLARTALVESAWHYLTCTPRPKAPAPGADVAAAIRARADACTARLCRRREALAAAGKSSCKANAAVARELACWVWEIGRRAEGTLG

SEQ ID NO: 437126 - protein, 355 aa, unidentified
MNSEKYIGLDVHQATIVVAVLDSSGRLVMESILETEAATILQFFAGLRGTVSVTFEEGTWSVWLYDLLKPHVDKLVVCNPRKNALLKDGNKSDRIDARKLAELLRGNQLKPVYHGETGVRMLRELARSYLTIVKDLSRVMNRLKAVYRSWAIPCAGRGVYYRRHRAQWLAKIREAGVRRRAERLYEQLDMLQHLRQQARRELLAESRKHAITAKLRQIPYLGPIRSALAVALIQTPHRFRTKRQLWAYSGLALETRISAEYRLVEGQVRRSKKLLSIRGLNKDHNHDLKGLFKGAATMASVRPGPFQDFYQASLAKGIKPTMARLTIARKIAAITLTLWKKGENFDADKLKSQAA

SEQ ID NO: 437127 - protein, 341 aa, unidentified
MNHCMYFVGIDVASETFTVSVWVADHKIIVTEAALLNTKEGIAAFVAWLSTRGMCQAQTIICMEATGVYNEVLCTDLVAAGYRVAVEPPLNVKRAFQPGGPKSDPVDSRQIAEYAFRFSDVLTFWTPVAALVQEIRALLGMRERLTRNIVVHRNARHALARAAHPYLLLLTMTDTLITQLVEKTVEIDAQIRTLVRQDPRLQRIVGALDSIPGVGLLLAAYLLVLTNGFQRVPTAREIAAYLGMAPLLRSSGSSLRGKPASRHYGPRKLRSLLHLAARSVVTHRAEYREYYTRMCAAGKPKVLVLNNVANKLLRVICAIMKSGAPYHAGHYSINPGLSAGR

SEQ ID NO: 437128 - protein, 317 aa, unidentified
MHETNMIAAGIDVAKAKLDIAVAGRRQSWQVPNTPAGLGDLVRLMRRHKVTRIGLEATGGYERDAAEHLRKHGFAVVVLQPIQVRAFAQFVLCRAKNDRIDAALIAACVAHRTTLRAPPDPRLAPFADRLTFIEQIEEDVARIKVRLEHVRDAALRRLMCADIKRLAARRAAMLAALEADLRRHDDLARRLDLLLTIDGIAERTALALLIRMPELGTLSREQAACLAGLAPFDRDSGQRSGERHIAGGRGRLRKSLYSAALPAAFRWNKHLVDLYRRLLADGKAHKLALVACARKLLIFANTVLARGTPWISNSAPT

SEQ ID NO: 437129 - protein, 354 aa, unidentified
MTEAITVTTIGLDLGDKQSELCVLNAAGTISARGKVLTTPAAMEAAFGKLEPARVVLEVGTHSGWLVELLRKAGHEVVLANPRQVKLISEGRRKTDRHDAELLARLGRSDISLLSPVTPRALGDREALALIRSRDQLVKVRTSLVNHVRGAMKAFGFRLPSKIDAAAMHRHRSEIPVSLQPALWPLFDQLQALAQSVAALDETIEAEAAKRPDVALLTPIHGVGTLTALTFVLVVGEASRFRRSRTVGAYLGLCAGKRQSGDKDPELSITKCGDPLLRRLLVTCANYILGPFGAQSDLRTWGLKLAAQGETKRARGRAKVAVARKLAVLMHSILKNGTVYEPVGFGKKEQSAAV

SEQ ID NO: 437130 - protein, 391 aa, unidentified
MYIVGIDIAKRKHEAAVIDGEGTVIIKPFSFTNNCSGYNRLLAMLTKAKLPLDEVSFAMEATGHYWLALFTRLQKEGFRVQVINPVQTNSIRSFYIRQAKTDPRDALLIAEVIRFGHFSESTLHPENIYELRELCRGRHAIVSMQADVKRKVVALLDQVFPEYETAFTNMFGDTSMAILQTCPTPKELSEMPLEELCHLIEVSSHKRFRMAKAQELQALARNSFGFAMAGDVFSTMIRLYAKHLDFLKQQVREMDRKIAEIMETLDTPITTITGIGPTLGAYILSEIGDISRFSSAAKLAAYAGIDPTMRQSGEYNGVRNRMSKRGSPYLRHAIWLAASSAVLHDPALKLYFQKKRDEGKPYMASVGHACRKMVSIIYAVMRDNKAYCLCA

SEQ ID NO: 437131 - protein, 450 aa, unidentified
MNTSLVLGIDPGKFFVVAALMQSTGERVWKGRQYVMSREGFERLKADVPEGELTVGVEASGRIDDNLLAWLAEWQAASPERKIKVIRVNPGQSSRFGGFKPRRDQTDRSDAEHVSEYTRVYAHRLEAFEHDARSQAMARLVTERQRVIEQLAATKNRIHEQLLICFPEFTRIFKNPFAQLACAVLRQVPTAQRAAGRKALSLGRVKADRKGRSLGVSRAGQLIQLAKRSIASAREDNDAEAMIFMLDEVQLLEQRLQRIKQGLVNFVDQARKETQVPGQEGVSPARQIQLLDSIPGMAVVAAATLVLGTRGLTRFPSARALAAQWASCPERTQTGTSLDKTRLTNRGDHKRRAMLYLATQVACLSDPAFAFHKWRMIQGGLRPQQAICATMNRMARIIWAVVAHNTTYDAGQMMKQIDIHHEAQWKTFVLQLGKESKLWKKIARENRKIA

SEQ ID NO: 437132 - protein, 427 aa, unidentified
MSVTQNEKIRQVTDTTMVIGVDIASEFHWARAFDWRGLELGKTVKFENSAEGFNFFLRWVSELTVEQKKDSVMVGLEPTGHYWFTLAAHLQGGDFKLVLVNPYHVKRSKELDDGHPSKSDKKDPKTIAKLVLEGRYVYPYIPQGLYAELRVAMNCRWRIRKELASLQNQIQRWLKIYFPEHSKVFGRFTGAGSMALLHSAPFPSDLISLGVEGISGIWKQMKLRGIGRKRAQRIYEAAQTSVGCTTGMEAARMELQILLEDYDAKLQQYERVMQVVENLCSQIPAVAELLKIQGLGLVTVTGLFAEIGDIRRFESPRQIQKLAGLAITENSSGKHKGPTEISRRGRSRLRAILFRAAIPLLAKNREFQLLHRYYTTRQNNPLQKIQSVIAICCKLLRVFYALATKDCAYSPEKVLADIQRNQPLKAA

SEQ ID NO: 437133 - protein, 396 aa, unidentified
MLTYRNWLTPFNSFEFEQNVRNVACSAYPEYPTRSQNEGGFSLWIDRQVMKILKQVSGIDVSQNELVVSLGRMHEDLTTEIHAYKTFPNNEKGFESLIQWAGKLMVAETPVKYVMEATGVYHERLAYYLTDKGHLVSIVKPNKVSNFAKTLETKTITDKTASQAIVLFGLEKQVTIWKKPKQLYRNLRQVTRERGQLIEARTGLKNQLHAEQSEAFPSKKSIDRMQVRIELLNSQEKEIMHEIADYIKQDKEVSENIKLICTVPGIGVLTAATILSETNEFELITNKRQLASYAGLDVQEKQSGTSVKGKPRISKKGNKHLRKAMHLPALAAIRHDERFKAIFARLVQRHGIKMKAVVAVQRKLLELVYTIYKTNKPYDKEYLKQTKDNGQSKKAD

SEQ ID NO: 437134 - protein, 413 aa, unidentified
MESNRGVAGIDVHKKMLAVVIRRQSGTQVEYIKRQFGTMRVEIEHLAAWLQHEQVSEVVMESTAQYWRPVWYGLEGHFQLHLTHPLKTKAPRGRKRDFRDAQRLADRWVSGDLGESFIPGAEQRSWRWLTRARVHAKRKMGVIRCQVEGLLEQGGIKLTAVASDVFGASGWAMLEKIAKGETDVEAMVELACGALRQKRAKLREALRGRLEPIYQLLLRQHMDQVRLLRKQVDELNEALAVAMKDQVAVLCRLSKIPGVDLYAAQELLAEIGPRAAAFPSAEQFASWVGVCPGSHESAGVNYSRRSPKGNRYLRRLLMQTAWGAIHTKKTFYASLFQRLKTKIKPKGAAWAVAHRMASVIWLIMHEEVEYEERGQAAPNPRTLARKLRKLVREFKLQGIDVRALLDQTLEAHA

SEQ ID NO: 437135 - protein, 401 aa, unidentified
MDSHLCVGVDVGYRSHRVGIAHPDGSILEEFDISHTDAGFNEFFRRVEERRQQLSLPVAVAMEGYNGYARPLDRLVQEKGYRLYNVNNLKLARFKEVFPGAAKTDPIDTRKILELFRLKDQLPLAKDAIQEVVIAPAVNEKLKRLSRRRRHLVTEKMRVLNRMQTDLQAVCPELLAITNDADNLWFLRFTTFRDDLQQLARLRRATVLQIPGVGRKYAGIIQDWQRKAKFSSEVEYVGPMIIQDAKRILELLKQIRVLDNALAELSTQSEIARRISTIPGFGKTSIAELAGEIGTLDRFIGEASLGLYLGMCPLTHQSGEMSRARIPRQVNTRCKAAMMTAVARHIGCVPQSRAYYDRKRAQGKTHNQAIRALGRHMVRVIWAILRDGRDYEIREDLHPMT

SEQ ID NO: 437136 - protein, 321 aa, unidentified
MERTALFVGIDVSKAHLDVAVLPPGQAWQEPNDEAGRARLVPQLAALTPVVVVLEATGGWELPLACALALAEVPVAVVNPRQVRDFAKSLGRLAKTDTLDAHSIAEFAQRVQPVPRPLPNTQVQELAALLARRRQLLQMHTAEENRLGKTTVPALRRELQEHLAWLEEHLRRLDDDLATRLRESPLWRAQEDLLRGVPGVGPTLCSTLLAELPELGTLDRRQIAALVGVAPFNRDSGLRRGQRHIQGGRAQVRSTLYMATLSATRYNPVIRTFYQRLCGQGKPKKVALVACARKLLTILNALLRHQTPWNPRLALDIQHSC

SEQ ID NO: 437137 - protein, 319 aa, unidentified
MANVSKIIGIDISKEKFDACFSIQPCGYSSRTYTYDAEGVKSFLQEVPTDCICVMEATGVYHLRLAYALNKQGIAVSVVNPLSVKNFSRAVMCRTKTDKADARQLVDYARRMELTEWKPTSDNYIRIQQLYRSIELFLTNITQFENQLEAINNSPVCNPRLCRMLHSHIKRLNKQIVLLEKRIEELIAQEDATVVEHISSVPGVGKKTAIALLTATKGMHGFENYRQLSSYFGLRIYDSGKSVHGKAHICKMGMGWIRKLLYMCSISAIRYNRACAALHVRLKEKGKPIKVILIAVVNKLLKQIFAIVKSNSVYSEIFT

SEQ ID NO: 437138 - protein, 361 aa, unidentified
MKKISTVAKRGNEIFEEPKLTIGLDLGDRTSHYCLLDEAGNVILEHSLPTPPKGIQQVFSRISRSRIALETGTHSPWVSRQLTRLGHEVIVAHARNVRLGGESSRKDDQFDARTLARLARIDPDLLGPVRHRSAKAQIHLTVIRARAGLVSARTALVNTARGLAKSYGERLRKCGTGQVGRALAGGLSAALRDALDPLLQGIESLNERIAEYDRRIEQIAKEVYPEVALLKQVKGVGTLIALTYVLTLDDPHRFRRSRDAGCFLGLRPGRRNSGMSEPQMHISKEGDRYLRTLMVQGAHYILGPFGEDSDLRRWGLKLAERGGKNAKKRAVIAVARKLAVLLHKLWVSGEVYEPRGCPGFS

SEQ ID NO: 437139 - protein, 331 aa, unidentified
MFPVGIDVSKNTLDLCILYDGIKGRIKTRNIQNNRHSVENILRWLRLQHCSPEDVHVVMEATGVYHERLATELHDAGFRVSLANPHRSREFARGMGIMTKTDKVDAYMLACYAFLKKPHHWEPPSPEIRYLAALLRRRDVLLGDALREENRLEKYLSTDTPADIISSCRRMAQLLREEVSNIERQIKAHIKASPALRRDYTLLNSIKSVGPQLGMHMLVELRSHNFASAEQAAAFLGVVPIEKRSGTSVRSRPRMSKIGPPQLRARLYMSALCGKIYNKRMRNIYDEMCLRGKPKMVAIGALMRKLVHWCYGVLKTGTVFNDEGLKQVLST

SEQ ID NO: 437140 - protein, 400 aa, unidentified
MTGSQLWAGVDVGKEHHWICVLDTSGTVVLSRRCDNDEATIRAVITEIDALAETVSWTVDLTTAYVTLLLTVLADAGKPVRYLSGRSVWQASSVYRGGEAKTDARDARVIADQSRMRSDLPVLRPDDELIRELQMLTGHRTDLVADRTRTINRLRQQLVAICPGLERVAQISSDRGWVVLLARYQRPKAIRRVGAARLAAMLTGAGVRHAESIARAAVTAAKAQTVRLPGEDVAAELVAELAQAVIDLDTRINAVDAEIEARFRRHPLAEVILSLPGMGFRLGAEFLAAVGDPALIGSADQLAAWTGLAPRPKDSGKRTGRLHTPQRYSRRLRRVMYMSALTAVRCDPRSRAYYQRKRAEGKRPVQATICLARRRVDVLYALLRDNRTWQPTVPVTAVAA

SEQ ID NO: 437141 - protein, 332 aa, unidentified
MENFYFIGVDVLKKKLNFCVMFEGKVVHEEETSNHQGAIMSLLHHLEEDYGIASGQMLVCAEHTGQYTFPLACACKAVECKLWLENAAEIKYSSGVQRGKSDKVDAKRIAIYASRFQDKVRYYERPTEDIERLKQLESERTLYVTDFAKYKGQMKDQKEYMPKSLYERKMKRLQALMDDLEEAIQSITDEMDEVIASCPVLFRQRELLMSIDGVGRVVATNMIIATEAFTRFDDPRKFNCYAGVAPFSYSSGSSQHSKARVSHRADKVMKRLLHLAAVAVTHRIGGELKKYYERKVAEGKNKMSVINALRAKIVARMFAVIKRNERYKPILS

SEQ ID NO: 437142 - protein, 394 aa, unidentified
MGKLYVGIDVSKETSSAHGLDERGKDCFHLSFEMNSKGFAELLKAIDEHRTEHSDVIAAMESTACYHINLYSFLISKGMATVVVNPLLISNFARLSLRKTKTDKKDAKTIASFLLAHQDSISQIAVTQDLQDLRDLAREQESLCQQISAAKVEIRRILQTIFPELEGICNLFTKVMLHFIKQFPSARLVKASKPSRIAKTLKQTSGGGKLTFSAEQIVEAARRSVATVSPAKEIILRGKVETLEHLESRYEELSRVLTRSCECQVIEDLKILTSIDGIGKNSAATFLAELGPIRNFPSYKKLIAYAGIDPTVYQSGQYQGASRISKRGNRHLRRIIWLMTVCVIHHNDMFKKYYQKKRTAGQPYKKAVFATAHKLIRVIFSMLTHRAYFQEACL

SEQ ID NO: 437143 - protein, 374 aa, unidentified
MNNHSEAFVAFDTSKLRSAVAIAEGGRAGEIRFLGEIENTAVATAKLVKKLAAKYRRLTFCYEAGPTGYGLYRQITKLEHECIVVAPSLIPKKPGDRVKTNRRDALSLAKLLRAGELTAVWVPDRHHEAMRDLSRARETAVMELRRKRQQVSAFLLRLGLHYPEKTTWTKAHMNWLTSQQFDYAEQRLVFEEMLLAVRQAQERLERLEQAIRNAVPDWSLAEVVTGLMAMRGLDLISAATFMAEIGDLSRFQNPSDLMGYLGLVPSEDSTGDTIKRGPITKTGNRRARRTLVECSWSYQYPARVGRAKQTKVDAVPRGVREIAWKAQCRLCGRYRALIRRGKLKTVAVTAVARELAGFIWAVSREITTARAATR

SEQ ID NO: 437144 - protein, 377 aa, unidentified
MTATTRPEFGSVSEPTLYVAFELSAKQWKLAMTSGLGVEPWLRNVAAGDLRGVQRAIQQARTRFRLTPDARVVSCYEAGRDGFWIHRALTQLGIANRVVDSSSIEVNRRARRAKTDRIDALKLVRMLVRACGGERDVWREVRVPSPTDEAARHVSRERTALVQEQTRVMNQMRSWLATWGCALPSRRSSAWWTGIRDWAGAPLADAVQARLARAAARGAVLEAQIAALDAVQKTAMRGAPADGALGRLVQLKGVATTGASVLLDEGLVWRAFRNRREIGGLLGFAPTPYQSGEVAHDQGISRAGNDRLQAISIQLAWSWVRWQPASALTQWYHQRFAGGGKRARRIGIVAVARKLVIALWRYATRGVLPTGAIVKVA

SEQ ID NO: 437145 - protein, 349 aa, unidentified
MVILGIDAHKRTHTVVAIDEAGRQLGTKTTMATTTEAHLELVRWADRFGTGRRWAVEDCRHLSRRLEADLLAAGEQIARVPPKMMAHARDSARTYGKSDPIDALAVARAALREPGLPTARLDGPSRELRLLVDHRDDLVRDRTAHINRLRWHLHELDPSWDPAPRTLVRYKHLDALTARLEGQDGMVARIARDLVARIRALTVEESSLRREIEARVRVLAPRLLETIGVAALTAAKIVAETADVRRFRSKDAFARHNGTAPLPVWSGNRTRHRLSRTGNRQLNASIHRIAVTQKRCHEDANAYLERRMANGNTKTEALRALKRRLSDVVYRALLADATSSTDVAVGEAA

SEQ ID NO: 437146 - protein, 349 aa, unidentified
MIVIGADVHKRSHTFVAVDDVGRKLGSTVVATTTAGHLTALRWAHDRFGHELLWAIEDCRNMSARLERDLLGAHQKVVRVTPRLMAEHRRTGRERGKSDPIDALAVARAAAREPDLPVASHDDVSYEAKALVDYRETLVRERTSKINRVLWRVHQLGPEYHIPRGGLTLNKHQNNLAAWLVDRPGIDARLARHEVAAIIALTAEIKQVTREITALARDAVPTLLAMPGCAELTAAKLLGESAGITRFGTEAQFARNAGVAPVPVWSANPGRHRLTRSGNRQLNAALHRIALTQARMPESLGHTYYQRKRDEGKTKREAMRCLKRRLARVVYNNLTLDHHNRTTPQQDAA

SEQ ID NO: 437147 - protein, 323 aa, unidentified
MQGQKSPERSARPGVYVGVDVCKDWLDVYLHPIGQKLRVSNTPEGLKALKRRLAELSVELIVMEATGKFHRQAHRTLHAAGFAVAVVNPLRARLFAEAVGQLAKTDRLDARVLALMGQTLEPSALAPAPEAVEALQELARARAAAKAEETALSNRRGASQTTFLKAELGRRLKVLAGHIERLEAEIERRIGADPALKRRYDIVVTIPGVGPVAAVALVIGLPELGTCSAKAAALLAGLAPLACDSGAKAGERHIWGGRAFVRTGLYFAAVAAARCNPQLRDDYNRLTDAGKKAKVATTAIMRKLVVLANTLIKEDRPWQPIHA

SEQ ID NO: 437148 - protein, 396 aa, unidentified
MTAIWAGIDAGKTHHHCVVIDDTGKRLLSRRVANDESELLKLLGDVLALDDEAVWGIDLADGGAALVIAILLNHGQQLLYIPGRVVNRASEGYRGDGKTDAKDAAVIADQARIRHDLTPLRAGDELVSELKVLTRHRRDLSDDRTRTINRLRGHLTEIFPGLERELDLGNIGPLVLLSGYQTPAAIRRTGRRRLATWLRNRKVRSPDELAGKAVQAAEGQHTAVPGEDITAHVVHSLAGEVMALNEKIAETDKLIEGRFRRHRNAEVIASMPGIGVLLGAEFLAATGGDMGAFAGPDRLASFAGVSPVPRDSGKVSGNLHRPTRYSRRLQRVFYTSALISIRCCDESRRFYDRKRAEGKRHSQAVMALARRRVNVLWALLRDGRCYDPTPPVTLAA

SEQ ID NO: 437149 - protein, 337 aa, unidentified
MNRNVVGLDIAKQVFHLFMMLDGKAIKRKLKRSELLAFIAQLPSSLIALEACGGSHHWARSFQALGHEVVLLNARYVKAFVVGNKNDFNDAEAIFTAARQPNKRTVAIKNMEQQDLTMVHGIRQGKVEERTALINQIRGHLAERGIVLPKSANQVRKQLPSILEDAENQLSTLSRSLFAEQYRALVAMDEAIKALDRQIDALCRQNTLSKRLVAIPGIGPLTATLAAADIGNGKGYASSRDYAASLGVVPRQHSSGDRQVLLGISKRGNRRLRTLLIHGARAVLKYCGDKSDPLSRWLQALIERRGFNKAAVALANKNARIIWALATREDEYAAQVA

SEQ ID NO: 437150 - protein, 386 aa, unidentified
MSRSSNIPLRAIDYDHTLVLAIELSSKSWVLAAQVPGFPQTKAQRTIEPNKNALWAAIDGYRARAAALGCTVDRLITTYEAGWSGFWLARWLVALGVEVHVVQPSSVPVDRRLRRAKSDGIDAELLLRTLLAWLRGEPRVCSMAPIPDEADEDARRSVRERTELLSDRVGLTNRIGAVLATLGVNDYNPLLQSRRRRLAELRTGFGEPIPPNALAKIERLLARLELVLAQIAELERERDEVAATDAPDRAGKMIQQLTSLRGIGVQSATVLVREAFVRHFSNGKALGSYAGLTSTPYSSGGIDREQGIGKAGNRRLRTVMVGLAWLWQRYQPGTAQAAWFRDRVGSTGRRIRKVMVVALARKLLIALWRFVIDGVMPEGAVLKPSI

SEQ ID NO: 437151 - protein, 344 aa, unidentified
MTEYKRIGIDTSKAVFTLHGIDHAERPALRLNLRRGQMIGFFRKLPPTEIAMEACGGTHHWARELTTLGHKVHLIPPQYVTPYVKRGKNDDNDAAATCEAGGRPGMHFVPVKSIEQQAQGMVLKVRETLVDQRTQLCNTVRGHAAEFGAVIGKGRGQVSALLTAVEQDTTIPREAKEMFVVLGHQIATLDARIKHIDGQLASAHKANPVSQRLATIPGVGPITALTLAIEIDPEVFASGRHLAAWAGLTPKEHSTGGKQRMGGISRAGNERLRVLLVSGAMAVINAAVRPGGRQMTEWLRALLARKPRKLVAVALANKMARIAWAMMKRGETYRRPSPVGAVAA

SEQ ID NO: 437152 - protein, 315 aa, unidentified
MAMPVSASRPIVGVDVAKNELVIYQAEPDLLETLPNDKPAIRKWLKGLPRPVDVAIESTNIYHLEFADLAHEAGCTIYMVGGYELSHYRKGVKVRAKTDALDARLLARYLKNEHEELRPWTPPSPLYRRLLSLFRRRAALVQARVGLVQSWANEPLLKTAFAEQVASMQRLEVLVEKMIDDQLKEAGLLALLRRCMKVEGIGFLTGARLIAAFQRGDFRSADAFIAFLGMDLRVSQSGQKDGRRSLTKRGDPEARRLLHNAAMSASRTAAWKGFYEEQRAKGFSTTQALVILARKLARIVFALLKGQSEYEPKAG

SEQ ID NO: 437153 - protein, 432 aa, unidentified
MRPNAGGIDLGATEIFVGVPADRDSDSVRSFPTFTEDLHQLADWLQRCRVDTVAMESTGVYWIPLFQILQARGIEVHLVNAQHVHHVPGRKSDVLDCQWLQYLHSVGLLRASFRPEQAVCEIRSLMRHRENLVEMSCVHVLHMHKSLDQMNLQIHHVISDITGVTGLAIVDAIVAGKTNPKELPKLRDHRIKASIETVTKSLVGDYRPEHIFTLKQSLTAYRYYQQLIADCDHEIQQRIEAFDSKDQGPTAPADATSTETSKESGFNLHSHLERIFGVDLTLMPGFECLRIQTILSELGADLSKSPTDDRFCSWLNLCPKDGSSAGRRIRAPRIKTKNRVAQTFRLAAQSLHNNQSYLGDYYRSQRARYGAPKAIKNTAHKLARIFYRLVTTRQPYDETVLAKLEMHNQKRRLHKLQSLAKQMGYSLVEAHA

SEQ ID NO: 437154 - protein, 413 aa, unidentified
MKLFVGIDGSSEKLDVCFLDSSDTTLKEVTLPNNINGASSIKEDVLQFHQSFNYEKIVIGMESTSIYSFHPATFLSEDLELKSLGLVEVVIQNPKSIHRYKGLFEEDKNDRIDAFRIADFLRIERFNKTVLKEERYVALQRLTRSRYQMVHQLTECKQHFLENLYYKCNTLSKELDTSVFGATMLDRLSDALTLDEMAEMELEDLANLLQEKGRGRFSDPQKLAKTIKKAIRDSYRLGKVVQESVDMVLATYARLIQTLKKQIKDLEKSIVALFEIVTEAQCLKSIPGIGIVYAAGIVAEIGQIERFENEAQLAKYCGLYWKKNQSGNFESERTPLTRTGNQYLRYYMVEAANSIRRHEDTYRLYYQKKYDEVPKFKHKRALVLTARKLVRLVDTLLRNHQLYTPERSVSLKS

SEQ ID NO: 437155 - protein, 353 aa, unidentified
MVIGDQARKEASMEKVSIIGLDLAKNSIQLHAADGNGAVLVRKKLPRNKVLPYLTALDPCIVAMEACASAHYWGREIEKLGHQVRLIAPIYVKPFVKRQKNDAADAEAICEAALRPTMRFVAVKSEAKQASAMIFKVRDLLIRQKTQMINALRGHMMEFGILAATGPAYVQGLIERLEDPTSDLPDVARLTCRPLTGILKALKEQIKLIDLEIARRAKTDDVAKRLMTIPGIGPVIATAIEALAPPHDSFVKGRDFSAWLGLTPRQNSTGGKTRLGGTSKMGQRDLRRLLIIGAASVVRWAARYGAPAGSWLSRMLGKKHPMLITVALANRIARIAWALITKGGVYVPAGAPV

SEQ ID NO: 437156 - protein, 383 aa, unidentified
MSELNDLSRSLTSLEQDKTIIAVIEMSQSSWLVAGIVPGIERHPLKKLEPSEEELVRLLMRWRTEATKNGQTITRIAVAFEAGRDGFWLARWLRARDIETYVIHPTSVAVSREHRRAKTDRLDTGLLKRVFIGWLRGEPDHCHMAAIPTLAEEDAKRPNREREGLVRERTRIVNRMKSCLARFGIRNFKPTLRKAPERLATLATPEGVPLPPNTLLELRRDMARLRFVMDQIKEVEEARAQRLEQAPQEKTHAMVRLIARVIGVGIETADMLVHEILSRQLRDRRAVARYAGLTGAPDESGNKRREKGLAKAGNARVRRGMIQLAWRFLVFQKDSALARWYRTRTESAGRKTMIVALARKLLIALWRLVTIGEVPAGVLLRAA

SEQ ID NO: 437157 - protein, 297 aa, unidentified
MLYVGLDLSRKRLDFHALAEDGELVDRGAVPADADGLARLVHRLGAHDRELSAVIESMNGARFVHDQLELAGFDVEIADAQRVKGLAPLACKTDRIDAWVLAELARRDLVPAIWLPQPDVRAERERARFRLHLVRQRTRLKNRIHATLIAHGHACPVSDLFGRKGRALLERLAIPEPWRGTLQASLRLIDSLDAEIDACERELRRLGADHRYIPLLMTCPGIGWVLAYTIAAELGDITRFPSPRKLTGYTGLCPRVDQSGEHDRRGPLTKNGPRYLRWAPVYAAQHACLSPRYRQLA

SEQ ID NO: 437158 - protein, 404 aa, unidentified
MWYVGLDWADTHHDVEVQDETGKRVGARRFAHSHDGLNELKAFLLGIAASPEELACIVETNHGLLITFLLEAGIPVYPVNPKSANQLRKAAGAKTDRIDAHLLAKLGRFDLAELRRVEPDILSVAELKTLTRDQDALIQTQTRLVNQLTACLKEYYPAALQLFAKVQQRSTLLFLQAYPTPQAALAASVEEITATLRTGKHTNPTKAAPKIVAELHRPQLLASEVIVRAKSRLMLALVKQLLVVIEEIASYDKAIRPLFLSHPDQELWSSLPRAGKRLAPRLLAEWGDDRSRYADGTSVQTLAGTAPVPYESGNYAKAHKRFACSKPLRNALQQFAWQSTLSEPWALAYYQRKRAQGKTHSMALRALANVWVRIIYRMWVNKTSYQTATFEAAQRTHAPRQRIA

SEQ ID NO: 437159 - protein, 417 aa, unidentified
MIAIGIDIGKGKHAAAVIDDAGRQLCRPAFYNNDREGAEKLVAALAKIAPPTEARIGMEATGNYWIPFHDLLVNAGYAVDVINPIVTSASISGDVRGRKSDKGDAEAIARVLLSGKAAPHARPDDVSRRLMALTRHRSFMVAQRADAKRHLQSLLDAVFPEFHALFDDMFCRFALELLRAHPTASSLARAHRPTLAKLVGKCCRGKDAAAEAERLVKAAKRSLGFGSEVSDAFGACIASAVECIGDLDRRIAGIEKLIDEAESPRVANVIAQIKGSGKLLPKVIAAEFGDVSRFEKSPKSGRTSGMYKRMLAFAGCEPRIRESGKWRGRVRMSKRGSGALRTALMQIAFTISQNDDFFKSIYEKHISAHQHHKVALSYVAAELLKVVCSLWKSNRAYTVQRPATQVINMPRSNVLEK

SEQ ID NO: 437160 - protein, 349 aa, unidentified
MEHVGMDLGKKESQVTILSEAGELIEKRMRTERERLVEYFKDRPRAKILMEASTISEWVARVLEELGHEVIVADPNYAPMYAQRSRRVKTDKRDALALAEACKLGAYRHAHRTSDEQRHVRAMLAVRESLVRVRARFLALVQALLSREGFRVAPGSSRCFAARVEKLELPEHLTAEVAPLLALLEPLNAQIELLDEKLGELARKDERVKRLMTMPEVGPVTAVAFVATLDDAKRFRGAHQVEAYLGLVPREWSSSEVQRRGHITKAGHSRMRWLLVEAAWRLATHKKRPETQPLRDWADRIARRRGKRIAIVALARKLSGVLYAMWRDGLPYDPAKLGNAQVAKTEHAA

SEQ ID NO: 437161 - protein, 356 aa, unidentified
MTITKYIGMDVHKESISIAVMNAAGKLVMECVIETKGSMLLQFIDGLRGDVHVTFEEGTWAAWLYDLLKPHVSEVVVCNPRKNALLKDGSKSDRIDARKLAELLRGNHLKPVYHGEQGLRTLKELARSYLNISKDVTRVMNRLKALYRSWGIACAGTKVYALRHRSEWLGKISEAGVRRRAEYCYQQLDALRLLHQQVRRDLLLESKKHQAWRLLGLIPGIGPIRAALLIALIQTPHRFRTKRQLWTYSGLGLETHDSAQYRVVEGQLQRSKKPVTLRGLNQDHNHDLKDIFKGAATRVSSSSGGPLHDFYEHLLAQGRKPTMAHLTLARKIAAITLIVWKKEVRFDASYLKSQAA

SEQ ID NO: 437162 - protein, 319 aa, unidentified
MSSQAIFVGLDVGKATLDVAVRPTGECWQVPNDEAGGAELTARMRGLKPALLVCEATGGFERSVVAALAAAGVPIVVANPRQVRDFAKSTGQLAKTDRLDAGILALFAERVRPTPRPLEDAATQLLDALLTRRRQVLEMLVAEKNRLGFAPRPLHRGIRQHIRWLERQLDDVTGEVARMIEASPVWRAKDDLLQSAPGVGPVVSATLLGELPELGTLTHKQVAALVGIAPLARDSGQWRGKRMVYGGRASVRTALFLAALCGRRWNPQLKVFYERLIATGKPKKVALIACARKLLTILNAMVRDNAAWRAPDLTAQHSC

SEQ ID NO: 437163 - protein, 374 aa, unidentified
MLHEWVAQLQERFGGGKIAVALEQRKGAVIHALLMYDCFVLYPINPKALARYREAFSTSGAKDDPLDSELLLDLVVRHRDKLRAWVPDTVESRTLQALCEQRRKLVNQRVALTNRLTSLLKQYFPQALEWVGDLASVQACDFLTQWPTLAAVQRVRPSTIRQFYRAHNCRKADVIEARLAAIASARPLTTDAAVVEPLSLSVQTYATQLRTVIESIQIFDARIAAVFAAHDDHDVFTSFPGAGDVGAPRLAAAFGTDRARWNSAAELQAHSGIAPVTERSGKTVWVHHRLACPKFVKQTFHEFADQSIRFSKWARAYYDQQRARGNDHHAALRALAYKWIRILCRCWKERRPYDEERYIEALRRRGSPLAKNFA

SEQ ID NO: 437164 - protein, 402 aa, unidentified
MLHDHLKHPTAIRVQFGAIFVSLELSRKTWLITSLSPGKGEKMSKHSVTAGDIAGLLARFSELQRKAAVRTGKSFPLIVIQEAGLDGFWVHRVLQQEGIESHVVDPASIAIPRRRRRAKTDKIDGEALLRALLAYKRGEPRVCSMVVAPSPEEEDQRRLCRERDTLTAERVRHVNRIKGLLFAQGIADYMPLSRNRRKRLDELCTGDGRPLPQYVKAQISRELDRLELVLEQIKVVEKERDRVLLSLAPVVVSMGPEAVCDQPRRASGVRMLTALRGFAADGATKLWSEGLSRHFSNRRQVAAYAGLAPTPWQSGGISHEQGVSKAGNPRLRTTMVQIAWLWLRHQPQSALARWYFARVGVGATKARKKVAITALARKLLVALWKYVSAGELIEGAIMKPVA

SEQ ID NO: 437165 - protein, 450 aa, unidentified
MSSRPQVIDDQEHERVHDRVAAVDVAKDSGVVCTRTPHPSRPGARRATVWTVKARMGAVRALGRQLSRDGIEIVTLESTSDYWRIWFFVLEACGLAVQLVHAAQAKNLPGRPKTDKLDAMWLARLTELGLLRASFVPPKAIRDLRDYTRARTRLVQERTRCWQRLEKLLEAALVKVSAVASKLTTVSAQDMIKAMIAGQRDPQVLAALARGRMKAKHEDLVQALDGMFDDHHGELAGLLLDQIAFLDHRIEVLGARAAELTAAMPAAWGVEPDGTTGPHAGATAGSPVLNAVARLAEIPGVSENLARSIIAETGLDMARFPTAAHLVSWAGLCPSARQSGPRTRPGKKGQGDTWLRGSLGQAAVGASRTATFLGERYSRIARRRGKARAQVAVARSILVIIWHLLSNPAARFTDLGYGYYQARLDTDRRLKNHIRQIQALGFAVTITKAA

SEQ ID NO: 437166 - protein, 364 aa, unidentified
MNPGPDSRLTSIVKVIRLSSSPFFPVRLEDKSMENFYFIGVDVSKKKLDFCVMFEGKVVHEEETANHQSSIMALLHQLEENYGIAGGQMLVCAEHTGQYTFPLACACKTVECRLWLENAAEIKYSSGVQRGKNDKVDAKRIAIYASRFQDKIQCYERPTEDIERLKQLESERTLYVTDLAKYKGQMKDQKDYMPKALYERKMKRLQALMDDLEEAIQAITDEMDEVIASCSVLSRQKELLMSIDGVGRVVATNMIITTEAFTRFDDPRKFNCYAGVAPFSYSSGSSLHSKARVSHRADKVMKKLLHLAAVAVTHRIGGELKKYYERKVAEGKNKMSVINALRAKIVARMFAVIKRNEKYKPILS

SEQ ID NO: 437167 - protein, 457 aa, unidentified
MPAITPCMSVFVAEVARPTLVFRGLLGRAEPILTTGGRAVADYREAFVGIDVAKLKYAIAIAESGRDGEVRYFGEVEASDASMRRIIQRIAAKFDRVHFCYEAGPTGYGLHRLIKSLGHDCMVVAPSLIPRKPGDRVKTNRRDALALARLLRAGELTAVWVPDEGHEAMRDLVRARSAAVETLRVHRQQVSAFMLKHGRVYPRKKGWTMRYLHWLQEQWFDHPAHQIALQEMVEAVRISKERVERLEKVMEEFVPNWSLGPVVRALQTLRGVDLIVAVTFATEVGDVTRFESPRQLMGYLGLVPGERSTGETARRGAITKAGNGRVRHMLVESAWTYRHPPKLGVRKLYHLQGAPPAVREIAWKAQSRLTARYRLLAARGKRTTVVCTAIARELAGFMWVQGRRRRSDRRSPPPTCTSRMGGGGPTAGEYPSDALWPVLTDARSKIGTAPDAQSGMW

SEQ ID NO: 437168 - protein, 340 aa, unidentified
MRVVGVDTHKATLAACALDERGGVVAERTFPNEPEGFEQLRAWLTERAVERVGLEGSAGFGAAAARFLLAAGVAAVEVPPQLSYRERLRTRRAGKSDPGDALAIARVTLREPELPPVRLPDASRELHLLVEARDDLAAEMTRVRNRLHADLVVLSPGYTAVAANLVAEKHRRTVGRLLRPLRGVQAELARERLGRLAKLAAELRSLDCRIEARVAGHPLLALPGVGPLVTAKLVGEVGDVRRFRSADAFAMLAGVAPIPASSGQTRRMRLNRGGNRQLNRALHGIALAQVRSHPPAQAFVARKRAEGKSWREALRALKRHLARIVFRILSASAQPSVSGS

SEQ ID NO: 437169 - protein, 418 aa, unidentified
MKLFVGLDVSSEKLDCCFLSDDEHLSILFEASLTNDINGATEIKEKILELHQDWQFSQIVIGMESTSMYSFHPAMFFNEDLALRKLPTVVTIENPFRIKQFSRMFDEDKTDKNDAMRIADFLRIQRFTTSPIKEEKYMALQRLTRTRYQLIGQLVEAKQHFLENLTYKCNTLTRELKNSAGSTSVFGSTLLSLLTDDYTLDDLALMPIEDFATLLQSLGSGRFKNPNELAKSIKKAIKGSYRLGQVAQDSIDAILSVLARQIKGIEKSIKELDRVIEQLVVVLPEYQCLTSIPGIGKVYAAGIIAEIGQIERFDDQTKLAKYAGLSWKIKQSGNYQSENTPITKQGNRYFRYYLVEAANSVRRYLPDYAEFYKKKYQETPKHQHKRAIVLTARKFVRLVDTLLRNHQLYTPPRSVIDK

SEQ ID NO: 437170 - protein, 396 aa, unidentified
MYYVGIDVSKRHHDATVIDATGQVVIAPFRFFNTRQGVTTLLTRLQTLDAQVRIAMEATGHYWLPLYEALTTQGYSVSVFNPFQIKAYRQIGLRQTKTDAVDSLWIADFLRIDRSQPMVIPAPPVRQMRELARFRFTLLQRQANIRRRALTILDRVFPEHLSLFSRPFSPSSRALLRQAVTADAFATWPLEDLAQVLPQASRGHFGLQKARQLQDLAHDSLGIRSLGPVAHQEMQLLLDQLTLLDDQIATLDEELDRLLQQTGSYLTTIPGISTTLAATILGEIGDIHRFANLKQLVAYAGLDPTVHQSGQFQASHSRLSKRGSVYLRRAVWMAAFVARRYDPDLKALYQRKRLQRKHHNVVMGAVCHRLLARIYVILKEQRPYEVRHPATKGSSA

SEQ ID NO: 437171 - protein, 464 aa, unidentified
MPRRPQHTSRSPRIPKLETLGIVYSNAAGLDIGSREIWACVPADRDPHAVRPFPTFTPDLERLVAWLKACQIDTVAMESTGVYWIPIFELLEAHGIRAALIEPRQLKRVPGRKSDVTDCQWIQKLHALGLLSASFRPDAQIRSLRTLLRHRAEIIQHRAPHILHMQKALQQMNLQLHHVLTDITGVTGLKILRAIVAGQRDPAILATYRDPACKASLDTIHKALTGTWIPEHLFTLQQSLELFDFFSLKLAECDAFIETQYAALRPRWDSDQPLKLPAAKRNSHSKNAPPPSTRAHLARLIGVDLVAVDGFSASLVQTILSEIGTDMSPFPNVKHFTSWLALSPHNEISGGKVLSSRVLPTHSRANQAFRQAAASVTRSDCAFGAFYRRKQVQLGPTGALVATAHRMARTVYFMLKHHVAYVDLGAQAYNQQHRQRELAYLTKKAARLGFTLTPAMPTAPSPNT

SEQ ID NO: 437172 - protein, 322 aa, unidentified
MTSASQTPTSYVGIDVSKDKLDMAVEGSADIHTFANDAAGITQLIGRLRQLHLSLIVVEATGGYERAVLNAALDAALPIARVQPSRVRHFAKAQGLLAKSDGIDAHLLALYARCLQPAVSEKRSKNEVELDALLALRRQLIDARTAHTSQMQMAESDFVRDQLKQLLRQIHDRIKKVDKHIARLIDSDDDLAGRRDLLLSVPGVGQTTAATLAAQLPELGKIDRCQISALVGVAPYDRDSGHFKGKRSIFAGRATVRSVLYMATITAIRCNPVIQRFAERLQKAGKMPKVVITACMRKLLTILNAMARDGLTWSPQCHLQTT

SEQ ID NO: 437173 - protein, 411 aa, unidentified
METLIRRCAGLDVHKASVVACVRVIDENGELLSFTQSFGTTVSDLLKLNDWLASYAVTLVGMESTGVYWKPVYTLLEAEFECWLLNAQHLRNVPGRKTDVADAAWIAQLVAHGLVRPSFVPPKEIRELREVTRYRKAVIQERSREAQRLHKTLEGSGIKLSCVATDILGVSGRDMLQGLIAGTHDPDVLADLARGRLRKKLPALREALTGWFSPTHRILVSELLAHIEYLDESIERLSGDVAKMIAPFAAAIDLLDTIPGVDRRNAEVILSEIGPDMSRFPSSGNLASWAAMCPGNNESAGKRFSGKTRKGSKWLRVALVESAQAAAHTKGTYLAAQYARIKGRHGHKKAIVAVAHSILVIAYHVLQRGQPYNELGGDYFIERQNKDAYQRRLVKQLERMGYEVALTTHAA

SEQ ID NO: 437174 - protein, 352 aa, unidentified
MGERWSPHLPHLTRTVARNLRFRIYKAEKLGTLIMTNVSYTFNIGIDISKKKLDVSFSDNKTACYDNDLNGFKQLLKQISDKGRTRVAMEATGGYERSLVQFLQEKGIAVSVVNAKRVRDYAKALGKLAKTDKIDSHVIRLFTEAINPNVTEQLSESQQSLDSLTSRRNQLVKQRAIEKQHLETVINKETKRSINRTIKFLDKEIGIIEEKINKLIDLDSNLKEKVNRLTTIKGIGPVVAVTIVSDIPELGALSNKEISALVGVAPFCRDSGGMRGKRTIWGGRSQVRSVLYMATLSAVKYNPAIKVFYERLVNKGKPKKTALVACMRKLIIVANSMIRNNMEWNPHHGELA

SEQ ID NO: 437175 - protein, 313 aa, unidentified
MIIPLRCVGIDVSKQYLDIFDEGLGVPERIANATQAITQIAARWRCDVLVVFEATGVYDLELREALSEAGIRFARINPARARDFARASGQLAKTDPIDARMLAAFARAMQPATEPTANPARNALAGLAKRRDQLVRMRAQEKNRRSETDDRAMAERIGRLIEVLDGEIAEIEADIRGLIKAEREIADDARLMRSLPGVGPVACMQLIAKMPELGHVGAKQIAALAGLAPFNVDSGAFRGKRKIAGGRKRVREALYMAALNAVRRADPFKAFYARLRRAGKPAKRALIAVARKLLTVLNAMMRDRKPYLKANPT

SEQ ID NO: 437176 - protein, 346 aa, unidentified
MQYCGFDLAKVSSQVCIRTADGQFVERRLKTTREELTKFFAERPPTRILLEAATESEWVARHLEGLGHEVVVADPNFAPMYATLSKKVKTDKRDARALCDACEKGNYRRAYRSTDSQREVRARLISRETLVQTRTKYISVVRAMLRREGVRVQSCAAGYFRQHVEAMSLPAHLRSGIDPLLEVLRVLDEQISQADKKLDEIAESEPLIKRLCLIPSIGPVTSITFVAILGECSRFSSAKQVRAYLGLVPKEDSSGERKLRGHITKAGNSRMRSLLVEVGWSILASKKTEVQGLKQWALAVAARRGKRVAVVALARKLAGILYALWRDGTQFDPSRMQVDSAAAPVS

SEQ ID NO: 437177 - protein, 375 aa, unidentified
MIATTRPEMSVSEPTLYVAFELGKKEWKLAMTSGFAVAPWLRSVGSGDWRGLERALAQGRVRFGLPATARVVSCYEAGRDGFWIHRALEARGIRNRVVDSASIEVNRRARRAKTDRLDALKLVRMLVRVCYGEKKVWSEVHVPSVAAEAARQVSRERTALTQDQTRLINQMRGWLATWGATLPSRRARGWWTTVRDWAGAPLPVAVHARLARAEARLAVLEGQIAALEGQQQAAVTAAPRASAVRQLVQLKGIATTSASVLLDEGLVWRAFRNRRQIGGLLGFAPTPYDSGEVTREQGISRAGNKRLQTISIQLAWNWVRWQPLSALTQWYREHFGTGKRARRIGIVAVARKLVIALWRYVTTGAVPAGAILKVA

SEQ ID NO: 437178 - protein, 336 aa, unidentified
MEVVRKVLGIDVSKSKLDVALLVNGKLKSKVVPNTPDGHQVLLEWIAKQKVANADLHICMEATGVYHEAVAMTLHAAEFKVSVVNPACIKGFGHGVNIRNKNDEIDAALIAHYCLAMTPEPWTPPPMEQRELRAWTLRVQALKDIRQQESNRLEAHEVSGMQDVAAHVTEHIEWLDAEIKKLEKEIDDHIDRHPDLKEDAKLICSIPGIGMTTAARVLGHLGNIRRFDSAKAFAAFLGVTPRQRTSGSSVRGRTVMSKTGNSALRAALFMPSMVAKQHNPILKAFAKRLLENGMAKKAVIGAVTHKLTHLIYGVIKTGKPFDANYSQKGLAIQDGI

SEQ ID NO: 437179 - protein, 344 aa, unidentified
MKITTLGIDLAKNVFQIHGVDALGKVIVKKQLKRDQLAAYLVNLPPCLIGMEACGGAHHWARKLMGFGHTVRLMAPQFVKPYVKTNKNDAADAEAICEAVARPNMRFVPIKDVGQQSVLSLHRVRQGFVGARTAQANQIRGLLAEFGVIVPQGIAHLYTRVPELIEDASNEMTGSFRLLIQRLLDHLKELDKQVDEMEAQIVQWHKHSQASLKLAAVPGIGPITASALVASLGDAKNFENGRQVSAWLGLVPKQHSSGGKEKLLKISKRGDTYLRTLLIHGARSVLYREQSKADSCSWVKGVATRRHHNIAAVALANKNARIVWALLTREKGFDAKHVSLRVAA

SEQ ID NO: 437180 - protein, 348 aa, unidentified
MRCYTGQHRFYAGVDLHARSMFTHVLDHQGKTVFEKDLPAEPEFFLDAVKPFRDGLVVGAECMFAWYWLADLCEDHAIPFVLGHALYMRMIHGGKAKTDRIDAAKLASMLRGGLFPMAYVYPRAKRQTRDLLRRRSFFVRQRAQLITHIMNTNTQFNLPPLSKKLTYAANRSPQIAERFEHPSTRLSITADLGLIDAYDQQIADLERHLVQNAKVDDPVTFGLLRTVPGIGPILGLILLYEIDTITRFPEAGNFLSYSRLVRCAHVSAGKVKGSGGKKIGNAHLKWAFSEAACLMLRALPAAKAWMQRQERKRGKKKALSILEAKLGRTAYHLWRKQVPFDAKRFLAS

SEQ ID NO: 437181 - protein, 366 aa, unidentified
MKKISTVAKHGNEIFKEPKLTIGLDLGDRTSRYCILNETGEVILEQSLPTTPKGIQQVFSRVPRSRIALETGTHSPWVSRQLTQMGHEVIVAHARNVRLIGESSRKDDQLDARTLARLARIDPGLLCPVRHRSAKAQIHLTVIRARAALVTTRTALVNAARGLTKSYGERLRKCGTGQMNREIAKGLSQELRDALEPLLQEIESLNERIAEYDRRIEQIAKEVYPEVALLKQVKGVGTLIALTYILTLDDPYRFRRSRDAGCFLGLRPGRRNSGMSEPQMHISKEGDRYLRTLIVQGAHYILGPFGEDSDLRRWGLKLAERGGKNAKKRAVIAVARKLAVLLHKLWVSGEVYEPLRNNHKVASAVA

SEQ ID NO: 437182 - protein, 341 aa, unidentified
MNHKFTQKKYFIGVDISKDTLDLAESKEDTYGSYKDLMVDNNFDGFDKVETWLTKQKINLKDCLFCMEHTGTYGLLFFAWLDQMQIDYCVEAGTQIKKSIGMTRGKNDKVDARRICDYAYTNRMKLKQFQLPSAVILQIKQLLTYRRQLIKIRTSLKNSLQSHNQYQKVSGLKSVSEQIRVQIKDYNIRVDQIEEQITDVINSNEELKKNYQLAKSVKGIGPIITAFMIVTTNNFTCFENGRKYACYSGIAPFDNVSGTSIKGKSKVSHLANKGIKTLLTNGANSACVWDPEIKNYYNKKIAEGKDHKLIINSIRFKLVNRVFAVVKRQTPYVNIYKQNFS

SEQ ID NO: 437183 - protein, 424 aa, unidentified
MNYTQNQKIEQVTESTLVLGVDIGSSEHYVRAFDYRGRELTRKVFRFSTDINGFNSFYDWVTQICIKHGKNEAMIGCEPTGHYWYTFYQFVKDHGMKLAFVNPASVKKAKELDDNSPKKTDLKDPKTIAKLVIDGRYSFPYVPEGIYAEIREVTSSRDRIMKELNAASNRIQRWLKIYFPEYLTVYKKFDTTTGMMILEEVPLPTMVTALGVDNIIKIWREHKVRGKGASFNRAKTLVDAAHDSVGKSGGQGAVMEIQMLLEDYKVKKQQLEMVTSVMEELIMQIPNAEKMLSVDGVGLVTVAGFISEVGDISRFKNPKQIQKYAGFELVENSSGKHKGRTTISKRGRKKLRKIIYQVVLPLIQSNKEFRSIYDYYRKRIKNPLKGRQAMIAVGCKLIRVFFAIMTKGVAYNGSNRPTQLPQAA

SEQ ID NO: 437184 - protein, 385 aa, unidentified
MKKHSTAKKNQKMVSKTYRNRIRKMATRQRLTIGLDLGDRTSHYCVLDEAGEVVSEGQLPTTKTGLNSLFEKMPSSRVAMEVGTHSPWASLHIASLGHEVIVANPHKVKLITQNVKKNDRMDARQLARLARADPKLLSPIRHRGVQAQTDLAVIRARAELMEARTALINSARGLAKPMGERLKKCDADQVKEGLADGLGEAVRAVIGPLLKSVEAISEQICEYDQKIEAIAKRYPETELLTQVYGVGTLIALTYMLTIEDAQRFEHSRDVGPYLGLTRKQRDSGDREPELGISKTGDRLLRSLLVQGAHCILRQGAPDSDLKAWGLAKLDHSGKKGNKKRKKRAVVAVARKLAVLLHRLWVGGEVYDPLYNRKAAAAMKAKGKAA

SEQ ID NO: 437185 - protein, 366 aa, unidentified
MSQDSTLYVGLDVHKDSITVAYATGLDDVELFGKIGTTQTALDRLCKRLQSKARHVHVVYEAGPCGYGLHRRLIEKGFDSMVCAPSLIPRKPGDRVKTDRRDAFKLVRSLRAGDLSAVHVPTVEDEAFRDLARAWSSARDDLKQARQRLKSFLLSHGVQYSGRANWGPAHRRWLSTLSFDSAWQQLAFNEHRRTIEDRLAQCDRLEAALHEAVPAWRFYPVVLALQAMRGIQFTSAVGLISELGDLSRFAHPRQLMAWLGVTPSEHSSGGKRRQGSITKAGNSYARKLLVESAWSYQHPARVSKDIQSRQEGIPKPIVDRAWDAQLRLCGRYRRLVARGKSRQVAIIAVARELAAFIWDIGRMAMS

SEQ ID NO: 437186 - protein, 413 aa, unidentified
MEVLVDRCAGLDVHKKTVVACVRTPGTGRQKRVSEVRTFGTFEHQLVELREWLIECGVTEVAMEATGVYWKPVWHVLDDGQPFELLLVNPAHIKNVPGRKTDVNDATWIGQLLECGLLRGSFVPPVEIRELREVTRYRRQLTEERARETQRLQKVLEDANVKLSSVASDVLGVTGRMILDALCAGERDPDVLADMAQRKLRAKIGDLRQCVPGRFNHHHAVMVGEIIAHVDYLTATIGRLDARVEEMMTPFRAARELLTTIPGIQQRGAEIILAEIGVDMGRFATPGHLASWAGVCPGNNESAGKHRSTHTRHGDLWLQSALVEAAWAAIRTKNSYLGVRFWRIARRRGQQRAAMAIAHTLLIIIWHMLNDGTIYTEIGVDYLIRNDNPDRRRRHLIKQLQQLGYQVELSPAA

SEQ ID NO: 437187 - protein, 416 aa, unidentified
MTFKVVRFICGGMDVHKNLIVATIGTTDRQTLITEYIQQSFSTFYSDLIRLKEWFISHDCYDVCMESTGKYWIPIYNVLETELNICLTHPKYVKAIKGKKTDKRDSKWICDLYKCDLVKHSFIPKKEIREMREIARYRCKLVYMRSSERNRYQNCLTVSNISLASVVSDPFGKTATNIMKELMQSEVIEDDKILKLIHKNCKDKDKILDSLHGYHIESDQRFKMDTVMNHIEYLDKQIQACEAELIKRAYPLRDYFQHITHIKGISALSAILIVSEIGTDMNQFESDKQLVNWAGLSPANNESANKKKSVRISKAGQYLKPLLVQCALSSIKDKNSYFGIKYCRIKKRRGHKKAIIAIARMMLVCIYHMILTGEEFNPCDYESLTNPKPKKEPIMTVESALQFLKDSNFDFSSIQL

SEQ ID NO: 437188 - protein, 521 aa, unidentified
MLQLITILNFYEGSLTPEDENVRQLWTGAIIEALGKVETVIGGQSRILNWPCRRDGTPDWCGASRPWSKIVEHEPVGEPRPKEVCMIPAVLTHCAGIDIGKRGLAVCLMVGAAEAEPKVEVREFSTFTADIEAMKAWLVQAGCTHVVMESTGSYWKPVFNILEGSLVVCLANSEDVKGRKGHKTDRKDAKWLAHLLRHDMIRASFIPPRAIRELRDLTRRRKQLLGDATSERNRVQKTLEDANVKLGSVLSDVFGVSGQRMLEALLEGRGSAQEIADMARHKARQKIPQIIESLAGHRFSEHHRLMIRMSLEHLRMLEGQIIALDEEVVQRVQSLGLERMLNLLAAIPGLGHDSAATILAEVGPDMKQFPTAKQLSSWAGVCPGNKKSAGKNFSGHTTRGNRWLRSTLTECAWAVSRSKKSALRDKFWRWAAGGKKKAVVAVAHGLLLQVYQVLQTQQPLAQAPSPPMDEQRRKRIVRHHLRCLGRLGVSTGPKRISADGVAAKPGRPPSKVKTNKPEACS

SEQ ID NO: 437189 - protein, 390 aa, unidentified
MAKKRISDDSAGFTVLTEMLAAAGDSFDDAIPIAIETPRGLLVAALRATGRPVFAINPLAVARYRERHSVAGAKSDHADAMTLANILRVDSHLHRRMPADSELAQAIAVLARAQQDAVWRRSKASNELRSMLREYYPAFLDTFAGKSATNLAKPEARAVLAIAPTPAHAAKLIKTRVAAALRRAGRKRGIDGLAVNILEHLQAPQLRQPELVEKAMGRQALALLAMLDAACTGADELAQTAAEEFRKHPDYAVITSFPGLADLTGARVLAEIGDDRDRFADDRALKAYAGSAPITRASGKVTSITHRRIKNDRLAAVGWVWATYAYINPGPAQDHYRRRRDHGDRHAAALRHLFNKMLGQLHHCLQTRQTFDPIKAFGQPRTAPREPAAA

SEQ ID NO: 437190 - protein, 424 aa, unidentified
MKNCNKQNEKIELVDEKTLVIGIDVGSYDEYARAFTCRKQELSKKPLHFHNTAEGFKTFKYWAVNIMKTNGLEKIIVGMEPTSIYWEALATYCKDNGMILVHVNPAAVHKSKELDDNDPSKNDRKDPKVIAGLVTDGRYSFPYMPEEEYAQLRELSNLRIRTQESLTQCKNRLARWYSRYFPEFKEAYKNVVSKTAMIIMDMYPLPEDIVTLGVEGILQIWRNKKIRAAGESRAKKLYEAAKNSIGRKEAATVARLEFQSIKEDLDRYQERLEAIDKEVDEILPKIKNADKLFGIKGVGKATVLTFLSEVGDISRFENPKEIQKLAGYAIVTNDSCKHQGEKRISYRGRKRLRWALYQTALSVIGKNEEFRQIHQYYTTRKKNPLKGIQSVVAVACKMIRIFYKILTDGVSYDGTKMTQDIVRV

SEQ ID NO: 437191 - protein, 335 aa, unidentified
MLYVGVDAHKSTSQITVMNEAGAILSRKRVHSTREGFKEALAGYDEPLKAVLEASYSWGPMYDWLDDVSEEVLLAHPLKVRAIASARIKNDRIDSEVLAHLLRANLIPAAHAPSREIRALRRVLRQRMFFVQLRTMLRNRIRALLAQHSVRLPENEQIYTKQGRAWLAKVTLPDSDAHLLRGDCELHDNIEVQIESTNALIKKLAAQDPAVKWLISLPGIGSFLSVLIRWETDDINRFPDAKHFVSYTGLAPSTYASSSRLVHGSLTKQGNKWLRWAFIEAVTPAVRSSQFIQDHYMKVKSRRGTNDARCSTARKLAEITYTVWSEQRCWEETRS

SEQ ID NO: 437192 - protein, 410 aa, unidentified
MSESPYAFYVGVDWASETHQFTVLTPERHLEAERRIEHTGRALSEMADWLTALADGEPARIAVAIEVPRGPVVETLLERGFHVFAINPKQLDRFRDRHSPAGAKDDRRDGFVLADSLRTDRPAFRQVHVDDPLLIQLRELSRAEEELQTELRRLSNRLWEQLQRFYPQVLRLSPAVDEPWIWALLQLAPTPVAARALRRATLARLLARHRIRRVTAETVLAELHSPALRVAPGTTEAAREHIALLLPRLQLLHEQRGRCARRIEQLLDALEGSDAEHRDVTVLRSLPGVGRVIAATMLAEAARPLAERDYHAVRTQGGVAPITRQSGKSVLVRMRYACNHRLRNALYHWGRVSAQHDPSTRRHYRALRQRGHGHARAIRGVIDRLLVVLMAMLRTGTTYDPARRRVPAAA

SEQ ID NO: 437193 - protein, 344 aa, unidentified
MGEVITIGLDIAKSVFQAHGVDEAGAVVIRKRVSRAKLLEFFAKLQPCLVGIEACPAAHHWGRELQALGRTVKLMPPSYVKAYLKRSKNDANDAAAICEAATRPSMRFVPIETKEQQAALMLHRARQLLVRQRTMLSNSIRGHLAELGIVSAKGRKGTGALLEIIADAEDGRVPQAARGILDVLARQYSALGAEIGSIDRSIAAWHRSCEASRRLEEIPGIGPIVATALVAEIGDWKAFGSGRNLAAWIGLVPKQQSSGGKDKLGSITKQGNRYLRWLLVAGAMAVIRYAQKHGTLKRPWLGRLMERRPTKLAAVALANKMARMAWAIIVHGDRYREPKPLLAA

SEQ ID NO: 437194 - protein, 463 aa, unidentified
MRKKVQSKNSGRTDKPKVDWKALDIVHPNAAGIDIGGSEHWVSINPELDEKPVRCFQCFTEDLQQMADWLIGRRVRSVAMQSTGVYWIPVFEILQQRGLEVYLVNARHTKNLPGRKSDIAECQWLLKLHTFGLLNNSFQPSDEVRRARTLWRHRGGLVAQASSTIQRMQKALTEMNIQLSNVLSDLSGVSGMRIVRAILDGQRDPKTLAALADPQVKASKQVIAKSLEGNWRQELLFVLGQEVEMYCMYQDRIGACDRELQQQLRVRASKVDLQAQPLGPRPKGKRARGNAPKFDLRTELYRISGVDWTQVDGIDVQVAQSVIAEVGVDLEAFPSERNFASWLGLCPTNDSSGGRVLNRRTPKVVNRAKVAFRQAASSLIRSQSYLGAQFRRLRTRLGAPKAITAMARKLACLFYRLLKQGKQYVDKGALYYYRHHREQQVRFLIKRAKQLGLEVVAPATTNA

SEQ ID NO: 437195 - protein, 349 aa, unidentified
MRFYTQQHKYYCGIDLHARRMYICLLDANGEILVHRNGPATPEHFLAVIAAYREDVVVAVECMFTWYWLADLCARETIPFVLGHALYMKAIHGGKAKNDKIDAHKIAALLRGGLIPMAYVYPPAMRATRDLLRRRCHFMQKRAELLAHIQNTASQYNLEPLGKKIAYKANRAGVAEHFPVPEVRQSIAMNLALIDHYDALLTDIELAIVRTAKVDDPHAFHRLRTVPGIGKILALVILYEIHDIGRFAQVGNFASYSRLVKCEQNSDGKRYGYGGKKIGNAHLKWAFSEAATLFLRHNALGQAYCSRLAQKHGQAKALSILAHKLGRIVYLMLERKEAFDLKKFVGTAA

SEQ ID NO: 437196 - protein, 369 aa, unidentified
MKTQTQTPSVVSNNTSAALVSGFTIGLDLGDRSHYVCVLDAASQIIHEGPMLNERVALALLLVKYPGATVALEAGTHSPWISRYLTGLGATVIVANPRKLHAITRHERKCDQRDAVMLARLARADAALLHPIQHGSAQAQHDLLGLKLRDSLVRTRVNLINTVRFTLKSLGHVVSNPSSESFHKNIVTAVPADCLPVVQPVLAVLALITEQIKTLERDLVARSKRDYPVTQRLQQIAGVGPLTALCFVLKIGDPTRFGRSRDVGPYLGLCPGRDQSGGTDKQLRISKCGDGLLRRLLVSAAHYILGPFGPACALRAYGQHLIGTSIREKKRAVVAVARKLAVLLLSLWKHGTDYEPRVPAMPVLVMIPA

SEQ ID NO: 437197 - protein, 321 aa, unidentified
MQFIGIDAAKATFDIALPLSHGKYRTKAKLPNTPKGFDELLAWRAKHAPNAAVGMEATGIYHEALAQALVEAGVVVHVANPARVKAFGQAEGMRTKTDRSDAKLIARFFEAQRSEKLYPYVPPTPSEVKLRALVRRRDDLQEMLQMEHNRLDVADISVQQGIKDVIRTLEEQIKQVQKAIEDHIDNDPDLRRRHQLLTSIPGVGNTSSAQLLAILGDLSKYSDVRQVVAHAGLNPAQRQSGNYEGKCRISRVGDANFRKKLYMPALTGKTHNPTLKSFADRLSAKGKPFKVVMCAVMRKLIHLIWGVLRSGRPFEPDVALA

SEQ ID NO: 437198 - protein, 380 aa, unidentified
MKTHDKFVGLDVHKDTIVIAVADTGRDGEVRSYGTISSDLHALERALDKLRADGATLHVAYEAGPTGFVIYRHLQKMGIDCLVVAPSKMPVPGGKRQKTDRRDADLLARLLRAGELTGINIPDAVDEAIRDLTRTRSDAVDDLRRTKQRLKSFLLRQGYHYHGTADWSDKHLRYLRGLALPLPAHRSVLEEYLLAFDQCVSRVARLDDLLAAQVPKWRMYPAVQALMTLRGFQLIAATVLVAEIGDIRRFDHPRHLMAYLGLIPHERTTGVSRRLGGITKAGNVHARWMLVETVQSALRSPKVSKELTERQEGQPADRKELSWKTQCRLHKRGWALINRGKLKPKVTVALAREMAGFVWAMLQLVPAPTPPPDGPVLRRA

SEQ ID NO: 437199 - protein, 462 aa, unidentified
MEELFEDCHDVEVVYQRCCGLDVHKKMIVACLIIVAADGKRRKQIRTFGTTTAALLELLDWLKAAGCTHVGMEATGVYWKPIYNLLEGHFELVVANARHIKAVPGHKTDVKDAQWIASLLQHGLLKASFVPSTEQRELRELTRYRTTLVEERARIVNRLQKTLEDTNLKLGDVVSDITGKSAQAILRGLLAGETDPKVLADLARGRLKAKKALVGTIKPHHQFLLREHLDHIHQLDQSIGRVGAEIEARMGPLLPPEPEEASGKQPEAEQAPSDEQTQAEQTSSEKQTQPANQEPLSLAQAVVLLCSIPGISQRAAEGILAEIGVNMDRFASAKHLASWAGMCPGNHESAGKRTSGRTNKGSPWLRKLLVQVALAAGRTKNTYLSAQYGRLAARRGKKRATIALGHTILVIIFHVLRDQKPYEELGSNFFDQRERLAVEKRLVQRLEKLGYDVSLQPAAHAA

SEQ ID NO: 437200 - protein, 354 aa, unidentified
MSNDKFVGLDVHAATTTYAVLDDKGKLVMQGVVETTREHLLSLVKGFSGMIELTFEEGTQADWLYQMLEPHVAKLVVCNPRKNKRREENKNDRIDAIQLARWLRSGDLSPVYHRDHGTRTLKELVRGYENAVDDSTRSKNRLKAIYRSRGLLTPGRDVYNPEETEEWLSKLNSVGLRTRAEWLYTQIESLDALVKAANQAVEREARKHRGCKLLRSVPGIGWIRSATIVGHVRDPRRFRTKRQFWTYCGFAVVMVSTNDWKSTEAGFKPKNVPKSTRGLNNQYNRHLKVVFKGAATTSCSARGIFRPHFDFLVASGMRESMAKLTVARKIAATALVIWKKGEKFDLGKAVIRTE

SEQ ID NO: 437201 - protein, 321 aa, unidentified
MQTMTTIGLDIAKSVFQVHGVDAGGQVIVRRQLKRRYVLTFFQKLSPCLVGIEACGSAHHWSRELQALGHTVRLMPPAYVKPYVKRQKNDATDAEAICEAVTRANMRFVPTKTAEQQSGLVLHRARHLFVRQQTSVINAIRAHLAEFGIVAPVGRHGVEELLNVVTDPNDKRVPDIARACLSALGDQLQSNKQQILEFDRLIRAWHRSNEMSMRLEAAPGVGPVLATALVAAVADPKSFRSGRNFSAWIGMVPKQHSSGGKNRLGNISKQLRLSRSPTRSRGWLGHDGHGRAIQRTRRACAINEISPGNWRDVMVGRANST

SEQ ID NO: 437202 - protein, 415 aa, unidentified
MALKIVYKICCGIDVHKTFVVACIASTNSKGVTTYESHRFSTYTKGLRDLLQWLLARNCKDVCMESTGKYWIPVYNILENDCTIVLAHPKYVKAIRGKKTDKKDAKWIADLFKHDLVAGSFMPPADIRQLRDLMRYRFKLTCFRSSEKNRLQNCLTVSNIQLGNVVSDTFGKSAQAILDKLLENPADTSFDLEPLVFKSLKKKLPELRDAIDGFITPEQAGKLKVIKGHFEDLESRKAELEELILALAAPYQQELAILQTAPGISSVFTAIGIISEIGTNMEAFPSAKHLCSWAGLTPTNNESAGKKKSVRVSKAGCYIKPLLVQCANAVVTSKKHPEIRNRYLRLKKRRGHKKAIIAIARMLLTALYHMLKNGENYNAELYRKSNLPPVDREITVEQAIIIARNQGYKIKSATA

SEQ ID NO: 437203 - protein, 356 aa, unidentified
MRIIGCDLHTRQQTIAMLDDQTGELVEKQLNHEGEGVRQFYSALPRPVLVGIEATGSMFWFLRLLEELAIDFRVGHPAKIRAAEPRKQKNDRRDARLLLRLLVENRFPAIWMPSPILRDLQVLLRHRHRLVRIRTRVQHGLQALALSHGLRRGSSLWTPGGQHQLRTLPLAQHAAAQRETLLTLYPQLQHSIDCLDRQIETQVNERPQASRLMTHPGVGPITALATEVFLGDPQRFANGKAVASYIGMIPEEKSSGGRQRFGKLSKQGNTLLRFLWGQAAMQAVRRDPELLRFYRRKLVQKGLGKAMVAAARKLGIRLWIMLRDEIDYTEFCRRGNLLRQCATAYAGMPEGDSGPR

SEQ ID NO: 437204 - protein, 315 aa, unidentified
MNDNGREVFVGVDVCKATLDVRIEPHRELAQFGNDAQGIEALCARLSPIKPTLIVMEATGGLEVAVAVELGARGLPVVVVNPRQVRDFAKATGQLAKTDRLDAAVLCAFARAIRPAVRAPKDDLIRELDDRVTRRRQLVEMRVQEALRAHTASKTQLKSVKAHIAWLDKRIAEIESDLGKRLRDSELWRAKEDILLTIPGVGEITSRSMLSGCPELGTLNRHEIAKLIGVAPLNSDSGTMRGQRHIWGGRAAVRSVLYMATISAMRCNAKIKAFAIRLKAAGKPPKVVIVACMRKLLTIMNTMIKNATPWTPTSG

SEQ ID NO: 437205 - protein, 354 aa, unidentified
MITIGVDFHKRTSTYNVRDENGKQLKRSKLENRPELITEFLQQFPGPKRLAMEATRNWGLYYETVKPHVDEFLLGHPRRMKQITESQTKNDPKDADLICQMALIPFFPKAYVSSLDSRQMRSLLRYRHFLVDQRKSIRNQIQILLDRNLWPFQRPQNFKDPFCQRGLTWLRDVALPERERFILNGSLQTFQQLSQKISELESFIETQSLDHSDLPYLRRVPGFRKSKVNAYIVLFELVDIHRFRKAKNFAHYAGLIPSEHSSGDKHRTGRLVKEANHFLRTAFIESTLAALRQDKVLKVYYQTVKQRAGSGAAIIACARKLSYAVYHVLKSKTDYRPFNPAATTSHPLSIPQKG

SEQ ID NO: 437206 - protein, 414 aa, unidentified
MESQEFLFYVGVDCSSDKHQACLVASNGEVVAESIVEHSGNGLESLSQWLNRSTKTAPAMVAIAIEVPHGPIVDSLVERGFAVFSINPKQLDRFRDRYTVAGAKDDSRDAFVLADSLRTDQPCFKRVQLPSRFIVEIRELSRLEDDLHQEHNRGCNQLRELLNRYFPQLLCLSPAADDAWVWEMLQAAPLPSRAAKLSVGRIERLLKKFRIRRIAASEVAGVLRTAPLQVAPGTGEVVSERALLLVTRLQLLRKQRAHVAKRIDQLITEEIACEGAQNGDIPLLLSFPGLGRGGVATLFAEAWEPLTERNYYAFRAYAGLAPVTRQSGKKRVIVMRYACNQRLRNACYHWSRVSLQNDVANRAHYARLRALGHSHGRALRGVADRLASILMAVLKTRKPYESTLRHRAKSTDAT

SEQ ID NO: 437207 - protein, 406 aa, unidentified
MKQIVSVGIDVSKGKSTVCAMIHPNTIIKESFEVLHTVEEMSMLADYIGSLDGEIRIVMESTGHYHLPVAQFLYQKGFFICVENAYIIRQFSRIMLHGAKTDPLDAKKLAKYGLAYWSELKPYKFHPSCYTELSLLSKQYQTYIKLLIAAKQNVIHLMDEMLPGFKEALDTASSVQFSKMKYVDFAKEFYHVDMIKSMGKEIFRENYKQWCKEKGYRFQSEKADELFHLAEDGIPTLPTEFPSTRLCMEVATEQVSQLGYALEQILSQMQNLAKTLPEYQTIRQMGGMGEKLCVRFIADIGDVRRFHNGKALVAYAGIDAPPYQSGQYTGTKRRISKRGNSALRKTGYEVMKSLKSHPPKTDTRVYDFIIKKENEGKSKKQAKIAGLNKFLQIYYARVMEIYKNIV

SEQ ID NO: 437208 - protein, 458 aa, unidentified
MMIPDTNVSIILSKGAKMKKFYLGCDVSKGYADFVILNSEKSIVEKNFQLDDTFQGHNKLYEVLTNFYKQNPNSSILTAVESTGGYENNWFNTFSKLGEILNLNIVRLNPLGVSHSQKAKMNRAITDEISAYNIAEYLINNQSKVETNNTSYYSSLRKQWTFVKLLVKQRVQLLNQLESIVYTANTEVLSYCKHSTPNWLLLILKQYPTAKRLARANVTSLIKIPFVSREKAEALIAKAKLSISSSDDKITENIIKGTVDQILQLSKTIAMNEKQMSESCNLPEVKLLESFTGIGTYSAVGLILEIGAIERFASSKKLASFFGLHPTLKSSGDGRAAVRMSKKGRREPRVILFNIARTSITYNPLIKEIYEKHVKRGMPKMAALGVVMHKILRIVFGMLKNKQIFDPAKDRMNQEKCEPKKKIIKISKARRYQSYDTQAPVSRRQGSKRKEEKKSQIL

SEQ ID NO: 437209 - protein, 351 aa, unidentified
MKIVGAFDVHRRQITFKTLEPASGECSRGRISPAAREPLRQWFEQFAGLDGEFVLEGTTGWRFVVEEIERAGHVALLADPAETAARRGRKRRAKTDDADCDLQLRLLLAGELPEAWIPPAAILELRTRVRLRKTLIDQRTAWLQRLQAQLFHQGVPPGLKPRTAAGRDALARVELSPAGREAVELYLRMLDQLDRELVPIDRALRAFARRQPGCRALTARLYGVGAVTATAILAELGDARRFRSSDDAVRHCGLDVTVWQSDRKRAAGHLSHQGPSVLRWALFEAAQCAARRSSPDHAYYLEVTKRIDHNRACLSVARKLCRRAHHLLRELGDDALAPTDLPQAKLVDAAA

SEQ ID NO: 437210 - protein, 319 aa, unidentified
MIYIGLDIGKRAIDVQILKGEDNFEHHAVVNDAEGWQQLINIIKRKRHKKVHACCEYTGAYYFGAAVALAEAGYHVSVVNPLTIKQYALQELTRNKTDSEDAKLIARYCKVNRPALWQAPSPESRRIRQINRRIEQLIKMHTAEQNRQKEADADMRASHVTLLGHLEEEIAVQRKKLQELIEGDADLKAKSALMQTIPGIGEVTASALLSPLANIERFPTAKHFVSYLGLSPYRRESGDTVRRRGKMSKMGDRYLRKMLYMPARSACLRSKVFRDWAVQMMETRHPKVVYSIMMRKLATYAYKVIKDNQPFNPELALKH

SEQ ID NO: 437211 - protein, 423 aa, unidentified
MPYRITGIDVHKKKLAVVVADVEVDDEYQFERRWYGSNPEQLQLLSDWLVEQQVEEAVMESTAQYWKPVWEALERYWKPARQKREGAGRMSGTLHLAQALSNRGRRGRKKDFRDAERLVKRLVSQELVLSFVPDVAQRLWRTLTRTKYQRTRDKVRLQNQLEALLEEAHIKLSSLVSDLLGLSARRMLKALADGETDPVALAALADQRLHATPAQLRDALGACTELNPVYRRLLKMTLEDLHLIEQQVGQLDQEIASLLRQHQDAVERLAEVPGLGVDSAQQIIAEVGAKAATFASAKNLVSWVGACPGDEESAGRNYNPRSPKGNRHMRRILNQAANAAVKHKGSIFEIVYRRLVPRLGHNKTIGAIAHRLCQLIWIILHNGVRYEERGPAVSEKSRRARTSRMIRTLRTLGYRVEPLGNPV

SEQ ID NO: 437212 - protein, 462 aa, unidentified
MSSSRARCSPSAEKTKAPLTEASYMSVLFRQHDRHHAAGFVGIRRVFRMGFQFAIVIDPMKRDGTESCPLSKIIELINTGAPPMTMTIETGDVCCVALELSKTSWVCAFAVPGDGKAIVHKIKAGEVDRLIGFLDSSKARAERQLGRTLQIVLCYEVGYDGFWLARLLMARGIHTIVFDPASFLMPRRGRRAKTDRLDAEGMTRTLRAWLAGDREVARDVHIPSVEQEDAKRIERERKYLVEERTSIVGRIKGLLALHGIWLTGKRIGKGLRERLDTMTTGDGRPLAPFLRRDIERMLRRYDLVSDQIAEVEADRKEALSEKTGRFPHAEKVHLLATLGAVGETTATVLVAEIYHRSFETRRHVASFVGLAPSPYRSGDTDRDRGISKAGTKLARQTLVELAWFWLRYQPNSKLSLWWHQRFGDKGMRGRKVGIVALARKLAIALWRFVEDGVVPEGATLKV

SEQ ID NO: 437213 - protein, 370 aa, unidentified
MSVRRILAKTINTDLEYDRTDIDLAKNCVSVALLTTDGEVVCIDRLDYSELEKSAQVLCPTTFAMEPCTEMNYLVQKLEAWGHRCLVIGGKNVQNYVENHYSGQKTDLNDAQALAFLAQDTQLRTIKAKDMEQQKYASLTTLREQYIKQYRQTIVSLKGICQAWGLNISKGISGKARLKDLIENHAAFPEELKESLVDMVTHAQTAQKALNKITKTLELLAKNDKVCQLIQTIPGLGPICSCRLRATIGDIRRFKNPKDFPAYYGLVPRSIATGHNEKKGKITHRGDKTMRSLMVQGAGSVINMATKGKLKSKQLTKWILKKQKEKMPWGKLVCAVAAKLLRIVRAVLISRKAYDPKLAGVAKCSLPKAT

SEQ ID NO: 437214 - protein, 346 aa, unidentified
MARRELKDASRSKPATLAACAIDELGKPVAEATFANDPGGHVAFIAWARSTAPEATVGIEGSSSFGAALARSAQHAGLSVREVPPHLSRAERQRTRRPGKSDPGDALAIARVTARETNLPPIRLPDRTSELRLLLEAREDLVGEATRVRNRLHAHLLILVPGYGATATNLVAARHRTTVGRLLKSNRAVQAELARALVARLARVDREIASLTLRIDQLVAGHPLLGLPGVGSITAARLIGEVGDVRRFRSADALAALAGVAPIPASSGQIQRMRLNRGGNRQLNRALHVIAVTQARFHPAAKAYVARRIEVDGKTWREAIRALKRQLVRPVFRLLLEGSVAELPIA

SEQ ID NO: 437215 - protein, 436 aa, unidentified
MEVNTTTAQVSIGIDAAVVAPHQVAVRGDVREDFKVRPTLAGLSELTERLGPFAGSMVVAEPTAGTWLPLAHAVRDAGCEIGFVANRDSARLRKAIVGASKTDVIDADMLARCEEVLGVIAAPVPPPGQIALRRAMRRRHVATIDAHRVECRLWALAAWAFPDLWHATGGHTVAQPLLARWPHLERLSRARLSSITEIVAAHSRDKYPQRRAERIRDAAVGWARFWDSRLDLDALAWEVTAMLDDITTADARHHHATSHATGLWQQHWPDDVLVSIPGLGPICASAIRGWWGNATQFVTAKAAVAHTGLNPSMWSSGLTEAPSRRITKQGPAELRLALYQAANVARRRDPQLADHYRRLMTERGHNHISANTAVARKLACRAWAIATTGQSYEPRDLDGNPVSIDEATTLATELAVDDETRSRRRGHTRRGRLNPS

SEQ ID NO: 437216 - protein, 341 aa, unidentified
MQITTIGLDIAKNVFQVHGIDAAEKVVVRKQLRRGQVLKFFAALPPCLIGMEACATAHYWARELTKLGHEVRLMPAKDVKAYVKRNKNDAADAEAICEAVRRPTMRFVGAKSAEQQGRLIQHRTRDLLMRQRTQVINALRAHLAELGIVAAQGREGLKQLLTIIADEKDARLPIDARASLIVLAAQLQALQTMIGSIEKRLTVQHRANEASKRLESVPGIGTIGASAIAATVTDPNAFRSGRDFAAWIGLVPRQDSTGGKQKLGPISKQGDRYLRRILVVGAHSVLRRAKQNPEKYPWLTQLLARRPFKVVAIALANKMARVAWALLARGGTYRVPALAAA

SEQ ID NO: 437217 - protein, 395 aa, unidentified
MFIVGIDVAKRSHEVCMITSDGQTVQRPFSIRNNCTGYNLMLEKIRKHTNIKSQIVFAMESTAHYWLALFTRLRKDGYHVILLNPIQTSAMRDMFIRKIKTDAKDSFIIAELIRFGRYAESNVAQDRLLALKELCRNRFYLVDMAGDLKRKLVALIDRVFPEYEAQFDTIFCKSSVALLKKYPTPQKLSNAHLDKLTELLWNSSNGHFGEWKARELKELARNSFGVEDCDGAYSTLILLMLDQIQSLSGKADALEKEISRLFQSFDTTVTTIPGVGPIIGAVILSEVGDISRFSSADKLAAYIGVDPSVNQSGEFQAAHAHMSKRGSPYLRRCIWMASQVAVQRDPMFRAYYEKKAAEGLKYMTIIGHVTRKMTAVIFAILRDHKVYEPVLPTAA

SEQ ID NO: 437218 - protein, 309 aa, unidentified
MEHFVGIDVSKDRLDVHLRPSGESFAVARDGEALAGLVERLRTLAPALVVMEATGGYETVVASAIGAAHLPLAVVNPRQIRDFARATGKLAKTDRIDAAAIAHFAEAIRPPARPIAEPEAQALGELVARRRQVIEMIGAEGNRRRMARQRRVIRAIDRHLALLQTELSELEDDIDGAIRSSPAWQADADLLTSVPGIGPATRRVLIAELPELGRLTRRKIAALVGVAPINRDSGTLRGRRTIAGGRSAVRAALFMAALVASRKNPIIAPYYDKLRAAGKTGKQALTACMRKLLVILNAILRDRKPWQPA

SEQ ID NO: 437219 - protein, 355 aa, unidentified
MNSEKYIGLDVHQATISVAVMDSMGKLIMESILETKATTILEFVAGLRGTLSVTFEEGTWAAWLYDLLKPHVDELVVCNPRKNALLKDGNKSDRIDARKLADRLRLNDLKPVYHGETGVRMLRELARSYLNLVKDQTRVMNRLKAMYRSWAIPCAGRDVYYARHRAEWLGKIREAGVRRRAEHLYQQLDMLQHLRQQARRELLAESRQHPITAKLRQIPSLGPIRSALAVALIRTPHRFRTRRQLWAYSGLGLETRTSGEYRCVEGQIRRSKKQISIRGLNKDHNHDLKGLFKGAATRASVQPGPFQDFYQRSLAKGIKPTMVRLTLARKIAAITLTLWKKGENFDAEKLKSQAA

SEQ ID NO: 437220 - protein, 368 aa, unidentified
MKQGIRMSGETELASVGIDLGDRWSYWCAVSADGAVSGRGRVCTSVEAFTNQAKVWCGVRVAVENGTHSGWVSRVLSGAGCAVVVANPSRWRGTAHNSKNDGNDAEALARVLRVDPRLLFPLQHRPEAQQQDLAVIRVRAQLIKARTQLVNTARGMVKSLGGRLPRADAQYFVGQTWAEVPSGLRAALRPLYRSLAELNQQIRNLDLKIRQLSRARYPETARLRSVPGVGPVTALSYVLTLADPHRFSSSREAGAYLGLRPRQRQSGERDPDLGIAKNGDCYLRSLLVECAHHVLSRGPDSALKRWGLALAAGGRRPKRRALVAVARKLAVLLHKLWITGQYFCPFPEETVDAGKRAHRSLRAATATL

SEQ ID NO: 437221 - protein, 363 aa, unidentified
MFTERTSVGLDVHARSVAAAAIDGVTGEVWRTRLTPSYDHIRSWISALPGPVAVAYEAGPTGFGLYRALTDAGVRCEVVAPSKLQKPCGDRVKTDARDALHLSRLLRLDEITAVSVPSADQEAARDLVRAREDCRGDLMRARHRLSKLLLRHGIVYSGGAAWTGAHDRWLRTVAAPKLRAPATQMAFDADYDHVLTMQARRGRLDAAIEHMATACEFTPIVRRVSCLRGVNTLTSFALAVEIGDWKRFTGNTIGSFVGLVPSEFSSGLARVQGSITKTGNTHVRRLLVEAAWHHRARYHVGAAMRARWDQAPAAARARGDQGNRRLHGRWIGFLERRKRPTVANVAIARELAGWCWSLAVMDD

SEQ ID NO: 437222 - protein, 335 aa, unidentified
MQIYGIDLAKEKFDVSFFDLTSKKVSNQPSHKVVTNNLKGIGKFFKGLPSDAVLVAEHTGVYGDTLLKCCMDSNVKIAFVGGYVIHRYRATPDRAKTDVLDCALLRDFGERYPDKLKYKTFPEEALYELRQLARHREMLVEQRKQLITADKSEDCRPIRSLAVKRSMDHIKEMLDTEIAETEKEMLKVINGHESIHHNYELVKSVDGVGLITAVELLVKTENFTKITTARQYAAYAGTAPYEKSSGKMDKGAHISKIGNRRSKTLLYICAESARLHNKEIKLYYERRTLIDKKPRHYVLNAIANKLLRIIFTLVEKGEYYDANFIRQDPRVVKYN

SEQ ID NO: 437223 - protein, 325 aa, unidentified
MCKVGQTGVRRSDVPCFVGIDVAKAQLDIALRPSGERWAVPNEASGVMTLVDRVQALHPTLIVLEATGGLERAVTSALATAGLPVVVVHPRQGRDFARATGQLAKTDALDARALAHFADVIRPTPRPLPDAQTQELRALLGRRQPLIGMRTAEQNRLAGTNARLTQDIAAHMTWLNAAIATLDDDLETILRASPLWRENDDLLQSAKGIGPVCAHTLLLELPELGTLTRQQIAALVGVAPLHCDSGTLRGRRMIWGGRAHVRTVLYMGTLVATRFNPQIKVFYERLLAAGKVKKVALTACMHKLLTILNAMLKHRTPWQPQEVQS

SEQ ID NO: 437224 - protein, 349 aa, unidentified
MRYIGVDLHKINFVACFLGEEDTSQLETYPLTDQGLTTFCRRLRPTDQLAVEVAQNVYYFYDRIRASVNRVVLVDTYKFAVIAKSKKKTDRHDAFTLARFLKLGWLPSVPVPSEKIRHLRQLCQARDNLVQMATQLKNMGHAALTRNGIARRRAAFYSAGSRQRLIHLAGVAAIDQQILGVVLRQLDALEREIAGLESEILRRGKDLPGLPRLLQIRGLSALAAIILLAEIGDIAWFDSSKQLVAYAGLATSVRQSGGTDRRGKITKQGRKRLRTVAIRAVLGMVSGKRTPLMEFYARKQKEKGSGKALCATARKLLTIIFVMLKRDLDYWYLEDRLYQRKLQLLRAIA

SEQ ID NO: 437225 - protein, 398 aa, unidentified
MTESSDYESIQVFIGVDVGKDTHHAVAINRSGKRLFDKALPNDENKLRSLISDLKQHGQILLVVDQPATIGALPVAVARSEGVLVGYLPGLAMRRIADLHAGEAKTDARDAAIIAEAARTLPHALRTLKLADEQIAELSMLCGFDDDLAAQTTQASNRIRGLLTQIHPALERVLGPRLEHPAVLDLLQRYPSPEKLASLGEKKLAAQLCKLAPRLGKRLAADIAQALAEQTVVVPGTNAAAVVLPRLALQLITLRKQRDEAALEVEQRVLAHPLYPVLTSMPGVGVRTAARLLTEVACRAFASAAHLAAYAGLAPVTRRSGSSIRGEHPSRRGNKALKRALFLSAFAALRDPLSRAYYTRKMSQGKRHNQALIALARRRCDVLFAMMRDGTFYTPQGS

SEQ ID NO: 437226 - protein, 445 aa, unidentified
MKKEVKNEFQLVHPNAAGIDIAKNVHYVSVPADRDETPVKHFGSYTEDLHELAQWLKRCMIDTVAMESTGIYWVQLYLILEEYGFDVFLVNARHVKNVTGRKSDVLDCQWIQQLHSFGLLNKSFQPENEIRELRAYMRHRKNLTQSYASQIQLMQKAFEQMNIKLQNVLTDICGKSGQLIIKAILAGERNPKVLAELADHQVKASKEEIMKSLVGNWRAEHLFELRQAYDLYLFFKEKISECDVQIENVLRRLESGELNQDENKKAPRGVYTKNKFNFNATNYLKSVIGVDITKIFGISEVLALEIISETGIDMTKWPTKKHFTSWLNLVPNNRISGGKLLKPKKVKKKNKAGQAFLMAAYALQRSNHWLGSFYRRVKAKQGPGVANKATARKLALIFYDMIKFHKEFNPINNEKYNKQYEENKIKFIQSQAIKLGFQLVPAIVS

SEQ ID NO: 437227 - protein, 338 aa, unidentified
MFYVGLDIHSKSITICVLNDLGKVARRCTVRQIDTLMALLERLPRPFQVCYEASTGYGVFFEMLSKVADHVAVAHPGLLKLIFRSKQKNDRRDAEKLAKLLYLGEVPTVHVPTAQVRAWRELITFRRRLIEKRTRAKNGIRGLLRSLLIRAPQRPGLWTRKGIAWLGQLPLDNPMHALRRDLLLEEIATLSDQIRRVEKELARYSSTSAAVQLLRTIPGVGLRTAEAVAAFLDDPHRFAHSKQLGAYFGLVPSQDQSGGTNRLGHITREGSATVRHLLTEAVWQAVRRSPTVAAYMARISRAEKDRRKIAVVATAHYLVRVMWSMLKHQTAWRETVTA

SEQ ID NO: 437228 - protein, 422 aa, unidentified
MKNSTARKLKQIPAGYLIIGVDPHKKKHAAVAMTQDAIAHCKFKVVNSRRGYEELLERVRVQMVATGSRGVIFAIEAASHFWRNLAYYLEEHGIPFRLINPFTLKRRREGRDLNRVKNDFRDAAIAAELLRTGEFTETKLPQGTYAELRAAYNAYRRLVKERTRWLNLLKGLLDGLFPEFCQVFKDPAGKTALAVLSLCPVPGTITRMTAAEFADAIKDGCREPRLKLKKLHALHNAAQTSIGIQSGTRSMSIELSLLGQRLRLNAEQIEKIKSLLVDLVNSVEDSQYLLSIKGLNYITVAGLLAELGPLTSYQNAKQLIKMAGSNPIESESAGKRSSHTPMSKKGRPGLRWCIWTAAISLLRHNTDFHSWAKRLSERLVHAHPLKKNEVVGAAANRLLRLAYALVNKQTLYRLPQLAEVVS

SEQ ID NO: 437229 - protein, 367 aa, unidentified
MKKNSSAAAMQSRNIVRQTLTIGLDLGDRNSWYCVLDETGHIQLEQRVRTSAKALQEVFGAMPRSRIALEIGTHSPWISRLLTELGHEVIVANARKVRLIGESRKKDDRLDAQTLARLARIDPALLSPVKHRSAQAQVDLMMIRARAGLVRARTGLVNRARGLAKSYGERLQGCNVRNMNPEKSEGLSPELQRALEPLLSAIEELSERICEYDDRIEALAQASYPQAELLKQIKGVGTLIALTFLLTLEDPHRFGKSRDVGGYLGLQPGRRNSGESAPQMHISKEGDPYLRTLLVQGAQHILGPFGIDCDLRRWGLKLAEGGGRNGKKRAIVATARKLAVLLHHLWVSGEVYEPLHNSSLTTVAAGA

SEQ ID NO: 437230 - protein, 457 aa, unidentified
MCLGDRPILEPNAAGIDIGAREIHVAVPPDRDENPVRVFSTFTADLQKMAEWLVSCGITTVAMESTGVYWIPPYDVLEQHGVKPCLVDARGMKNVPGRRTDWHECQWLQFLHSVGLLRSAFRPDGGVCAVRSLMRHRSEQVLMANQHIQHMHKALTQMNVQIHHVISDITGLTGLAIVDAMIQGERDPEALAKLRDPRIRASEETIRKSLEGNWREEHLFTLKQSRESYQHYQEQISTCDEEIERLLLAFEARVDPEQRPLPPDRKRKQRGRKQKNDPKTGFDVRTESYKLFGVDLTQIPGLMAMVLTLFSEIGRDMSRWPTAGHFVSWLALCPDNDISGGQVLWRGVRKVHNRAGDLFRLAAYSLHHDESALGDYLRRMKSKLGPAGATTATAHKIAIIFYTMVKNQQEYDPTIWAQRDSERKKRFEAKLQHQAHQLGYKLVPIKEKPAAYETQSK

SEQ ID NO: 437231 - protein, 373 aa, unidentified
MSTIYIGVDFHARQQTICYLTTENGEIQLHELKHQNKQEVRSFYAQFQGHVIIGLEASGYSPWFERLVEELGCEVWLGHATEIRRRARWRQKNDRRDAELILDLMLHDEFPRLYLPPLQSREVLRMLRYRQKLVKIRTMGKNSLQALALQSGLAKGSHLFTKAGLQELRTAVMSPVMQWQREQWLQLLEPLNQRMTETMFWLKQQSLDDQRIARLRTHPGIGLLTSLCLVHSLEPVTRFRNQRKVVAYAGLEPLERSSAEKIRFLGISKAGSRILRYLVVEAAQVAVRKDEELKRFYQRLAERRGRAKAKIATARKLLIRAYIMLRDEIDYAEFRRRAVAARLVREITKASVPEFVIGQPASAEHRVKVTTTK

SEQ ID NO: 437232 - protein, 425 aa, unidentified
MKKVANFGRKVKGQLKTTVLDKASWVIGIDIGKEKLSCALMDIDQVLVCRFEVEGSLAGYNELLERVKRETMGKGKAVFAMEPTGHYWMVLGQFFEDHNQPYVLIHPLVVARSREVNRLNKGKTDPMDARLIGELACDGSITRTQIPGEYWATMRVYAREYMDREKDIAREKNRITSYLETTLPELIEIFHKPLGMTGRTCIRALANFREASKKDWEHFENHVRNQFPGKRLLTSRIRLLHEMLRRGDALGLRAGRQAMLHRIMNSLDRLEIYEGQQRAAKQALADAYEKSEYKQYLDSIWGSNTTANALVLGFMGDPASYDSPASLVKLAGSDPVPDESGKLKGRTPISHRGRSLLRKAGDRVSFLLEKRNSVFRAFVNHLTHRQKNRLTKRQARIACINKYLRIVWVLCNHRVPFNPALAQTL

SEQ ID NO: 437233 - protein, 418 aa, unidentified
MDKIRTKKGRVVNEKTLLVTVDIGKVMNMGYCRCPDKTEVKPFTFQNNYEGFNKFFSVIVKTKTTKELEYVVVGFESTGAYAEPLMHFLRANGVKLVQVNPLHTKKLKDLQGNSPNKTDRKDPKVIADIIELGHALTVIIPEGVPADLRRLTHARERTLKRKTALLNQLQDAVFVSFPEFLDIMKDVKTKTAHFLLKHYPMPSNILECGLKPLAIHLKKISRGKLGHERAQSLYEAAKRSIGIPEGRISLALEIRAFLSALEQCNGFIEQVEQEISRLLKEVSYSRFLLSMKGIGSVTVAGLIGEVGDFNAFSTISEMLKCAGLNLYEISSGKRQGARHISKRGRALMRKLLFYAALCTVRKGGIMHEHYQRYLQNGMKKVKALVAISRKLLGVMFALVRDHKPYLKNHEEAKYLNAA

SEQ ID NO: 437234 - protein, 370 aa, unidentified
MLDTTTFVGLDVHARSIKAVSLDVMTGEARCATFGYDAGAVAEWVRSVDPRARCVYESGVTGFDLQKRLSGLGVDCVVGAVSKMIKPSADRRRKNDRNDAEFLARMLSVGNVVEVWVPDDECEAARDLTRALEDARDDLSRAKQRLSKFLLRHGLAFDERTPTGRRKGNWTRAHWSWIESIRFAEGADNDVLAYYVDAVRRAAEEKARLEGLVEAEARKPRWRRRVDSLRCLKGVDTASAADLVFEAGEFSRFRNARSFAAWVGLTPSEHSSGESDRRGAITKAGNKHLRKTLVEAAWHYLTCSGRPKGLAKGQAPDRGARRHAAKGVRRLVERREALLARGVHGNKANVATARELACWVWAVGLMAEEA

SEQ ID NO: 437235 - protein, 355 aa, unidentified
MISTKYIGMDVHKESISIAVMNSAGKVVMECVIETKASMILQFIDGLRGDVQVTFEEGTSAAWLYDLLKPHVTKLVVCDPRKNKSMREGNQNDKIDARRLAELLRLDHLTPVYHGEHGLRTLKELVRSYLTITKDLARVKSRVKAIYRSWAIPCTGKQVYAQCHRAEWIAKINEPGVRRRAELYYQQLDALRVLRQGVRRDLLIESKKQKAWKRLCQIPSIGPIRAAVLLGILQTPHRFRTKRQLWAYGGLAIEMHSSADHRRVAGRLARSRKNVLFRGLNRNSNHDLKNLFKGAAAVASSKPGPFEQFYAALVAKGLRPEMARLTLARKIATIVLIVWKRGVCFDAQHLKPQTA

SEQ ID NO: 437236 - protein, 292 aa, unidentified
MEIHTLGIDLGKTIFHLVGLNAGGEVVLRKKCSRKQLLQFTANLQVHLIGMEACCGSHFLGRALREQGHEVRLMAARYVKPYVKTNKNDYIDAEAIAEAVGRPRMRFVPIKTDDQLDMQSLHRVRESWVGRRTSLINQIRGLLLERGITIRKGRHYAEAALPEILEDADTNLSGRLRLLLAQLQQELKQLQSQIDEIDLGIVQAAGEHEACQRLMAIPGIGPVTATAIVSAIGNGSEFKRGRGFAAWLRGLAGTGSRAVLHRRPAEATGDQQTRELLSAKIAGERGARRIAV

SEQ ID NO: 437237 - protein, 346 aa, unidentified
MLYAGLDLSRKRLDFHLLDQAGVSVGVGAAPPDADGLRTLAARLGRFGLPIRAAIESMNGARFVHDQLELLGWEVEIADAVKIRGLAPLACKTDRIDAWVLAELSRRELVPAIWLPDPSVRAERERTRFRLHLVRHRTSLKQRVHAILLAHGKPCPVSDLFGASGRALLARLELPEPWAASVEASLYLIDELEREINACECELRRLGAEHRYVPLLTTVPGIAWVLAYTIAAEIGDIGRFRTPTKLAGYTGLCPRVYQSGDSDRRGPLAKQGPKYLRWALIEATTHACKHPAYRERYQRTKTRLGKQRGPKVAQVDLARRLAEAIWHMLTRNQPFAPAGATSPLAA

SEQ ID NO: 437238 - protein, 420 aa, unidentified
MKKNLLFIGLDVHAKTITIAVAPGEGGEAHVYGTITHDLHALEKVFAKLRKAHPGAELRVCYEAGPTGFVLARRLAQLKIHCTVVAPSLIPVRAGDRIKTDRRDALKLARLHRAGELTAVHVPDASDEAMRDLCRARTDAVQDLRRGRAQLKAFLLRNGYRYSGKSAWSEPHLRYLRELVLPHAAQRVVLEDAIASIGSAGDRIARLEDQMGALLESWHMKPVVQALMGMRGVALVSAMILASELGGAWRFDHPRQLMAYLGLVPSENTSDQKRRQGGITKAGNGHARWLLIEAAQHYRLPPKVSKELSARQEGLSEDIKACAWAAQTRLHKRMMQLLARGKQRNKVAVAVARELSGFVWRIFRIMEPRVTRQEPGTTPQEPQVMPQEAQATPHGPQAAQEEPGKKRPASPVRMKAKKTG

SEQ ID NO: 437239 - protein, 351 aa, unidentified
MPRTSTVHAVTAIGIDMGKNTLHIVGLDSRGAIVLREKVSRGRITSRLANLPPCLIGIEAGLATHYVARELAALGHDVKQVPPTYAKPFRQGHKNDFRDAQAVAEAVQRPTTRFVPAKTDEQLDLQALHRVRSRLVSERTAVINQMRGFLLERGIIVRQGLRFLRQGLPDILAKRTDVLSPRMGRIVADLASDWRQLDERIEAVTDEIGTLAKSDDSCRRVMTVPGIGPIISSAMVAAIGSGAAFARGRDFSAWMGLVPKQMSTGDRTILGRISKRGNGYLRTLFMQAARVILLRPASWPKHSFGVWLARAAQRLHPNVLAAALANKLGRIAWTVLAQERSYEARVTKAAA

SEQ ID NO: 437240 - protein, 343 aa, unidentified
MKLTRVGVDLAKQVFQVHGVDRAERPVWCRRLKRGRWITEFERNVEPGCQIGMEACGGAHHWARLLQSKGYVVKLIAPQFVKPYVKSNKNDANDAQAICEAMSRPSMRYVAVKTVEQQDIQAVHRVRASLIGERTAKANQLRGLVYEYGLVAPREIASLRRAVPAWLEDATNGLSARFRALLAALYRDLQWLDERVRELDREIAALVRENEAVRRIEQLRGIGPLTASALVAMVGDGRQFKNGRHLAVALGLTPRQHGSGGKEKLLGISKRGDKYIRTLLIHGARSALRTAADKTDRLSRWALALAERSHPNVAATALAHKMARVAWAMLRNGTNYEPERMAA

SEQ ID NO: 437241 - protein, 386 aa, unidentified
MQKLNDLSRSLTALEPDGTLIAVIEMSLSSWLVAGIVPGIERQPLKKLAVDESALLKLLHRWREEAEKAGRRIERIAVAFEAGRDGFWLARWLKARGIEAYVIHASSVAVSREHRRAKTDRLDTELLKRSFLGWLRGERDHCKMVEIPTMKDEDAKRPNREHDSLIGERSRIVNRMKAALVRLGIRGFNPKLKRATTRLDGLHTPEGEPIPPNALAELRRDMERRRLVNNQIRQIEEERLERIEQAPCDGAHVMVRLLARVMGVGIETADMLVHEVLSRNMRDRRAVARYAGLTGSPDESGRKRREKGLARSGNARVRRGMIQLAWRFLLHQKNSALTKWFRSRTENARGTRKPMIVALARKLLIALWRLMREGIVPDGVVLRPAQ

SEQ ID NO: 437242 - protein, 350 aa, unidentified
MIAVNKDIITTIGVDLGKNTFHICAMNDKGTIVLRERLTRASLPKRLANIPRCLIGMEACAGSHHIGRQLATLGHDVRLMPAKYVKPFLKGHKNDYRDAEAIAEAVQRPTMRFVPFKNDEQLDLQALHRVRSRLVGQRTAVINQIRAFLLEHGVAVRQGPGALRRALPSILAQRTDVLSPRIIHLIEDLTDDWRRFDQRIADVTREIEQLAKQDEHCKGLMGVPGIGPMTASAMVAAIGDGAAFSKGRDFAAWLGLVPKQISTGDRTILRGISRRGNRYLRTLFIQGARSVLQRSNGWEKKSFGRWLIAASKRLHKNVLAAALANKLARIAWAVLSHAREFDAAFALKAA

SEQ ID NO: 437243 - protein, 387 aa, unidentified
MIYVGIDIAKETHVAAAVDSDGVIIIEPFSFTNNHEGFKLLKSKLDALDRSNLLIGLESTAHYAENVIFFLHSCGFDLAVINPVQTAAMRKTGIRKTKTDKVVSLLICKTLMVNSFRRYSENDIKTLKLKSLCRFRQNLKKSKARLKIQLTSYVDVIFPELQSFFKSGLHIRTCYELLKAYSSPDDIAALHLTKLSNILSKASRGRFGKQDAQSLKSLAMSSVGVKNTYISIQITQTIAQIELIESQLAELETVIEVAVDELDSVIMIVPGIGKLNGAMILGEIGDIKRFSDSSKLLAYAGLDPVINQSGKFNAKRTRMSKRGSKLLRYALINAAWNVSLNNDTFKHYYDSKIAQGNSHYSALGHTAHKLVRVLFKLLNDNIPFALA

SEQ ID NO: 437244 - protein, 420 aa, unidentified
MKSNTQNAKIEAITEKTLVLGIDVGSKTHYARAFDYRGIEYSKKPFKFSNTEAGFVTFKEWILDLKERHEKDKVVPGMEPTGHYWFNLGKFLQDNEMKPVLVNPHHVKKSKELDDNNPTKNDRKDPKVIAGLVREGRYMIPYLPEGVYADLRTASNIRFQLQAELTRIQNRISRWFNIYFPEYKTVYGKPDAKSGMLILKAAPLPEDILTLGIDGVNQIWRDAKLRAVGKARAKTLIEAAVSARMEIRMLLEDYESRNIRLQEVMTLIEGLVKQIPMAEKLLEIKGVGIRTVSGFLAEVGDISRFNNPKELQKLAGLALVENSSGKHKGETTISRRGRKRLRYLLFEVAMSLVAKNPEFRELHNYYTTRRLNPLKKMQSLMAIAAKLIRVFYAMLTKGVDYDPKKMVSDIKRPAVYLQAA

SEQ ID NO: 437245 - protein, 394 aa, unidentified
MSLCVGIDVSKEKFDACGIGEGGKKMFSVSCPMDRSGFDKLVVQLPTDKTSFLLGMESTACYHMPLFSYLTTHGYQVVISNPLLIAQYANRSLRKTKTDKRDALTIAQFLMQEKESLSVETCSPLIGELRDLARRREKLTDQVTALKSDMKRILSVTFPELEHLTGVFTKSTLRLLADFPSAHALRQANYSAIAAIVIPRSRGRKSHASVHALMTAAASSVGVTSPAKEMILKQEACLLLEVEEQIRETTKLLMSLRNERIRDDTEILCSMRGIGENTAVNFLVEMGGDIGIYKNDKKLIAAAGLDPSTYQSGKYAGRSKISKRGNRHLRRVIWLMTTRTITNNAIFRAYFFKRRTEGLPYTKAVLATAHKLIRVMYSMLTHRTCFVEGGINYS

SEQ ID NO: 437246 - protein, 342 aa, unidentified
MQQSIFVGLDLGSSHCHQTVINADGTIIRSRSVPTSEQHLRNSFADLQGDIHVHAEASELSDWVRSIINPLVTRFVISHPRSLAWIAKDSVKDDAVDARKLAELLRFNLVHEVYYEDRADRRSFKQLVVHHEQLSREQARLKSKIKARLRTLGIIRKDARLFSESGQSELFASITDLLIEQMFHQSFAVLNQMLISLMDAKTAMIEFSRRLPEVRLLQTAPGVGVITACRFVAYIQTPQRFSNKQKLWRYARLGITRRESNGKRLSHPHLDPAGCGSLKDVSRKIFEAARRTKTDNSFKRFYEQSLANTKNAVHARLSTQRKILATLRAMWQANQPYRNDGG

SEQ ID NO: 437247 - protein, 408 aa, unidentified
MRIIGLDIHRAFAEAVAWKDGKLSRLGRVIMRRERLEEFAKQLSSSDVVVIEATGNAASVAAVIGPHVSRVVIANPKQVRLIAHAKIKTDTIDAGVLAQLYASGFLPEVWIADETTQALRRQVTRRNQIVRQRSRLKNIIQSILHAHLIPSCPHQDLCGPKGRAWLSEQILPGDERLAVERHLREFDRLTDDLKAIERDLAQSALADERVKRLMTIPGIDMVVALALIAAIGDVERFAKPGQLVGYLGLNPSVRQSGPGPAYHGRITKQGRGHARGMLVEAGWAAARSPGPLRSFFLRVQSRRGQHVAAVATARKLAILIWHLLTKNENYLWARPALHARKLRDLELKAGYKPARGQKGTAHAYNLQSQRDQERRWVEQAETAYTRFVAGWNTRGPKARTGAAKEERQ

SEQ ID NO: 437248 - protein, 389 aa, unidentified
MIYVGIDVAAEKHACCILAESGKVHKQFTFSNDISGFEKLHKALLAPSETKIGLESTGVYGNNLAEFLRRNGYETHIFNPLLVKKSIQATTLRKTKTDKSDAKHIAQYTKEHSQPNLEPSYHISELKSLSRGRFSLVRERSKVKTQAKSLLVQLFPEFSQAFSDVFGAAASAVLKQLPSARMISQCPVDVLTNLLRTASHGRLGKVKAELLIDLAEHSVGIQSMALELQTQMLLQQIDLFTIQINRYEAAIKSEMETIQSPITTIPGIGSVLGAVILSEIGDIRRFATPAKLQAYAGVDPSVGESGTSVSTPGRMVKHGSHYLRWALCQAARCVSLYDPIFAAYMKAKRDEGKHYGVACSHVAKKLTRVIYSILKKNTAYSLTYSQIGA

SEQ ID NO: 437249 - protein, 387 aa, unidentified
MPGGQVGSEFITLSNQKRLPIIISKAPRVEYRVVAAPDETTSTLTEEVALLCYAGIDLHATNSVLVVIDETDRVLYQKRLRNDLALIVAALEPYRTTVQGVVVESTYNWYWLVDGLMETGYRVHLAHAPALPQYSGLKHADDQHDARWLAHLLRLGLLPTGYIYPKAERAVRDLLRKRSQLVRHKTMVVLSLQSLLTRLTGTRLSLPRLRQLTPESVRTLVPFPAHVQAVASSLTVLQCLEQEVHTIEEQVREAGRTQSGYALLQTVPGIGPILAGTILLEAGDIRRVTTVGHFASYCRCVGSEHVSNGKRKGAGNTKNGNKYLSWAFIEAAHFAIRYEAVIRTYYQRKQARTHPLVALKAVAHKLARACYHLLREQVPFDVSRAFG

SEQ ID NO: 437250 - protein, 326 aa, unidentified
MSKKKLDLCLRSNGKDILYDVIPNDLSSIKSWLTRTFEKFFLSEDSLVVCAEHTGQYTYPLVCATKSIGVYLCLEDAAKIKYCHGIPRGKNDKIDACRIAMYAERYNDCLQPYTASELIIQKLKNLSTERSMLVADRAKYQSQLKDQVDYMEHSIYIAKCNRVEGIINTFTDYIAQIDLEIKELINQAPVIAHQMDLLMSVDGVGERVALKMIMETDAFTSFTDPRKFCCHAGVVPFVYVSGSSQRSKNRVSNRADKSIKHLLHMAALSVSQVKNSPLKKYYDRKVEEGKNKMSVLNAVRAKLVTIMFAVIRTDCFFSRNYQNSLA

SEQ ID NO: 437251 - protein, 361 aa, unidentified
MAKVRSWAGLDVHARSVLAVTLDAQSGELRSQRLPGETAKVVEFLERLPGPTRAAYEAGPTGYGLARALHAAGIGCVVAAPGKIERPAQDKIKTDLRDAERVLRLLMIDGLHPVRVPSIEEEALRDLVRAREDVRGDLMRARQRLSKLLLRHGIVYEDTSSTWTQKHRAWLRSEQLDGGTQATLLDHLGAIDTLELRRTSLETAIAELVPGSPWAQTIGRLRCLRGIDTLSAVGLAAEIGDFDRFDRPGKLMSYLGLVPSENSTGQTRRQGSITKTGSRHARRLLVEASWHYRKPPARGITLQRRQDGQPAHIVQISWQAQQRLHRVWQRLDTQRGKRRTIVAVAVARELTGFCWALARAD

SEQ ID NO: 437252 - protein, 419 aa, unidentified
MKHQASEAFAAFVGLDWADAKHDVCLQAAGTAQREFLSLEHSPEEINAWVQTLRTRFNGQPVAVCLELNKGPIVSALRNYDFLVLFPVNPLTVAKYREAFTPSRAKDDPTDAELQVEILLKHREKLTPLSPESPTMRALAQLVEHRRRLVGDKVRLTNRLTSALKNYFPHVLRWFQDKDTAIFCDFLSRWPTLKAAQLARRTTLESFFRAHHVRSADVITTRIEAIKSAMALTTDDGVITPNALLVQALVAQLRVTLQVIADFDTAIAQRAQEHPDFSFFDALPGAGAVFAPRLLVAFGEQRERYASAEELQKYAGIAPVTERSGKKSWVHWRLQCPKFLRQTFVEWAAESTRHSFWAQVYYQQQRAKGKAHQAAVRALAFKWIRILYRCWQDRTPYDESVYLQALNRRSAPLLHNLAN

SEQ ID NO: 437253 - protein, 480 aa, unidentified
MNVKARKAKKQVNVEKQAINLLSKEELSKKIEVVEKELRSYTWRELETNGKFAKNDKLSFITDDMLIVGCDIGSETHYIRAIDVRGRELSRGAFEFSNTSEGFENAKAWVLALAAKNDKKQIVLGLEPTGHYWFALAAWMISNGISVVQVNPYAVKQSKEIEDNSQLKDDRKDPKLIANLVKDGNYGMPYLPEKVYADMRRLSMFRDQLTEDRIRNINRLHRELKIYFPEYMDAFGKIDGAFTLEVLKVSAIPSDIAALGEEGIKNIWHDAKLRGRGYSRAGEIVSYAKKSVGLKDGTDAGREAVKWYAEQILKLDEQLAVIESALHKKCREIPYAENILAINGVGENILAGILAEMGDISRFDDVKEIQKLSGMGLVACSSGKHKGQTKISHRGRKRLRYWLFQAAKSAVSHAGEFKQLHEYYTTRTNNPLKKMQSLIVIACKILRVIYTILKTGTTYDPQKLLKDIKRPVLAQALLAA

SEQ ID NO: 437254 - protein, 455 aa, unidentified
MPKRTTGDRPELKQVNVGAAAIDIGSKMHMAAVDPTCADMPVRAFGTFTQDLHDLADWFKACGVTSVAMESTGVYWIPAYEILEQRGFEVILVNARYAKNVPGRKTDVSDAAWLRQLHSYGLLRGSFRPDAEIATLRAYLRQRERLVEYAAAHIQHMQKALMEMNLQLHHVVSDITGATGMRIIRAIVAGERNPDVLATYRDVRCHSSIERIRAALVGNDRDEHVFALTQSLELYDTYQAKMLDCDRKLESLITALTDKGAKTVGKLSRPRVKTKQVNTPSFDVRTALYGVLGVDLTEIHGLGPSLALKLIGECGTDLRAWPTAKHFTSWLCLAPGNKISGGKVLSSRTRRSSSRAAALLRLAATTIGRSGTALGAFYRRLSSRAGKAKAVTATARKIAVLFYNTLRHGMAYRDPGADHYEEQYRSRVLANLKRRAKSLGFVLQAVPCDAEVAVS

SEQ ID NO: 437255 - protein, 339 aa, unidentified
MNRTTIGIDIAKNVFEIYVEDGATQSVERKRLARKKLLPWLANRPPALVGMEACGGAHYWARELTKLGHEVRLMAPQYVKPWVQTNKSDQADARAICRAVQEPGMRFVRIATEAQQDVQAMHRVRSRLIGNRTALVNQIRGILLEYGVAVPQGVASLRKVLPTLLAEERWSPLMRQFLTEQQAELTVCETQVAAVTGAITRESATQPVCQRLEQVRGIGPLGASALWLKLAGGAYQNGRHVAAALGLVPKHTGTGGKVRLGGISKRGDRYLRQLLIHGARAVVAQVGEKPDALSGWLRRLVARRGMNKAVVALANKNARVAFALLHGEQPYEVTKMCQA

SEQ ID NO: 437256 - protein, 358 aa, unidentified
MADKVTVAAVVGGVDTHKDLHVAAVVDQNNKVLGTQYFATTRQGYRLMLAWMTSFGALKRIGVECTGTYGSGLLRYLQNAGLEVLEVTAPDRMERRKRGKSDTIDAECAAHAAFSGIRTVTPKTRDGMIESLRVLKTFRKTATSARRVALQIIHSNIISAPDDLREQLRNMTRMQLIRTLGSWRPDASEYRNVTNVYRISLKSLARRYLELHDEIADLDVMIAAIVDELAPELIKRNAIGYESASQLLITAGDNPQRLRSESGFAALCGVSPVPVSSGKMNRYRLNRGGDRAANSALHIIAIGRLRTDDKTKEYVARRVAEGHTKMEAIRCLKRYISREVYTLLRNQNRQVNSIPIMA

SEQ ID NO: 437257 - protein, 351 aa, unidentified
MTMVGGFDVHRKQITFDYVDDDGLVRVGEIRPATRTTLRHWLSEHCPAGDAEFALEGCTGWRYVVDELATAGVVAHLGDPAEIATLRGPKKRAKTDRADARLLRTLLLEGRFPESWIPPAHVVEVRTLGRLYCTLMDERRAWQQRIHAQLFHQGCPPIRALLSVAGRDALAQAQLSAAGRQYVDTALRRIDELTVEIGPVRGQLVSFARRQVACQALQARQYGVGWLCAAIMWAEIGDARRFSSSDQLVRFAGLDVTVYSSAGKRSPGHLSRQGSPELRWATFEAAKCAARHGSPDHAYYQRLATKHDGHNGKNPTLAVERKILRRSYHTLRELGDAALAMPVPEEQGVAA

SEQ ID NO: 437258 - protein, 410 aa, unidentified
MEVLHPRCCGLDVHKETVVACLRHVSGGKVNTEVRTFETTTASLIALSEWLAQNGCTHIAMEATGIYWKPVWHILADGEFQLVLANSAHVKNVPGRKTDVNDATWLAELLAHGLIRASFVPDTQTQELRTLLRTRKQLVREKASHILRVQKTLEDANIKLESVITDVMGMSGRAMIEALIAGESDPAKLASLANYRLKTSQEKLREALRGRVTKHHRFLLRLHLNQIDALDAAIATIDRQVEAGIAPFRAAVEQVSSVPGIRDIGAQVIVSEIGTDMSRFPSDGHLISWAGLCPRNDESAGKRRSNRLRKGAPWLKTTLVQCAWAAVRKKDSYLRAQFLRIKSRRGPKKAIMAVAASILTAIYHMLKDGTLYQDLGSNHFQTRSKGQQTQRLVKRLADLGYEVALKPLAS

SEQ ID NO: 437259 - protein, 356 aa, unidentified
MVTGLKHQKEKRSMDHFAGLDVSVKETSVCIVDDTGKIVREVKVASEPETLLAVLKNPACHFKRIGLEAGPLSQWLFSGLAEAGLPVICVETRHMRAVLKAQINKTDRNDARGIAQMMRVGLYRPVHVKTLRSQKLRMLLTHRKLLQSKAIAIDNDLRGTLRNFGLKVGMVGMAKFEARIKELVENLPDLAVLVEPLLIVRRVLREQIAVLHRRLLAVVRDDDVCRRLMTVPGVGPVVALTYRATVDVPARFRNSKAVGAVFGLTPSRHQSGERDRPGGISRCGDEMMRAMLYEAAQVMLTRTDKWSWLKAWAMKIARHRGMKKAIVALARRLAVVMHRIWVDGTEFRWTRDAVAA

SEQ ID NO: 437260 - protein, 341 aa, unidentified
MDSESGELVVRRLPATTGGLVEFLVALPGPTRVAYEAGPTGFGLARALEAAGVGCVIAAPGKIERPASDRVKTDRRDAERLLRLLMIGALHPVRVPSVEEESLRDLVRAREDVRGDLMRARHRLSKLLLRHDVRFDGAGGAWTQQHRRWLATVDLGQQGAQVTLLDYLGAIDALLVRRDTLEATIAQLVPGSPWAQTVARLRCLRGIDTLSAVGLCAEIGDFTRFARAGHIMSFLGLVPSEHSSGQTRRQGQITKSGSGHGRRLLVEAAWHYRRAPANGQALRRRQAGQPAHVLAISWAAQQRLHRTWQRLDHRRAKRRTIVAVAVARELAGFCWAIANAD

SEQ ID NO: 437261 - protein, 340 aa, unidentified
MKKIFVGIDFSKLKFDAAIYNGQKNENVNSQVFDNDKNGFKDLLKWIESQTGIKRNDWLVCGEHTGLYSYALSLYLSENGIDIWLESGLQIKRTQGIKRGKTDKIDAFRIAEYAYRHNDKVKVFKPLSNSLDGLKDLLAYRERLVEAKKVFVISSKELKRVKQERTIAEFIITESSLEIQSIELKIKNCEKKIEEIIQSEIDLDRNYKLLTSIKGIGMVNAVMVLTITANFTLFTDPRKFGCYCGVVPFKYDSGTSVRGRTKISPLANRKVKTLLTQASRTCVMYDLEMRAYYQRISAEGKSDKIVINNVRNKLIHRMFAVVLNCNMYNPNYINPLKQVA

SEQ ID NO: 437262 - protein, 376 aa, unidentified
MRKRTTGKANKSILSKKLRRQIHSRAAQRRLTVGLDLGDRHSRYCVLSERGEVMIQGTLPTTKTGLNRLFERMPPSRVVLEVGTHSPWVSRHLAELAHEVIVANPRKVALICRSRQKDDRLDAEKLARLGRIDPQLLAPIRHRSAQAQGDLMMIRAREALVEGRTKLINAARGLVKSLGERLPACDSEAVGLELMEKLSASVRPSLEPLLRSVESLSAEIAAYDEQIKQLEERYPEVELLKQVYGVGRLIGLTFLLTIEDPSRFQRSREVGAYLGLQPRRRESGASQPQLGISKEGDRDVRRLLVQAAHCILRRRAPDSDLRRWGLKRMQRGGKNAKRKAVVAVARKLAVLLHRLWVSGEVYEPLYNRPAVRAAAA

SEQ ID NO: 437263 - protein, 316 aa, unidentified
MRAFLGIDIAKLKFDVVLLTGDTKRHKVFDNDENGFAALLAWLGDSACGLHACMEATGGFGDDLALFLYDHQIVVSIVNPLRTKAFGQSELTRTKTDKVDAGVIARFCRSQSPDPWQPSSPCIRELRALVRRCAALKEMRVQELQRRTQGTSSSFVASSMQRTIEWLEAEIDAIKRAVTQLIHKDDALRANFDLLTSIPGLGEQSAAILLAEIPDFRAFSHNKQITAFAGLNPRERQSGSSIRGHAHISKMGNARIRSALYMCALSARRHNPVLRGFANRLIEAGKAPKVVLVAVARKLLVLAYGVLKSQRAFEFS

SEQ ID NO: 437264 - protein, 331 aa, unidentified
MKDILTNACGLDIHKETVVACIIKNKPKFGALTDVSKTTLTTEIRTYSTLYDDLQKLRLWLEAEKCHDVAMESSGIYWHPIYDVLETAFGGDINLLVVNARHMKNVPGKKTDVKDAEWIASLLRAGLLRGSFIPPEEIRQLRQLTRYRKTIVQDICTQKNRIEKFLQSSGFKISNFLTDIFGVSGRCLINVLINTGMITPKDVERELRGAAKLKIKDMRHALNGLLNEHQRKFLSLQLEHLDSLSLHLKKAEEDIDALSSSFSSEFDLLTTIPGIGLTAAKSIISEIGVDMTRFPTCDHMTKWAGLSPGDNESAGKKKVLAYCTAIPILKE

SEQ ID NO: 437265 - protein, 423 aa, unidentified
MKVKQWKELTHYAGLDWARDHHGVVIVDAQGQIVTDFEFEHSLEGWKSFREKTAAWPNLGVAIETNQGAAVDQLLQHGYTVYPVNPVASESYRKRKAPSGTKTDHVDGWGLADALRLDGQGWKALQSIDPLTEQLRLLCRDEVLLIEQRTALVNQLQQALLEYHPCALQAFDDWTCPFTWEFIIEFPTPEVLCQAGQRRWHKFLHAHKLWRPETAQKRLTLFAQASQFKASQGITKAKSQLALSLCKLLRTLDQQLKAYRQQIEALFKKHPDHELFGGLPGARKILAPRLLAAIGSDPERYGNHNVLQCFAGTAPVRYQSGRINKVKVRWACDKFLRQTVHLWANCFRRASAWGQTYYEKKRQQGMSHACALRCLGQRLLKIVFKMLVDKKPYDAELHARNQQKHGSWVLKLLNENPGAKSCE

SEQ ID NO: 437266 - protein, 401 aa, unidentified
MKEFNAEEVRFETVSAVDAMRRAPAFARYPAYIGLDVHKETIAVSIARAGRDAPESRAEIANQPKKIAKLVERLTREFEGEVLLFCYEAGPCGYGLYHQLLELGQDCQVIAPSMIPRKPGERIKTDRRDACKLARTLRNGDLTMVWVPDEEQEAMRDLTRARDDLKAQERKARQQLNAYVLRHGHAWPSNKTRWTQTHYHWLESLKFPHDWQQVVLQEYLDAGKAASQRVADITAQMERVLPQWSLAPVVDSLVALRGIDKLAAMVLLAELGDISRFDSPKQLMAFLGLVPSEHTSGGRRRQGAITKTGNSHARRMLVESAWSYRFPARQTMHLKRKAKNAPDEAKAIAWRAQKRLCGRYRTLLQAGKNTKQTTVAIARELVGFIWDIACHEMPKVQQAAR

SEQ ID NO: 437267 - protein, 400 aa, unidentified
MSTAHERIWVGVDAGKGHHWAVAVGADGETLFSTKVINDEAQILTLIDTARERAAEVRWAVDISGRASTLLLALLIAHGQQVVYVPGRTVNRMTAAYKGEGKTDAKDARVIADQARMRRDFAPLDTPPELVSNLQVLTHYRADLIADRVRLINRLRDLLVGICPALERAFDYSAAQGPVVMLTEYQTPAALRRIGVKRLATWLERRKVRGAQAIATKAVEAAQAQQTVLPGEKRAAKLVCDLAHQLLALDERIKDNDREIRETFRLDERAEIIESLPGMGPILGAEFVAIVGDLSGYRDANRLASHAGLAPVPRDSGRRTGNYHRPKRYNRRLRRLFYMSAQSAMMRPGPSRDYYLKKRAEGLIHTQALLALARRRVDVLWAMLRDRRLFTSAPPVTQAA

SEQ ID NO: 437268 - protein, 368 aa, unidentified
MSNNVLYVGLDVHKNSIDVAIAEAGSEIRHYGSIGGELKDLEKVIRKLHSQGSELYFAYEAGPCGYQIFRFLKEKNYSCLVAAPSLIPRRPGDRIKCDRRDALTLARLFRAGELTAVRVPDADDEAMRDLTRAREDAISVERRAKQRTAAFLLRHGRRYPGKTTWSRGHWSWLFQQVMEHPAQQIVLQEYLDAVREAGVRVQRLTDQIRELVPQWRRAPFVKAYQALRGVSLIVAATVVAEVGDLNRFLNPKELMAYLGLVPSEHSSGASVRRGRITKTGNGHARRVLVEAAWAYRLRARVSRTLFKRQEDLPESIRQIAWKAQVRLCARYRRLLAQGKSKQTIVTAIARELAAFFWAINQAVVPVTA

SEQ ID NO: 437269 - protein, 345 aa, unidentified
MATVSVAGIRTFVERSKSGTFHVGVDVHKRSYSVALLRADGAWKEWTMPSSPKTLENAFLPLRSRIGAVVYEAGPTGFGLARRLIRAGIPVIVAAPSRVPRPVAPTSKTDRLDGRKLAEYAASGLLRPIAVPTEEEEGFRALVRRRHRLTDSIRHVKQRIRGLLLQFGIEEPAGLSLWGKAAVEEVGRLSLPPGTDETRDSLLRELAFLTQEREAIEEKLRQTCRAPRHEGRIKALKTVPGVGETVATTFRFHRPEEVTSYLGLAPVVRQSGSGKARVQIRPVGQRRLRSLLIEAAWIWKQRDPAADTFYRRILGRTGLPQKAIVAVARKLAVLLWRLSVSPAVA

SEQ ID NO: 437270 - protein, 345 aa, unidentified
MTTMNYIGLDVHKKTISYCVKDVSGRIQQEGKVGATRRELDCWMKTLPQPWIVAMEATIFSGWIYDHLLPHAAQIKVAHPLMLRAIAAAKKKNDQIDASKLADCLRCDFLPECHMMPRAIRDRRRTLRYRHLLVRQMVQMKNRVSGLLMETGVEYNKQRLHKVSYFRELLSANGEVPPSIRPLLKLSRETIERCQKTEYALVSSLRRDPALADRIKRLRTVPGVGPITALTWALEIGDVSRFGTIKQAISYCGLCGDERSSADKAMRMPLSKQRNKHIQRALVEAAKLAPRQNHEMAVIYDQERQKGNSNRATLAVARKMVAYLLAVDRQQRDFVPAEERRTTAA

SEQ ID NO: 437271 - protein, 453 aa, unidentified
MAQGSGLTRGDRNRNSRIAGLRAVVRRDRAVLAVDLGEDKQVAALADHEGRVLARKTVTAKAYQLGELLGWAAGKAAAAGFAGLTVACEPTGHRWKALMGLADAAGHGFVCVQSLAVARAREGDDYTRDKTDHRDAYLIGKLVARLECYLPERADEAWARLRHLGARRFALVADVTSCMQQVSDLLACAWPAALGVAARPLESTTWLAAMGAVTDRCAGNPARLRKLGYEKFTAAVRRELPRWGARNVYHKIARGLWEALADTGGVPAQRRGALERVHLLLGDWRSLLARLADTAGRMTGVLDELGLTELVTSIDGLSATGAAVILAETGELSRFSSARSVVKHAGLNPCEHTSATLAGRTRISRRGRPGLRTAAWRAVWGGLRHNRVLHARHAHLTGRDGNRLAGGQARAACAATLLRWLYAVVTRRQMWDARIAAGTIPARRGAVTTPAAA

SEQ ID NO: 437272 - protein, 400 aa, unidentified
MLSIGIDVSKGKSTVCGMKPGGEIVYTPFEIQHTREGMSELVSLLHNSGEEVRAVLESTGSYHCPVVAALLENGIFVSVVNSLRMKRFCSQSIRKVKTDRIDAMQIALYGLAYWQELQPTKLPEDTYRELQLLARQYYQMTSLLIKAKVDFNAICDQVLPGMQELMSDHAGRHKLSDFVLRYRHTTHILEMGETRFRKDYCKWAEKKGYRNCERMAALIFATAQNGIPVLPNAPSTQIVITEAIRVLHTVEASRDAILTQMQALAKTLPEYSLVREMPCIGDTLAPRLIAEIGDVRRFHSKRALIAYAGIDAPPYQSGKFCANNRHISKRGNRYLRKTGYEVMQSYVMHKPANDPIFTFIEKKRSEGKCGKLAMVAGLNKFLRIYYGKVTELYRSLPAIE

SEQ ID NO: 437273 - protein, 352 aa, unidentified
MAKNNFDELMSSGVDIGKDVFHLVGFNKDGQFVLRKKIKRMALVATFEELPHCIVGMEACMSAHFVSRTLRKLGFEPRIIPAIYVLPFNKGQKNDYNDAEAIAEAALRPNLKTVSEKTQEQLDLQALHRVRSRLVSRRTATMNQIRASLIEQGITVRKSVAALRASLQAILDNRDDEMSLRMRKLILGLQQDWIWIDKRIVMTTSEIEGVSKSEASCQRLMTIPGIGPIISTAVVAAVGNGEAFDRGRDFAAWLGLVPRQHSTGGRTILGRITKRGSLYLRMLFVQAAQVIMMRPKNWHKFSFGPWLEAASTRIQHNKLGVALANKLARIAWSVLNSGKDFDRKEKELATAI

SEQ ID NO: 437274 - protein, 342 aa, unidentified
MHATTIAIDIAKSVFQLHWVDADGVIVHRKLSRAKLMEFIARREPTRIVMEACGGAHHLGRQFTAMGHQVELLPAGQVRAFVRGNKDDAADARGIWLASQHSDIRRVPIKTVEQQGVQTLHRLRSHWMSTRNASLNCLRGLLYEFGIVLPKGPVAAIKALAAQRERLEQAAPAAVVRAVQLQLDMFRRCEQTVDALQHELKQELKQSPQAQRLDAVPGIGLLGATALAAAIGDGSGWRSGRQFAACSGLPPGHSGTGGKVRMGSMTKRGDPYLRTLLIAGARSLILRPDKSPWLQALLARRPVNVAVVALAHKLARQAWALLAHQRDYDPHWQPQPPAAQAV

SEQ ID NO: 437275 - protein, 344 aa, unidentified
MLYVGMDISSKSFVVHAVDERKRVVLKTEIAASREGLRWLVRQLGPQPKLIVFEAGNQLKWVADTLRKQEAVSLHVVHPNEVKWISTSSGKTDKVDARKLAELARGDLLPRKVHLVEGEARALRELISARTQLMQKRVSLLNALRGYLRQEGVRLGENFFARRDWNDRLENTKLSSTLKVVLRAFRPSVEALEVSEHELNQRISNIKNKKTELLETIPSIGVLSSRTIFAALDDPTRFENRKAVAKYGALSPTIYQSGDTVQLGRINRDGRREVRRVLLQCAHLLTRMKSPAARPLRLFYERIAKRQGKKKALVALARKLLTVAYGLLKSESPYDPMKLLPHAT

SEQ ID NO: 437276 - protein, 343 aa, unidentified
MEAYVGQQFVGIDLHRRRSVIVRTTAAGDVLETVRIVNDADRLTEVITRAGQAPEVVLEATYGWYWAVDALQAAGATVHLAHPLGVKAFEYRRVKNDERDAIDLADLLRMGRLAQAWIAPPATRELRELVRHRAKLVAVRSHCKAEIHAVLAKCGVQVPMSDLFGVAGTDLLDRLELPAPYAARVGSLRRLTDHLDFEIDVFAGLAHRRLATDPGYTAVQAIPGIGATLGAVFVAEIGDVGRFAAAPQLACWAGLTPRHHESDTHVRRGSITKQGSRLVRWAAVESVQRLPASTKVGQIRDRIAERRGHNIGVVAAARRQLEFVYYALRDHHVRALHPLPAAA

SEQ ID NO: 437277 - protein, 339 aa, unidentified
MSKTNQPAQATVFCGVDVSAATVNVAVQQEDHRFEERVFDNSASGHKALIAWLYKRKAMARVSLEATGIYSLDLALALDRAEGIEVAVLNPKIIHRFAQTLRRSKTDSADAQALAEYSRRMPFTPWCAPSVNGLQLRTISRHVQGLVVEHTRQNNHLHAAEKSVATPRCVVSDLKRSLASLQRRIVRLRREAREVARSDETIQKRFELLIRIPGIAEISALQLLGELSPLSPEMSVRQWVAHSGLDPSHRVSGTSVNKPSRMSRAGNRHLRRTLYMPALAAVRCDPHLKAFYEVLLSRHKAKLQAIIAVARKLLHAIYGIFRSQTHYDGSKLFPHLEVA

SEQ ID NO: 437278 - protein, 350 aa, unidentified
MSEISIIGLDLAKLVFQVHGADERGQGMLRKQLKRCDVLRFFAKLKPCIVAMEACGTAHYWAREIAKLGHEVRLIPPAYVKAFVKRGKSDRIDAEAICEAASRPSMRFVPAKSMEQQTVATLHRARDLLIKNRTMQVNALRAHLAEFGFVAGKGIGKLPDLIKIVSEAPAEALPDMVRATLSGFLDAITLINAQVAAIEKRLVAWHKTSAKSKDLKTAPGIGLMIATACSGMVSDPHAFKNGRHFAAWIGITPKLDGTGGKMRLGRISKAGNRYLRRLFVLGATSLLRSLANKTTPLALWVQGLLARLSRRAVTVALANKLARIAWAIMARGEAYKPHAAAGLASVGASA

SEQ ID NO: 437279 - protein, 451 aa, unidentified
MAAGACAGVDWAKDTHDVVVEDGDGERLWEATVAHDEAGLTRLCRELMRLGVQRVAVERPDGLLVERLLDAGLTVIAMHPNQVAAARPRFRPAGGKSDRFDAFVLCELARTDHHRFRALVPDSDQTKALRALTRGRELLVEQRVALCNQLRAELERFWPGATMIFADLDSPIALAFLERYPSPVDARGLGEKRLAQWLARQHYCGRRSPAALLERLRQAPRGRAGELEADARRGIVLALVAALKPIVEQIRLLTSEIAHAVRAHPDGHIFLSLFRDPKSVVCAATLLAEIGDCRERYPTAQHLAADAGMSPVAVESGRRKVACFRRGCDHRLRDATSTLADATRHWHPWAADRYAAARARGHDHPRAIRTLGRAWTRVLWRCWQDGVAYDPARHRAPQQHCAVTIPTPSGPRPDLTATQRMLGATVTHGAAQRAEREALDGKPTTATPLGG

SEQ ID NO: 437280 - protein, 417 aa, unidentified
MEYAPSTLTAVPVNRLACGIDWARDDHAVAIVDGGGRQVHRSIVEHSSAGLRALVTVLARAGVAEVAIERPDGPVVDALLGAGITVVVISPNQLKNLRGRYGSAGNKDDRFDAFVLADTLRTDRARLRPLAPDSESTVALRALCRARKDLVAHRVRVANQLREHLNRVFPGAVGLFTKLDSPISLRFLSRFDCQDRADWLTPRRLQAWLASAGYCGRTDPAVVFGRLGAAPRGLPSAAGAAQIPITQALVATLDNLVKQIAMLSEQIGQQLNAHTDAHIFTNLPHVGTVRAARLLAEIGDCRGRFPTPEALACLAGVAPSTRQSGRMRSVGFRWACDKQLRDAVCDFADGSRRGNPWAADLYSRARARGHDHPHAVRILARAWIYVIWTCWQNNTAYNPAQHRALQTVLHQDQPPGA

SEQ ID NO: 437281 - protein, 358 aa, unidentified
MQSKIKQSNWFDNQNIYVGLDVHKKQWTVSIYTEEFEHKTFTQPPKAEALYSYLKKNFPGAHYQSAYEAGFCGYTPHRKLCALGIDNIVINSADIPSSYKEKYVKTDRIDSRKIARELRSGDLRGIHVFDPIHEELRTLSRIRFKLVRDQRKCKNRIKSFLMYYSLEIPPEFDNNNWSHAFLNWMKEVIMNSEAGKIGLNVLPDDYQTKHIQLPDVTKKLKRLMKQGDNTLYMLLRSIPGIGPLTAISLLVEIGDINRFKHLRHLSSFVGLVPYTKQSDENEYTSGIHFRCNPYLRPLLVEAAWMAVRADPVLLKYYQQHIINSKPSKVIIKVAHKLLNRIRYVTKNKKRYVINTIQE

SEQ ID NO: 437282 - protein, 379 aa, unidentified
MILGLARWGGRPQRHQCAMVRVVRTCTKEPPAMSITMIGLDTAKSVFQIHGVDETGKTEIRRKLARNDLISFFKKHELCTVVLEACGAAHHWARILTGLGHDVKLIAPEAVKPFVKKGKKNDAADAAALCAAASRPDMRFVPAKSLEQQGILALHSARSLLVKQQTMLANAMRGLATEFGLTVPKGIGKLEELAVLVEEDETFPMKARQAFTGLFDQCKALTESIMTFEAEIVAHARHDETARRLATIPGIGPITASLIAATVGDIGMFKSARHFAAWLGLVPRQHSTGGKTRLGRITKTGNREIRKLLVLGATSMVYRAPQWNSAAGLWIRGVLERRPVRLATVALANKMARIAWALMTRKEVYRAKGRAEAATEAAA

SEQ ID NO: 437283 - protein, 364 aa, unidentified
MKKISTTTAKAFRKMEKLTIGLDLGDRSSCYCVLDERGELVLEQKVSTTPKAMEEVFGGMPRSRIALETGTHSPWVSRLLSELGHEVIVAHARNVRLIGESRRKDDRLDAKTLARLARIDPQLLCPVKHRSAKAQAHLTVIRARAGLVRARTALINVARGLTKSYGERLRGCSPRNLNKRAEGLSVELRTALGPLLEEIESLSERIREYNQRIEGIAEGLSPETALLKQVKGVGTLVALTYMLTLEDPHRFSKSRDAGCYAGLQPGRRNSGQSQPQMRISKEGDAYLRGLLVQSAHHILGPFGADSDLRRWGLKLAERGGKNGKKRAIVATARKLAVLLHRLWVSGEVYEPFYSSSRRVLVAAA

SEQ ID NO: 437284 - protein, 338 aa, unidentified
MTQNALAHAWVGIDVSKEKLDACLLRDNDKTTSLLVDNSAKGFSKLLAWVKRNAPEAQLHFALEATGAYSNAVAEYLVEAQEKVSVVNPALIRHAGIAYGFHNRTDKTAAVVIALFCKKEKPALWRMARPEVRLLVALVRRREMLRDQRIQEHNRLSNPGLPKEIIQSLNKHIRYLDKEIAHLEERITMHIQNTPALQADKELLLSIPGIGETTAHFLLAELPEVSEFEEASAVAAYAGLAPCERSSGSSIKGKTHLSKRGKAELRHGLYMPAVAAIQCNPLVKALYDRLRERGHTRMSALGAAMRKLLMLAYGVLKNGQDFDPKWQEKSKQPAPAAT

SEQ ID NO: 437285 - protein, 277 aa, unidentified
MEVNAIAIDLAKNVFAVCGADAAGKIVWRQQLRRAQLLGFMRKIPPCLIGMEACGGAHYWARQLVSLGHQVRLVSPALVTPYRKGNKTDRNDAEAILEAVTRPSMRFVAIKSLAQQDLLALHRVRSQLMKSRTALCNQLRGLLRERGVAVRAGATALKRALPAILAEENMEISGEVRALLIEMGEWLRTLELRIASCDEKLARQFKTDERCKRLAQVPGVGPLAATALVAAVGNAHEFRNGRELSAFLGLVPRQHSSGGKRFLLGITKRGTAICAPC

SEQ ID NO: 437286 - protein, 356 aa, unidentified
MKILALDIGKYKSVGCDYEAETGRHSFATVATTPQALHDLLVEREPDRVVIEICSIAGWICDLVRTLGIEIQVANTSDERWSWRKVKQKNDRRDALKAAQLSAVNQLRPVHVPRLEIRQWRALIAYRQQLVRRRTKIKNHTRDLLQREGVILPRGRKAWTQIGMAALQELVKPLSESSLNELWRGELGVELAQLKELQQQIAVVEAKLDELGAADARVRLLRTIPGVGPRLAEAIVTMLDDPRRFGSGREVSAYVGMVPKQFDSGETERSGRITRQGNRLVRSLLVEVAWASLRHNAWARQCYQRIHGGKKSRKKTAIVAVGRKLLVRCWGMLRHQTPWHWEMKTATPVSSELRVG

SEQ ID NO: 437287 - protein, 340 aa, unidentified
MEITTIGLDLAKNVFQAHGATATGAVGFRKKLRREQVLAFFSAQPHCLVAMEACASSHFWAREIGKLGHEVRLIPPAYVKPFVKRQKNDAADAEAICEAAQRPTMRFVAVKSEEKQASAVIFKTRDLLVAQRTQIINALRGHLSEYGFIAPQGVTYVDRLIAEVESNSSSAPEAARACLLRLVDILRELQAEIAALDAEVAVRAKRDAVAKRLMTIPGIGPVIATAIEALAPPVETFRSGRDFAAWIGLTPIQKSTGGKPRMGRTSRMGERTLRRLLITACSGVVRWAKRKGAPANLWLARMLARKPPMLVIVALANKTARVAWAVMTRGEVYRAPPSVA

SEQ ID NO: 437288 - protein, 419 aa, unidentified
MNTIETKKQRIVNGKTLIVAIDIGQVTPVGYCRCPDGKETKPFEFSNNAGGFRELWDRICSMKIAHHLEEVVVGFESTGVYGEPLVHYLRQKPVKLVQVNPMHTSRMKELPDNSPRKTDRKDPRVIADIMALGHALSVIVPEGAAAELRRLSQARERKIEQRTVWYNHLHALVFLFFPEFLQVMKDLKTQSAQYLLRHHPTPEGIRECGVEALTLLLRRVSRGKLGKQRAEALYEAAGESVGLREGRRGMLLELEEILSEIETSNRFIEKIEQEMVQPLAQIPYSECLLSVKGIGTVTVAGLIGEIGDFRQFHTLSEITKIAGLNLFEISSGNHRGLRRISKRGRSFLRKLLYFAALNTVRKGGVMHEKYQRYLQRGMLKTKALVAIARKLLRILFALVRDHSHYSENHSPIGRLKLAA

SEQ ID NO: 437289 - protein, 409 aa, unidentified
MAAVMIGVDPHKGSHTAVVIDQAEVALGEIRVRASAAQVQRLLAWAAAWPERTWAVEGAGGLGHLLAQQLVAAGERVLDVQPKLAARVRLLAAGDVNKNDPDDARSVAVAALRSAACPPVRADDHAAVLKVWAKRHRDLSRARNQVTCRLHAVLCELVPGGVSKQIRAAAAARLLDQLQPAGAVQAARRELAGQFLADLRRIDAQRRDTRKTLAAAVRACGTTVTEVSGVGPAVAAAVIGDVRDISRFPGPDCFAAYNGTAPAEVSSGNRKVHRLSLRGNRRLNHAIHMAAVTQIRYRHTKGRSYYDKKIAEGKTPKEALRALKRQVSDAIYQHLKAGARRAAAAAGPGGHPGNGSVASAAGLHPADRLFGQATPGPAPTLRPRPGRSKAMRPGSSRRTRRPVTAHTSA

SEQ ID NO: 437290 - protein, 404 aa, unidentified
MIFVGVDWAEGHNDVLVMDEQGAVLGKGRFGVGVGGLAQLHGLVADHAAEPAEVLVGIEIDRGLIVESLVGAGYRVYGINPLAVSRYRDRHTTSGAKSDAADAKLLADLVRTDRHNHRPVAGDSDEASAIRLLARAHQGLVWTRQRQVGALRSALRDYFPAALDAFGTDLGSADALGVLAIAPTPQAARGLSRAKIASAIRRAGRERNLDRRATEIQQALRADQPQAPDVVADAFGAASAARVAVLVSLNQQIAALEAALAEHFDRHPDAEILRSLPGLGLVLGARVLGEFGDDPSRFSDARGRKAYAGTAPITKASGRSLVVLARVARNRRLADACDRWAFCSLNASPGGRRYYDALRARGKTHSQATRQLANRWVGILHACLERRESYREEVAWPELLSLAA

SEQ ID NO: 437291 - protein, 344 aa, unidentified
MEYYAGIDVSLEQSSVCVVDATGKIVCETKVASEPEALVRFFAQLSVPVTRIGLEAGPLSQWLHAGLSEAGLETVLLETRHVKAALSAMIVKTDRKDARGIAQLLRMGWFRPVHRKSADAQEVRALLVGRKLLQSKLRDVEFSIRGILRGFGLKVGEVSKGRFAARVEELIAGHAMLEAVVGAMLTARAGLHSEFMRLHRQVLAIVRADDVCRRLMTVPGVGALVAVTFKATVDDPARFTSSKAVGAHFGLTPKKYQSGETDVTGGVSKVGDAMVRTVLYEAANVLLSRTTRFSTLKRWALDIAKRRGVKRAKVALARKLATVLHRMWVDGSEFRWGKETAVAA

SEQ ID NO: 437292 - protein, 339 aa, unidentified
MKIIGCDFHPGYQQIEMWDKGTGEVLEKALSHARKEEVRAFYAGLEGPVRVGIEATGQSQWFEQMLAELGHEVWIGDAAKIRAASDRRQKTDRRDAGLIVKLLDQDRSPRIWRPTCAERDARQLLLHRHKLVRMRTQVKNQLQALALNQGMQQKWRLWTERGRKELQDLPLLPWASRRRAELLTLHDQLEASIEELSQAVLQQANTRPVVQRLMTHPGVGPVTALAFVLTVGPAGRFRRGKQVASYLGLIPTEHSSGGKQRLGHLSKQGNSFLRGLLAEAAQSAVRREPEMRRAYQRLAQRKCRALAKVAMARKLAVRLYWMLRKEADYAQLFQGSHAG

SEQ ID NO: 437293 - protein, 413 aa, unidentified
MGQKTAEVELHYERCCGLDVHKELIVACFRDGSKNTIREFGATSKELQVLAEWLESVDCEMTVMESTGSYWKPVYNILELLGVEAMVSNARDVKNLPGRKTDVKDAEWMARLLAQGLLRPSYTPDRDQRELREVTRYRKSLTEERAREINRLGKMLEGANIKLSSVVDDILSKGSRKLLEAALAGESLTELTIEGMVKGKLKGKSALLVDAMDGVFSKTQRLLVKAVLDHIDDMTRRITDLDNIIRDEMEKYDKAIIRIDKVPGIGVSSAQTILAEIGLDMNRFPTAGHLAVWSGVCPGNNVSAGKSKSGRSRKGNQTLRATLVQCAQSATLAKDSFFKAQYDRLVVRRGKNRAKMAVAHSIIIVIWHMLKYDTDYNELGGNYYSKFNPEKKINMYLKKLAELGWVPPTPAVN

SEQ ID NO: 437294 - protein, 481 aa, unidentified
MKTKPPEKIQQATNPSTRGHWNKMNRKQRREMMRQIQSEDLSLEVVHPHAAGIDIGNESHYVAVPPTRDRQPVRHFGCTTVELKALAEWLKQCGIQTVAMQSTGVYWIAVYDILETAGLDVYLVNARDTKNLPGRKSDVQESQWLMKLHTYGLLRNSFRPSQEIRTMRTYWRQRNDLIRAAVSHIQRIQKALTQMNIQLGNVLSYVSGVTGQAILKAILAGQRDPHKLAALRDPRVKASEEQIARYLEGNWQEDLLFVLKQEQVGYEFCQQQIAECDRQLEQYLQLREDRSQGASLPQEMRKGRLVRKKGNKPVFALRAELFRITGTDLTQVDGIDVVTAATILSEAGWDMSKWEDEHHFVSWLRLCPDNRISGNKVLGKGQLPTNNRASIALRMAASTLRVSNTYLGAQFRRFRTKLGAPVAIKAMAAKLARLVYRMLRYGMKYVDQGAKIYEAQHRQRQIGQLKWNAAKLGFRVVEAAT

SEQ ID NO: 437295 - protein, 307 aa, unidentified
MKFYGVDVSKDTLDIACDGKIVQIANNKSSIRSFLRSVPAGSVVALESTNKYHLAMADGSYASGMAVYVVNPRMTRHYREALNLRGHTDKLDARTISSYITHHHEDLRAYVPKSSDQRRLQGLIRRRAKLVETKVALRQSLGGIKELKSDLDGVVKRIDKVIERIELLIDKQLDGNEGRQRITTVKGIGQVASAVLVADLDAGEFASADAFVAFYGLDPVPNDSGKSKGKRKISKKGHRLGRSMLYTCALSAASSKAWKPVYEHILAKGLTRVQALVCLARKIARTAWSIYTHKTEFQPERLLIGLT

SEQ ID NO: 437296 - protein, 411 aa, unidentified
MRRIIGIDVHRTFGEVVFWENGRLRHAGRIDMTRTALEGFGKTLLAGDEVVLEATGNSLAVSRVLAPFVARGIIANPLQVKAIAQAHVKTDKIDAGTLASLQAAGYLPQIWTPDAETERKRRLVARRYQVVRHRTRLKNAVHSILHAHLIPKCPHADLFNARGRAWLAAQQLPDDERAAIDRHVRELDRLAEDLVLLDREIARDAIEDFAVNRLMTITGVNLAVAAGIVAAIGDISWFNSPQKLVSYFGLNPRVRQSGLGAAHHGRISKIGRSHARAMLVEAAWAAAKAPGPLHAFFVRIRARRGHQIAAVAVARKLTVLCWHLLTKGEDYLWARPALVANKTRAMQLQAGHPQQKGSRRGPAYAYNIKSLRDREMLIAAQAEQSYERFVSQWKSRHPKSGARAPQFGRTK

SEQ ID NO: 437297 - protein, 414 aa, unidentified
MEKQWNIVCGADIHKKFLIATILSRDGTKITNRFGMALNDLLNFKNWVIENGCEQVAVESTGTYWVPIHTVLEGSVGLIVGNAYKIKHTPGNKNDLADADWIAELCLNGMIEPSRIFPKADRDLRRLTRIREGYVNDMTREKNRIHHALDSCGIKLSSVLTDIFGKAGQTILNGLLEGRTIDDILKDINLKRLKATAGEIRDAIKGSLDFTQIFLIRGSLEQMEAIQKRIDEIRKEIKGRIAYRKDELKIAMSIPGVGFTSASTLLAEIGDIADFKTPEQLAAWAGLVPSVYQSAGKLITGSITKHGSRHIRWILVQVARVIARGRNSKLKRFFLRVKSKKGSNVAVVALARKVLCILHHLLINREMYKEDGINKKVKIDVGNEIPPREMDLEEMITYIVRAGYEVRKGSTGGG

SEQ ID NO: 437298 - protein, 379 aa, unidentified
MKTNSTLSGASAPVSEAKQQLGDNFPVPQPICAVVGIDLGDKQSKYRVLDLQGNLIGDGVVATTLAALRLLFSGKGRMRIAVEVGTHSPWVSRLLKEQGHEVIVANPRKLRLITESDAKNDHADAALLARLAYAGPDLLSPVQHRSAQVQYDLAVVRAREVTVTARARMVTAVRGIVKSTGARLRVCSTGAFASKALADCPEPLRLALLPLLRLIQQLTAEIRLYDRMVVQKAREAYPETAPILTIPGVGPLTALTLVLLLNNDKQRLFRSRDLGSYFGLCPRQRDSGQHVSQLGITKAGDTLMRKLAVQCAHFMLGRFGKDSALRRWGLSLALRGGKNARKRAVVAVARKLVILMHRLWITQEAFDATRGLRTEPQAA

SEQ ID NO: 437299 - protein, 346 aa, unidentified
MLYVGLDLSRKRLDVCVLDREGVSVEVCAVPPDADGLAGLVRRLDRYGLPVVAAIESMTGSRFVRDELAERGWRVDVADAARVKGLAPLACKTDRIDAWVLAELCRRDLVPAIWLPSLQVRDERERARFRMHLVGHRTALKNRIHQTLLSFGQPRPVSDLFGARGRDLLERLDLPPAWSGSVQASLRLIDELDREISEIERELAGSGADHPYVSLLTTVPGIAWVLGYTIAAEIGDINRFASPAKLAGYSGLCPRVYQSGERDRRGPISKAGPKYLRWALLEATTHACKHPAYAARYQRTKTRLGRQRGPKVAQVELARRLTEAIWHMLTRNKPFAPAGASQALAA

SEQ ID NO: 437300 - protein, 437 aa, unidentified
MKECIATVLSELFISRMLPGDHLPSTYFNQVYEDKRLWIVTASNTLGKEGFMIYAGIDIAKLNHFASAISSDGEVVLKPFKFTNDYDGFSKLKSSLDSFDPDQLIIGLESTAHYGNNLVEFLVNNNYKVCVINPIQTSTLRKNNIRKTKTDKVDTLVIAKALMMNPTRFFTKYDISLLHLKELGRFRLKLIKKRTQAKIQLTSYVDQAFPELQYYFNGIHHKSCYALLKEAPTAAKIVSMHMTHLSHLIEVASHGHFNKETAKELRVLAQTSVGIDDSSVALQITQTIELIELLDKQVKTVESDMESIVKSLDSVIMTIPGIGYINGGMILGEIGDISRFSNPSKVLAFAGLDPAVYQSGFFEARSTKMSKRGSKALRFALVNAAHNVVKNNKTFKDYYAQKRSEGKSHYNALGHCAGKLVRIIYKMLTDNVAFNLD

SEQ ID NO: 437301 - protein, 391 aa, unidentified
MIYVGIDVAKDKHDCFITNSNGEVLFKAFTISNNQDGFNILYQRIESVMEDVTKVKVGLEATGHYNYNLLGYLIDKGLTTYVINPLHTNLYRKSLSLRLTKTDKVDARTIAYMLMSDVNLKSYSNTSYHNEELKSLTRYRFDKVKERAKLKTSVSRLVCILFPELEKLVPTLHMASVYALLSEFPGAKHVAGAHLTRLTNLLSDASKGRYGKDTAITFREAARASIGSNMPAKSLELKHTIKLILELGSEIDEIENEIKIIMDEINSPILSIPGINYRMGAMIIAEIGDFSRFDSPDKILAYSGFSPSTYQSGQLDSAYSHMEKRGSKYLRYALYNAAKYVCHWDSTFAGYLAKKRAEGKHYNVAISHAVKKLVRVIYHLVKSNQQYIKVA

SEQ ID NO: 437302 - protein, 339 aa, unidentified
MKLYAGIDLHSNNSVLVVMNETDKTVYERRLPNQLSVILAELAPYKKKIQAIAVESTYNWYWLVDGLMEEGYEIKLVNTAAVKVYEGLKYTGDEHDARHLAHLLRLGVLPTGHIHPKGERAVRDLLRKRGQLVRYRTMQILSIQATVSRNVGHGISTDEVRKLDDAAIDRLCGGDAARALAIKSNLVILRSLDAQIEEVEALALQKAKLKPEFKKLLTVDGIWNILGMTIMYEAGDMDRFAKVGHFASYARCVGSSRWSNGKKKGEGNRKNGNKYLAWAFIEAAHYAVRYNERIRKFYQRKQAKTNKIVAAKAVAHKLARACYHVLKEQQPFDETRAFA

SEQ ID NO: 437303 - protein, 342 aa, unidentified
MPQTLGGVTVGVDTHGKIHVGAVADPLGRILGTIEVTTDERGFRQLENYAKGFGTIERFGVEGTGAYGATLCRWLTNRGHEVLEVDRPDRKMRRLRGKSDPIDACAAAQAVLSGRASGVPKARDGAVEAIRVLRMARGSAVRGRTQTMNQMHALVTSAVDPLRMQLRSCSPAKLVDRCVGMRPGKLDSPAAATKFALRELARRHRALDEEVERFDEELSRLVAKRAPRLVALVGVGTDVAGALLVTAGDNPDRLRSEASFAHLCGVSPIPASSGRIHRHRLNRGGDRSANQALWRIVMVRMSWDERTRAYAARRTSEGLSKREIIRCLKRYVAREVYEVLVA

SEQ ID NO: 437304 - protein, 427 aa, unidentified
MLFEAVIGCGSLDICRLWLTSYWLAGPLTAVRGEWLKRGLHCPKLVCPPRIHAGSNQERLVSVGIQFSRDQVVIAVDPHKGSWTAAAVDASLQPLASIRVPVSREGYRALRRFARRWPDVGWAIEGATGIGAPLTRRLRADGVEVIDVPAKLATRVRVLSIGHGRKNDDADAVSVGIAALTSPTLNTAHTDAHTTALRAIVDHRDDLVKIRTQTINRLHVVLTHLVSGGARRNLTADQAAALLRGLRLRDPAAKTLRALAIDLISEVRQLDRRIAKAANDIQTAVTASGTTLTDVYGVGALTAAKILAHIGDVHRFRSTAAFATYTGTAPIEVSSGEVIRHRLSRAGNRQLNYCLHVMAIVQVRQDTPGRAYYLRKRSEGKSHNEALRCLKRRLSDLVYRRLIHDANAQKAGPGGHSGAALLSRAAG

SEQ ID NO: 437305 - protein, 448 aa, unidentified
MNNGSGVSRGDRNRNARLSRLREAVPVTSAIVGIDLADRKQMVVVTDHDSRVLARRTFRCKAWDLGAALDWAVDRASQAGFAGVTVAAEPTGHRWRVLGQLVADRGMRFVCVQPALSSWARKTEDLTSDKTDDKDAVLIARLTGQLRCYLPEPVDETWGRLRHLGARREQLIEEHVRSIQQIRDLLECVWPAALEAAKWPFRSTTWIAAMTVVMDRDGGDLDRTRRLGAARFEHAVRKEVTRRGKARPCLRIAHALFTALTDTAGVIAHRPGAFERLAWTLSDWDHARAKLADTESRMVAVLDQLELTDLACSIDGLSPVGAAAILAETGDLHRFTSARAVVKHAGLAPRERMSGTFTGRARLTGAGRPGLRVAAWRAVWGCLQTNRVYAARYRHLTTRETNRLTPTQAQTAVAAAILRQLYAVVVHQQAWDPAVAAHGTRGSAVIAA

SEQ ID NO: 437306 - protein, 337 aa, unidentified
MAKETPQRSVGVDVSARWVDVERAATDEAVVRRQWPNTAAGHRQLARWLTSGGRRARVVLEATGVYSLDLALALQRTARLEVMVLNPRVSHDFARACGQRARTDASAATALREYAARMPFVAWEAPSTAALGLRAVMRRVAALVAMRVQEQNRLHALDAAAALPAVVRVDVREQIQALGRRIARLEREARAVVESAADLRAAYAHLRSVRGIGQRSALALLSELAVVPRQLSVRQWVAHAGLDPRPIRSGSSVHPPVRISKRGNVHLRRHLFMPALVAVRREPAVQRLATQLAARGKAPLQVLVAVMRKLLHAIYGMLKTDRDFDGEKFRQSVATAD

SEQ ID NO: 437307 - protein, 370 aa, unidentified
MQEYATSIGLDVHARSISACAFDPMTGEVTRASFPYDPSAVAEWALYFDAPKAVYESGVTGFHLCRALRALGLDCAVGAVSRMQKPSADRRRKTDRRDAEFLARLLATRNVVEVDVPDEECEAARDLSRALEDAREDLQRAKQRLLKFLLRHGLVFDERTPTGARKGNWTRAWWSWCRAISFAEPDARTTFEHYKDEVRRLEDAKRSLERAVAAAAGRPRWKPRVDALRCLKGIDVATAHALVAEAGDFSRFRGAPAFAAWCGLVPSEHSSGEGQSRGGITKAGNKHARRLLVEAAWHVPMSGRDPKDLAAGQEVAPAVRRHATKGVRRLIERREAMAGAGKRPTVANCATARELACWVWAIGRMVEERA

SEQ ID NO: 437308 - protein, 414 aa, unidentified
MLKIVYPICCGMDVHKSFVVACIASTNEQGVTTYKSKRFSTFTGDLHQCADWLSENNCKDVRMESTRKYWIPVYNILESTCNIVLAHPMYVKAIRGKKTDKRDAKWIADIFKHDLVAGSFIPPADIRQLRDLVRYRWKLTNFTTGEKNRAQNCLTVSNFKLDDVFSDVFGKAASAITDRILENPAEKITDVSCFRTKGMKATNEQVLAAVDGEMCEEQAEKLRIIRSHMDNLELCKANLESLILTTAEKYLPQLGLVMTVPGIQSFAAIGIISEIGVDMSVFPTSKHLCSWAGLMPQNNESAGKKKTTRISRAGAYIKPLLVQCALSAIRAKQFPEIRNRYLALRKRRGHKKAIIAIARMLLTAIYNMLKKNEPYNPELYRKDDRTPAHREVSVEEAIFILQRQGYLVAAPSTT

SEQ ID NO: 437309 - protein, 401 aa, unidentified
MQEPLQHNSIDVFVGVDVGKGQHHAVALDRSGKRLYNKALPNDEAKLRALINELKAYGQLLFVVDQPATIGALPMAVARDEGVLVAYLPGLAMRRIADLHAGEAKTDARDAAIIAEAARSMPHTLRSLRLADEPLAELTMLCGFDDDLAAQVTQTSNRIRGLLTQIHPALERVLGPRLDHPAVLDLLERYPSPAALAETSEKTLANRLTKLAPRMGKRLAAEIVQALGEQTVVVPGTQAATVVMPRLAKQLAALLQQRDEVASEVERLVHAHPLYSVLTSMPGVGVRTAARLLTEVAHKTFASAAHLAAYAGLAPVTRRSGSSIRGEHPSRRGNKVLKRTLFLSAFAALRDPISRAYYSRKIQQGKRHNQALIALARRRCDVMFAMLRDGTFYQPQTAPNA

SEQ ID NO: 437310 - protein, 324 aa, unidentified
MSREPAATPTRSACWVGIDVAKASVAVAVRPSGAGWQGATDPAGLSALVAWLAPQQPTLIVLEATGGYEAPVVTAVALAQLPVVVVNPRQVRRFAQGVGRLAKTDALDAAVLAHFAEAVHPTPRPLPDAATQALHALVERRRQLVAMQTAERQRLQQSRVTAVQERIQKHLDWLADELQDVNDTLQAQLQASPLWLAQQELLRSVPGIGPTTACVLLAELPELGQLRAPQVAALVGVAPLNRDSGTSLHGARTTWGGRAAVRATLYMATLVAVRVNPVLRAFYQRLLERGKAKKVALVAAMHKLLILLNALLKHQTRWQSQQAA

SEQ ID NO: 437311 - protein, 311 aa, unidentified
MDAIYVGIDISKDRLDVHVRPAMQVFNVPRTDTGIEALTARLLELKPTYVALEATGGLERIVVASLATAGLPVVLINPAQVRDFAKSLGKRAKTDSIDAAVIAHFVEATKPELRPSPDEATRNLADLVTRRRQIVDLIGMESQREKGAHGRAKESIARVIASLKKELREIDSDIDGSVKGSPIWLADQKLLVSVPGIGNTTARILLAHLPELGEIGGRKIASLAGLAPFTKQSGAWRGKSTIAGGRTVIRCAMFVVALTAMRRNPVLSKAYNALVEKGKPKMVALIAIARRLLVMLNAIMRDKKLWQPQNA

SEQ ID NO: 437312 - protein, 338 aa, unidentified
MYYTGIDLHKFTSFLTTVDSSGNIVKQQNIKNVEHNFVQYFGSISGDHKTTVESTMTWYWLDDLLNSLKIPLVLAHAKYVKAIAYAKVKTDKVDSHTLAQLLRMDYIPQAHKISNQNRSLRDALRARLKIVQRHTSVTNSMHLLLAKYNFDNPSQLSGIAKYQYQQLAKLELLLNDQILDLEKQLYPSLIPNDDIQRLLWIPGIGKLNAFNILLEVDDINRFDSVNNFYSYCRLTPSARNSAGKAKQRSSKDGNKYLKVVFSDAAVHAIHYYPVIRKYNNSLMRKKNKQVAKTIIAKEIANIVFHVLKYKTNFNNKFKGKDLEHTKSLQWPRVVSPYA

SEQ ID NO: 437313 - protein, 351 aa, unidentified
MDRYVGVDGHSRSCTFGIVSAAGRRLESKVVETNGRALVETIRLIPGRVHVCLEEGTQSAWLYELFKPHVAEIVVSVPSKAKGAKDDKRDAFARAEELRVGAVETRVFKAPNHLAALRTAVRAYNFAVTDVVRAKNRLKAVFLGRGIVTDAGVYDPERREGWLARLSGPYRHLAEILSRQLDLVVPARDEAERWLLTESKTHPIIRKLLTAPGMGPIRTAQVVAIVAVPDRFRTRQQFWSYCGLGIVTRSSADWRPGRKGGLERSQNLSTRGLSRKRQPLLKSVFKGAAMTVITQLPNDPLHAHYQRMIEKGIKPPLARLTVARRIAATVLSMWKNQEVYDSKRHAVVEQP

SEQ ID NO: 437314 - protein, 391 aa, unidentified
MRYFGLDIHKSYCEGAELLPDNTVRRFRFANSRSEWKKFASTLDDQCKVALEATGNAFMIHDLLSARGVEVVLVNPLRTRAIAEARIKTDKIDAEILVRLLAANFVCESWIAPQEERELRLLLHHRMALKKQACAAKNRIHACLMRQGITLPVKDIFGAKGRQLLASLKDLPEVEKIILVSNLKVLEFLEEEIKALEKELNRRAKLIPGIELLLGIPGINVLAALTILAEIGDIKRFTSAKKLVSYAGLAPSVYQSGKTRYTGHITKAGRSMLRWIMIQVALQVVRSPGRLRTFYLRLKKRKGHKIAIVAAARKLLCIIWTMLANNREYHELRDDLRRHKIRLMEARALRYEIDQGLLSKIKIYAFPKHDQPNVTGEEPRSAYTGVALSHR

SEQ ID NO: 437315 - protein, 354 aa, unidentified
MKEYSMIVGLDLSDKTSRYCTLDADGEVLGEGSIRNTEKGVRGHFGHLEPCLVAIETGTHSWWMGRLLAELGHEVVVANTRKVRAISQNDKKSDKADAQMLARLARSDRELLCPVKLRRARAQTDLAMLKARDALVGARTKLVNTVRGLLKSFGEAPPACSTESFAKKVRPCVPEEHKEALLGLLDTIEVITQRIRDYDQKLESMVKEQYPQAALLQDIAGVGPLTSLGFVLVVDDPSRFARSRDVGPYLGLTPRRDQSGQRDPQLRITKAGDGLLRRLLVNAAQYIMAHETADSQLRRWAWKLAGGEECKDKRRKKRAVVALARKLAVVMLSLWKTGSCYEPFPGASAKEGAS

SEQ ID NO: 437316 - protein, 289 aa, unidentified
MTFEGLLHFVAKQKRLAGEVYTCYEAGPFGYHLHRKLTAMGVTNYVVQPQIWDEHSKGVKTDKLDALALCQRLDRFVRGNRKAFGIIRVPTEEEERERAFSRQRQQLVRERQRLQAMGRSLLSSRGIYVTGRWWKGATWKQITAEAPDWVIERLEVFIRLITPVEAEEKALTEAIEEAGRQTKIPKGVGPLSFEVLRREVGDWSRFNNRREVSSYTGLCPREHSSGGKRRGGSINKSGNPRVRAMLVEMVWRMMRWQPDYHALCKWAPVLENPKASAAARKKAVVAVAR

SEQ ID NO: 437317 - protein, 409 aa, unidentified
METIVERPAALDIHKAQVTACVRVPGEGRAREQHVAEFSTTVRGLLTLRDWLAAHRVTQVTMEATGVYWKPVWAILEDEFECLLVNARHVKQVPGRKTDVSDAAWLCQLAEAGLLRASFVPPKPIRALRNLTRYRKTQIQERAREANRLHKALEDTGIKLDCVATDILGVSGRAMLDALINGTTDPEVLADLARGRLRAKIPALREALQGRFDHLHTVWIGAILAHIDFLDEQIAGLTETIGEQIAPFEPAVELLCTIPGVHRRTAECVIAEIGVDMSVFPSAKHLASWAGLCPGNDQSAGRRRSGKTRNGSKWLDWALEEAALAAVRTKDVYLAAQYQRLRPRRGHKKALGAVKHSIICAAWYMLSTGELYRDLGGDYYQRRDPEKTTKRLIAQLERLGHTVVLQEAA

SEQ ID NO: 437318 - protein, 320 aa, unidentified
MRIVCGLDVHKDSVFVCILNEKGEKFEAKYGVLTPELGELHQLLLTHEVKEVTMESTSIYWHPIWRILGDIECLKLVNPYFIKQLPGRKSDVRDAAWIAECTMKDLIRGSFVPDATVQRMRQYNRRIFDLNKEKVYKLTKLDALLHRCNIRISNYVSSIDSKSYKEVVRLLSEGIVDAERLMEAIHGRTVNRVGKDVIRAALTGVVNEVDIDLIRQYREELLIDDKHLKECQNKLTEICRNEFPKEFENLQTIPGVKERSATSILSELGADMKMFLTASALVSWCGLKPRNEESAGKIKSHSLFSNITSLLMYIFIYYNF

SEQ ID NO: 437319 - protein, 332 aa, unidentified
MSVYVGIDVHRKRSQVAVIDEVGEVLANRNVTNGVRPILSVIGELPAGTPAAFEAAFGWGWLLELLEGYGFEPHMVHPLQCKAIASARLKNDKVDAATLAQLLRADLLPEAWIAPPEVRQLRAMLRHRAQLVRLRTLLRNRIHAILPDHGYGRPAGCWSGPGRRWLASLELPAVSREVIDDGLALMDALQQPIDRLDQEVRQRAKADPRVKVLTQLPGVGPFTALVLLAEIGDISRFGSARKLASWAGLTPTVRGSDRTVRHGHISKQGPTWARWVLCEAAQTAKRHPDFAPGYEALARRRGKKIATTAVARKLLTRAYHLLTDASAAGEPR

SEQ ID NO: 437320 - protein, 332 aa, unidentified
MYLGIDVHKRYAQVAVMDEAGEIVEEVRVENANLDDLAQRYAGAEAALEATSNYYHIHDTLSEHLDVTVAHPKELNQIANSDKKTDRVDAKELARMVRLNSVPESYVPTDEIREARALVRGRQTLVENRTKYANKIHGLLSDHGITEDVKPLNKEGREFLRELSLPTPWDALLESYLELIETLTEEIQELEETIEERAGSLKETQLLMTIPGVSYYTALTIYAELGKISRFDGDKSVVSYVGLNPVIRESGDSRIEGSISKRGSGRVRWLLVQAANTAVHTCNDEYLSRFYERLASRKNSQKAIVACARKMLVSIYHMLDRGEVYDPPDVSS

SEQ ID NO: 437321 - protein, 427 aa, unidentified
MKTEDSRLEEFRQLRNEIRGSEKHLLVGIDIGKEKHNAFLGTATGKTLYKRLIFGNSKEGFEKLLTHTEAVKVQNNLSQAVFGMEPTANYHKPLGEYLITRGHEVVLVSGNAVSNNRQLLDGRWDKNDGKDSANVADLISQGKFQYYEYPCREIRDLRGLLSLKRKLKKQAQGLWLRIRNNLVAQYFPEMDRYYGSCTQDNLAIVRNCLSPSVIAGMEYNEFFKTVVSRKKGLRQHKHLYKLWQLAGDSICCEAGNAAVCEADVLVEQLKQTREAIEQVEKEIEKLCCLFSEYEFLMSIPGFGPDISAKVLAYIGDPYRFDRASQVVKMAGLDLSANRSGKTTDRAVPVISKKGKADLRYALYQAALIASSHNQHFIKYFTEKIRGREREKGIKTKMRVKLSAKLLIIAWTLMKNKELFNPDYLKIE

SEQ ID NO: 437322 - protein, 341 aa, unidentified
MLKFTIGADISKDKINFALRYLNDFPLEREVENTTSALNKFIKEVLSFVKKFSKENKSIHSIDFIMEHTGIYGNLLIECLAGHRLNMYVVSGLEIKNSAGISRGKNDKIDAKRIADYGIRFADKLKPYTFCEKMLVEIKGLNTKRAQLVRIKSQMTQANDDNKKFQSKDLLKKLNKIDDPIVKALDDAIEKIEAEMLELIKSNTAFYDNYKIAQSVPGVGKIIAIAFICATNNFNKFESAKALGSYCGVVPFGKESGRYKGKDKVSPIANKTLKTLLHLGALASIGGKNAFAAYYQRKVNEDKKNKMLAINNVRNKIVKTLFACIKNKTKYTADYSFKFAA

SEQ ID NO: 437323 - protein, 361 aa, unidentified
MKKSIKSKRGPEYVSVGLDVSDRKSCWVGLGQNGAILEKGQVATRASDLEKWAMSMAPTVIAIEAGPHSPWMSRLLARCGHEVIVGNPAKIPTISRSRSKSDWRDAEQLARLARFDRSMLHEIRHRGEQAQRDLQLIRSRDAAVRARSRLVTHVRGTVKAHGQVIVRCSTDAFARHARAVVAEPLREIVEPILEAIEKLSTTIHRYDVKIEVLAAGTYSDSQWLTQIKGVGALTAVSYLLILGEASRFRRSRMVGPYLGLVPARSQSGESDPQKGISKEGDRLMRRLLVQSAHYILGPHGVDSDLRRHGEAIAGHGGKNAKKRAAVAVARKLAVVMHHLWATHEEYVPLFNHRIAEELPAA

SEQ ID NO: 437324 - protein, 337 aa, unidentified
MTLYCGIDLHANNSVVAVLDEHDQTIYEKRLPNELATIIEVLSIYQTELEACVVESTYNWYWLVDGLMAAGFPVCLAHTSALPEYSGLKYSNDFSEARQLAHLLRLGLLPTGYIYPKEERALRDLLRRRLLLVRQRSLHHVSLQSLIARHSGQRLNTRQIKTLIREQLADYLEGHALLNGEITHQARCWLDRAVMRIEQELQHQINSREDYQLLQSVPGIGPILGTTIALETGTIERFASAGNYASYARCVKSEKISNGKRKGQGNKKNGNKYLAWAFMEAGHYGAIWNPRIKRYYQRKKDKGHILVAKKAVANKLARACYHMLKRREVFDVTRAFS

SEQ ID NO: 437325 - protein, 349 aa, unidentified
MATYYIGADVHSNSIEIAIRTRREVVSRHSIPPSIQAAVEVLSSLEGTRHMAIEEGPMAGWLYRNLRQKVDSFVVADPRRNKLISSDGDHDDKIDSAKLALLLEGGYLREVYHSDDDRRVELKHWVGLYHDRVHDAVRHMNKIRARCRMHGIRIPRKVLRQPEHRADWLVKLKQPSLAKQLLMLWIGYDATAKQARMAKQHMISLSRKYPVIRLWQQLPGIGTVRAATVFAYLDTPWRFKRKNKLWKYCGVGLQRTASGTDKKGKPKPARLQMPWAANRTLKDAILGAALTAINQKHNAFKDDYERMVQNGVILSNARHTVARKLLTAMWGIWKRSCQFNQSKGAIEIN

SEQ ID NO: 437326 - protein, 344 aa, unidentified
MDHFAGLDVSVKETSVCIVDETGNIVREVKLASEPDALVAVLKNAAYHFKRIGLEAGPLSQWLFSALAEAGLPVICVETRHMRAVLKAQINKTDRNDARGMAQMMRVGLYRPVHVKTLRSQKLRMLLTHRQLLLSKAIALENDLRGTLRNFGLKVGMVGKVKFEARIRELVENLPDLAVLVEPMLIVRRVLREQIVILHRRLLAIVRDDEVCQRLMTTPGVGPVVSLTYRATVDIPARFRKSKSVGAVFGLTCAKYQSGEVDWDGRISRCGDQMMRTMLYEAAQAMMRSKKWSWLKAWAMQIARRRGMKKAIVALARRLAVIMHRIWVDGTEFRWTREQAAVAA

SEQ ID NO: 437327 - protein, 480 aa, unidentified
MNVNVKKNKRQVKVQDSSINVLSMEEMKSRIATVEKDMKSYTWRELETNGKFAKNDKLSFISDDMLIVGCDIGSEIHYIRAIDTRGRELSKEVYSFSNNEGGFQNARDWMVNLAAARDKKQIVLGLEPTGHYWFALAAWMISKGISVVQVNPYAVKQSKEIEDNSQLKDDRKDPKLIANLVKDGNYGMPYLPEKVYADLRRLSMFRDQLTEDRIRYINRLHRELKIYFPEYMDAFGKIDGAFALEVLKTAPMPDDILALGEAGLREIWQEAKLRGRGYSRAKEIVEYAEKSVGLKDGTYAGREAVKWFASQIVVLDERLAEVESALHQRCMEIPHAENIIEIRGIGENILSGILAEMGDISRFDDVKEIQKISGLSLVECSSGKHKGQTKISHRGRKRLRYWLFQAAKSAVSHGYEYKQLHEYYTTRTDNPLKKMQSLIVIACKLLRVIYTILKTGIKYDPEKLLKDIRWPEKATVKEAA

SEQ ID NO: 437328 - protein, 360 aa, unidentified
MDKYIGFDIDSKKAVICVVQKGEKEMYSTIGCDIQSMRKYLKQQKADGSKVHLTFEISGQAGFIYDSLIDCVDTITVSNPSKMTWIYRTAKKNDRIDSRKQAVLLSIGEIPAVHMPSLEVRQWRNMILHRRNLVNKVTEVKNKIRAVLKSQGFTRPIHRGSLWKRVNRTWMSELCGGGVNPASLWQMNLYNFMEQLGLLDGQVKRVTEYLDVYLSKKAGGGLLMSIPGVGPRTAEAVLAYTDDINRFGSSKEYCSYFGLTPRLDESGTSRRLGHISKLGPSVVRWVLYESSWKVVRKSKAMRAFYERVMSNGQAGRKKIAIVAVCRKLLSIMRAMMLTGEMFNEELVSRECGNEQLRKAS

SEQ ID NO: 437329 - protein, 343 aa, unidentified
MHIASIGVDLGKTTFHLVALGEQGKVVVRKKFSRKQLLAYTANLQSSLIGIEACSGAHFIGAALRNQGHDVRLIPAQFVKPYVKSNKNDFLDAEAIAEAVARQNMRFVPIKTEDQLDLQALHRVRDRLVHRRTAIINQIRGFLLERGVTFAKGPANLRNRMPAILEDAEQNLSPRMRTLLARVWQEWKQLEVDIADASDEIERISNEDAGCRRLRQIPGVGPLVSTATVAAIGNGAAFRKGRDFAAWLGLVPRQHSTGDKAKLYGISKRGNIYLRRMFVHGARAVLLRVKYDTGGFGQWIRQLEARAPRNKVVVAIANKLARIAWAVLFRGEDYQHMAVCTQV

SEQ ID NO: 437330 - protein, 356 aa, unidentified
MAIAIGIDVHKKTSTFFAYGEDGEPLEEFNKRFKRVASNRDGYTEVLVWLGNSDCDFLMENSTKTHDVYWILQGLGYKNLYVAHSVDLKRITKSSKKTDQFDAEKLATYMRVKQQNIDQFRTCYICTPEDMRIRRLCRIAKQELFDMGRIRRRIRSHLLLTGREWMGGLNTKWECEALMNEYDPGLRHLGRQLNECRLRRDAAEEAVVKAIKGNEKMFPIYEKLKEIPNFGDITAAYLAAVIVDIDRFENPKKLAAYLGIVPRMRDSGETENHCGLTRSGDPAARWLLIQATFRLVNSSAPDSQLKAFFAEKNGGSIEERKEADTSGLLKRPALVATANKLIHIIFALLTHPDRHW

SEQ ID NO: 437331 - protein, 356 aa, unidentified
MFYSGVDLHRRSLSICTVDDSGTVVGRTKIKTDPALVTDYFHQWPGDHRAVVECTTGWYWFCDLLRSIRVTIVLAHAKYLKAISYAKVKTDAVDALTLAQLLRMGYIPEAHQLPPEYRALRDLLRQRMVMEHKRTNIIQRISSILAQFNITSLPMSPSQTGFADFLAECSITEEYRMTLLMYHQQCLQATEHRKQLERYFKARLRPTPTVQLLMSIPGIGDITGSIIAMETGDIHRFADAKHYCSYCRLVPGAKDSGGKHSHRSGSKDGNQYLKYAFTEAAIKAMMFYPEIKHFATRLERRSTKAIARTVVAKELAKITYYVLTRQQEFQTFKGILIEKLRDWPRARKPVRLTGDT

SEQ ID NO: 437332 - protein, 388 aa, unidentified
MEARTVNNPPSAASHDETVRCVLAIELSKKSWIVAVNTPLSDKVSRHTLEACDWKGLLELIARIRTRVMALNRPVEVVSCYEAGYDGFWLHRLLEAHGVCNYVIDPASVQVDRRARRVKTDKVDVGRLLRSLLAYLRGEPKVWSVVRAPSIAEEDDRRLHRERDRLINERVQHVNRIKGLCAVHGIYDYEPLRPNRLARLEQLRAADSQELPPRVKAEIVRELQRLELVLNMIKTIEAERDAIVSAGKSSMHANAKKIQDLIRLKSIGPEIGTALVGEVFYRQFNNRQQLGSYVGLTPSHFQSGPMSRDQGISKAGNPKARTIMIELAWLWLRHQPNSPLSIWFRERVGTAKGRIRRIAIVAMARKLLITLWRYLETGVAPTATVLKG

SEQ ID NO: 437333 - protein, 401 aa, unidentified
MKYGVGIDISKGKSTVSILSEYGEVIETPFEINHDSDGLNHLKDILNKYPKENLKIVMEETGTYHLPVLNYLLDNDFFACADNAFKIKKHLDHDIRKVKNDNKDSLKIAEYCCDNWHKIIKYCQTDEKYEQLKFLSRQYIAQMSVQIKEKVQLSNLCDLLFSGFYSLLDENNFILGITVFKKYCSPELVLKKKKTSFINEVDKIAKKLGHRSAGITLANKIYELANKTVTPYPYNEYSQLSVDCCVDLLILTINTTNNIITKMEELASTLPEYDTVRSMEGCGDKLTPRIIAEIGDIRRFKNAGSIIAYGGLDAPPYQSGQFEATIRHISKRGNKYLRKTGYEIMKSVKSSGKSGNELYDYISKKEDEGKAKKVAKIAGLNKFIRMYYGKVKDKYKELEIW

SEQ ID NO: 437334 - protein, 400 aa, unidentified
MYVGIDWAAESHDVCVVDTAGTIQGRATVAHSRDGFEELVGHLRRWAKHGEVLVGIERPEGRLVDRILEAGYPIVLIPTYAMKDLRRRYAVGGAKSDPGDSYVIADVVRTDGHRLRRLEPLSPETRALRSVVRARDDLVDQRVALSNQIRACLEAYWPGAAVIFADVASEICLAFLERYPTPEAAARLSDVRLQSFLKKAGYSGRRSPAELLERLRAAPEGIRGVEAEARADAVRAMVRVMRSLLRSIKDLDRAVVAHLGEHPDAEVFTSLPRSGQINAAQMLAEWGDCREAYPDPDSVAMLGGLCPVTHASGKHRDVSFRWACNKRLRVALTAFADNSRHASPWAADIYRRAIARGCDHPHAVRILARAWVRVIWRCWQDRKPYNPALHRAATHLEEAA

SEQ ID NO: 437335 - protein, 356 aa, unidentified
MQTYIGVDYHRGYSYMTAMDEKGKIYKQGRVANQLEAVKEFINQASANGNSAAVLEATRNWTVMHDWLEELVEEVHLAHPLKVKAIAEARIKTDKIDARVLAHLLRCDLLPEAYVPEKATRSARNVLRQRMFFVRVRTMIKNRIWHLVDRYPELANSIPCKELFSKQGLEWLKTVSVKEQDRDILNEDLSLYHALEERIRRSNELIEKLSRGNTKVKLLKTIPGIGEFFAVLISNEVDDISRFSSEKKFFSYIGIIPSTYSSGGRTFHGRLTKQGNKYLRWALVEAVSTAARCDSELGAYYRRLKARKGPNPAKIATARLLATIIYRVLKQQRPYYPGKTIGSKLPSVSPGGLNLC

SEQ ID NO: 437336 - protein, 360 aa, unidentified
MAQARSWAGLDVHAAKVVAVTVDALSGELVVRRLPGRTGEVVAFCAALPAPVRVAYEAGPTGFGLARALEQAGVGCVVAAPGKIERPATDRVKTDRRDAERLLRLLMIDGLHPVRVPSVEEEALRDLVRAREDIRGDLMRARHRLSKLLLRHDLRFDGRQWTTDHRRWLKQIDLNGRGAQLALGDYVDAVDALLVRRDALEASIAELVPDSPWADTVARLRCLRGIDTLSAVGLCAEIGDFSRFARAGQLMSYLGLVPSEATSGEQRRQGAITKSGSRHGRRLLVEASWHYRRPPAKSYQLKRRQAGQRAQILAISWQAQRRLHRTWQRLDVERGKRRTIVATAAARELAGFCWAIANAD

SEQ ID NO: 437337 - protein, 384 aa, unidentified
MNAIASTNTILAIDLGKYKSVVCIHDADSGEFAFTSFSTSQAELGHLLARHRPTVVIIEACLLAGWVHDHCSELGVRCLVANTASEAWKFKHLKRKTDKDDALRLAQLYLLEQLPTVTLPTAAVRQWRSLLATRQHLVGRRVATQNRIRALFVAQGLPAPRGAKAWSTSGLAGLAAHAKPLADCDPEQLWRGLLDLALVEYRQVNELIGQTETRLDALGKANAAVKLLQTAPGLGPRTAEVIAAYLQDPHRFQTGKQVSAYSGLVPRQHQSGEMDRRGRISKRGPALLRKLLVECAWCMVRYNAWARGFYLRLTGGGQRRKKQAIVALARKILVRAWAMLRDGKAWHDPQAGPKAALPPSKQKRQAEAQRRREAKAVVAAPTGT

SEQ ID NO: 437338 - protein, 338 aa, unidentified
MKVYGGIDLHSNNNVIVLLDEEDRVVYRERLANDLQLVLRGLEPYRDTIEGLVVESTYNWYWLVDGLMDAGYRVHLANTAAIVQYSGLKYADDDSDARWLATLLRLGVLPEGYIYPKTERPIRDLLRKRSQLVHQRTANLQSVQNLMSRNRGHSLSANRIKRLTFEEVDQLLPDADLALAVKSNLAVMRTLDEAIEQLEKTVKARVKLRPAFKPLLTVNGIGEILGLTIMLETGEIGRFAKVGNYASYSRCVGSQHLTNGKLKGRGNTKNGNKYLAWAYVEAANYAVRYSPKIRRYYQRKAARTNGIVAIKTVAHKLARACYYILRDQVEFDVNRAFA

SEQ ID NO: 437339 - protein, 414 aa, unidentified
MQYNNKFERLLNKKIIIGIDIAKHEHYASITEKETGRILKTGIKMTNKEKDFKKLINLAGPYKKEEILMGMEPTGLYWKVPNNWFVSEGYETVIVNPYHVKLSKEIHNNLNNKNDKKDSQVIAELIRNGKFLDVLTIEENYDELRQLTLTRDTLVKDLTREKIRLITLLDEFLPEYANCFREPARVTSLSLLKKYLLSGLSNNKNKKQKANLIFTISRGAIGREKAKNIVETLSKSIGIKSGVNSAEYRLKLIIEKITYLVKKIGEIEAEMKVYLYATSEAKYMLSMPGIGVVTLSGFLGCTGCLEKFSHPMQLQKFAGMLPSQQKSGKFEGLTKLSKRGNGKLRNVMHRIAISLVSSNFEFKKLYKYKLEELNKIRMVGLTAIAAKALRILYRLGRDKKFYEKKFVLDSIVKF

SEQ ID NO: 437340 - protein, 425 aa, unidentified
MKNTQNEKISQIKDSTLVIGIDVAKETHYARAFDFRGIELTKLLKFSNTGEGFDHLSQWMQNICRQHEKAEIIVGFEPTGHYWFTMGDFLKSEGHKLAMVNPFHVKRTKELDDNSPTKNDRKDPKTIAMLVKDGRYREVYIPEDVYQELREAVAERDRLVQRLTAINNQVDRWLDIHFPEFEQIFKDWRRQAAFLTLRHFSTPEKIVAAGAMKIVAIWKQSMKRTAGVKRAQELVKAASISIGRKIGLIAAEASLQNLLDEHELYVKHYAELEQLMMELLLQVPNAGKLLQIKGVGLITAATFVGEIGDVSRFQDPRQIQKLAGLNLVENSSGKHKGKTRISRRGRKRLRHSLFMAMITILAKNTEFRMLHQKNLTRGKNPLTKMQSVIALCGKLIRVFYGILTTGRDYSAEKMLGDIERGKTAA

SEQ ID NO: 437341 - protein, 482 aa, unidentified
MKKKNIFQNRSQQLLRLFEKAGNRLKMMCVPIDYAKKDHIVMFCNGYGDILRKPFSVKNTLEGVKYLIDQVMRSCRQRHIKKEYVFFGGEDVNSYAENFANAIRTEGFLVANVNAHDAKKQRENLQASTDRIDLMGIAMMLLNLRAKCSPAQNGIYRNLRTLVRHRKKLVVMKTEVKNRVHALIDRLFPGFLNEKNTGINPFSESSLYLMEDRFSAQQIRRRQQRTLIKILKRCATPDAENVAAKLHSYAAQVITTPDEYAPTLQLSLEHHIQHYRCLKENIDQLLSEIALLLAQTQGAFLTSIKGVGIVLAAGVSSEIGNPFEQKPLNNLTSYSGIIPRVKQSGGIEGHTHTGRVSKRSNHILKDYVVQSAFQMGLRGPLPLLQDYKRREAAGQHAGFGIGRRFLRMAMCLMRSSQVYMPPTLRSPKIQMHERAGYYLTTWPLLRDKWKKAHAHQAAFAKDQPLGQWRQIVQELYDIKLKL

SEQ ID NO: 437342 - protein, 342 aa, unidentified
MEKSLFIGIDFSKKTFDVSILRPTNLQVVDYKQFENSKEGCVALLKWVKSLTKEPPQSWLFCGEHTGLYCICLSEFLLKKGFFVWLENPLQIKMSSGIKREKNDKVDSRQIALYAYRYQDKARMYQLPEKALKSLALLLSFRERLLSNKQTLLVSSAEIRRVLKRDTTARYIYEQSQKEIARINKEIKEVERRMLEQIAGDEELQENYQLVSSIKGIALINTVAILVATQNFTRFENSRQFACYAGMAPFGRQSGTSINTKPRVNGLANKKIKTLLTQAAKCAMRYDSNIRQYYERKLAEGKDKWLVTNNIRNKMIHRIFAIVRCKQAYQVDYRNQVEKAAA

SEQ ID NO: 437343 - protein, 487 aa, unidentified
MNRTRLSNLTVVLESGNEYSDEDESSLRRLRLAIRNSHPARAARTTSKLPSSWKGLNMNESVSEQPLSPKVAAFVGIDWADQKHDVVLRSAGDPAEPEHQVVKSEINGLNDWIAQMHERFGEKGKVLVCLEQSRGALIYQLMAYELFELYPINPSQLANYRKTFFSSGAKDDRPDADLLSELVMCHRDRLKAWKPDDQMTRELASLNEGRRNAVNRRTELANEIKSQLKLYFPVALQILENDITTALAADLLVQWPTLAELQKVSPGKLRKFFYGHNSRHEKKILERLALIKEAKPLTADAAIIRPTALRVKLLAQQLKSLLPFIAEYEKRIAELFGSHPDRFLFDNLPGAGPALAPRLLTAFGTDRDRFEVAGDLLNLSGIAPVRIASGKKTGKNASVHFRRACPKFLRQSFHEFGECSIRYCPWAQACYQAQRGRGKGHHAAVRAVTFKWIRILFACWKRRIPYDPQRYFQALQTRGSDYAQTTT

SEQ ID NO: 437344 - protein, 401 aa, unidentified
MPELWAGTDAGKAQHHCTVIDADGKRRLSRRVDNDEATLLQLIADVVELSEGGPVTWAIDLNAGGAALMIALLTDNGQQVLYIPGRTVHHASGSYRGDGKSDAKDAFVIADQARMRRDLEPLHRGDDIAVDLRILTSRRLDLAADRTRAINRLRAQMLEYFPALERAFDYKTSKAGLVLLTQYQTPAALRRIGRTRLATWLKNRKVRNYRLVASTAVEAAEAQHTAVAGEKMAAAVVAKLAREVMALDEEIAETDALIEGRFRDHPHAEVILSMPGIGPVLGAEFIAHTGGDLSVFGSSDRLAGVSGLAPVPKDSGRISGNMRRPRRYCRRLLRVFYMSAMVAARSCPVSKAFYERKRAEGKGHRQAIIALARRRLNVLWALMRDGRPFEITAPPSPVALV

SEQ ID NO: 437345 - protein, 378 aa, unidentified
MLVEALVAQPSVDGEDGPAPSVLAVHWPCCNPNKELSAMEADTIGLDLAKNVFHAHAVDVDGNVVIRKRLTRREVLPFFAGLQPCLVGIEACATAHHWARELQNFGHTVRLIPPAYVKPYVRRGAKNDASDAAAICEAVARPGMRFVPIKSKENQAFLLLHRARGLLVRQRTMAACAIRAHLAEYGIVIAQGRHRVEAFVAALDEFGTELPEDAQFALNALIGQLDELNRQIERIESKLNAIHQSHPVCRVLSSIPGVGPITATAFAATIPDPSMFRSGREFAAWLGLTPRQNSTGGKTRLGGITKQGDSYLRHLLVIGARTVVRYPKARSKVDAEWIDALLQRRRPMVVAVAVANKLARIIWAMMSSGEFFRTADVR

SEQ ID NO: 437346 - protein, 335 aa, unidentified
MKITTIGIDLAKSVFQIHATDAHGKVVLLRTLRRSQMVFFFTQQEPCLVGMEACGSAHYWARTLQALGHEVRLMSPQFVRPYVKTNKHDAADAEAICEAVRRPNMRFVAVKSIEQQSILAVHRARSGMVKARTAQSNQLRSLLGEFGIVLPRGISALCRAVPALLEGEELPLSLCSLIVRLHNQLRELDRQVLELEAEIVTWHRASEPSKRLAQIPGIGPLTASALVASIGDIRHFRNSRQLAAWLGLVPKQHSSGGKARMLGISKRGDTYLRTLLIHGARSVVRHSKAPLGWLPSLLARRPFNVATVALAHKNARVVWAMLAHERDYQADWALN

SEQ ID NO: 437347 - protein, 372 aa, unidentified
MKKRSSSRQNPKPAAKAKRAQQSVTIGMDLGDRNSRYCILSSEGEILREGQVATTKAEMIKTFSRLGRARIAIEVGTHSPWVTRLLQSLGHEVIVANPRQVKLITESSRKDDRLDAQTLARLARIDPQLLRPIQHRSEKAQTALMVIRVRAALLSARTSLVNAARGLAKSLGERLPKCDADQMGVPQGESLPPNVQGVLEPLLKEVESLTEKIKDRDQKIEQIAREDYPETTLMQQVGGVGPLIALTFVLTVENKDRFQKSRDIGCYLGFRPRRSDSGQRQPQLRITKEGDPYLRTMLVQGAHYIISRRGPDTDLKRWGLRLAERGGKRGKKKAVVAVARKLGILLHRLWVTGEVYEPWRNQNLRKGRKKAA

SEQ ID NO: 437348 - protein, 338 aa, unidentified
MSLYAAIDLHSTNSVLAVMDADGKPLLQCRRPNALPGILAELEPFRPQLAGVAVESTYNWYWLVDGLMDHGYAVHLVNTTAIPQYDGLKHGDDHTDALHLAQLMRLGLLPEGYIYPREQRATRDLLRRRFTLVRQAVQLMLMIQSSVSRCSGRCLSSNAIRQLTAAQLESLFPDLATRYGVLVQFRLWLTLQEQIAALERWVRKDLARPDLLLRLQSVPGIGPILGTTILLETGAIERFASVGDYASYCRMVESVRLSNGKRKGHGNRKCGNRYLCWAYMEAAHHATRHSAPVRRWYERKRARKHRVVAIKAVAHKLARASYYMLREGTPFDPKRAFG

SEQ ID NO: 437349 - protein, 403 aa, unidentified
MSPEHSIDIFLGLDVGKSEHHACALDRDGNKVFDKPLPQLESELAGVFHQLQKLGTVLVIVDQPNTIGALPIAVARDCGCEVGYLPGLAMRKAADLYPGRAKTDKRDAFIIADTARTMPHTLRAVDRNDEVLSALKMLSGFDDDIARDCTRTVNRLRSVLTQIYPSLERVFAGSALTRTPILELLIHYKGPQGLKRAGYQRVLNWMIKRTRKDPTPLVDDIFAALKAQTVTVPGSDAAELVIPQLAANIQALKEQRNTIAEQVEEMLADFPLCEVLMSMPGVGIKTAAQILLAIGDGSDFASAGHLAAYAGIAPVTRRSGSSIRGEFPARSGNKRLKNALFYSAFAVIRSHEPSRRYYERKRAEGKRHNAAVICLARRRCNVIYAMLKNKEFFREIPPRPVAA

SEQ ID NO: 437350 - protein, 338 aa, unidentified
MSIVMGLDQHRGQITCEWVDTETGEVQRSRVAPADRAHVRKWLERFGGQELEVALEATTGWRFLVEELRQVGAVVHLAEPAETAGLKGAKKRAKNDRADARHLRELLMVGRLPESWIALDHVLDLRARVRLRHELGEQRSEWQQRIQAVLYHHGCPQRRQLMAGDGREWLVAQPLPETAREQVRVALAMIDALDLQMRPIEKQLRAYARRQAGCKALMAHYGVGELTAVTILAELGDCTRFSSSRQAVRYAGMDITVYQSDQRRAPGHISRQGPPALRWALYEAAQIARRPGSPDRDYYLEAAERIGGNRACLSVARKLLKRCYHTLRELGEEALAPA

SEQ ID NO: 437351 - protein, 409 aa, unidentified
MELVIARCAGLDVHQATVVATVRTPDGRGGRRRTTETFGTMTADLLALREWLQAHGVTHVALESTGVYWKPVYYVLEDAFTLLLINMPDLKRVPGRKTDVRDSEWLAQLLECGLLKSSFVPPPAIRELRDLTRYRLQQVRDHSQEVNRLCKVLQDAGLKLTTVITDVMGVSGRAMLRALVEGTTDPVVLADLARGRLRQKLPALQRALAGRFRAHHAFLVQQILTKIDFLDETIARVTAEIDRRLAPFEATLAALDTIPGIDRVGAISIVAETGGDMSRFPSAEHLCSWAAICPGQNESAKKGTAGRRVKATATCVALWSKPAWRPPAANGTALQARYRRVKRQRGHKKAVIALGHHILEIAYYVMRDGRPYDELGADYFDKRHAERAARRHVRHLEALGFHVTIEKAA

SEQ ID NO: 437352 - protein, 344 aa, unidentified
MDHYAGIDVSLEYSSVCVVDASGKVVREAKVVSEPEALIGWFGSLGFGLARIGLEAGPLSQWLYAAMKQAGLAVELLETRHVSDAFKTMPVKSDRNDARKIAQLMRLGWFRPVHCKSITAQEIRAMLTARKLVQSKLLDLENSLRGILRGFGLKVGKTTRTNFARRIEELVKGQANLQTIGQALLRARAVLLAEFNGFEKRVRAMSRLHEKARLLMSAPAVGPIVSLTFACAIDDPSRFTSSKQAGPHFGLTPKKYQSGETDYTGRISKHGDASVREALYEAAHIILTKPIKGCSDLKSWAMRIARRAGTNKAKVALARKLAVIMLRMLKDNVPFNPAAKPATA

SEQ ID NO: 437353 - protein, 373 aa, unidentified
MLYVGIDVAKNKHDVTALNVRGKTVLKPLTFSNNKAGFELLDLSLRQLNQDCLIALENTGHYAFNLLNFLHEQGYKVYTYTPLLIKEFAKSLSLRKTKTNKKDAHGIALKLLSDPNREQFQHDNRQVELKILARHIHRLKKKQSDWKVQYTRCLDIIFPELDKIVEKHSEYTYQLLTCYPNPQKRLEAGFDKLIEIKRLTASKIQDILSVAPRSIGTTSPAREFEIIKHYKRLIDKAEKCVNDLMAEFNSVITTVTGIENRLGAVILAEIRNIHAFDNPAQLQAFAGLDSSIYQSGQIDLAERMVKRGSPHLRWALIQAAKACPRFSPAFKAYLKTKLEQGKHYNVAIIHLAKKLIRTLFYILKKSCHLTNKK

SEQ ID NO: 437354 - protein, 344 aa, unidentified
MGEVITIGLDIAKSVFQVHGVDGLGVVVIRKRVSRAKMLEFFAGLPRYLIGIEACPAAHHWARELQAIGHTVRLMPPSYVKAYLKRSKNDANDAAAICEAVTRPSMRFVAVKTKEQQAALMLHRARQLLVRQRTMLSNAIRGHLSELGIVSAKGRNGTDELLEIIGKDADSRIPLAARSVLKVLASQYVAIGVEIASISKSILAWHRACEPSRRLEEIPGIGPIVATALVAEISDWMAFSSGRGLAAWIGLVPKQHTAGGKDKLGSITKQGNRYLRWLLVNGAMAVIRYAQKHGTKKHPWLGQLMARRPTKVAAVALANKIARIAWAIMVRGDRYREPALMPAA

SEQ ID NO: 437355 - protein, 391 aa, unidentified
MIYVGIDVAKDKHDCFITSSNGEVLFKAFTISNNQDGFNVLYQRIESVMEDVTKVKVGLEATGHYNYNLLGYLIDKGLTTYVINPLHSNLYRKSLSLRLTKTDKVDARTIAYMLMSDVNLKSYSDTSYHNEELKSLTRYRFDKVKERAKLKTSVSRLVCILFPELEKLVPTLHMASVYALLSEFPGAKHIAGAHLTRLTNLLSDASKGRYGKDTAITFREAARASIGSNMPAKSLELKHTIQLILELGSEIEEIENEIKIIMDEINSPILSIPGINYRMGAMIIAEIGDFSRFDSPDKILAYAGFSPSTYQSGQLDSAYSHMEKRGSKYLRYALYNAAKYVCHWDSTFAGYLAKKRAEGKHYNVAISHSVKKLVRVIYHLVKSNQQYIKVA

SEQ ID NO: 437356 - protein, 345 aa, unidentified
MSYYAGLDVSLEETAICIVDGTGAIVRELRAASDPESLISALNVVDLPMERIGLEACSQSAWLHQGLTRAGFPALCIETRQAKAAMGAMPNKTDRNDARGLAQIIRTGWYRQVHVKSVPSRMARSLLVARRTVLCKLRDMENAVRAVLRESGLKVGSPGRKLFSARVRELADADPTLTDITEPLLAIIATMYRELERLTRRALESVRVEPICRQLMTVPGVGPLTALAFRATVDQPERFRRSRDVGAHLGLTPRRYQSGETDVQGRVSRCGDELARTLLYEAAHTLLTRCKKWSALKAWGMNVAKRRGMAKARVAVARKLAVIMHRMWCDHSEFRWGKAPACHAA

SEQ ID NO: 437357 - protein, 347 aa, unidentified
MNYYAGIDVSLECSSVCVVDGTGKIAREAKVASEPEALIAWFGSLGLSLERIGLEAGPLSQWLYAALREAGLAVELLETRHVKAALSAMPVKTDRNDARGIAQLMRLGWFRPVHCKSAEAQEIRALLTARKLVQSRLYDVEMSLRGILRGFGLKVGRTTPKRFAERIRELVVGHATLEAVGAALLSVHAVLLREFNGFEKRVRAIARSEGRVRLLMSTPGVGAIVGLTYISAIDDPARFKSSKSVGAHFGLTPTKYQSGETDVTGRISKLGDSSVRTALYEAANVILTRPIKGGGLKSWAMKLAKRAGMKKAKVALARKLAVILHRMLADASKFIAEKASGCVRVAA

SEQ ID NO: 437358 - protein, 421 aa, unidentified
MTQPSHDTFAACIGIDWADAKHDLCLQAAGTAKRERFQLEHTPEAIDAWVTTLRTRFNGHPVAVCLELDKGPLVSALRKYDFLVLFPINPLTLARYREAFTPSRAKDDPTDAELQLELLLTHRDKLQPLQPQSPPMRALAQLVEHRRRVVGDKVRITNRLTSTLKNYFPQVLHWFQEKDTRIFCDFLSRWPTLKAAQLARRSTLETFFRDHHVRTADVLATRLHAIKTATPLTTDEGVIAPNTLLVQTLVSQLRVTLDAIEAFDHAIAQRAQHHPDFPLFQALPGAGPVFASRLLVAFGEQRERYASAAARQKYAGIAPVTERSGKKAWVHWRLQCPKFLRQTFVEWTAESMRHSFWAQVSYQQQRDKGNTHQAAVRALAFKWIRILYRCWQERTPYDESTYLQALHRRGSLLIQHRAKAS

SEQ ID NO: 437359 - protein, 317 aa, unidentified
MSKSNMVCAGIDTGKSKLDVAIAGSAQRWCFANSPQGRAGLLAWLRGHHVERVGIEASGGYECAVVAEMRCAGFVVIVFQPAQVRAYARFRGQLAKTDKIDAGLIADCTAATEKIHAPPDPRLVMLAEHQTLIDQIIEDIATLKNRRESAREKPHRQFWSAQISDLKRKEKDELKNLVAAIRAHDDLARRLDLIASVDGIGLPTAVGILVRLPEIGRVSREEVAALAGLAPYDDDSGERSGAKHIAGGRERLRKVLYNASLAAAYHWNPQLIAFKDRLLAAGKFHKVMRVACARKLLIFVNTVVARGTPWVSSPIPA

SEQ ID NO: 437360 - protein, 364 aa, unidentified
MSQSKWLVAALVPGVKRQPLKKLDADQESLMKLLHRWRKEAEQAGHPIKRVVVAYEAGRDGFWLARWLRTRGVEAYVIHPNSIAVSREHRRAKTDRLDTELLLRALLGWLRGEKRHCSMVAIPTIEEEDAKRPNRERDSLVTEQTSIGNQIKAILTRFGIRRFRLKLRKAEQQLKELRTAEGSLLPGNTRAELFRHLARLHIVREQIRAIEKARLQRLEADRNSNKSPHAMVRLMARVVGIGVETADMLVTEVFSRQFRDRKAVARYAGLTGSPDESGKRRREKGLARAGNARVRTGMIRLAWRFLRFQDGSALAQWFQTRTADGRGGTRKTMIVALARKLLILLWRLVTTGEMSDGIVLRPAS

SEQ ID NO: 437361 - protein, 452 aa, unidentified
MAAKRKGRRRSTLKSMNPDAAGVDIGSRFHVVAVPPDRDDNPVRSFDSFTGDLHRLADWMESCGVRTVAMESTSVYWMPLYSILDSRGFEVLLTNARDVKHVPGRKSDVNDAQWLQRLHEFGLVRGSFHPAEGFDTLRAYLRQRERLVEYAASHTQHMQKALMLMNLQLHHVVADITGKTGQRIIRAIVDGERDPHVLAQLRDGRCKNTVQTIAAALEGSYSDDQVLALEQSLSLYDTYQLKIAQCDEHIEAVLIRLRQGDLGTQPLKKLRKSIKQSNEPKFDVRTAVHAVCGVDLTEVHGVGPYLALRILGECGTDLSKWPTAKHFTSWLGLAPGTKISGGKILSSKTRRTNNRVASLLRLAAMTVGKTDSALGAFYRRLSARVGKAKAITATARKIAVLVYNLLRHGKSYRDPGAQYYEEQHRARVIRNLKRRAQSLGFTIEPAVAEGVS

SEQ ID NO: 437362 - protein, 414 aa, unidentified
MLKIVYPICCGMDVHKSFIVACIASTNEQGVTTYKSKRFSTFTGNLRRCAAWLATNNCKDVCMESTGKYWIPIYNILESTCNIVLAHPKYVKAIRGKKTDKRDAKWIADIFKHDLVAGSFIPPADIRQLRDLFRYRWKLTSFTTGEKNRAQNCLTVSNFKLDDVFSDVFGKAASAITSRILENPAEKITDVSGFRTKGMKATNEQVLAAVDGEMCKEQAEKLRIIRSHMDSLELCKLNLESLILATAEKYLPQLNLVVTAPGIQSFAAIGIISEIGVDMSVFPTSKHLCSWAGLTPQNNESAGKKKTTRISRAGAYIKPLLVQCALNAIRAKKFPEVRNRYLALKKRRGHKKAIIAIARMLLTAIYNMLKKNEPYNPELYRKGDRPPAHREVSVEEAIFILQRQGYLVTDPPPT

SEQ ID NO: 437363 - protein, 388 aa, unidentified
MDMIDAVSNAPIQTTISAIFFSMELSGSKWLITSLSPGGGERMSKHVMPAGDVGGLLEQLDAIRSKAEAKTGRVFPFVSIQEAGLDGFWIHRVLDREGIESHVVDPASIATSRRRRRAKTDRLDSETLLRTLLAFKRGDPRVCSMVVVPTPEEEDRRRNSRERKALVHERVSLVNRLKGLLFSQGVTGYEPLKSDRRERFAELVTGDGRPIGEHLRAAAERILDRIELILAQLKTIERVRDSLVAQQPADDQSPACPAQLMTLRGVGPDFAEVLWSEGLYRHFDNRRQLASYAGLSPSPWQSGSINSEQGISKAGNPRLRSIMVQLSWFWLLHQPDSALSRWFHDRVKLDGGRRKKLTIVALARKLLIALWKFARHGVVIEGAVFKSA

SEQ ID NO: 437364 - protein, 360 aa, unidentified
MDKYIGFDIHDNKTVACILEKGKKDIYQTIPTEIPAMKAWLKQQRNSRAKLHLTFEVSGSTGWFYDELRGSVDSLTVSNPSKMTWIFRTSKKTDRIDAFKQAMLLKMGEIPSVHIPEKEVRQWRVQIQHRRKLVSLRTQVKNRVRMLLKSHGYRQPASKGSWWKKVNRQWMMGLSETVLDCWAESLGDLLDQLAMYEGQIEHRSKKLDERLSKHGGGGLLQTIPGVGPRTAEAVLAYTDDVSRFARGKDYCGYFGMTPKLDESGSTRRVGHISKQGPSVVRWLIVESAWRAIRKSPALAEFFGRVTRGQPKRKKVAVVATARKMLSVMRAMLMTGEVFNEQLVLRQEQCLSRRMKADFYN

SEQ ID NO: 437365 - protein, 420 aa, unidentified
MRILHERAIGLDIHSRMIAGCLDYPDPEAPDGRAREHRRFETFTDALAQLCNWVSGTGASVVAMESTGQYWRPLWWLLGDRCPTVQRILANPHHIKQVPGRKSDTTDAEWLAELAAYGLVRASLVPSAQIYQLRDLTRHRHRMIHQRGSEVQRVLSLVESAGIKFGIVASDIMGVSVRRMLDALVAGERDVSVLADMALTRLRGKIPQLQRAAVGSFTQSHADRLAVILDFIDYLDGLIERLNTQIAPLMTPFAEKVAHLMTVPGFGPRVIETLIAQTTGDMSYFRDEHHLASWACMSPGNYESAGKRKSGRTRKGNPELRSALVEAAWAASRTNTYHGGLYRHLVRTLGNNPVGRKKAIVAVGHSLLCTSWWIMKHNVDYHDLGADYFKRHYDPAKEATRLIKRLRKITGKDVILQPAA

SEQ ID NO: 437366 - protein, 278 aa, unidentified
MVSEGKVVTTQDALRKYFSSLASSRIAMESGTHSSWISRLATSAGHEVIVANPRELRKIHQSDRKNDRADAQILARMARFDPELLAPIQHRSAPMQADLASIRARDVLVRARAECVNSACGLVKAMGGRLPKCSTESFANKSIEHLPEELRAALQPMIEIIKSLTEQIRQYDRQIEKLAAKRYPQTQHLQQITGVGTLTALAFILVLADSSRFRKSRDVGAYLGLVPRQADSGSRVSQLGITKAGDTLMRRLLVNCAQYILGPFGPDCDLRRYGERLM

SEQ ID NO: 437367 - protein, 407 aa, unidentified
MVFVGIDWAEQHHDVCVMSVDGQPLGRARVAEGVDGVARLHALVADHADDPAEVVVGIETDRGLLVTSLVATGYQVYAVNPRAVDRYRDRHAVSGAKSDGGDAKVLADLVRTDRHNHRQVAGDSVLVEAVKVTARAHQSLVWTRQRQVNQLRSALREYYPGALATFGTDLAHPDALAVLATAPTPELGRRLSSARIASALRRAGRVRNIDARAAAIRDGLRVPQLAAPTVVADAYGATAKALINVIAALTVQIAELESALADRFEQHPDADILRSLPGLAVILGARVLGELGDDPNRYANAKARRNYAGSSPITKQSGSRKIALARYVRNRRLADAITWWAFSSLQSSPGARAFYDRRRAAGDTHHKALRALSNRWVGILHGCLRHHTLYDEATAWGHLTESHAAAA

SEQ ID NO: 437368 - protein, 403 aa, unidentified
MKHFAGLDWGSVEHAVCVVDEQGASVAQLDVQHTAEGLQKLLAQLARIAPPEALPIAIERPTGLIVDTLLEAGHPIVPIHPNALKACRPRYRAAGGKSDPGDAYILGDVLRTDGHRFRALRPASDEVRALRALVRTRDDLVAERVAVANQLRSLLDTFWPGAGAIFADVDSPIALAFLERYPTPNSARRLGEKRLAAFLAAHRYSGRRAPTELLKRLRAAPTGLAGEVEEEVKGELVKALVAVLRTLLERINVLTSRIEHDVAQTAAGQVMMSFPRAGKLNAAQIVAELGEDPERFQTEQQLAAEAGVAPVTRASGKSRVVVFRYACNKRLRLAITTWAGNSRFESPWAKHIYAQARARGCDHPHAVRILARAWVRVLWRCWRDATPYEAALHGAARPFLKTA

SEQ ID NO: 437369 - protein, 438 aa, unidentified
MSNKVIFNLDELFISVGIDVGADFSWMSIALPNQQFVGKPYKILHNSIDSLTTAVSKIKEAEELYSLESRIFLESTGIYHYPLFCYLRDKGFNCSVINPIITKNSTNINIRKVHNDRFDSKKAALVGLKPDLKVSLMPSDLALNCRNLCREYYDLMDNRSAYVNKLQGELRMAFPQYLGIFSKVTINTSLTLLETYTSPSAFLEADKQEIIDLIKSTARFGLTYAQNKYNAIIQAATDANQFGYIIESNIKRIRLYISFIRKYDEEINDILESLHKLVDSNEDTKFVKQVHLIETFKGAGFLSAATIMGEIGDFSAFSKPKQLFAYFGLDPAVKQSGKFEGTKVQMSKRGSAIARRVIHTLTLQSISISRNGEAKNPVLREYYLQKCDSKPKLVAMGAVSHKVCNMIFAILRDNKPFEIITPQEHIKQYNAAKCDIAA

SEQ ID NO: 437370 - protein, 470 aa, unidentified
MSHRRLVGIDLGIATAHTVRVLDGEGTIVAKRKAWPTRESLTAVETAALAGCPDGTRLEVVIEPTGPAWLPVAVFFTARGHKVFRVSSQKAADLRRFLSRHAKSNGIDADTLARLPLFDPAGLRPLVLPGAERAALDRRVRATDRLTSQAAEHKRRIKDLVRQLLPLSPLTGDLGAADLAVLERYADPRALTGVGQAGLTQVIAKASHGHQGAGRARQWLDAAQASLELYDGHPAVDLAGLAAEVATEVRLLRATQAELSAHAAEREARYQHVDPAGLARSLPGLAEVGGPALVACMGDPARFSRASQFRSYTGLAPRASETGETDRKGQPMSKAGSSLLRTTLVRAADNARRQDPQLARIYHQQMTERGKGHLGALCVVAASLAERAWTVMRRGTPYVICNTDGQPVTAAQAKAIIAERWTVPPEVRARRRSKKTGKAPQKVLAGQYARGDLPRGTTPPQRQRPVKPST

SEQ ID NO: 437371 - protein, 365 aa, unidentified
MSQSSWLVGALIPGVERRAAKKLEVSEGLLLALLHRWRDEAAKAGRTIGRIAVAFEAGRDGFWLARWLRARGVEAHVIHATSIAVSREHRRAKTDRLDAALLQRAFLGWRRGERGHCPMAAVPSLEEDARRPSREREALVGERTRIGNRMKSALARLGIRGFKPSLRQAAERLERLRTPEGMPVPPHTLTELRRDLARLRLITDQIGEIEAARIERLRQHPDAARHPMILLLTRVVGIGVETADMLVQEILSRNLRDRRAVARYGGLTGSPEESGARRREKGLARAGNARVRRGMLQLAWRFLMFQKDSALAQWYRTRTADTRGATRKTMSVALARKLLVALWKLVTTGEVPHGLVLRPAMPAAV

SEQ ID NO: 437372 - protein, 400 aa, unidentified
MSQMWAGVDVGKEHHWVVVVDDTGTVKLSRKLVNDEQPIRALVAEIDAMAERVSWTVDLTTVYASLLLTVLADAGKSVRYLAGRAVWQASGTYRGGEAKTDAKDARVIADQSRMRGTDLPVLHPHDDLITELRMLTAHRADLVADRTRTINRLRQQLVAVCPALERVAKLAQDRGWVVLLSRYQRPKAIRQSGLSRITKTLTEAGVRNASTIAEAAVTAVKTQTVRLPGEEVAAALVAELAQGVISLDDRIKATDADIEGRFRRHRLAEVITSIPGIGFRLGAEFLAAVGDPTLIGSADQLAAWAGLAPVARDSGKRTGRLHTPQRYSRRLRRVMYMSALTAIRCDPHSRTYYQRKRDEGKRPIQATICLARRRTNVLYALIRDNRTRHPDSPPITTSAA

SEQ ID NO: 437373 - protein, 429 aa, unidentified
MRTESTPGARGPVFCGVDTHADSHWLCVLDWRGRKVLSRQFPADAAGYEALAGAIAAAGEPACVAMEGTSSYGAGLTRHLASLGMPVREALSPARTQRRRPGQGKCDEADAERAARAAMSGSKLGTPKSQDGWVDGVRCMLAARSGAVKARTSAINTARSLLTTAPEGLRSRFRGMAGPRLMEELPSVRAEGALGAALGALADLWAAARDAALDMERAIEASLEENCPALLAMYGCGPVSAAKLAVAAGDNPGRLRSEASFAAICGACPIPASSGKTVRHRLNRGGDRQANSALHEIARQRVMRDPETAEYAERARARGKSDREVMRCLKRYVAREAYRALMRPHEIRRPEDASGLVAARRAAKVSQVRAASILGTSEKYISMLERGQRELKPIRRAYEAWVEAGLPLDWNRQAFEAERKMDSKKHLAK

SEQ ID NO: 437374 - protein, 335 aa, unidentified
MNARSDAACFVGVDLHKDTLVACTIAAKDREVSYRKIACVAREKVREFLADLPRPSVVAIESVGFYRWLWTEAEPIVDQVVLADARGCRALAGRRIKTDREDAFNVAELLMTGRLPTAWAPPNHIQRLRDLTRHRNGLSRDHAKTLHRVKSIMNRLNRPGPARMDAAGLQRYLLASVERIEADDLMMLWQHQRRLVEVEQDRSAIERRIIDVMRAEEFRRLREILESIPGVGLITAATAIAEIGDFSRFPDAKAIGRYAGLTPTGYSSADKHRLGRICKTGSPDLRWVLQQAAWTAIRCEPAFKKVASKISKGSKTRKKAAAVAVARKLLVLMWT

SEQ ID NO: 437375 - protein, 371 aa, unidentified
MNHVTSIGLDVHARSVTAVALDSITGEVRSQKFGYSPAEIAGWILQLDSPKAVYESGVTGFHLVRELRGMGVDCIVGAVSKMHKPASDRRKKNDRNDAEFLARQLMAHNIVEVFVPDVETEGARNLSRALEDVRDDLTRAKHRLTHLLIRWGYAWNEFNEDGKRRGSWTRAHWEWIRGIELPDAAARESLDYYISEVRHIESQKKAIEKRVAQCASRPRWRDRVEALRCMKGIETVTAFALTVEAGAFSRFDSARAFASWLGLVPSEHSSGERASRGGITKAGNSHLRKLLVEASWHYTRATKERKRSLCDESVPASISNHAAVGVKRLVERRRHLSCELRKRPVVANVATARELACWIWALGRMSEGALA

SEQ ID NO: 437376 - protein, 461 aa, unidentified
MSRNKPTGKQKESVQKKVDWKALEIVHPDAAGIDVGGSEHWVAISPDRDAEPVRRFGCFTADLRDMGQWLVQKGVRSVAMQSTGVYWMPVLEVLEQHGLEVYLVNAQHTKNVPGRKSDVQECQWLLKLHAFGLLNNSFQPTDEIRIARTLWRQRGNLVAEASSTIQRMQKILTEMNVQLSNVLSDLSGASGMKIIRAILVGERDPRELAALVQPGVKAAAEDIAKSLEGNWRKELLFVLRQQLELYCIYQDKIIDCDLQLRKHLESLGSKLDPKVQPIGPRPKGKKKSKNAPGFDLRTELYRITGIDWTQINSIDVLTAQTVIAEAGADLSAFPSEKQFASWLGLCPTNEQSGGRILKRHTRKVVNRATVAFRNAAATLLRSQSYLGAQYRRLRTRLGAPKAITAMARKLACLFYRLIKHGKQYVDKGIEYYEARYREQQIQSLAKRAQKLGLQLVVPKIA

SEQ ID NO: 437377 - protein, 345 aa, unidentified
MNNVSILSIDLAKNVFQLLGINKHGNPCFSKRVSRVKLHEIILNLPPCKVVMEACSSSHYWGRACLNSGHQVNLIPAQHVTPFVRGNKNDKNDCLAIYEASRRPNIRFVPIKSEQQQAVLCLHRIRERLLSTRTACINQTRSLLLEFGFHIPKAYSVFKKHIHELLSQDVQPVIRLMLLEVQQELENYDKKIKLMDTLFQQTNTHNTSAEIMQSIPGIGPIIASAFSASIDKGQAFKSAKDFSVWLGLTPRQYASGDTNRLGTITKCGDGYLRKQLIHGARTVVNHAHKKDDDLNLWVTAIKQRRGVNKAAVAMAHRLARLMWILLQKNEYYRPIRSCNQVQDNA

SEQ ID NO: 437378 - protein, 341 aa, unidentified
MKIIGCDLHSRQQTLAMLDSSTGEVVRVTLRHEGDNVREFYSNLPRPVRVGIEATGSMQWFLNLMEELGIECLVGHPATIRAAEPRKQKHDRRDAELILALLAENRFPAIWLPTKEHLDLRALLRHRHQWVCLRVKIQNALQAIALANGLRRGSSLWTRAGQHAIASLPLSPHAAYRRNELQAMYSKFETEINELNSRVEQQARERAGARLLMTHPGVGPITALATEVFLGDPSRFAGSKELASFAGMIPGEHSSGKRQRLGGLTKQGNPLLRFLWSEAAIHAVRRDAQLKQFYRRKLIQKGLGKARAAVARKLGIRLWIMLRDQIEYNEFCHRGQMQSKW

SEQ ID NO: 437379 - protein, 459 aa, unidentified
MTLPPPAFAGLQTGNRGTRRRAPVSDRPGASLAAAGPSLPLPLQGAELSLALPEALFFTGIDWAEVTHAVCVTDAAGKITAEFTIEHSADGIAMLIRRLARHGDPADMPIGIERPNGRLVDLLLEAGHPVVPVSPNAIKTWREGEVLSGAKSDAGDAAVIAEYLRLRQHKLRVATPYSGETKALRTVVRTRDDLVAMRVAATNQLSALLGAYWPGAKAVFADVESPISLAFLTRYPAPALAARLGEKRMTAFLVKNGYSGRRTAAELLARLHAAPAGTADETLTEALRDAVLALVAVLTALNTGVKDLGRSAAAHLGEHPDGKIFTSLPRSGQVNAAQMLAEWGDCRQAYDGPDAVAALAGVTPVTKESGKHRAVHFRWACNKRFRKAMTTFADNSRHASPWAATIYNDARASGKDHPHAVRVLARAWIRVIWPCWLHGTPYDPARHGAAVALTKPIAA

SEQ ID NO: 437380 - protein, 474 aa, unidentified
MPWTLRAVRPPLIQPQLEICYMRPRRKSNPPKSPQLSTLNEHAGGIDVGAREIYVAVPPGTCARTVRCFATFTEDLHALRDWLKECGVTTVAMESTGVYWIPLFQILEAAGIEVCLVNARHCKNLPGRKTDVQDCQWLQHLHAVGLLRGSFRPADEVCAVRTILRHRDTLVRGASRCVSHLHKALTQMNVQLQHVISDLTGVTGQAILEAILAGERDPQKLAALKDRRIKASRDVIAKSLRGDWRAEHLFTLAQSHELWRKHQALIAACDEEIARLLAQFDSRVDVNTAPLGEARTSHKKPQRNEPQFAARAECYRVLGVDLTTVPGLQAPTVLVLVSELGPGFAEKFPTAKHFGSWLGLCPDNRITGGKVYSVRTRDVKSRVAEALRLAAQSLNRAQNYFGDLYRRWKARLGGPKAITAMAHKLARVLWHLLKYKEPFKPEVFAKEEAKMKRRQLARLHNLAATLNHQLIPNQ

SEQ ID NO: 437381 - protein, 422 aa, unidentified
MNQLADTLFTAYVGIDWADAKHDICVRSPDGELVEFDCISSRPEAIADWALGLYQRFGGPIAVAVELTKGPIVTALMKYDFMVMFPVNPLMLARYREAFTPSRAKDDPTDAELAVDLITRHPQRFEPLQPQSVEMRKLMALVEHRYKVLCDQRRISNRLSHALKQYYPQVLEWFRQHNTVLFCDFVLQWPTLQQVKRARASRLERFFGAHNMRRKGVIERRLTAIKESTPLTEDPAVIDPYRLQIEVLIDQMRGTITALKRYDNDIEAITQQLPDYDLLFSPLPGAGHILAPRLLAALGEDRERYQRADELQMHSGIAPVTERSGKKTWVRWRWQCPTFMRQTFVEWAAQTINKSAWAGAYYRQQRAKGASYEVAVRALAFKWIRILYRCWKDRKPYDELKYLETLRRKGSPLLKYLADPAL

SEQ ID NO: 437382 - protein, 316 aa, unidentified
MICGVDVSSQFLDVRVGRDGVSAHFDNDAEGIVQLASFCQLHQVHLVVTEATGGYEQLAFGLLWAGGIEVAIVNARSVRKFAQAMNILEKTDQIDAGVIAWYAETKKVVAMRPASVEQQRLKALVTRLRQLTEMRAMQRNQRLLVTEAGVLEHFHQLLVFLNQQISTLEKAIAGLIGSDPIWQKLDQSFRSIKGVADRTVARLMAELPEIGTLSNKKISKLAGLAPLADDSGKSKGKRRIYGGRHGVRDILYVVATCVSRYNTDFSAFQARLTKAGKPKKVIRIALAHKLLVRLNAKAREVRQLHQPAAAISALLP

SEQ ID NO: 437383 - protein, 412 aa, unidentified
MKVVYPRCAGIDIHKETMTVCVIVDRQDGSAPEYQKRKLATHTEGIRELSTWLERCQVTDVGMESTGVYWKPVWNALEGQWGLHLSNPQHMRAIPGAKTDLRDGTRVGELLAYGKLPESFIPPQWQRELRDLTRLRARLAQETTRAGNRILKVLEDAQIKLDCVASDALGVTGRLILNRLVAGETDAAKLAELAVGKLKKKKAQLQQALEGNFTEHHRFQIRLLLKAVAEYEDKIFQLDRRIEQYLAPHEEIVRRLDAIPGIDRLGAAIILAEIGPEMSRWEDARKLASWSCLCPGNCESAGKRLSGRTRRGNRWLRCAFCQMAWAATRKKNSYFKTQYRRLAGRRGKQRALLAVAHTLITVVYHLLRQPTLEYHELGEDYFDKRDAERAATHLIKRLEKLGYEVALKPKEA

SEQ ID NO: 437384 - protein, 393 aa, unidentified
MLYYLGIDVGKFSHSLCLLTEAGKKTIFQINNNREGFEKLRIKLSELNCDKNILVGMEATGHYFLNLYDWLLQCGFDSEQIALLNPLQVKSFRNTNLRGAKSDNVDSERIAVLLKFGEFKRCNVATDEMMNLRELTRLRADLVANIGDLKRKIISVMDRVFPEFMTVFSNRFGKTVMSLLNSYTPEEMAELSLEKLTDVIKNLSGRGRGISQKKIQALHEASRNSIGITFGRQAFKIELDILLTRLKVFKEQVEKLENEIQLIAEKFDSKIFTIPGIGATTGAAILSEIGNIQNFSLAVKLIAFAGLDPKLKESGKYQGRTPISKRGSKYLRNAIWYSAMVACRVDDKFKKFYQDRRNKGKSHRYSVTAAANKLTKVIYHVLKNKCEYDSKLV

SEQ ID NO: 437385 - protein, 322 aa, unidentified
MKMPQGGTIVGLDVSGQRIDGFVLPIGREVTAANEVLGRARLLSELRALAVDEAVVEASGGCERDLVAELRDAGLIVRVVDPKRVRFFAQALGKRAKNDRIDARMIARFAATIDGPAPAHDPARQALAALLATRQDLIDGRTRFANQARHQEGAAARALERVLKTIASEIDRLDQRIAKAIASNPAFAALARLIGSVAGAGPVLAAALIAWLPELGRLDRQTLAALVGVAPFDDDSGPLHGPRHIAGGRTALRNVLYMATLAAATQHNPVLKAFYRRLVAKGKPAKVALVACMRKLLHILNTMVARGECWNPNRTQPAPAAA

SEQ ID NO: 437386 - protein, 342 aa, unidentified
MKIIGCDFHPSFQQIAMVDTETGEYTERKLTAAEARPFYAALPGPVLVGMEACGNTLWFERLLAELGHELRLGDAAQIRTMEVRKQKTDRRDAALLLRLLLEGHFPELWVPSLEQRDLRQLLLHRHKLVAMRRQVKNQLQHLALNQGVQQKRKLWSAAGRQLLEALPLSGWTAKRREDLLQLLDELDRRIGELDLAAQQEAEKNSVARLLQTHPGVGPITSLAFALTLGRIERFAHSRQVVSYLGLNPAEHSSGGRQRLGRISKQGNPLVRSWLVEAGQSAARLVPELKRAYQRLQHRKHCAVAKVMVARKLAVRLYWMWRSQQPYAAARTQGSPSHPVVAE

SEQ ID NO: 437387 - protein, 426 aa, unidentified
MRALGLDVHLDFCEVAISEGGGVRSAGRIETKPEQIELFAQSLGAEDRVALEVTGNTWEIARLLEPHVAQVVVVSPGDTGIRQARAKTDRLDARTLAKLLAAGELDAVWMPDRETWVMRRRLQRRGQLVSARSRAKNQIHAVLMRCLVGRAPFADLFGVKGRRWLAALELPEEERETVDSALRQVEFLDREIAEVERLIASAALGSAEIRRLMTVPGVNVIVAASFLAAIGDVGRFESPRKLVGYLGLDPRVRQSGSGPATHGRISKQGSLRARHALVEASWSTVRQPGPMRAFYQRIRVRRGHQVAVVAAARKLACLFWCLLTREQDYAYAQPSLTRKKLRRLELGAGAPSQRGTKTGLWAANAAMRKAERELARQAEVAYRRTVADWQTARAEKEGAGATPGRASRRPSSGQAARQGKAPGPAL

SEQ ID NO: 437388 - protein, 347 aa, unidentified
MHNRQNYLYVGVDLHKEHHTAVIINCWQEKLGEIQFDNKPSAFSKFLLEVETYVSAGITVVFGLEDVGGYGRALAKYLVDHEQVVKEVNPALSFLERKSHVTTQKSDSWDAECVARILINKLNQLPDAKPNDLFWSIQQLVSRRNALVKAQSALKNQLHIQLNHHYPSYKKFFSELDGKTALAFWQQYPSPFCLEGANIKQLTAFLLDVSNNTCSVKKASDILKLVKEDGQTMKEYQETRDFLVRSIVRDIEFKKKEMKYIERELKRLVNLLDYQLETMPGIELVTASALIAEIGDVRRFPNANKLARFAGIAPVYFGSGGKGKTHKSKQGNRALHALFYNLAVQQV

SEQ ID NO: 437389 - protein, 338 aa, unidentified
MKIFAALDVGDKTTHICVLDGEGAVVWRGVCATDPDVVASTLKRHAAGVERVVLETGPLSAFLYHGLVEREVPVVCICARHAKGALSVRVNKSDVHDAEGLAQLARTGWFKAVHIKGSATHLDRAQLKVREQLLHARLAMANQLRGLLKLFGLRMGKVTTPGKRAERLEALLVQKPELRPILAPLVAGLEALDVQIATSTRSIKARAAADPVVALLMTTPGTGPITALTFKSSIEDPTRFERGEDVGAFAGLAPRRSQSGERDVHGRISKAGDPMLRSALYEAANNLLCRVKRPCHLQTWGKALVATKGAKRARVAVARKLAILLHRLWISGNSFQWA

SEQ ID NO: 437390 - protein, 358 aa, unidentified
MVDKVTKAAVVGGVDTHKDLHVAAVVDQNNKVLGTQYFSTTRQGYRQMLAWMTSFGTLKRIGVECTGTYGSGLLRYFQNAGLEVLEVTAPDRMERRKRGKSDTIDAECAAHAAFSGIRTVTPKTRDGMIESLRVLKTCRKTAISARRVALQIIHSNIISAPDELREQLRNMTRMQLIRTLGSWRPDASEYRNVTNVYRISLKSLARRYLELHDEIADLDVMIAAIVDELAPELIKRNAIGYESASQLLITAGDNPQRLRSESGFAALCGVSPVPVSSGKTNRYRLNRGGDRAANSALHIIAIGRLRTDAKTKEYVARRVAEGHTKMEAIRCLKRYISREVYTLLRNQNRRINSIPITA

SEQ ID NO: 437391 - protein, 347 aa, unidentified
MVTVGSDSHKRTHTFVAVNENGKQLDFQTFAATTPGHLEALRWAGQWPDRRWALENCRHLSRRLESDLLHAGEAVVLVQARLMATVRVTGRQLGKSDPIDALAVARAALREPNLPVARFEGKSREVKLLLDHREDLVAERTRICCRLHWNLHEIEPGVVLSDSALIRWCVMDRVEKIVRHHTGLLAEIALEQLETIRRLTRRIKALGLQLRALMRQLTPSLLELQGCGPLCAAKIFAESADIRRFETRGAFALNNGTAPIPVWSGNNVRHRLNRGGNRQLNAALYRIAIIQARDEGLGRTYIAKRLALGNTRREALRSLKRRISDEVFRRLWNDLPLVLNERFSEAA

SEQ ID NO: 437392 - protein, 314 aa, unidentified
MILALRYVGIDVSKHMLDIFDDAVGDAQSIANAPQPIAEQVARWQCGNVFVVFEATGIYDRELTSQLHEAGIRFARVNPARARDFARASGRLAKTDAIDARMLAAFARTMAPAADPAADPARNSLALLAKRRDQLVHMRAQEKNRRSESADHTTIESITRLLDFLTEEIKAIELKIKTLISKTPQIAEQARLMRSAPGIGPVACMQLIAQMPELGRLAPKQLAALAGLAPFNVDSGKHRGKRLIRGGRKRVRDALYMAALNAVRRNGILKTFYQRLRTAGKPAKLALIAVARKLLTILNAMLRDRKIYLPAPHS

SEQ ID NO: 437393 - protein, 349 aa, unidentified
MEVTTIGIDIAKRIFQLHGVNNNGKTVLKKRLMRDQVLIFMSNLPKCLVGIEACGGSNYWARELSKLGHEVKLMAPQFVKPYVKTNKNDEADAEAICEAVARSNMRFVPIKTVEQQDMLSIHRVRARLVKNRTALANEIRGLLLEFGIIIPQGINKIVDKLTEVLDSDQLSGISYQTFSDLKEEYITNDKRVKELENRLKILSNQCNLYKRLQEIPGVGLITGTALIASIGNASCFKNGRQLASWLGLVPRQNSSGGKTKLLGISKRGDVYLRSLLVQGARAILNAKLRYISKKDQIHANCSKFTEWICNLSERCGSNKTVVAIANKLARVIFAVLSSGNAYLEQKVCN

SEQ ID NO: 437394 - protein, 410 aa, unidentified
MEVLHSHCAGLDVHKESVVACVRHMAGGKVTAPVKTFKTTTAELMLLSDWLSAEGVTHIVMEATGVYWKPVWHILSDGEFELILANAAHVKNVPGRKTDVNDAMWLADLIAHGLIRASFVPDEPTQQMRDLMRTRKQMVRERSSHVQRIQKTLEDANIKLDSVVTDILGLSGRRIIEALVAGQTMPQALATLAHRRIHASADELEAALRGRLTKHHRFLLKLHLDQIDAFDAAIAAIDQEVNVNVEPFRAAIELLSSIPGIGNLAATVIVSEIGIDMSRFPTDGHLISWAGLCPRNDESAGKRRSTKMKKGAPWLKTTLVQCAWAASRTNGSYLQGQYHRLRSRRGSKKAICAVAASMLTAAYHMLKNGAFYEDLGAEHFDRREKNKQILRLVNRLQSLGYAVEITPQAA

SEQ ID NO: 437395 - protein, 483 aa, unidentified
MQFSLVLIWAVKAVAFMEPRFRPTNETLLPLAYMQASQNAYGKFVPTRVKSSAHIRTAPYMGNDLDKGGGLDIHKKSVKAAIVSSDGSILEAEFGMTFIQLGNLKSWLIENGCRRVAVESTASYWYRVVQVLSDEINVIVVNPLDVKDRSGKKTDKIDARRLATKCLHNEAKASRKFTKEELELKRLTRARIQNVQIRSKLRNQIHKVLDAAGIGLSLFVSDIFGKSGMYLLRGLVERKSLEELIPGIPSNRIRRRARELPELIPVQLDDVQVLLIRRALSTIDNVQKSIDEINAELYKKAESYKEDLRILMSIPGVKFTSAITVLAEIGSYRDFEDGDQLACYAGLTPFVYDSGEKHILGRITKHGPKYLRWILNQIARGASKTKRSRLSKVYLRLLHRRGKPKAITALARKILSIMHHLLIKREMWDEEGFRKKRSDLWLDRTSSSTQLTWLDLLFRNVGGADKARPVVDRTGRVKPGDGG

SEQ ID NO: 437396 - protein, 339 aa, unidentified
MDSKKYIGMDVHQASISIAVCDAAGKLQMESVIETKASTILEFMQGLRGSLWVTFEEGTSASWLYDLLKPHVAQVIVCNPRKNALLKAGNKNDRVDARKLSDLLRAGLLTPVYHGESGVRTLRELTRSYLTITTDLTRVMNRIKAVYRSWAIPCGGQEVYSPRHRTTWLNKIQEVGVRWRAEQLYQQLDALVHPAHHLLLQIPRLGAIRVSLLIALIQTPHRFRTKRQLWAYSGLALQTRSSGEYRYKGGQLKHSGKPPALRGLNVNHNHDLKSVFKSTATRAGKSKDPFVIFYQNLLARGIEPQMARLTLARKIAAIVLNIWKKGEHFDPAQLNQHAA

SEQ ID NO: 437397 - protein, 424 aa, unidentified
MKSINQFAATVGWDWADRKHDLWLRPAEGSKGEHLQLAQTPEAIHQWVAKLRERFQGQPVAICLETSRGPVVSALQAYDFIVFFPVNPKALKNYRAAFSVSGAKDDRSDAQLLEAYVRLHRDKLRALEPDTVETRTLAGLVETRRNLVDERTRLVEQLHSVLKIYYPLAEDLLGEQMTKVMAADFLARWPDLESLKRADANTLRSFFFKHNSRSHKTIEERLSAIAQATPLTTDPAIILPSSLRVLALAAMLKPLHRMIAKLDQQIEKTMDQHPDAHLFRSLPGAGPCLAPRLLVAFGTDRTRFESATEVAQFYGIAPIVRQSGTTKTVHFRHRCPKFGRQTFHENAGCTLREELWTHCFHTQYKHKHDDRYHQACRSLAYKLIRIYFACWKHRQPYDPQRYLQALQKNGSPLHKMLQKLTQEM

SEQ ID NO: 437398 - protein, 386 aa, unidentified
MPQLNDLSRSLVILEQDATLIAVIEMGQSSWLVAGIVPGIERSPLKKLAVDESALLKLLNRWREEAEKAGHRIERIAIAFEAGRDGFWLARWLRARDIEAHVIHASSVAVSREHRRAKTDRLDTELLKRAFLGWLRGERDHCKMVAIPTLAQEDAKRPNRERESLVGEQSRIVNRMKAALARLGIRGFNPKLKKAVERLDGLRTPEGEPIPPNTLAELKHDMERRRLVRSQIRDIEGTRLERLEQAPGDGPHVMVRLLARVIGVGVETADMLVQEVLSRNLRDRRAVARYGGLTGSPDESGKKRREKGLARSGNARVRRGMIQLAWRFLMFQKDSALAHWFYARTKNAPQTRKTMIVALARKLLIALWRLVREGAIPEGVVLRPAL

SEQ ID NO: 437399 - protein, 346 aa, unidentified
MSQKTAAVARTIGIDTGKNTLHLIGLDDKGAIVLREKVARGRITARLANVPGCLIGIEAGMATHYVARELSALGHDVKQVPPAYAKPFRQGHKNDFRDAHAIAEAVQRPSTRCVPVKTDDQLDLQALHRVRSRLVGQRTAVINQIRGFLLEHGIAVRQGLRFLRQQLPDILAKRSDVLSPRMIRIIEDLSADWRRLDERIEHVTEEIEVLAHGSEGCRQLMTVPGIGPLIASAMVAAIGNGAAFAKGRDFAAWLGLVPKQMSTGDRTILGRISKRGNRYLRTMIMQGARVILLRPANWAKHSFGPWLTAAANRLHHNVLATALANKLARIAWTVLMQARSYEARVN

SEQ ID NO: 437400 - protein, 370 aa, unidentified
MTSIIYVGMDVHTTNYTLSCYSITTDRVFATTTIEPDYMNIVKYLEKVERNHDGDCHFLCGYEAGSLGYSLYHQLTRSNLDCVILAPSTMATPRKKKNIKTDKRDAENIAKCLAYNTYSPVYVPTDEDNAVKEYIRMRNDAKETLKRTKQQLLAFCTRHGRQFTEGSKWTLKHLAWLRKQDFDNAILYETLQEYITLYFQAVDKLELFDKRIEEFAQLGRYEENVKKLSCFIGVKTYTALSTIVETGDFKRFPTAQQYAAYLGLVPGEDSSGDSVRRTGITKAGNSNIRKLLIESSQSYGRGVVGAKSKALKSRQFGNEPKVIAYADKANERLKRKFYKIQFRSKRNIAVTAVAREMACFIWGMMTDNIA

SEQ ID NO: 437401 - protein, 399 aa, unidentified
MFVGIDWANESHDICAVDPAGKISGRATIAHSQEGLDELTKHLGRWAEQGEILVGIERPEGRLVDRILQAGHPIVLIPTFAMKDLRRRYAVGGAKSDPGDAYVIADVTRTDGHRLRRLEPLSEQTRALRSVVRARGDLVDQRVALGNQLRACLQAYWPGAAVIFADVCSEIALAFVERYPTPDAAARLGEVRLASFLKKAGYSGRRSAAQLLGRLRSAPEGLGGVEAEARADSVRAMLRVMRSLNRSIKDLDRAVVAHLGEHPDAEVFTSLPRSGRINAAQMLAEWGDCREAYPCPDAVSMLGGLCPVTHASGKHRDVSFRWACNKRLREAITTFADNSRHASPWAADIYRRAIARGCDHPHAIRILGRAWVRVIWRCWQDRRPYDPALHGAAVLLEAA

SEQ ID NO: 437402 - protein, 413 aa, unidentified
MVGKMVIAGVDTHKDTHVLCLLDGLGRKMSVASFSADPAGYDELARAIGSPEGCMVVGVEGTASYGAGLARRLAELGYNVVEVLRPKRDKRRPGEGKDDPLDAERAARRAASGHGCSVPKSQDGWVEAVRQLYVARRIAVATSTSCVNCAKSMLTTAPGALRERFRGIEQAKELMPRLARRRRADDPLEEAALAALRSVAKVWEEAREQADSCERRMRELLDANAPALLGLEGCGTTTAAALVVAAGDNPDRMKSEAAFAMLCGACPIPASSGRTERHRLNRGGNRQANWALYEIAVKRMAHDGKTKEYVEKRTADGKSKKETIRCLKRYIAREVYHALLDPNPEGAAPKGPALARMRREAHLTQRQVASELGVSAAALSNLERGKRRSTRLEARYYALLHKRKASQIVLDNL

SEQ ID NO: 437403 - protein, 341 aa, unidentified
MKQEMNVLGIDIAKRVFHAIGMDNTGKIVFRKRLSRHDLIPFMAKLPPVLIGMEACGGAHYWARRFREHGHEVKLMAPQFVKPYVKSNKNDSRDAEAIAEAVTRPTMRFVPTKDVAQQDIQALHRVRERLIGERTALVNEVHGLLHEYGIVMPKGVSKFRQAVVGKLEAEKDKLTPLSQEMFGKLVDEFAVLEKQLAYYQEKLEALAQSHPECQRLMTIPGIGPLTATALVAAVSDASAFKNGRQFAAWLGLVPRQHSTGGKERLLGISKRGDTYLRKLLVHGARATIRWVGRKTDRRSQWMRQLLERRGHNRTAVAVANKNARIVWALLTHHQDYQPATS

SEQ ID NO: 437404 - protein, 387 aa, unidentified
MGKTTSLASPAGAVDYDATLIMAVETSNKSWVVAAHVPGLGHIKAKRTIGPTAEALATSIEGYRRRAAASGRVIDRVIVVYEAGYGGFWLARWLTARGIDVHVIQPSSVPVERRKRRAKSDKIDADLLLRTLLAWLRGEPRVCTMVAIPEEAEEDARRPSREREELIRERIMLTNRIGAILATLGIDDYNPLRRDRRVRLEALRTALDHPLPEHARAKIVRIIERLELVLSQIAALESQRDAVLEDEAPEEAKRMIKALVLLRSIGAQSATVLVYEAFIRRFANGKALGCYAGLTGTPFNSGGSEREQGISKAGNRRLRAAMGELAWLWLRYQPESALAKWFRERLAGAKGRLKKVLLVALARKLLIALWRYATDGVIPEGAVLKPA

SEQ ID NO: 437405 - protein, 384 aa, unidentified
MAEQIFKYSVGCDISKDTFNVCILEVSQEQSKVKASHKFKNEKKGFREFEAWVKKHKRHDVPTGFYMEATGVYYENLAWYLFEQEFNVFVLLPYKTKHYLKSIGIKSKNDKIDAQGLAQMGAEQKHNPWRPHSKSIYVLRALTRQHENVTKLKTSLENQLHANEHSAVRNATVKKQLNATIRLLEKQLEELSCEISNLIDADEKLCEKYSHIDPLRGISKLSWATIIAETSGFETFENQRQLVSYAGYDVVENQSGKHVGKTKISKKGNSRIRRILYMPSLVSVRLKEPALFNLYQRVHERTGIKMKGYVAVQKKLLVLIYHIWKNDKAFQSDHSKTFGEEESKSLFPFGFGETIKESSPDKRATQDEHSYELSSKVLFPLAQI

SEQ ID NO: 437406 - protein, 337 aa, unidentified
MQKTPKLGIDISKEHFDVALQWRADEVRPKQGQYLNAPGGFGQLGQWLHEQGASHVHAVMEATGSYGLPLARFLVQQGHTVSIVTPSRITAFAKSEQRRTKTDRSDAALIARFAFSQTCKLHAWSPPSAMAEQLLDLQRSRADLLQTSQQQRNRLASGPHTPAVQQALEKVLACVEEQVRQVESALVALVEDETSCQQQVDMLDAIIGIGPMTAMLLVAELPPISTFTSIRAFAAYLALVPQERSSGKTVRAGSIGKMGRLTVRHALYYPALTAMRYNPAIRAFAQRLLARGKPKKVVIVACMRKLAHQIYAVLKSGQPFDPTKGLAPSVAETAAAS

SEQ ID NO: 437407 - protein, 305 aa, unidentified
MKYSGIDLHSNNSMVVVSDEADRVLVRRRLANDAAAILALLAAHREELVGVVVESTYNWYWLVDALQADGYRVHLANTAAIKRYEGLKHSDDEDDAAYLAQLLRLGILPSGYICPPAARAVRDLARKRMQLVRSRTAQVLSVENMLSRETGAGMRSYAVQRLTAQAVASFGFHQDVERALCANVAVIQTLNREIDKLEQRLRQCVGLRPEFRLLTSVPGIGPTLATLIMLAVGTIERFAAVGNFASYARCVDSARLSNGKKKGQATSRTVMPTWLGRSWKRLTLPAAIVSKRSASMNARRRGPMA

SEQ ID NO: 437408 - protein, 357 aa, unidentified
MDGFKSLLQTIQDCSQKSDKIKVGLEATGHYSYNILGFLLDNDLPIYVMNPLHTNLYRKSLSLRKTKTDRVDAKTIATMLLSDVDLKSYTDTAYHNEELKSLTRYRFDKVQERAKLKQSVSRLVTILFPELEQLVSSIHGTSIYALLSEYPGAKQISEAHLTRLANILVKTSRGHYRKDKATHIRDAARTSIGSVMPAKSLELKHTIKLIQELTSEINEIEDAIRKIMDELKPPILSIPGMGFHSAAMILAEVGDFSNFNSPDKVLAYAGCSPSTYQSGKLTNCYAHMEKRGSRYLRYALYTATKYVCYWNPVFTEYLTKKQAEGKHYNVALSHATKKLVRLIYALQKSGKAYLAVT

SEQ ID NO: 437409 - protein, 364 aa, unidentified
MERVFVGMDVHKEKIVAVGLPVDGTGPVFREEYAGGDLSRVVKRLMRLGKTHQIMACYEAGPCGYGLVRALLEKGIDCRVVAPSLTPRKPGDRVKTDARDARELALSLRAGTLTFVRIPSEEEESVRGLIRCREDIAKEVRRLKHIIAHWLLTHGCRKPSGVGSWSKSHWSWMRALELAALDRSVLDHYLDTLWLLEGRLQVIEGQIVALSDTEAYREKVGRLRAFRGFSVLGAMRVIAEVMEFGRFPSAPAFMKYAGLTPSEYSSSDRIRRGRITKAGNSLLRYVLVEAVQSVRSASPGRALLLRMEAVHGPLREIAVNCLGRLRTKFLRLLHRGVTSGKAKVAMARELAGFVWAMMTAPEPA

SEQ ID NO: 437410 - protein, 332 aa, unidentified
MEHSNFIHFVGIDISKSTFDVAVIEQDQLPTSFKFENTLKGVNAFIRLLKNKKYSLENTLICMEHTGVYGRIIIAKLVEKQANFCVEMSLRIAKSIGIQRGKNDKIDAVRIAKYAEKNCNELELYKPIPLVLEKVKLLIKVREKLVQFKADLQKHPNEMKAFDPELGKLAEKNIKKTIKCFTNEINRIEEDLKELILSDDQLNNTIGLVTSVTGIGIITAVYFTIFTNFFTRYTDPKQLACYCGVVPFEHTSGSSVHKQSKTHPIANRTLKKQLHMCALAAVRHDPDLKEYYLRKAEEGKNKMLVLNNVRNKLVLRICAVVKRQKPYKKQVA

SEQ ID NO: 437411 - protein, 524 aa, unidentified
MSYHVRRIRRESPKSKPRSIKTLQKPNGVISPRVQKVGGEHFAIVCVDPAKHRSAWMMADYFGNVLIEPQVLQHLGAGFKLAVEQIHQVQQKHDIQDLIVVVERTGNYYLPAKRAFAGAGFETRIVNPFATKQYRMPANPGNKTDETDLFAQHRAAVAGFGLCEFELESPYRELQLRARHRRNLVQQAAALACQIREHLHLGMPGYANLFDRLFESPTPLAIAAACDSPAKLVELGALGLSRHLRKKKIPHRSPSIEKVLAWAALAINDPIKDGPMHHAIWTDLHELYQHSHQQIATLERQLVGDLVQTPYVRLLAIPGINVVSAADLAAEMGPITRYANANSITSRSGLYPSRHQSDQTDNDRGPIIRHANRRLRCVLMRIADNLACHCNYYRAQADLDDRRGIDKRASRVKIAKRFSRLALACVAGDEPMRHPCFQQPDSILEKLRRFHQDHETPVDRLLADLNAAVGQLPYNTRSYEAKIVAGVLQERAQRRRGARAIGDLLPAVLARLNVTEENKCGDRS

SEQ ID NO: 437412 - protein, 332 aa, unidentified
MDIVYLSIIHQNKNAMSRVSFEQVILRGCGLDVHKDVVVATISGEGLSTETRSYKTFSSSLTELKEWLLSNGITHAAMESTGVYWKPVYKILECPRMKVWVVNARHIKYVPGHKTDKKDSAWICKLLLAGLLKPSYIPEREQRELRDLTRYRNKLIQHVSSNKNRIVRILEDCNIKLSSVMSHLDGVVATKLIDILIDKGHVTMDDIACVYHKRLEASPELLYQACEGFIEPHHTYMLQTIRKDIEQTESIISDLTSRIKEVLSPYENVIDLLRKIPGLDRKTVEDLIAEIGVDMEVFPTEKHLASWAGICPGNNESAGKKKVEEPLMATNS

SEQ ID NO: 437413 - protein, 346 aa, unidentified
MEHYVGLDVSLKLTAICIVDRTGKIEREGVVTSDPETITAFVKSHAPHVVRIGLEAGATSTWLWTELNKMGLPVICIDARHAKAALKMQINKSDRNDAVGIARIMQCGWYKEVRVKDLDSHAIKALLVSRALLVKIKRDIENQIRGLLKNLGLVIGRAKMNVFAVRAAELADARPAVAAAVEPLLKARDAVGRQIADLDRKVLRLARNNAQVRRFITVPGVGPITALCFLATIDDPTRFKRSRSVGAYAGLTTRRYASGEIDWTGRISKCGDKMLRTYLYEAANVLLTRIAKWSALKAWGVRLAKRSGLRKAKVAVARKLAVILHRMWIEGTEFKWSSKGAANQPA

SEQ ID NO: 437414 - protein, 345 aa, unidentified
MEHYVGLDVSLKLTAICVVDQTGKIEREGMVVSNPEAIAAFIKSHAPHVARVGLETGATATWLWTELNKMGLPIICIDARHAKAALKMQINKSDRNDAVGIARIMQCGWYKEVRVKDLDSHAVKALLVSRALLVKIKRDLENQIRGLLKNLGLIIGRAKMNVFAGRAAELTDNRPELAAAVDPLLRARTAIEQQIADLDRKVMVIARNNVQARRLMTAPGVGPITALCFLATIDDPTRFKRSRSVGAYAGLTTRRYASGEIDWTGRISKCGDKMLRSYLYEAANVILTRVAKWSALKAWGIRVAKRTGLRKAKVAVARKLAVILHRMWIDGTEFKWAKEAANQPT

SEQ ID NO: 437415 - protein, 353 aa, unidentified
MKYIIGCDAHKHFSQFAVFEEQSQKFKQVRVNHEGGAIRDFLSEFPEGTPVALESIGNWYWIVDEIEAAGCQPLMAHAAKAKAMMGNVNKTDKLDARGLATLLRNGTLPTVWIAPGETRDERELPRTRMAFSKIRVALKNRIHATLAKYNLCVASDSDIFAEKWREELKKVIQELPAETQTCIQQEIELLEVVQGQILVMEERMHERIPITATMQLLKSLPGVGDILSIVIAAEIGAIARFPRAEQLASYAGTTPTVHSSGGKARYGHLPPQSNHYLKWAFIEAANGVARHYQHPNWQARHVTQLYRRVRSRKGHAVAVGAVARHLAEATYWMLTRNQPYQEPVSRKVLLRQE

SEQ ID NO: 437416 - protein, 340 aa, unidentified
MTVGTIGIDVGKNWFHLIGLDSRGVIVTRQRFNRAQLLRFMSKLPPCVVGMEASCGSHHLARELSGMGFDARLMSAKFVRPFLKGNKNDYLDAEAIAEAVQRPSMRFVPIKTVEQLDLQAIHRTRSGLISRRTGVINQIRSFLQDRGITVPQGPAVLARALPALMTAEEARLSDSIKQLIRMLREQWVSINQQVDELESELRSIVERDDACKRLASIPGIGAITASAIVAAIGDGRMFRSGRDFAAWLGLVPRQHSTGGRSTLLGISKRGNAYIRTLLVHGSRCMLRFFKDPDTAIGRWAVALKSRAHANVAAVALANKQARTAWALLTQGTFYQARPAV

SEQ ID NO: 437417 - protein, 345 aa, unidentified
MRYVGMDYHKGYSQVTVMEENGEIVNQAKLTNEPEALKRYFEKIGSCEVVLEAGRNWYTMYDLLEELVEEIHVAHPLKVRAIAEARVKTDKIDSETLAHLLRSDLLPCIHIPQPEVRDNKKILRQRMFFVAVRTMVKNRIHDIMDRQRIKTEQFSDLFGKGGMEYLKGLELPEPDNSLLKEQIDTLEELNQHIETTNELIHKMAEEEPRLKWVDSIPGIGEFLGLLAIQEIDTVERFSGPEKLAAYAGLVPSTYASGGKVWHGRITKQGNKYLRWAMIEAVRPALKKSVYLRNYYVRIEKRGGRNHAKVATARKILGLIWTVLKEKREYQEHWKSRLPSIRLSHV

SEQ ID NO: 437418 - protein, 341 aa, unidentified
MYRTKVGVDLAKYIIQVCILNGKKVTSNVEMTTDEFLCWLVKSKPMTIAFEACSTSNYWYQQAIKAGHDARLVSAKLVKAVRQNQKTDKNDALAIVQTLFLPEMSFIAGKSIEQQQLQSIQRLRELALKHQGAAQKQIVSLLLELNIRVPNAQASLLSKLEDMLEDAENDLPDIFRATLGVAKNQLENMINTIREYDKHLEKTIHSLPDCKKLLKLEGVGPINAVNLYIALSGEQSQPFKKGKDASACIGLTPIQYSSGGKTNIGTIGKHCKNTFLRSQLIAGAMAVVIKVLKYGAKTKKELWLQGLMQRRGNKCAAVALANKTVRTAHAMLSQNTEYHAA

SEQ ID NO: 437419 - protein, 400 aa, unidentified
MICIGIDVSKGKSTICIMKPYGEIISKPYEIAHIEKDLNDLVNTIKALNEEKRVVMEATGIYHLPVLTYLQDNNIFVSVINPFVMKKYRCQAIRKGKTDKLDSITIANYGLDNWFHLEEFKGLTESYAELKLLSQQYRHYMNQHICGLLALTHILDYTMPGIKELLSSFSESNGKDKLSDFVDKYWHFDNIRKMSQEEFINNYHKWAKEKGYHPNQEKAIEIHNLAMKSIPTLSSTTSTTKTIVREAVRVLKEIDATLYKILTLMQEIASKLPEYKIVREMNGVGEILSAKLIAEIGDIRRFHSGKALIAYAGIDAPPYQSGQFMSVNRRISKRGSSSLRKVGYETMRCIKSHKYENDAVYNFIIKKECEGKAKKVAKIAGLNKFLRIYYARVKEIYQNI

SEQ ID NO: 437420 - protein, 317 aa, unidentified
MLNSSVYLGADVAKDSIALASCPPLAGLSGEIPNTPAGFRLLLKRLAKVSGCVQVICEATGPYHQAFAQALHQAGINLTILNPRQARDFARAKGLRAKTDPIDARLLADYGRKLAPALTPKPDPAVVQLDALVTRRRQLVEDRAKENTRLQQTSDPVSLKSLRQHIRYLDQQIDHLVGLIEALIQAHPQLAAKAQIMAKVRGVGTLTVSSLLADMPELGSLSRGQVAALAGLAPFNCDSGAARGLRRIQGGRSCVRRALYMAAFSASRFNPILKDFYQKLIARGKPHKVALTAVMRKLIVHLNRLLKQHALASAQLI

SEQ ID NO: 437421 - protein, 355 aa, unidentified
MKYYTSTTEFNCGIDLHARQMYVCVMDRQGKKLVHTNVKNNDFQFFLKLIEPFKHDLTVCCECMFGWYWLADACQAAGLTFVLVHALYVHLIHAGKSKNDRIDSEKLTHLLRSNLIPPAYVYPADKRPLRALLRQRIFFVWSRSQLLARINSHQLAHNRIPAKQTRRTRDLWEEQLLEREDHPLRQIALKNELAMIRHFDHQIFQLEEELQRQTKQVACREYALRQTVPGIGENLGLTILYEIGNIERFPTVKDFLSYCRLVKGTVASAGKIKGLRGAKLGNPYLRWAFGEAAVIAKRDHRLIGPLAQRLEDRMGGNKFKANTVVAIKLARAVYFMLSNKTVFDPDRLVAALAKN

SEQ ID NO: 437422 - protein, 310 aa, unidentified
MTILCGVDVSKSWLDAWIEPAGHQRFANTAEGVAELGAWCRAHHAALVVMEASGGLEQPAYLALWQAGQPCAVANARSVRKFAEAMGYLEKTDRIDAMMIARFADAKRMVATPPPSADQQRLVALAVRLRQVTADLGVQKQRLHSVRDPFALQSIQEAIAFFTTQASQLASEIAALIEVDPLWVALDRTFRSIKGVADRTVAYILAELPEIGTISNRAVTKLVGLAPLPDDSGQRRGRRSIRGGRAGLRSILFLVADVARRYDQSLTDFRERLLARGLSKMEVRIALARKLLVRLNAKARDVRAELAHAL

SEQ ID NO: 437423 - protein, 347 aa, unidentified
MVQYIGCDVHKKYSVFVAVDELGRRSVAKRVEHDRAGFRAFLEELAPGSPIAVETTGNWYWIIDEMEQAGHFPCLAHAAKSKAMMGHINKTDKLDATDLAVLLRNGTLPSIWIPQGELRDQRELPRMRLVLVQMRTALKCRIHATFAKYGITFEGESDLFGVRGHRSMAERMTELPAETRRTVEQELSLLGQIEEQIGLTEQRIRQVIAVTPAMKQLMTLPGVGPILAITVVLEVGDVARFPNAQHLASYSGTVPRVNSSGGKTWLGRTRVDVNHYLKRAFVEAANVVVLNQAKNPSQHAVKLYRRVRSHAVHGKAVVAVARHLAESAYWVLKKNEPYQEPVSPEQG

SEQ ID NO: 437424 - protein, 344 aa, unidentified
MTIIRIGLDTSKHVFHVHGVDGDEQPALRRRLRRSQVEKFFAKLPPTRIGLEACGASHHWARVLRSLGHEVVLIPPQYIKPYVKRGKNDAIDAEAICEAMSRPGMHFVPIKSRDEQAALMLLKVRDLLMKQRTMLTNAIRGHAAEFGVIATKGPQNLAELLERLGEDANVPAPARELLNSLAGQIAALEVRLEALEAKLKAHHKADPRSRLLATIPGVGPITALSLTLKVPDATVFRSGRHFAAWLGITPREHSTAGRQRLGKISRQGDEGLRQSLVLGATAVIQQVERRFKAQRVSRTDSPWLLQLLARKPEKVAAVALANKMARIIWAMLVSGELYRQPQAV

SEQ ID NO: 437425 - protein, 403 aa, unidentified
MEHGTTHFGSVDWASEGHAACIVDAEGTALDEFEVAHSHAGLIELCQHFRRAGVQRVAIERPDGPVVDALMAADLEVVVVSTRAVKALRTRYGLAGNKADRSDAFVLADCLRTDGHRWPSLQPDQSQTVALRAAVRTRKDLVATRISTANQLRAHLQLVFPGSVGLFAALDSPICLAFLERFPTAAQAAWLSEKRLAGWLAANAYSGHTAAGELLHRLQSAPAGLHGDAATRQAAVTLALVRVLRSVLAEIATLEAQIREQLKLHPDGFIFRSLPRSGCVRAAALLAEIGDCRARFPSPESLAALAGAVPSTRRSGKHTAVTFRWACDKKLRDAVIDFAQDSPRGNEWAARLYHQHRARGHSHPHASRVLARAWIHVIWRCWQDRVAYDPVQHRALQALRKAA

SEQ ID NO: 437426 - protein, 456 aa, unidentified
MNTTTDFAATLGLDWADQKHDLWIRPADGSKAEHVRLEQTPEALHEWVAKARERFANRRIAIALETSRGPVISALMAYDFIVLFPVNPKCLKDYRSAFAVSGAKDDRTDAQLLEEFVRLHRDKLRALEPDTELTRKLAGLVENRRHLVDERTRLVNQIHATLKTYYPLAEALLDGQMNTPMAADFLARWPDLDSLQRAKPEGVRSFFYQHNSRSAKKTEERLAALKKAKALTTDPALIVPARHLVLALAGMLRPLHRAVACLDKEIEQAMDQHPDAPLFRSFPGAGPALAPRLLVAFGTNRGRFDQSSEVAQFYGLAPVVVQSGNSKIVHVRYRCPKFGRQTFHENAGCALKKEPWAKCYYEQQKERNKGKHHQACREQQDLPDGAPAHGVRRHDNLASYGKEFRLPPNGQSARQPERRNGRLVPGTRQLFGRNAAGAEGRQDFVSRGALRVLLRN

SEQ ID NO: 437427 - protein, 457 aa, unidentified
MSRKGKRTKGIEEAHPFAGMSRVNANAAGVDIGATEIVACVEGDENMQIVKGFGNYTVDLQAIGKWLQEHNVKTVAMESTGVYWIPLFEELERQGFECLLVSSRSLRRVPGRKSDIQDSQWIQTLHSYGLLESSFRPQGDLVALRTLLRHRGQLVDHRSPHVQHIQKALLQMNIQLSQAVSDITGQTGQAILRAIAAGERDPQKLAALRDRNCKNSEEEIAKALTGRWQEEYLFILEQSLELFDYYTRQIEGCDAEVERMYALTRPEWEGGELQPRSTRKRNSHSKNAPPNQEELRAHLKRISGVDLSAVDGFGVSLAQMVVMECGTDMSKFPTEKHFCSWLGLAPKHEISGGKVLKNRTLKTKNRAGQAFRMAAQAVKRADCVFGSFYRRLRGRLDKAQATVATAHMIARVVYRMLKYKVEYETINIEEYEAKYKEQQIKYMKKKAAKLGFQLVPA

SEQ ID NO: 437428 - protein, 418 aa, unidentified
MNQDLIARLSRRYLALDIHKHYSVVAGVDFEGKVILEPVRVEHADLPAWLEKHIQVTDHVVIESTTNAWTVYDLLEPLAEKVLVANPIKVKQIAQARVKTDVRDTLILARMLAANMIPAIWVPSVDVRSLRYLLSQRRRLTGMHTQIVNRMHSVAHRHHLSHPRGKRFNEKNTVWQQDDELSEEEKFQLELDMATEKHLSEQIGKITRKLSKMSHQKPWRESMMYLMQLPGFGVVTGMTVLAAIGDISRFEDFKKLASYSGLTPGVEQSGTKNRGKKITKEGRKDLRWAMVEVAQRAVKSDPLWERRFQELCRRMHRNQAIVVIAHRLLELVWIVLSRKQPYRHFSHERIAYKYLTWAWQMSEADRDGLTRQQFARYYLMRMGIGHELEKIALNPRYPRRLASEVELLTLRPDLFQSG

SEQ ID NO: 437429 - protein, 343 aa, unidentified
MQIRSVGIDLGKTTFHLVALGDNGKVLLKKKFSQKQLSVFAANMQSSLIGMEACAGAHFLGRALRAQGHDVKLIPAQFVKPFVKSNKNDFIDAEAIAEAVDRQNMRFVSIKTDDQLDLQALHRVRERVMQRRTAVINQIRAFLLERGMVFAKSPIRLREAIPSVLENVEENLTPRMRNLIAMMWSEWKELELQLEELNAEVERIASSDAACQRLRQIPGIGPLVATAIVASIGNGSAFRKGREFAAWMGLVPRQHSTGGKARLYGISKRGNRYLRIILVHGARAVVLRSKRDRIAMGAWLTSLEGRAPRNVLIIAMANKLARIAWAVLSTGQDYRTDAVAVPA

SEQ ID NO: 437430 - protein, 355 aa, unidentified
MLRSNKGSKEVQHFVYPKPKVMKNYLFHIGVDISKLKLDVNILNVSSFLSEHFVIENNPKAITNFLKMISKKGIDINESLFCCENTGVYTNHLVHVLLNLTLDLWVVPAIEMKRAKGISRGKNDKIDAKDISLYSYRNIDKLSLYTITEVDVQKLKILYSEREKALKSLMLIETSSENLEFVNKEIFKEIAGFNKSLTASIKKTIKKIETRIKEIIQANEKLKTQSLLIQSIPGIGEQTSLYFIIATKGFAAFENWRKFACYSGVAPFEYSSGSSVRGRTKVNHLADKKMKSLLQMCAMTSIKYDAQLKEYYQKKKAEGKNPMLILNNIRCKLISRVFAVINRETPYINTYKFAS

SEQ ID NO: 437431 - protein, 351 aa, unidentified
MAERNVVVGCDLGDKFTELCILDPSGTVIESGRIRTTKHSLETRLARFGRTRVVLEASTHSRWVAAVLTAAGHEVIVANPRQLRLIWRRPRKTDKSDALMLAKLGRIDIALLAPVRHRSHSAHVDLACLRARDKLVAVRSKLITHVRGTLKAFGLRVDGQHANSFPEKAHQVLPAELVPALAAALDVIRLLNVHIAAHDKQVDHLATVVYPESARCSQICGVGPITALAYMLTMEDPTRFKKSRFAGAFFGLIPAADQSGESNPQKHITKAGDGFVRKLLVECAHRILSPVTSADSDLRRWGLKHAESGGPNGRKRAVVAVARKLAVLMHRLWLSGERYQPIGYSHRELAA

SEQ ID NO: 437432 - protein, 360 aa, unidentified
MSNSIARVEPAAKVIVGVDTHKHVHVAVAINGLGARLATCKAPADRAGYAHLVAWARALGTVEVFGIEGTGSYGVGLASFVRRHAMRVVEVSHCDRRKRRNTGKNDTLDAETAARSVLAGIAVAVPKTADGTSEMVRQIKIARDTAVKARSAAIITLKTLVVNAPGELREVLEPLADRKLIGRCATLEPGDLIDPTASVKHALRALATRWLTLTTEISTHDTALDTITLAAAPTLRETFGIGPDSAAEMMIVAGDNPARVRSEAAFAKLCGACPIPASSGVTNRHRLFRGGHRQANAALYRIVIVRLRWHQPTIDYVTRRTAQGLSKKDIIRCLKRFVAREVYHALIDDHRSRAALTEAA

SEQ ID NO: 437433 - protein, 321 aa, unidentified
MQEFNAFVGVDVSKAELVAAFHDQAGCCSIANEAGAISAWLHKLPDGSALAMESTGRYHQLLATLARAAGLQVFVLNARDVYFYAKALGARAKTDRVDAHVIARYLAEQHKHLHPWQAPSAVLAQVQCLLGQRWTAVTKRAALHQSLQGCDAVIASQVQALDLAFNALLKAIDARIATLFEDDAHLGAQRALLQSIVGVGPQSSALLASVLEQVSFVSGDALVAYSGLDPRACDSGKSRGRRRLSKRGQPALRRQMYLAAMSACHTKAFEGTYKALRQRGLKTTEALVVLARKLLRIAFAVWRTGKPFDPQRIPQSLDNKP

SEQ ID NO: 437434 - protein, 419 aa, unidentified
MFKIFRKNCCGLDVHKTWIYACIGITDTNGRTDYKEARFSSFSRGLHELSDWLAKFSCTEVCMESSGKYWIPVFNVLEKTCWVTLAHPKYTKPQKGNKTDRKDAKWICDLFMCDMIKPSFIPPPDIRHLRDLMRYRFKLTNMLSGEKNRAQNCLTVSNLKLDDVFSDVFGKSARSITGYILEHPGEQFDVAPFVDGRCKHPLEEIQAAVDGSISHEQATKLREILKHTDEIQIHKQSIETEILRLAAPYQALLNIIHTAPGFSSDPMTAIAIISEIGVDMSVFPTAKHLCSWAGCCPRNDSSGGKCKSTRISRAGVYLKPLLVQVANAVVKSDKYPECKERYRRLKARRGHKKAIIAICRMLLTAIWNMLAKLESYTNKGYLVEHNTPERRTLTTSQALNLLKSRGFIIKDELEDSLTA

SEQ ID NO: 437435 - protein, 318 aa, unidentified
MLIHYIDIAKRNFVIAVSSLSKTKTETNNPKGIAHTIEYLKKHKVALVVTESTGGLEIPAAKAIRRAGIAVIIANPRQTHQFAQSQPLTKTDAKDAKMPAFFAQMTAQKEDSQTMPYQPPTEAEEVLEALVNRRNQPADMRTAEKNRLHQVHETQVGSVKQLIAHFDRLIDELDKQIDDHTHTHFDGKAQVAEQIKGIGSITTATLMVMLPELGRLSHKRIASLAGIAPHPRESGETKFKSRCFGGRSAVRKALYMATVAATRFEPLIRDFYQRLLSEGKPYKVAVTACMRKLLETFAKFLSLPTAETQTQVFVYFRS

SEQ ID NO: 437436 - protein, 347 aa, unidentified
MEDDGMKLFVGFDISLAKTTVCVISEHGKIIKEAETESEPEALARWLDELGGSIAAIGLEAGPLSQRLHRGLTEAGLDAVLMETRQVKGALKAMPIKTDRRDAEGITRLLHLGWFRPVHCKSISAQETRAVLGARKAIQQNMIALEMSLRGLLRNFGFKVGAISRGRFETRIRELADGNPMLETATEPMLRARASLRQELAGLEKCVRQLAWDDPVCQRLMSMPGIGVVIALTFRAAVDDPARFRSSKRIGPWVGLTPSRNQSGERDISGGITKAGDVNLRRALCQAATVMMNRGRSTWLRTWGAQLAQRRGRKIAMVALARRIAVILHRIWVDGSTFQADAAPIVT

SEQ ID NO: 437437 - protein, 391 aa, unidentified
MSQHCRFDASKSLTALEQDSTIIAVIEMSQSKWLVGAIVPGVERHPLKKLDADEKALLKLLHRWRNEAGQAGREIKRIVVAYEAGRDGFWLARWLRARDVEAYVIHPTSIAVSREHRRAKTDRLDTELLMRAFLGWLRGEMRHCSMVAIPTVEEEDARRPNRERHNLVTEQTRIVNQIKAIFARFGIRNLRPTQRKAEEKLEGLRTAEGTPLPQNTRAELRRHLARLGFVREQIRAVEQERLRKLAASPAAEKGPHAMVRLIARVLGVGVETADMLVNEIFSRHWRDRRAVARYAGLTGSPDESGSRRRERGLARAGNVRVRSGMIQLAWRFLRFQKDSALAQWFAARAVDGRAGTRKTMIVALARKLLIALWRLVTKGEVPQGVVLRPAS

SEQ ID NO: 437438 - protein, 423 aa, unidentified
MNYTQNQKIKQITPSTLIIGIDIAKDKHVARAQDDRGIEFGKRLIFENHIHGFEQLIVWAERYAQENGKKTILFGAEPTGHYWKNLAYYLVAKHYQFVVVNPMHVKKSKELDDNSPTKNDTKDAKVIAQLIKDGRYSVPNLVEGIYAELREGAKIRDQLVEQLMTTEGRIQNLIQRYFPEFFGVFGDWEGKAALCTLKFFPFPSDISQMTPEEVLQKWKPYVQRGVGIQRATKLVEAAKKSIGLSVGIRFARQEMGCLLDQYELFKTQLEELDQDLEEVGKTIPGAKKMMAIKGLGVATVTTILAETGDLTKYSHPQQLINLAGLSLRENRSGKWKGQTKITKRGRSKLRRALYLAIRPLVAHNSTFKALHSYYTKRPDKPLKKQQSLIALCGKLLKVIFVIGQRQCPFDGSKLLCGIPQNQA

SEQ ID NO: 437439 - protein, 370 aa, unidentified
MLDTTTFVGLDVHARSIKAVSLDVMTGEVRCATFGYDAAAVAEWVRSVDPKAKCVYESGVTGFDLQKRLSGLGVDCVVGAVSKMIKPSADRRRKNDRNDAEFLARMLSVGNVVEVWVPDDECEAARDLTRALEDARDDLSRSKQRLSKFLLRHGLVFDERTPTGRRKGNWTRAHWSWIESIRFAEGADNEVLAYYVEAVRRAAEEKSRLEGLVGAEARKPRWRRRVDSLRCLKGVDTATAADLVFEAGEFSRFRNARSFAAWVGLTPSEHSSGESDRRGAITKAGNKHLRKTLVEAAWHYMTCSGRPKDLAKGQAPDPAARRHAAKGVRRLVERREALLARGVHGNKANVATARELACWVWAVGLMAEEA

SEQ ID NO: 437440 - protein, 351 aa, unidentified
MAGSKRLVIGGVDTHCATHHAAVIDRNGRLIAGAEFSATPVGYASMLTWMRSKGKLGQVGVEGTGAYGAGLARYLHQQGIEVLEVPRPDRRLRRQRGKSDPIDAEAAARTVLAGKASGAPKLADGPIEAIRMLRVARNGAVKARTAALNTLRSMVITAPEPLRTQLRSLSSAQLVTACARLRPDPTNLLDPAQSAKQALRSIAQRAQHLDTETRSLRKQLDDLIQTAAPATAAIFGLGPDTVSALLVTIGDNPDRLRSEAAFAHLCGVAPIPASSGKTHRHRLHRGGDRASNSALHIATVVRLRYDPRSRAYADRRTTEGLSMPEIIRCQKRYLAREIFHSLRADYAQLST

SEQ ID NO: 437441 - protein, 339 aa, unidentified
MQEQFTFFVGTDVSKLTLDMSITRKGIEVHSSQIANTKKAIASWSKAMSKQNGISAGNTLFCMEFTGIYNYHIVEYLDSQAASMWIMPGIQLKHGKGMDRGKSDKADAKKIALYGFTHPHEVRLWKKPRLVLKQLRALINNREGLLKTRHQYERRLKESKGLVEKKELAINRKYCQPMLNMADKQIKVIDKAIKELIEGDEKLNEISGYVQSVDGVGIVTAAEMIVTTNEFENYIDAKKLACHCGVVPFEKQSGTSIKGRASVSHKANKKMKRLLHLAALAAIKVKGEFKEYYERKKAEGKHVMSILNAIRNKLVLRIFVCVKNKRYYEKNYHYGLVKP

SEQ ID NO: 437442 - protein, 410 aa, unidentified
METVVERPAALDVHKEQVTACVRIPGGREQREQHVAEFKTTVQGLLALRDWLKALGVSQVAMEASGVYWKPPWAILEDEFECVLVNARHVKQVPGRKTDVSDAAWLCQLLEAGLLNASFVPPKPIRTLRNLTRYRKAQIGERQREANRLHKILEDTGIKLDCVASDILGASGRAMLDALVAGTTDPAVLAELAKGKLRTKLPALKEALEGRFDAEHGIVVGAILAHIDFLDEQISLLSEAIEEQIRPFAPAVELLCTIPGVQRRTAEVIVAEIGTDMSVFATAGHLASWAGLCPGNDESAGKRRSGRSRKGSRWLGIALTEAAQANTRSRDTYLSAQYRRLKPRRGHRKAIGAVRHSIIVACWHMLTTGEIYRDAGGDYFTRIDPDKQTRRLVAQLERLGHIVTLQEAAA

SEQ ID NO: 437443 - protein, 352 aa, unidentified
MSDPIEVQSAPIKKLQMIGVDVAKQKLDVSVDDNTALTIDNHEESFKNLLKIIPENGSACFVMEATGGYERKLVAFLQAREIAVAVVNPKRVRDYANAMGAYAKNDRIDANMIRHYAQTAYDKKRLQLRESLTEAARRRESLLRRRNQLVGQRSMEKQHLESATDKDTVRSIKRIMKQLDKEIEKIEAMIQTDINADEHLKKSMKQLLQVPGLGDVTVLTLLTQLPELGKLSNKEISALVGLAPYARDSGKKTGRRAIFGGRTQIRSTLYMATLSATRFNKPIRLFYQRLLAQGKLKKVALVACMRKLLTILNSMAKTGSEWNPDFEHSCCMGRYLLLQYLHLPHPWGSCRR

SEQ ID NO: 437444 - protein, 360 aa, unidentified
MPYSTSIGLDVHARSISAAACIFETGELVEATFGYDAEAIAKWAEGLPEPKAALYESGPTGFDLKRKLDSLGLPCHVGAVSKMRKAPGDRVKTDRRDAAYLARLLMVGDYVECTPPTPEMEAARDLSRIREDAREDLMAARHQLSKMLLRYGYVWPAGRASWTKAHRDWLKGIHLPDPTAQYVLEEYMERVRECEARKRRLDEAIAERAKEEDIAGIVQRLCLLRGISVLSAFGIAAEIGDFARFRTARGFMSYVGLVPSECSSGGSVARGPITKTGNSHVRRLLVEAAWQHSRPLSPASDSMQPPEGASPEAAGIAAKANMRLHRRSLHLRKHGKKPCVANVAVARELAGFVWALALCG

SEQ ID NO: 437445 - protein, 356 aa, unidentified
MSQNLDVSPAAIGIDIGKNSFHIVGQNQRGAIVLRQKWSRGQVEARLANLPPCRIGMEACVGAHHLSRTLKALGHDARLMPAKYVRPYSKGQNNDYRDAEAIAEAVQRPTMKFVATKTADQLDLQALHRVRERFVGQRTGIINQIRAFMLERGITVRQGLRFLRAELPSILATRTDALSPRMLHILEDLSADWRRLDARIEDLSSEIEALARQDKGCERLMTVPGIGPIISSAMVAAIGTGDAFSKGRDFGAWLGLVPKQLSTGDRTILGSISKRGNRYLRSLFVQAARVVLVKIGPKHWDRYGLKSWIEAARKRPHHNVLAIALANKLARIAWAVLHKGRAFECVKTNEAACRPA

SEQ ID NO: 437446 - protein, 424 aa, unidentified
MLKIVHPICCGIDVHNKFVVATIATTDHKGVTRYQTKQFKTFNYDLENLKAWLIKNDCKQVCMESTGKYWIPVFNYLENSCTVTLANPKYVKAISGKKTDKRDSRWITDLFKHDLVPGSYIPPKEIRMLRELCRYENKLVSNRSSEKNRIQNSLTVSNIAIANVVSDAFGKTASRIIEYVISCDTFDPQYCKTLIDKRIKASHDEVIKSILGYNLMPSQASRIRISQSHLNFIDEAVLNLNKTLGELSKPYQEQIKILTSMVGISEKSAVKIISEIGTDMSVFASAKHLCSWSGLTPQNNESAGKKKSSKISRAGVYLKPLLVQCANAAIKSAKTPYFRDKFFKIKKRRGHKKAIIAIARMMLTCIYHMLSKGELFAPSDLNYSDMPKEIFEKRRQKMVQSAIFLLQRQGYTVTNSTDNEVLSG

SEQ ID NO: 437447 - protein, 316 aa, unidentified
MEVLFDSCCGIDVHKKTLTACIMIGKDGKITKKEIRTFSTMTEALEEFRDWLKSEGVTHVAIESTGIYWRPVYNILENDVEVILANARHIKNVPGRKTDVADSEWLCKLLRNGLIQGSFIPPRHIRQLRDLTRYRSRLNNNIAAEKNRLQKYLEDANIKLSSVATDTLGVSGRRMIREIIRGNRDRDSLSELAKGRLRSKIEELKKSFNSRITEHHRMLIEMSLKHIEYIEEMKEKLEKEMDGLIKERKLDEDVELLDTIPGVDKIGASIIIAETGADMSKFPSASHLASWAGMSPGNNESAGKKKAEGPHQETSG

SEQ ID NO: 437448 - protein, 401 aa, unidentified
MKRLSGGIDVGSGSHHILILDDEDNVLYNKKISHRINEFAESIKLFKQIEKKEGGKLSFALEGKNGYSAPFDRILLNKGFTLYNVDNLKLKRFREAFAGEWRDDERDSLMLSKMLKLKDYINSEREKVFIKIEKPSPLTESLKLLSRHQQTLIDEKVRLINRLGKKLLEVCPRILELGKLKNKKIIAILAKYPDFSKYKRITLKSLLKIKGIGKIQGLFLLKGLNNIEYMPSLTDIYKTIILSYAKRIMQLQREIKDIDKSLDEIGGKNKEVNHLKTIPGVATKLASRFIGEIGDINRFSSEKQLAVYCGIACVDNNSGKITKARVVYKANKICKQTLITMAGCSIRFSFQCKDYYLKKRTEGKSHNHTLRCLARQLIKVIYRMLTEDREYIVRKELKKVA

SEQ ID NO: 437449 - protein, 404 aa, unidentified
MKYCGIDWANDHHDALSIDEQGRHLGSIRVAHTPEGFSQLDAYLEHIAGPDGTDQVACIIETTHGLLIAHLLEQGWAVYPVNPRTVARRRAPSGAKTDTIDAYLLAKTGRADFQDLRRLNPDSELIQELKTLTRDQDSLVQMQTRLVNQLTACLKAYYPVALDLFGKLQQPSTLAFLRAYPTVQAARAASVEDLTTLLKPLRFPGAKKKAEELVNHLQQPSLVASEVITRAKSRLMLALVAQLEPLLKQIDEYDQEIERLFLSHADSELFLSLPGAGARLAPRLLAEMGDDRDRYESASSLQALAGTSPVLYQSGTYQKAHRRLGCIKPWRNALYQFADRSRRWEAWAGEYYRGKRTEGKSHTVAVRALANIWARILLAVWKKRELYQTATFEAAQRTHAWRVA

SEQ ID NO: 437450 - protein, 343 aa, unidentified
MYYIGLDVHKRTISYCVKDAAGHVHREGKIGSTRRELDAWVRTLPQPRMIAMEATIFTGWIYDHLLPHAEKVKVAHPLMLRAIAAAKKKNDRIDAAKIADCLRCDFLPECHMAPTEIRDRRRTLRYRNLLIKQMVQMKNRVSGLLLETGVSYNKRRLHKVGYFADLMSTNEEVSESIRPLLKLSRETIVRSQKLDYALVSSLERDPLLAERLKRLRTVPGVGPITALTWALEIGDFTRFRSIKQAISYCGLCGDEKSSADKVMRMPLSKQRNKHIQRLLIEAAKLAPRECHELAMVREREMQKGNANRATLAVARKMVCYLLAVERRKQDFVPAEDFRATAAA

SEQ ID NO: 437451 - protein, 325 aa, unidentified
METKKLCCGIDVSHTTLDVCYQNNLGELFHLHVGNNNKGFEKILEHTGTHYHFVMEATGVYYIRLAFFLNQHSCTLSVVNALSVKRFIQMHLERNKSDKKDAQWICRYAIEQKPIPWEMPDSAYFQSKQLYNTIREYSEQIKRFNNQLHCLRLLPVVSKDAIKSLEKMKGQLQKEMKNLEEKLQSLLQAWQPEQLKSVSSIKGLGKRASAMLIIFTQGFKNTRNHRQLISFAGLSPTEYSSGTSIQGKSKICKRGGKQLRDVLYMCAMNAIKTNGACRALYERLRAKGKTGKQGIIAVCNKLLKQAFAVVKNNTLYQPNYCSAKP

SEQ ID NO: 437452 - protein, 380 aa, unidentified
MTANSLMQRRSAIKPDTLIVGIDVAKFNHVARTLVPGGAIGRPLEFANSREGFAALSAEIEARKPTPASAVIVGLESTGVYWINLARWLAEQGYQVVQVSGLYVHRAKELADNSRGTSDGKDALLIADLVAQGKYLGFVRPAGVLADLRQLVGLRQRLVQERAARCNLLHQSVDLLFPEFPTVFKDVTGPGARRVLRRFPAPAAALVHPPDEMRRQLAEDGRVRVSVTKLAELQALARQSIGAREWTTGLQYALNDTLLELDSLDTRVKQVEAEINRLLAQVDETPILTSLVGPMTTAIILGETGGLKQYSCAAAVLKLAGLNLYQISSGRYCGDRHRWAGRYCARRCTWPCCSTPTRACRCTRTMPSCCGAASPSRWRS

SEQ ID NO: 437453 - protein, 410 aa, unidentified
MDLLYQRCCGLDVHKDTVVACLRLVSDGKVTTEVRTFKTTTAALLQLSAWLAANNCTHVAMEATGVYWKPVWHILDDGEFELVLANPTHVKNVPGRKTDVNDAMWLAELLAHGLIRSSFVPDTQTQEMRSLLRTRKQLIREQSSHTLRVQKTLEDANIKLDSVLSDLMGQSGRAMIEALIAGETNPAKLASLANRRVRASHEELREALRGRVTNNHRFLLRLHLNQIDALDAAIATVDVQVEKMLGPFRTAVELIMSVPGIKNLSAQVIVSEIGTDMSRFPSDQHLISWAGICPRNDESAGKRRSNRLRKGAPWLKTTLVQCAWAAKNKKDSYLQAQFYRIKARRGPKKAIMAVAASILTAIYHMLKDGTVYQDLGRKHFDRRSHDQQKRSLVKRLADLGYTVEVKPLTP

SEQ ID NO: 437454 - protein, 347 aa, unidentified
MAIVEVPRLIVGGVDTHLDVHVAAAVDSVGGLLAVRSFPTTPAGHHALSSWLGSLGVIERVGVEGTGTYGAGLARHLAAAGLAVVEVDRPNRQERRRNGKSDELDAIEAARAALSGRARGHAKGGTGNVEALRALLVAKRSARSIRIRTSGQLRHLVITAPDDLRERLNGLTTKALIAEAAVLRPRVGSDPVRHATKTAIVTLARRVQTINAEISVLDRHLEALVRATAPQLLEIYGVGVDTAAILLGAAGDNPSRIRSEAAWAHLCGVAPIPAGSGKTNKRRRLNPGGNRQANHALWRIVLTRLGQGEPRTVAYMHRRLAEGRTKPEIIRSLKRYIAREIYQQLFA

SEQ ID NO: 437455 - protein, 305 aa, unidentified
MISWVGIDISKTNLVVWVQPQNEGFDVSNTSQGFVELIEHLSCYEVGRVLLEATGGYERRVMAALQDANFNVLRINPRRARAFAVAMGKNAKTDPIDAAVLADFAEVLHASRDKVISPEREALRELVQLREHFVQQRDDNKRRLQQAQLPTAITAIKEHIRYLQTQIKQLEKAINQSMRDLDAEKAERLISVKGIGTVATASLLVYLPELGELDRREIAALAGIAPYNDDSGNHSGKRQIFGGRARVRRALYMSCWVVIRHQADFKARYEALRERGKSAKVALIACMRILLIRLNAMLRDGTEWR

SEQ ID NO: 437456 - protein, 344 aa, unidentified
MLYAGIDVHKRCTQICIENEDGEILERRILTERRRLLEEFGERPKMRILLESATESEWVARCLEGVGHEVIVGDPNFAPMYAQRSRRIKTDRRDARALLEACKLGAYRPAHRCSDAHKRVRARISARDLLVQTRSKCISFVRSLLRQEGIKPERKSSITFAQRAREIGAPETLAVEIAPVLDLIDTLTEKIRRADERVSEIAKDETHRRLMSVPGVGPVTAVAFVSTLDDPRRFHGPRQVRAYLGLVPREQSSGEKTSRGRITKQGGTRMRRLLVQAAWAVLRSRPTAEAEPLRRWTTNVASRRGKYVAVVALARRLAGILFAVWRDGTTFRAPGPLGGGEVTT

SEQ ID NO: 437457 - protein, 342 aa, unidentified
MGEVTIIGVDLAKNVFQVHGAAADGSVVYRKKLSRPQFTRFMADQPPCLVAMEACASAHHWARELARHGHQVRLIAPHYVKPFLKRQKNDAADAEAIVEAALRPTMRFVEPKSADQQARAVAFRTREQLVKQRTEAVNALRSHLYEFGHVAPEGIGYLPRLAKVVDDPDTDVPELARDICRMLLEQIAHLTDRINALKARIAAMSNEAEMPRQLQTMPGVGPITALAVETFAPPMEQFRRGRDFAAWLGLVPRQHSTGGKQKLGKTSKMGQRDIRRLLVIGATAVIRWASRRGAPKGSWLARMLERKPIPVVAVALANKMARGIWAMLTRGESYRGPVLIGA

SEQ ID NO: 437458 - protein, 441 aa, unidentified
MSAKKNQKGKLRKINYKVSGIDLSSEEMFIATVDKNVRQFSTFTKGLEEATSYLKQEKIEKIVMEATGIYWIPVYEHFEKAGFHVSLVNGAHAKNVPGRKTDVLDSEWLRELHTYGQLRASFIPNAQIRELRYYVRLRDDHIAMGAAHINIIQKNLDMMNIKLHKVIDSVMSKSGQRIIRAILDGVRDPEKLWELCQEYIRNEKKQMVIDSLKGNYRKEYLFGIGQALQMWEQYQLKLKQCDREIEKILGKMTENQANPKTLSTPKAMKQNKPEIQDFHRLMVKLTGGTDITAIAGINDYSTLKIIAEIGLDLSKFKNEKFFTSWLGLSPSAHQSAKTRRRKGRRHCNRAGFIFRQLAVNVGNGKHTALSSFYKRIRARSGKMVAIKATARKIAVYFFNLMTKGFAFVEEGIKKYEKRYAEQQQKFIQRKAQEMGYMLVKV

SEQ ID NO: 437459 - protein, 449 aa, unidentified
MSRPQVIDDEQHEQVHERVAAIDVAKDSGMVCTRTPHPSRPGARRSTVWTVKARMNAVRALGRQLHKDGIEIVTLESTSDYWRIWFFILEACGLAVQLVNAAQARNLPGRPKTDKLDAQWLARLTEMGLLRASFVPPKAIRDLRDYTRARTRLIQERTRCWQRLEKLLEGALVKVSSVASKLTTVSAQDMIKAMIAGERDPHVLAGLARTRMRAKHDDLVQALDGMFDDHHGELAGLLLDQIAFLDGRIAQLGARAAELTAAMPEAWGINADGTTGPDAGGTPGAPVLPAVPRLAEIPGISDDLARAIIAETGLDMTRFPTAGHLVSWAGLCPSARQSGPRTRAGKKGQGNGYLRGSLGQAATGAARTATFLGERYHRIARRRGKAKAQVAVARSILVIIWHLLADPAARYTDLGASYYQTRTDTDRKLRNHIRQIQALGFEVTLTKTP

SEQ ID NO: 437460 - protein, 379 aa, unidentified
MTAATRLTESSAPGGTLKLAFELGSTKWTLGFTSSPAQRPRLRTIAAGDLVALAKEIALAKTRFGLPGEMRVQSCYEAGRDGFWLHRWLTTHGAENVVVEASSIEVNRRARRAKTDRLDVGKLLALLLRWLGGERKVWSVIHVPTPEAEAQRQLTREIDTVREDRKRVRNRIQGVLATQGVRLPLTGNFLELVRTAQTGDGRPLPEAFHTRLTREWAHLDAIAARLDALTAARDEQIATGTDRVATVARQLCTLRAVAETSAAVFSAELFGTRTFSNGRQLGALLGLVPVPYRSDQAVRDQGISKAGRGELRRMWLQIAWGWLRWQPNSALTQWFQRRFAAAGGRSKRIGIVALARKLAIALWRYVEHGVVPEGATLKA

SEQ ID NO: 437461 - protein, 423 aa, unidentified
MMRLTYPICCGLDVHKNVIVATIVTTDKTGISEYKQKSFSTINSDIQKFHDWLIENNCKHVCMESTGKYWIPIFNYLENDIDVCLTHPKYVKAIKGKKTDKKDSKWIADLYKFDLVRCSFIPPKDFRQLRELARYRFKLVCMKSSEKNRIQNCMTVSNIGIASILSDPFGKTATEIMSYLLTNTSKTIDDKAIRKLIKKGATAKSDEIIEAIKGYNIETDQAKKLELARRHLDYLDDMITQTEVELYVRIKPYYEFVEYISSLPGVTELSATIILAEIGVDMNIFDDAKHLCSWCGLSPANNESAGKKKSVRIAKAGAYLKPMMVQCALAAIKSKKQPYFAIKYGRIKKRRGHKKAIIAIARMIMVCIYHMISEKQPFNPTDYAELMDPHFNQQRVVLNDANVFAYLEAQGYDVSLLVNSNDN

SEQ ID NO: 437462 - protein, 361 aa, unidentified
MHVPIRTKGVNAMPSLAERVDVVIGVDTHKYTHTAAAVAAATGAKLDELTIGTDSDGYAALLTWAQSHPGDRVWSLEGAGGYGAGLARFLAAAGEVVFELDRPVRAARRNGAKSDPLDAVRAAREALSREHLAEPKTDGPRAQLAALMAARRSAVEAATLAQHQLHALVIAAPDSLRALFRGQTTAVMLATAAKLRPHTGWDPTTVTTAQVLRRLARRSNDLTEEAVEHEKAITTLVKAWRPDLLELPGIGPIVAAQVLTAWSHQGRIRSEAAFAMLAGTAPIPASSGMLTRHRLNRSGDRQLNRALHVVALSRTRYDQRTRDYIERRRAEGKTDREIRRCLKRYISRQLYRQLEHGGRLA

SEQ ID NO: 437463 - protein, 365 aa, unidentified
MQNPVRQCIGIDVAKVTFTSCVCQQDLEGTVRLSQVAEFKNSRTGFNQLIKWTRKQIKPDVSLIFVMEATGNHYENLAYLLHGLKQQVAVLLPNKVAHYAKSLNVKTKTDAVDARVIAQLGVERKLRLWEPPRPIFKQLKELTRQYTELKREKTVFTNRLDSIKSGHKPPSFVLESNKAMIRTLKQQIEKCEEEIEKLIMSDEWLWSKMKKVLSIKGIGMTSASIIVAETQGFEFVQNIRQLTSYAGLDVVRRESGTSVMGKTKISKKGNSRIRAALYFPALVAVQHNEDFRTKYLRIKEGKSSKMIGVTALQRRILVLIYTLWRKDEEYQENYIQSAFNKTGRDNKSLPAQDELQPNRLKSSFV

SEQ ID NO: 437464 - protein, 336 aa, unidentified
MRYIGADVHKQYTVFCVLMREGKVEQRVQVENTPDVIREFLREIPRPVHLALEASYHWQPFFELMEEMDIQVSLAHPFKVKLIAEARIKTDTIDATTLAHLLRLDYLPTAYIPPREVRDLREILRHRAKLVATRTQVKNRIHALLTKNGVRHGFSDLFGKKGRLSLEGLRLRPCYQLALDQDLTLLDVLNHLIAQVTQIIEAKAQANPEAMLLTTMPGISYYSALLIRAEIGEIGRFSNPKKLCSWAGLVPSTHSSGGRTYHGHLTKQGSRWLRWILTQVAPHGVRGSRRLRALREREERRQDGGGSPDADYHPSHAHQKRTIPGRVSPPAIPCFS

SEQ ID NO: 437465 - protein, 399 aa, unidentified
MNALYTPNELQIGIDVGSINHAVAISDGFGNILNEFEITHTKKGFDYFFKIVEDEANKRESTIIIAMEGYNGWARPFDSLILKKGYKLYNVNNVKLARFKEIFPAAAKTDVIDARKIVELFSLQKHLPLAKKVLQEITVPDDCNAQLKKLTRRRKQLVEERMSIANRFGSDLQGEVPDLKALTSSVDNLWFLRFMTLRDDIRKLSKVHKQSIAKIKYLGKKNLAHIMQWQKEAQFNTTLEYTASILYDDSMRLLELKDKIKELDKQIKILIPSSKIAKLIQTIPGFAHISAGSLAGELGTLKRFESEASLALYLGMTNLDNSSGKYKGSKRNLATNRHAKMVMITATMKHTQYVEESKQYIEKKISEGKKYQQAIRSMGRHLVRVIWSMIQQEREYEIR

SEQ ID NO: 437466 - protein, 392 aa, unidentified
MVISVGIDVSKDKHDCFILNSEGEVLAEVFTIPNTMDGFNCLLQKIQDSTTPQDKIKVGLEATGHYSYNLLGFLLDNGLSTYVLNPLRTNIYRKSLSLRKTKTDRVDARTIASMLLSDAGLKPYTDTAYHNEELKSLTRYRFDKVKERSKLKSSIARLICILFPELEKLVPSLHMASVYALLEEFPGAKQIAAAHLTRLKTLLETASKGRYKRNMALEIRDAARNSIGAWMPAKSLELQHTIRLIRELDAEIAEIEEQIQSLMEELDSPITPTPGMGFRMAAMILAEVGDFSRFDSPDKLLAYAGMSPSTYQSGQLKNCYPHMEKRGSRYLRYALYNATKYVCHWDPTFAAYLAKKRAEGKHYNVALSHAAKKLVRLIFAMEKSRAPYHMAA

SEQ ID NO: 437467 - protein, 457 aa, unidentified
MNPKRSKPKNDRTMPMIHPNAAAIDIGATMHTAAVRADRMPEPIRSFGTFTTDLHRLVDWFTECGVETVVMESTSVYWIPIFELLDARGFAVFVVNARDAKHVPGRKTDVSDAQWLQRLHSYGLLRASFRPKGQIAELRAYVRQRERLLEYAASHIQHMQKALTEMNLQLHHVVADVTGATGLRIIRAILAGERDSKVLACLRDYRCHSSAEAIEKALTGNYRAEHLFALELALALYNIYQDKASACDARIEAVLKELSISRGRDAGPLPSPRRRLHGKANGPDFDVRAALFKLLGKDLTQIDGLGSYLSLRLIAECGDDLSAWPSAKHFTSWLCLAPSNKISGGKVLSSRTRRSGSRASALLRLAAVTVGRTDTALGAFYRRLSARIGKAKAITATARKIAVLFYSAVRHGMEYVDPGSSYYETRYRTRVVENLHRRAKAFGFVLLPLESKAGAVS

SEQ ID NO: 437468 - protein, 458 aa, unidentified
MNRKQWRELARKIQADDVSLEVVHPDAAGIDIGNETHYVAVPPKRDTEPVRRFGCTTGELRSMGGWLKQCGIRTVAMQSTGVYWIPVYDILEEIGLEVYLVNARDTRNLPGKKTDVQESQWLMKLHTYGLLRNSFRPTQEIRMMRNYWRQRNDLVQSAGRHIQRMQKVLTQMNVQLANVISDLSGVTGQAIIKAILDGARDPWELASLCHPRIKASEEEVASSLQGNWQNDLLFVLKQEQDGYEFCQKQMAECDARLEEYLKEREDRSGGASLPEEKRKGRLKKKKGNAPTFNLREALFRMSGTDLTQIDGVDVMTATTILSEAGPDMSKWATEDHFVSWLRLCPDNRISGGRVIGKGHLPTNNRLALAFKMAASTLRQSDTYLGAQFRRLRARLGAPVAIKAMAAKLARLVYRMLRYGMQYVDKGAEIYEAQHKNRQIHSLKRKAAQLGFQVVEIAA

SEQ ID NO: 437469 - protein, 382 aa, unidentified
MAGDPTRAGIRTLFAASELSKKNWLVALWSPVVDRVSLHRLPAGDAKALLACLERAKSSAQEALGQEVEIMSCFEAGYDGFWLHRVLTSVGITNLVVDPASIQVDRRARRVKTDRIDAQALLRFLMAHHRGEVRVWSVVRVPTPDEEDAKRTHRERQNLIKERGRHVNRIKGLCAQQGIFDYEPMRSDRRERLECLVTGDGRAMPPRLLAELRRELDRLEFVIGQIKAVEAERDAVQPCSGAPTPGSQADRLARLRQIVSIGPETAAVLGYEVLYRRFENRRQLAAYVGLAPSPHMSGGLRVEQGISKAGNPRARTALVELAWLWLRYQPGSTLSEWFVRRVGEQRGRIRRIMVVALARKLLVALWRYLETGLVPSGAVLRR

SEQ ID NO: 437470 - protein, 343 aa, unidentified
MQIRTIGVDLAKNVFQVHGVDSAGKVVITRQLRRKQVIEFFSKIPPCLVGMEACGTAHHWAREVSKLGHTVRLMPPSYVKGYVKRSKNDAADAAAICEAVTRPSMRFVAVKSTDQQASLMLHRTRDLLIRQRTQLINALRAHLAEFGLVAETGREGVAQLAALITDESDREALPFAMKQALQAIVDQLAALELQVGTLDRAIHAHHRANDMSSRLETVPGIGVIGATAIASAVADPSNFKSGRDFAAWIGLVPRQHSTGGKERLGGISKQGDRYLRRLLVVGATAVVRHARQHPQKHPWVMRLLAKKPAKLVAVAVANKMARIAWAIMAKGGYYRAPELAAAA

SEQ ID NO: 437471 - protein, 340 aa, unidentified
MNHYAGIDVSLEASSVCVIDGSGKIVREAKVASEPAALIAWFGSLGLSLTRIGLEAGPLSQWLYAALRDAGFAVELLETRHVRNAFKIMPVKTDRKDARGIAELMRLGWFRPVHCKSMEAQETRAMLTARKLVQKMLHEVEMSLRGILRGFGLKVGKVTPTQFEARIEQLVAGHPSLEVIAASMLAVRATLRREFNGFERRLRTLARSDTRARLLMSTPGVGTIVALTYAAAIDDPSRFKSSKTVGAHFGLTPSRYQSGETDRSGRISKTGDGSVRAALYESAHIILTKPIKGRTNLKSWAMRIARRAGLNKAKVALARKLAVIMHRMLADGTTFTTQSA

SEQ ID NO: 437472 - protein, 419 aa, unidentified
MLHIVHHNCAGMDVHKKFIAVCIATTDFKGVTTYKKKRFATFNSDLIACRDWLLRHNCPEVCMESTGKYWIPIFNVLEGHLHVVVANPKYVRAIKGQKTDDKDAMWIADLFKFDIVPSSYIPVKQIRKLRELFRYHYKLVNERSSEKMRLQNALTVSNIALGSVLTDTFGKSASSIIDYLLSGQDFDPEYCKKLLLRRAKDKADDVVASIIGYEISNDQAIKMNLCREHADYLSSVIGRLDDAIVELSKPYDELVQLASDVPGITQTSARYIIAEIGPDMTVFKSAKHLCSWAGLTPQNNESAGKKKSCRISRAGAYLKPLLVQCALASIKDKQNPYFRVKYDRIKKRRGHKRAIIAVARMLLTCLYHMFLKKEAFQPSDIHYEELPEQLLQKRKEQYIQQAIKLLEKEGMTVVPPSVA

SEQ ID NO: 437473 - protein, 416 aa, unidentified
MKIVRPICCGMDVHKNIIVATIGITNKKTRITEYIQETFSTLNSDLLNLKQWLINHKCFDACMESTGKYWIPIFNILEDEINIYLAHPKYVKAIKGKKTDKKDSKWICDLFKHDLIKFSFIPPKEIRALREISRYRYKLVGMRSSERNRYQNCMTVSNIGIGSVFSDPFGKSAQAIMKEVLESDIIEDEKILKCIHGSCKNKDKILDSIKHCNIETDQRFKMNESMTHMEELQVHINNCEIEMMKRAAPMFDQFMHITQLPGISTLSAILIISEIGVDMKQFESDKQLTCWAGLAPANNESANKKKSVRISKAGQYLKPLLVQCALGAIKDKEGYFGIKYSRIKKRRGHKKAIIAIARMMLVSIYHMILTGEKFNPSDYESFRNPKPPIKQQDLTEESAIEFLKKSGFDVSKLTKP

SEQ ID NO: 437474 - protein, 385 aa, unidentified
MDPTSCPMPSARALHCALELSKKSWLLAIQFPDRPQPSLYAIEGGNTEKLMARLTAARDCWAKMSGAVPVITVCYEVGYDAFWLARFLEERGVECLVIDPGSLQVNRRGRPVKTDRVDVKMLLRTLIAWGRGERHVWSLVRIPSIEEEDLRRSHRERSRLVRERTAHINRIKGLLFAQGIRRINVKCQYKTLAVDKLVTGDGHRLPPRIASEIAREIQRLAMVQDQIAEIERERDTAPTPCEATERKRQLLLQLKSIGPAISALLSREVYYRQFANRRQVGSFLGLTPSPYNSGEEERCQGISRAGSGHVRAIMIEAAWLWIRHQRKSALTRWFVERTAGQSKRMRKIMVVAVARKLAIALWRYVEYGLVPHGAILNPPTTGKAR

SEQ ID NO: 437475 - protein, 407 aa, unidentified
MNTAVGIDVSKGRSVVAAMRPFGEVALPPREFLHTSEGLSALSEALRLIDGNTRVILEATGRYHEPVVMALQEAGFFVSAVNPKLIKDFGNNSLRKVKTDKADAVKIARYGLEYWEEMREYTETDTTRQQLKLFSRQYNLHMKTVVSLQNNLISLLDSVFPGINELFTSPVREDGRQKWVDFVCTFYHRDCVSSVSIAAFSERYRKWCKRKGYNFSTAKASEIYTTSRNMVVTMPKDALTKALITSAAGQLVAATATLATLKAEFVRLAATLPEYEVVRSMYGVGEVTGVQLMAEIGDVRRFANRGALIAFAGVDPGVNESGKHSSQSVRTTKRGSPHLRRTLFQIVSTHLKQSPLDEPVYQFLDRKRAEGKPYLVYMTAAANKFLRIYHAKVRDHLNALEQVDSNT

SEQ ID NO: 437476 - protein, 318 aa, unidentified
MSDSVFVGIDVSSQTLEVASSAEAKTWQARNDSAGIEQLVAQLVALQPVLVVLEATGGYEFEAACALQAAGLAVAVVNPRMARDFARAMGALAKTDALDARMLAAFARVLHQHPERERFVKPLADAELQQLQALVLRRRQLVQMLTSERQRLRISHAAAKPSIERVIEFLQRELDDSNRDVASHVQRHHAELAAALQSVPGIGAASVAVLLAELPELGQLDRRRVAALVGVAPLNRDSGQMRGQRAIWGGRADVRRTLYGHALVAVRHNPVLRTYYERLLAAGKRKKVALVAAMRKLLTMLNAIARHGSQWNPGLHNA

SEQ ID NO: 437477 - protein, 384 aa, unidentified
MDTCFEVIHHCCAGLDVHQAIIWARRRRIGSPGAVEEDVRRFPTTTAGLRQLLAWPEHEGVTIVAMESTGVYWKPVSNILEGRLPVILVNAQHLKEVPGRKTDGIDCPWIAKLLQCGLWKAGFIPPLPIRQLRDLTRRRSQLVRERAGVVNRIQKILEGANIKLAGVASDILGVSGRAMLTAISRGATDPVAWADLARKSLRRKIPALQAALDGLTSDHHRFLLRRALDQIEALEGPIQEMTDRIEEATTAEPLASARRRLLTIPGISATAAEVILAEIGTDMGQFPGAGHLCSWAGLSPGKDQSGKKNRPAKTTKGSQWLRTALVQVAWAASRSKGTRFQRQYVRQAQRSGRKKALIALAHRILALIYTLLERGQDYEEPKAA

SEQ ID NO: 437478 - protein, 320 aa, unidentified
MSATSVVVGIDVAKAHVDVAVLGAKFDAQRFDNNAEGHSALATALQPLGVALVAMEATGGYEAALACALQAAGLAVAVVNPRQARDFAKSMGRLAKTDTIDARMLAEFAAVLVRREDLASFIRPLADAQQQALAAMVTRRRQLLTMLLSERQRLQLAIPVVRPSIEAMIEAIRKQLDEVEVQMVTHVHEHYAALDKLLRSASGIGPVASATLIAELPELGRLNRRQIAALVGVAPIANDSGTSRGRRRIQGGRFEIRRVLYMAALTASRRNPAIKPFYERLIAIGKQPKVALVACMRKLLTTLNAMVRTNTPWDNSLHLA

SEQ ID NO: 437479 - protein, 353 aa, unidentified
MLIIGCDFHPGFQQIAIFDNQTGAYEERRLSHRAEAEQFYRSLAGQEVRVGMEACGHYPWFEHLLAELGFELWLGDAAKIRASVVRQQKTDRRDAEHLQMLMREDRFPRIWVPSLEERDVRQLLVHRHKQVQARTRTKNQLHALAMSQGVQKKWKLWTAAGRAELEGLELLPYAAQRRRQLLHRLDALEAEIAALNRQVEEEVKGRPAAVKLMTHPGVGPVTALAMVLTLGPAERFRDGRKVGSYFGLIPSEYSSGGRQRLGHISKQGSSFVRFLLVEAGQSAVRKDAELGRFYRRLGARKHRALAKVAVARKLAVRLYLMLREDWTYAQLCRAVVQASPSHSVAASKSRPLE

SEQ ID NO: 437480 - protein, 343 aa, unidentified
MQTITTIGLDIAKSVFQVHGVDAAGRVVIRRQLKRRHVLAFFQRLRPCLIGIEACASSHHWSRELQAVGHTVRLMPPVYVKPYVKRQKNDATDAEAICEAVARANMRFVPTKTPEQQSGLVLHRTRHLFVRQQTSLMNVIRAHLAEFGIVAPVGRHGVEELLGIVADPSDKRVPEVARACLAALGAQLRVLKAQILEFDRMITAWHRSSETSRRLDDCPGVGPALATALVATVADPKAFRSGRNFSAWIGLVPKQHSSGGKDRLGSISKQGDRYLRSLFVAGALAVIRYAKIHGTKHRPWLTALLARRPTKVAAIALANKIARMAWAMMAKGERYKQPVALAA

SEQ ID NO: 437481 - protein, 453 aa, unidentified
MKKETPKLGIVKMGSGLPVFNPYAGGIDIGDTLHCVAINDGKGGHEVKTTSAFTCDLHEIVDYCKYNGVTTVAMESTGVYWLVLYLLLEEAGIEPYLVNAKHAKNVTGRKKDDTDAIWLQKLHTCGLLQKSFQPDNETRLLRSYTRQRKNLILLAADSIRRMQKALELMNIKIHTVISDILGKTGTAMVKAIIAGERAPEILCKLCDPRIKASREDIVKSLEGIWKEEYLFMLEQAVENYEFLQKQVKSCEEKIQQQLLRQVALIKDGDITGLEETPKKKSKAKAKKNQFDFSLLPYLIAIAGVDLCKIPGISEVTALEFISEVGIDMSKWKSSKHFAAWLNLTPNTKISGGKIISSKMIKKNNKAGQLLRQAASCLITNKTAIGDYYRAMRARLGGKGAALATAHKLARIIYTILLRKTEYNSGMIVENQEKIKEEKIKKLEKQIARLKQAA

SEQ ID NO: 437482 - protein, 366 aa, unidentified
MKQSSSNILPLTIGLDLGSRSTQVAVLAPSRELIEERKVSTTKEALTRLFERYPGARIVLEASTPARWITKLAESLGHEVIVANPRNIPLITQSQRKNDRNDARLLAKLGQVDPSLLCPVQLRDERFQSARRELFVRDHLVKQRTKIVTFIRSQVKAIGRSLPGCDAKNFAKQMQPAIPRELQSVLNPLFQVLETIVESIKTADERIDRLSKLAFPESEVLRAAHGVGPLTALAFVATIGDPARFRDSRSVGAYVGLVPAMNQSGNYDPAMRITKCGDGYLRRLLVSSATRILQSNAPDSDLKRFGERIIGQGGKRARARARIAVARKLAVLLHALLKTGEVLEPLRNSPDDEIHEVASETEPLAV

SEQ ID NO: 437483 - protein, 403 aa, unidentified
MSKEPLSVFGGVDTHKDVHVAAVVDERGKILDTASFEANAKGYVALQRWLEGFGTLVRVGVEGTGSYGTGLTRHLQGNGVEVVEVNRPNRQMRRQRGKSDPVDAEAAARAALNGEATIVPKDHDDIVESIRVLRVAFCSARDTRTRLALQIRDLIITAPAVLRESIPAKTADRVAHCAKFRPGNVRSPHEATRQALKTLSRRYQDLTDEMRDLTKLLDELTKEANPALRAAKGVGVDVASILLVAAGSNCQRLRNESAFAAMCGVSPIQASSGQTNRHRLNRSGNRQANNALWRIAMVRMTTDEETKTYLARRTAEGKTKRDVTRCLKRHLAREVFWLLQNPAYEEIGPHLRTTRTSARISLQTVSDDLGVWPTKVSRIERGLEHDPEFAERYEAWLTNKTAA

SEQ ID NO: 437484 - protein, 340 aa, unidentified
MKQIKRIGIDLAKSVFQVHGVDVHENVVLRKQLKRAKLRAFFAQCPACQIGMEACGSAHYWARELGKLGHTVHLIAPQFVTPYRKNDKNDGNDAEAICEALGRPTMRYVPIKDEEQQAVLCVHRARSLLVEERTALANQLRGLLAEYGLIIPQGVARLRAALPGILEDAENGVPMLAREVFADFTERLRGLDTHIAAYDRRITHLARTMTAAKRLMQVEGIGPLTATALVASVGDARLFKNGRQFAAWLGLVPRQHSTGGKSRLGRITKRGDVYLRTLLVHGARSVLMHRAEKTDAKSRWGAALQARRGFNKAAVALAAKHARILWALLAHEADYKPATA

SEQ ID NO: 437485 - protein, 339 aa, unidentified
MELHCGLDLHSNNTYAGIIDQNGKRVVRTKLKNIPENIVQFLDPYKEDLASIVVESTYNWYWLVDLLMDEKYKVHLANPSAIQKYSGLKHSGDIDDAFWLAEMRRLGILPEGYIYPKAERPIRDLLRKRGHLVKLRTSLIISLQNIIARNCGVKLSANDIKVSQEDRVAPLLSDQEELSLAGAVSKDAIDFLGGKIRYIETEVRNRIRLKEPYTLLRTMPGVGNILSLTIMLETGPISRFSKVGDYVSYCRKVPSLWTSNGKKKGKGNQKNGNRYLAWAFSEASELSRRTDGNARAYYNRKLQKANLMVAHAALAHKLARAAYYIMRDQVPFMPEKLFR

SEQ ID NO: 437486 - protein, 478 aa, unidentified
MTPPKDYCLEAPCPPTPLLPPLPVLSDALQVCNPHAAGIDIGEAEHWVAVPPGRDPQPVRRFGTFTVDLDALADWLIDCGVITVAMESTGVYWIPLFELLEARGLQVFLIDPRQAKRAPGRPKTDRLDCQWLQRLHAYGLLAAAFRPADQICVLRSYLRHRQMLLTYGAHHIQHMHKALQQMNLKLSQVVSDLTGATGMAILKAIIAGERDPLTLAKLRNPHCQHSEDDIAKALQGTWRAEHLFALQQAVELYQFYHQQLTVCDQHMQTHLGPFADKSRGQPLPPKARRHKKAHAPRCDARTPLYRLAGVDLTTIEGIEEGTALVILSEIGTDMSRWPSVKHFCSWLGLSPQHKISGGKVLSRRVRPGAQRVALALRLAARTLHKAHTALGAFFRRLRSRLGAPKAITATAHKLARLVYSLVKHGSASVQQGLAAYESQYRERKVKAMARQAKALGYTLVALGTPEGASLNAVTAPIP

SEQ ID NO: 437487 - protein, 339 aa, unidentified
MKNTKYYIGLDVHKERTTYVVRDKIGNILLEGETATLYQELFPRLKTYLKSSMIGLEASTSYYTLYQEFLKHGHIVKVANTIQLRQLITKNDKLDARRLSEMLRLGTFPSSYIPDEKIQRIRSLIHTRHSLMEEKVRCNNRIQAYLDRNGVMMPSYKAFTKKWRYALMQHMGSGRVSIELRHEYDHYVFLEKKQEQVEQEIQGYAQKNWTTEYNLLQSITGIGPTVACYTIAHILPIERFSSCKKLRRYAGVVPTCKESGNKRSHGHIPKTSSRRQLRWALIQAANTIGKTNTNLGRYYRRKKQQKKNNGIAKVAVASSLIDIIYKVLTTKKPYTTNTC

SEQ ID NO: 437488 - protein, 430 aa, unidentified
MKYALTQVLPDVPAGGVCGGIDWATADHVACVVDMAGRVTDRFSAAHDRAGITALITRLRKNKVTEVAIERGDGALVDALLAAGLTVVVITSRQVKNLRSRFGAAGAKDDRFDAFVLADTLRTDRARLRPLVPDTPATISLRMAVRARRNLVAHRVAGGNQLRAHLAVAFPAGTRLFHDLDSPLSLAFLARFGSQDAASQLDEPAIQAWLATIAVRGRPAPVSVLHARLHAAPPGATGPDGTAQAGVTAALTATLTALSAQIKALETQIAGQLAAHPDAHIFTSLPRPGTVRAARLLAEIGDCRSRFPDPESLAGLAGVAPVTRRSGTRISHGFRWAVNRQLRDAVCDFAADSRHASPWAAAIYDDARARGKDHPLAVRITARAWIYVIWRCWRDGTAYDPAKHHALQAILARQQASDHTAAGPGPQEAR

SEQ ID NO: 437489 - protein, 339 aa, unidentified
MKYTPVGVDIAKHLIQVHFINEHTGEVVDKQLRSKDFLTFFSNREPCLIGMEACGGSQHWARELTKQGHKVRLMQARFVKAFVMGNKNDVMDSRAIWMAVQQSGQEIAVKTEEQQSVLVLHRSRRQLVKFRTAQINSLHGTLLEFGETIHKSRAALERELPAALGRMKARLPPYLIAVLEEQYNRLSELDSLIDGLEKQLNSLARQNETCKRLMEIPGVGPLIATAAVATMGEASAFKSGRAFAAYIGLVPKQTGSGGKVRLLGISKRGDTYLRTLFIHGARAASLCAKEPGTWITELRKRRPTSVAIVAMANKLARTVWAIAAHECRYDKNYVSIRPY

SEQ ID NO: 437490 - protein, 423 aa, unidentified
MMRYYVGVDWGDERHRVAVSDEAGRQVEARWVEHTEAGFSAWGQWLNQARQDGIELWAAIERPDGRLVDFLLDHGLSVYPLNPKAVDRARDRYRASSAKDDDFDAFVLSQFLRTDHMHLRPLQPNSPAGEELKLLTRDYQDLIRQQTRVLNQLTHTLKEYYPLALELFSDLSAKGARDFLCSYPTAEKAAKVRAQTLAAFARNYRWGEKQLQATSTKLKQKQIAVPAPVVRAKARKMVSLLRQLDVLVKQVEEYRAEIERFFATRPAAEWSRSLPVGGARVTVASIWAELGDAEGRWESAAHLAAQAGAAPVTQASGKRRNGKQADVKRGTYHTQPLILFRYACNHRLRYLLTQYAFLSITHCEWARAYYKQQRARGHSHYRALRALAGKWAKIFYAMWAKKQPYDDDHHLASIARHQLRQAA

SEQ ID NO: 437491 - protein, 313 aa, unidentified
MKKTICGVDVSKAKLDACIEPGHRLASFNNDTAGIAELAAFCREHAVTLVVMEASGGYERRAFIELWEQGISCALTNPRNVRRYAEAMGILEKTDRIDSSIIARFADAKNLAPTPLPSQAQQRLKALVARLRQVTGDLTVQKQRRAGLLDNSEMLASLDEVIALLKRQSRSLEGEIASMIADDPLWAKLAETWREMKGVAGRTVARLHAELPEIGTLSNKAIAKLAGLAPIANDSGKRKGKRTTRGGRAGVRSILFLVAAIAARYDKSLGEFRDRLLKAGKEKMVVRIALARKLLVRLNAKAREARAALAQNA

SEQ ID NO: 437492 - protein, 344 aa, unidentified
MSQVTTIGLDIAKNVFHAHGADERGAMVFSRKLTRAKLLDFFVGQPACVVALEACSGAHHWARELRTMGHDVRLIPPSYVKPFVKRNKNDAMDAEAICEAAQRPGMRFVAVKSEDQQAAGLVFRTRDLVVRQRTQLINAIRGHLAEYGWVAPRGTAHMTMLAELLEDEQFTSTLPEAARPMFKLMVELLGELDARIATLDREIARRVKEDEDARRLMTIPGIGPIAATAILALAPPAETFRKGRDFAAWLGLTPRQHSTGGKQRLGSISRMGERTIRRLLIIGGSSMVRQATRFGAPAGSWLERMLARKPRMLVSVALANKMARMVWALLTKKEDYRAPAAVAA

SEQ ID NO: 437493 - protein, 316 aa, unidentified
MESPQPFVGIDVSAKRLDVAVLPAGTHFTVTHTDEGIASLVHRLRELGPHIVVLEATGGYEIAVAYAMSEANLPVVIMNPKVLRHFAKSTGKLAKTDKLDAQVLAHYAQAIQPPVRPLKNSEQMELATLMSRRRQLRDMIVMEGNRRRTSTPKVRGNIDQHLLYLRQLLEDLDREIHDAIRRTPLWHEKSEILQSFNGVGPKVSASLIADLAELGSAPRAQISALAGLAPMNRDSGQWRGKRTIQGGRPAVRQALYMAALVASRRNPVIREFYQRLRQAGKPAKVALTACMRKILVILNAMLKNRTYWNPQLPLAA

SEQ ID NO: 437494 - protein, 391 aa, unidentified
MCTGHTLAISSAEASVNHDSTVFVGLDVHKESITVAYAIDMGDVELLGKIGTLKADIDRLCKRVQSKARHVRVVYEAGPCGYGLYRELVERGFDCVVCAPSLIPKKPGERVKTDRRDAVKLARALRAGDLSAVHVPDVEDEAFRDLARAWAAAKSDLRQARQRLKSFLLSHGVRYSGNANWGPAHRRWISAFAFPNHWQQLAFDECRRTIEDRFAQCERLEATLHEAVVGWRFYPAILGLQTMRGIQFITAVGMLSELGDLSRFEHPRQLMAWLGVTPSEHSSGERRRQGSITKNGNSYARKLLVEAAWSYRYPARVSPEIQRRHEGIPKRILDRAWDAQVRLCRRYRKLAARGKNVNIAVVAVARELAGFIWDISKLAMSLAVTRNEQPA

SEQ ID NO: 437495 - protein, 334 aa, unidentified
MKKRYFLGNDIAKETFDFCLLNSAKVCLWQGQFPNSDAGFKALLEGLKARGFKLKQIHFALEATGVYGRALMATLHAAGLAVSELNPAQVKFFGISYNKRTKNDSLDAKLIALYCLERRPMATRPLRPVEQQLKMLVHEREARVNEQTRERNRGQTDQAQPGSLPPILLRQRQQRLAQLQTQIAQLDSAINALLDSDPKLVHQASLLTTIPGIARCTAAKVLAQLAGKEFSSARQLAAYAGLTPAECRSGTTFYGKTRLCKIGNSFLRKALYMPAAVARRWCKPLAKWADLLQARHLRPLAIRGALMRKLLHLIFGILKHQQPFNPNLLPCPKQ

SEQ ID NO: 437496 - protein, 349 aa, unidentified
MKILAIDLGKYKSVACNYVTATGRAKFATVVTHANELDRLLSQESPDLVVIETCSIAGWVHDLCCQRGVKCQVANPNGEAWKWKNVKRKTDRDDALKLAQLAALEQLPTVYVPAPETRQRRALLKYRQSLITRRVAIQNHLRAIVQREGILLDRGRRAWTVTGLEAIQQLAKPLEQCSAEELWRGEAALELQALKAVTKLLREVEHKLEAFAASNESVKLLRSIPGVGRCTAEVVVAYLDNPQRFENGRQVSAYAGLVPKQFQSGETDRQGRISRRGPSLLRKMLVEAGWVLLRYNSWAQRLMLRLSRGQKTRRKQAIVALARKLLVRCWAMLRDNTEWREPPPTTATA

SEQ ID NO: 437497 - protein, 338 aa, unidentified
MSIVAVGIDLAKNVFAVHGVGASGKPELIKPDVKRNKLLELIASLPPCLIGMEACSGAHYWAREFQKFGHTVRIMAPKFVAPYRLGGKHAKNDAADAAAICEAVTRPQMRFVPIKTLEQQSHLFLHRAHQGYVAERTALINRVRGLLSELGIILPQSYKAFKQGVHQVLEDLPGYCNKVIGDMLSEIAHLDERIEHDAKLIAQLAREDAQSRRLMQLCGVGPTTATAIVASIGNGHDFKNGRQFSAWLGLAPSQSSSGGKSKLGRITKAGDGYLRTLLVLGARALLLKAPNKTDPVSRWALQLKERRGYGKAVVAIAAKNARMCWAALNLGDGFRVPA

SEQ ID NO: 437498 - protein, 381 aa, unidentified
MKIIYPRVCGIDVHKKFIVAVICISESVEPVYLKKRFSTFHNDLIRFRDWLIQNDCQNVCMESTGKYYIPVYNVLESHISNIVVANPKWVRAVKGEKDDDKDAKWIADLFKLGIVKSSFIPQKDFRILRELTRYKYKLVNMRSSEKNRYQNALTSGNCKLDMVFTDIFGKSASNIIDLILSDNPYTDEDILSKVHKNCKASPDMILNSINGTDLTSIQKSRIELVNDHIKQLSSNIQRLDKLIDLMIEPYEDYISFLCQIPGVSRNSAIIILSEIGVDMNQFTSTRRLTSWAGLTPSSNQSAGKKKSVRISRAGVHLKPCLVEVAHAAVNDKSHPCYTNKFNKISKRRGKKRAYIAIARKILVVAYHMLLTGEIWNPTDLA

SEQ ID NO: 437499 - protein, 355 aa, unidentified
MNDAKYIGLDVHQATISATVLDAEGKLVMEAILETKAETVLQLIHGLRGSLHVTFEEGTSAAWLYTLIKPHVTRVLVCDPRKNALLKVGNKSDRIDAHKLAELLRSNLLRPVFHDDAVLRTLREMARSYLTITKDVTRVMRRLKAIYRSWAIPCGGQEVYSPRHRAEWLGKISEASVRRRAELYYQQLDALVYLHRQAKKELLAEGRKHQATKLLRQIPSIGPIRSVLLVALLQTPHRFRTKRQLWSYSGLALETRNSGEYRFQDGQLKRSKKVFAIRGLNKNHNHDLKNVFKGAAIRAAAIEGPFQKFYEALVAKGMKPAMARLTLARKIAAITLIVWKKGARFDAEHLKQQAA

SEQ ID NO: 437500 - protein, 327 aa, unidentified
MNHSEQVKAVLGIDIAKATFKVALLRESKFKHKTFPNHSEGFQALLVWLAHLQVQHVHVCLEATSHYSEPLADYLFDQRMAVSVVNPSRIKGHAQSELVRTKTDKTDAALIARFCAAMHPALWQPEPKEIRVLRAYVRHLDALIDMRQQERNRLEAASEVLSEAIKAHITYLEQDIQQTQRKINDHIDQHPDLKDKKQLLESIRGIGPATINVILSEFAQVQRFQNAKHLASFIGVAPRLMESGTSVRGRSRMPKIGRSQLRKVFFLPAMVALRYNPIIKSFGERLRASGKTKMQVIGAAMRKLIHIVYGVLKNNTPFNPDYSAEMA

SEQ ID NO: 437501 - protein, 321 aa, unidentified
MIKTSLGIDISKEKFDVALLLNDKFKTKAFNNTSKGFENLYGWAQKHVHNLDNIHICMEATGIYGDKLATFLFEKALCVSVVNPARVKGFGQSELSRNKSDKADAKLIARFCKAMNPEPWKPVEKHLQELRGWVKRLDSLKAIKQQETNRLESATEKVSEDILEHIQYLDEAIQKSNLVITEIIEGNDDLKKKRDLIETIPGIGKTTQAVVLAFIGNPEDFTSAKQVAAFLGLNPKQHQSGSSVNGRTKMSKTGDSYIRKSLFMPAIVARHHNPIIKLFCDNLANSGKSKMAIIGAAMRKLVHIIYGVLKNECPFDPKWAL

SEQ ID NO: 437502 - protein, 294 aa, unidentified
MSQPNPLCVGIDVSKATLDIAASSDVAQFTVSNDSDGFNAIITGLRRHSVALVLMEATGGLEVAVACSLQAEGFEVAVVNPRQARDFARAMGYLAKTDRIDARVLTQMAEVINRHPERKRFIRALPDAERQALAAMVVRRRQLIAMLVAERNRLHPFHPQNKKSINTIIKALEDELVRLEKEMDSHIRNHFKEIAERLSSIKGVGTMTVSAMLAEIPELGTLSRREISALIGVAPVNRDSGTMRGRRTIFGGRAGVRSALYMAALVATRFNPVIKTFYVRLLAAGKDKKAALMA

SEQ ID NO: 437503 - protein, 341 aa, unidentified
MKKFIRIGVDLAKNYFQIHALTSESGPAVTRKLKRSKMVEFFSQIEPCLVGMEACGSAHYWARELKKLGHEVLLMPPDYTKPYVKRGKNDAVDADAICEAMSRPGMRFVPVKSAEQQATLMLHKTRELLVKQRTMSVNALRSHLSEFGIIAAKGIGRVDELLELAESDATLPAATRAAVEVLALHLEGLDKSIDDLEDTIASAHAQSEMSRLLDEVPGIGKLIASVIAASVPDAGVFKSGRDFAAWLGITPRQNSSGGKQTLGAITKQGNRYIRKLLVLGATSLLRVVGKRKGALRDWIVGLLAKKPARLVTVALANKLARIIWAMMKTGESFRTEMFAKA

SEQ ID NO: 437504 - protein, 343 aa, unidentified
MYIQVIGIDLGKSSFHLVGHDQQGRSQFRKKLSRSKLCEFLSNHPLTTIAFEACGGAHWLGRYCKKLGHQVKLIPPQYVKPYVKSHKNDFIDADAIAEASQRPSMRFVEVKSEQAQVIGAIHRIRSGYIKERTACMCRIGSLLLEFGISLPTGHSIMKRLFAWLAMQRQAVPPMLMEELIELHEHYSDLNTRIDRQDRKLARLVKNHQDGELLKTIPGIGDLTASQCLSEFESVNQFKNGRSLAAWLGLVPHQHSTGGKTRLLGISKRGDKHLRTLLIHGARSILSRPDTVGAVFGEWLVKLRQSKPFNVACVALANKLARIVWSVLKYKKVFNAEKLHPEFA

SEQ ID NO: 437505 - protein, 353 aa, unidentified
MKYVGVDWAYRRAQWCALAPRGEVAGEGRIAADRDGLARLVLELGDEVTACLEMMSGALWARDELVACGWQVQVADARKVKTVAPLAAKTDKVDARLLAELCRRQLVPALWLPSLGDRELRERLRRRMHLVRLRTSAKGRIFGLQTQWGIRISLRRLRRADGMTLLERAGMPAVWRHSISECLALIDFLDARIVPLDAELRPFAQADPRAVLLDTIPGVAELLALTIAVEIGEISRFAGPQKLVSYGRLAPRVRQSGEGRPHTGPLNKSGSRLLGWAAVEAAQQAWRESNPWHQLYLDVSRRSRNHNSAKAAVARKILIAAWHMLSRNEPFKPAPRSTEGTPVPASSRLALAA

SEQ ID NO: 437506 - protein, 385 aa, unidentified
MSKVTRFVGLDVHAKLIAVAVADGGRDGEVRSHGTIENNPESVRRLFKRLRSDGSKLRVCYEAGPCGYGLYWQCTEMGIECQVIAPTLIPKKPGERIKTDRLDAMKLARCHRAGELTSVWVPDKKREVLRDMVRAREVVRRNLTEARQVLSKLLLKHEINCSESCAAWTSRYMSWLKALKFDDPGLEFVFLEYFNEVENQLGRLARVDAAIDAAIDSSPPEIREIVTALQTLRGVAKVTAAGVVAEIGYFSRFESPDQLMSYVGVVPSEYSTGGPDKRRQGGITKAGNRHVRRLVTESAWNYRFRPVPSARMKAAIKNVDPSLQAEIGRISKEAQQRLCTRYRHLLGNGKNPNVTVTAVGRELLGFIWAIAVTVEQKHKKNIRVN

SEQ ID NO: 437507 - protein, 343 aa, unidentified
MAYFAGLDVSVKETSVCIVDDAGKIVREVRVASEPEALLQVLTNTIYRFKRVGLEAGPLSQWLYSVLAEAGLPVICVETRHMRAVLKAQINKTDRNDARGMAQMMRVGLYRPVHVKTLRSQKLRMLLTHRKLLQSKAIAIENDLRGSLRNFGLKVGMVGTVKFEARIKELVENLPDLAELVEPLLIVRRVVREQLGILHRRLLAIVRDDDVCRRLMTVPGVGPVVALTYRVTVDVPARFRNSKAVGAVFGLTPAKYQSGENDRTGAISRCGDEMMRMMLYEAAQSMLVRAAKWSWLKAWAMKIARHRGMKKAIVALARRLAVIMHRMWVDGTAFRWTREVAAA

SEQ ID NO: 437508 - protein, 347 aa, unidentified
MRFYNQTHEHYCGIDLHVKTMYVCILDAAGKVLVHRNMPSTPEAFRDVVAPYRQGLVVAVECMFTWYWLADVCADDGIAFVLGHALAMKAIHGGKAKNDKIDSHKIAVLLRGGLLPQAYVYPATMRSTRDLLRRRLHLVRKRGELLAHIQNTRAQYNLPVFEKRLAYAANRDGVPDHFPDPSVRKSVEVDLSLIDHYDELITDLELTIVREAKRHDADAFHRLRSVPGIGKILALTILYEIHDITRFDRVQEFASYARLVKGRHESAGKVVGGGGAKQGNVHLKWAFSEAAVTFLRQNREGQRLKARLERRHGKGKALSILAHKIGRAVYYMLARHTVFSMEKFLAA

SEQ ID NO: 437509 - protein, 416 aa, unidentified
MSGKREIACGVDVHNKFIVATILSSDGLKLQDRFETNLEELLKFKDWLKENGCHKVALESTGNYWLPIYHVLEGSVNFILANAYQIKHIPGRKTDTLDSEWIAEICLKNLISPSRIFSRDRRELRSLTRTRESLIKVRTKIKNRVTHELEAACIKLSSVISDIFGKSGRHIIDGLLKGMDLEKILESIPSKRVRVNKEEIRGIIQANLSHSQIFLLRSHLNMIDSITKQIVEIDAMISDQISSRNEDLRIALSMPGMGFISASTILAEIGDFRDFSSPNKLAAYCGLVPSVYQSAGKLINGHITKHGSPHIRGMIIEVAHAIIQTKRNSKLKKFFLRIKAKRGAKIGIVALARKVLCILYHLLISQETYQDELLGKPRCIKHSSVHSTALMSLDEMIRTIIKAGYEVRKNECLESG

SEQ ID NO: 437510 - protein, 407 aa, unidentified
MSYKVAGIDVHKKVLMVVVCEVAEPESLPQRRRFGTTTSELRRLSQWLREGGVEEAVMESTAQYWKPVWYELEPYLRLQLAQAYSNRAPRGRKHDFKDAERLVRRLVADELRLSFVPTGEQRAWRTLTRMKVQLSREASRLHSQLECLLEEMRIKLSSVISDLLGRSGRRILQAIAAGESDPQRLASLGDHHLRCTQEQLIDALSGNPQVLHRQLLALYLERYQLIQQQIEQLNQMTAAAMQAHSEAVTRLAEVPGFGTDSAQQVIAEVGVEAATFASAAQLSSWVGTCPGQHESAEQNHSSHSAKGNRYLRRILNQAAHAAVKKNGSHFQAVFRRLLPRLGYKSAIWAIAHRLCRLVWKILHERVRFVEAGSEPSPRAKRQRAQRLLRSLRRLGYQVTVNPLPAAA

SEQ ID NO: 437511 - protein, 350 aa, unidentified
MCSLPVFVGLDYHDASVRVCVLDTDGRELANADRCNDWKAIAEFADRFGRPVRAAIESCCGAADLAEELVSCAGWSVDLAHPGYVQRMKQNPDKTDYQDAQLVADLERIGYLPRVWLAPQHIRELRHVVRYRLQLTEQRRATKLRVRALLREQRCRAPQGVNAWTKAWDHWLRHSAELSAEGRWVANQHLQELACLVTRIRQVEKRLERLTANDVEVQRLQQQVGIGPVTAWTIRAEIGHFDRFRTGKQLARFCGLSPRNASSGQRQADAGLIRAANPALRAVLIEAAHRLVNYDRYWQKFAQRLRAAGKPGSVVAAAVANRWIRRLYHEMKTPSGELAVAVRSARSEDS

SEQ ID NO: 437512 - protein, 404 aa, unidentified
MYNAVGIDISKGKSTIAVLQPGGIIIRKPFDVLHTSQQLNELSSYLNTLDGDTRVVMECTGRYHEPMVNTLHKAGLFVSVVNPHLIKNFGNNSLRKVKSDPADAKKIARYTLDNWAELRQYSSMNSTRTQLKTLNSQFSFFMKQKVAAKANLIALLDNTYPGVNKLFNSPVRDDGSEKWVDYAYTFWHVDCVRKIGLNAFTERYKSFCKKHHYNFQKSKPQELFHATKELIAVFPKEKNYKLLIQQSIQQLNLASKHVEQLRKKMHELASTLPEYSTVIGIYGVGKTYGPQLIAEIGDVSRFTHREALTAFAGVDPGVDQSGQHNSKSNRASKVGSARLRKTLFQLMTTLLQNAPEEDPVYRFLDKKRSEGKPYYVYMTAGANKFLRIYYGKVKECLRNLEHVK

SEQ ID NO: 437513 - protein, 357 aa, unidentified
MLEATSDREEIIERVAALDIGKAELVCCVRVPGAEGKSRRVQEVTSYPTMTRALLGMVDRLTELEVTRVVMEATSDYWKPPFYLLEAAGFETWLVNAKDVKHLPGRPKTDKLDAVWLCKLAERQMLRPSFVPPPPIRVLRDLARYRADLIGVRTAEKQRVEKLLEDAQIKLSVVATDIFGVSGRQMLAALIAGQRDPQILAQYARGRLRGKLAALEEAFTGRFNDHHGFLLSKMLARIDQVSADLDDLDAAIEGEVAPFAQAAARLDEIPGIGHDTACVILSEIGMDMSRFPTAAHLCSWARFAPGVKESAGRRKGNGTTGHGNSYLARVLGEAAVSAGRTDTFLGERYRRIARRRG

SEQ ID NO: 437514 - protein, 338 aa, unidentified
MKLYGAIDLHSNNNVTVLIDEQDQVVYQKRLPNELAVITEQLSGYRDRLQGIVVESTYNWYWLVDGLMEHGHRVHLANTAAIQQYEGLKYTDDTSDARWLAHILRLGVLPQGYIYPKEERAVRDLLRKRSQMVRQRTTNLLSIQNLITRNTGSSLNGNRIKILNAQEVDELFANADLALAVKANLALMNCADEQIHLLERTVSERIKLRAEFCFLKTVPGIGQTLALTIMLETGEIKRFPTVGDFASYCRCVGSQKLSNGKKKGRGNTKNGNKYLAWAFVEAANFAIRYCSRIKSFYQRKKAKSHGILALKAVAHKLCRACYYIMKDQVSFDVSKAFA

SEQ ID NO: 437515 - protein, 350 aa, unidentified
METAYDGRQVVGMDLHRRRSVLVRMSEDGRRLGTARITNSAAELRKAIAVAGKNPRVVLEATYGWYWAADVLVAAGAEVHLAHPLGVKAFAYRRVKNDEKDAADLADLLRMGRLPEAWIAPAEIRGLRELTRYRIKLVQRRASYKDQVHAVLAKLGIAVTCSDIFGVAGNIWLDELPLPQPYAGKVASLRTLIADLGTEIALLDAVIADLLEHHDGYRALQALPGIGPVLAAAIVAEIGDIHRFASPAKLCCWAGLTPRHRESDTKVTRGHITKQGSPVLRWAVAEAIQRQPAGSPVRGVKDRIIARRGNQAKNIAKTAAARHLLTAVFYTMRDGQARSLATRTAAQAAA

SEQ ID NO: 437516 - protein, 389 aa, unidentified
MKIYVGIDIAKLNHFAAAISSDGEIIIEPFKFTNDADGFQLLVSKLESFDKNSLIIGLESTAHYGDNLVRFLVTELYQVCVLNPIKTCQMRKNNVRKTKTDKVDTYVIAKTLMMQDNLRFVSFFDLDMMDLKALGRFRQKTIKQRTRLKIQLTTYVDQVFPEIQYFFKSGLHQHAVYALLKEAPSPKEITSMHMTHLANLLKVNSHGHFTKELAKELRVLAQKSVGANDSAISIQITQTIQQIELLDSQLEKIEAEMTDIMKFNDSVIMTIPGIGYINGGMILGEIGDIHRFSNPNKLLAFAGLDPSVYQSGNFQAKTTRMSKRGSRVLRYALVNAAWNVVRNNATFKAYYDAKRAEGRSHYNALGHCAGKLVRVIWKMLTDEVEFNLE

SEQ ID NO: 437517 - protein, 380 aa, unidentified
MGKIIRIGIDTSKSVFVLHGVDENELPVLRKRLRRSQVLAFLATLEPTKIGLEACGAAHNWARRIQALGHEVVLLPPQYVKAYVKRGKNDDRDAEAICEAMSRPTMRFVPVKTAEQQAALMLAGIREGLIRRRTQFANTIRGHAAEYGLVAPKGLFHIKPLLARVAEDGEVPDLAKALFATLAQEYDRLQIEIKAIDRKMMAWHKANAPSRKIAKVPGIGPIGASLGVMKVPDPHAFRCGRDFAAWVGLTPKDHSTAGKTRLGVITRAGDEALRRALVVGATAVIKEVTRGKGPRSPWLVEMVRRKPPKLAAVALANKNARIMWKLLVSGEDYDPKRGLASGARGARREERVAALHGGSAPRSSLLATPTIAEASAMTNA

SEQ ID NO: 437518 - protein, 316 aa, unidentified
MGSAPVYAGIDVARDEVVIALAPDGAQWASATTPVALGEAVARLRQCAPALVVLEATGGLEAPLVALLAEAGLPVVVVNPRQVRDFARATGRLAKTDALDAAVLALFAERIRPEPRPLPDAAARRLGALLARRRQLLDMLVAEQHRLARADADVIQDVRAHIAWLRKRVAGLDDELSRAIKASPLWRAKDDLLQSVPAVGRVLALTLIAELPELGTLNRKQIAALVGVAPLNRDSGAFRGKRMVWGGRASVRTTLYLAAMCGTRFNPTLRAFYQRLLAAGKPKKVAQVACARKLLTILNAMARSRTAWRLDLQHSC

SEQ ID NO: 437519 - protein, 352 aa, unidentified
MIVLGADMHKSSHTLAAVAAATGEMLDEKTAAVGARGFDGFLRWARGLGSERVWALEDCRHVSGSFERFLIARGERVVRVPTRLMANTRRSSRERGKSDRIDALAVARAALAEGIATLPTAELAGPELDIRLLVDPRERLVRTRVGLNNTLQWHLHDLWPELVLPGSSLFYGKWGPRIARRLARAEQTMRVRIARDELRRLRELTQAINALETELAALVAQVAPQLLSEPGFGPLTAAKLVGEVAGAGRFSSDAKLARAAGLAPIPVSSGRTNRHRLDRGGNRQINAAIHRVAVTRARCHPETIEFLARKKNEGKTHREAVRCLKRHLARRIWQLLRAPHPVSETPPHPSTS

SEQ ID NO: 437520 - protein, 365 aa, unidentified
MEITTIGIDLAKSVFALSCADRAGKVVLRKQLRRGQVLEFLRGRRPCLVGMEACGGAHHWARAIGALGHQVRLMSPALVRPYRSGANKHDRNDADAICEAVGRPQMRYVAVKSVAQQDLLALHRVRTQLLKQRIALSNLIRALLHERGVIAPLGAAGLRQALAQALQAENSELSAAIGEVLRELSGGLRELEQRIATITRRIECAAKDDERCARLRQVPGVGPLTSSALVATVGNAREFKRGRELSAYLGLTPRQHSSGGKTVLLGISKHGDRYLRTLLIHGARALLYRNRSNPRAAWAARIMAARGPNVAAVALANHNARVLWALLSRGTSYRPAPHPSSFPSRPSPVVARAREGKLLITTERS

SEQ ID NO: 437521 - protein, 397 aa, unidentified
MPTMTQPVAQPQRQAQRRAQRRAQFESQFESQFEPRPVLGAGRVTGGVDTHKDTHTAAVLDPTGRLLGHRQFPTTPAGYALLLGWLRAHGEVDKVGVEGTGVYGAGLALYLRVAGVELVEVDRPDRKTRRRQGKSDPVDAEAAARAAQAGRASGIPKDHAGAVEALRALRVTRRSAVTARAQAQTQMKSLLVTAPDPLRSQLREMGERQLVAHCATRRPDRRPERGALADPTTATRIALRALARRHQQLSAEIGELDALIAPLVTQINPALCALLGVGPDVAGQLLVTAGDNPARLRSEAAFAMLCGAAPLPASSGRTQRHRLNRGGDRQANCALYRIVLCRLRWDPRTRAYAQRRTAEGMSRKEIIRCLKRYVAREVYTALLNPLPSSVPASTCAA

SEQ ID NO: 437522 - protein, 401 aa, unidentified
MKYGVGIDVSKGKSTVAILSIEGEVIEEPFEINHDINGLNLLEEKLKDISKEDLKIVMEETGTYHLPVLGYLLDKGYFVVAENALKIKKYLDRGLRKAKTDKKDSYKLAEYTCDNWYKLNKARENDETYDNLRFLSRQYINNINVQVKQKNNFSNLCDLLFPGYYQMLDENNFILGLEIFKKYYHPEIVTNKKQSQFVDEIDKLAKKLGHKGAGITLANKIYLLAQKTISPRPNNEFAQLSAISCADALILTIKTTTTIITEMDKLARELPEYDVISKIPGCGKKLTSRVIAEIGDVRRFKNEGSIIAYAGLDAPPYQSGQFEATNRHISKRGNKYLRKTGYEVMKSIKSSCRSDNDLKSYIIKKENEGKLKKVAKIAGLNKFLRMYYGIVKKKYKQLEIW

SEQ ID NO: 437523 - protein, 375 aa, unidentified
MKEKVRFLGLDVHAETIAVAVAEPDGEVRSLGTIANREESIRKLIKKLGPVEQLRACYEAGPTGYVLYWQLTQLGVECAVVAPTLVPTKAGDRVKTDRRDALKLARSHRSNDLTAVWVPDGDSEALRDLVRTREAAKQDQLRARHRLAKFLLRTGQRPAVGVKAWTGPYMAWVRQVRFQRPAQQATLQDYLHEVDHMAARVKRLEQAITEVVKLASPQVQEVVKGLQALRGIAEISAVTIVAELGQISRFDTPRQLMGYSGAVPSEDSSGKRKRQGSITKTGNAHLRRIVVEAAWSYRHRPAIGPRLRKRQEGVPEPIKEIAWKAQVRLSKRYARLAAAGKDQRKIITAVGRELLGFIWAIGVKAETASKQPMAA

SEQ ID NO: 437524 - protein, 342 aa, unidentified
MTIVAGFDVHRRQITFDALDTETGELMRGRIDSTPAAVEQWATRFQGRGVQVALEACTGWLFVSRALERAGVVAHLAEPVETSALRGRKRRAKTDREDARWLRTLLGEGRLPEAWIPPEHVREWRSRARLRKTLIDERTQWLARIQATLFHHGVDGVPAELRSGAGREFLDELELPADARERIEIALGMIDALEGQLRPLEAALRKLALRQTGCRALMAQFGMGELTSLVTLTELGDVGRLSASRKAVRCAGLDIGVHRSDRRSRVGKLNRQGSPHLRWALYEAALSATRPTSPDHQDYLALKARGLSHTRASLTIARKLARRSFHILRELGPSALDPIPTS

SEQ ID NO: 437525 - protein, 310 aa, unidentified
MTLSPTWIGIDVSKAWLDIASSGGEGVQRIANTMDAIAAFAATLEREGTLVVLEASGVYDRSLRAGLALAGIGHVRVNPLRARDFARASGQLAKTDALDAAMLAEMGRALRLVADPLPEAGRERLGLLSRRRDQLVAMRTQEKQRRIEMTDPFIGADLDRHLAGLNQAIAAIEVEIQNQIGSDAALAQDQALIRSVPGIGPVTASVLAALMPELGRRSGKQIATLAGLAPLNNDSGLRRGQRSIRGGRRRVRQALYMAAVASLRTQSPLNAFYHRLRQAGKPPKPALVALARKLLVTINAMMKTRTRFAT

SEQ ID NO: 437526 - protein, 344 aa, unidentified
MTKTPIAVLGIDLGKNSCSLAGQDATGAIVTRRKMTREGVVAFTAALPPCVIAMEACCGAHFLGRTFEAQGHQVRLMSPEYVQPYVKAQKTDDRDAEAIAEAATRPTMRFVSLKSEAQLDLQVLHRGRERLVLARTALINQLRAVLLERGIIMPKGRILLMRRLKEIGLAGLAISSRIQALVQDLLAECADLDRRIKAYDEEFAAVAREDAQARRLSGIPGVGVINATALLAAVGDASAFARGRDLASWLGLTPRQHSTGGKTKMLGISKRGNRYLRKQLIHGARAAMPHIAAKPTRMGAWLRDMLTRSHPNVVVVALAAKLARIIWAVLRHESNFDQGAVMEA

SEQ ID NO: 437527 - protein, 408 aa, unidentified
MEVLHPRCAGLDVHKDSVVACVRIASDGAVRQEVRTFGTMTTALEELAEWLRVEGCTHAAMEATGVYWKPVWHVLEDTLELVLANAMHIKNVPGRKTDVNDATWIADLLAHGLIRSSFVPEASIQELRALTRTRKQFVREKAGHVQRLQKTLEDANLKIASVAADIMGASGRAILEALIAGETNPEKLADLTRGRLKASRATIVESLRGRVTANHRLLLKLHLDHIKAIDQTLVTVDKEVDALLEPFLAAAKRLSTMPGISDLVAEVVISEIGVDMSRFPTPGHLISWAGLCPRNDESAGKRRSTRLRKGAPWLKTTLVQAAWCATRAKKSYLSAQFFRIKGRRGPRKAIMAVAASMLTAIYFMLRDGVDYRDLGHDYFDRADKSKAADRLVRRLAALGYKVELTAAA

SEQ ID NO: 437528 - protein, 394 aa, unidentified
MCQQYKTEASMIKHNILFIGLDTHKTFTEVAYIEDQRGAKSIHLGKILSNKAAFKKLARQLQSKYPDATLHFVYEAGPCGYWIYRLLTSLNHCCYVIAPSLIPKKPGEKIKTDKRDALKLAKLLKSEDLTPIYVPEPEDEAVRDLSRARETGMKDLKDAKYQLKALLLRNNITSKVKDNWSLQHLRWLAELVLPHPCQQIVLQEAVSTITERLKRLKRLDNELTHQVKNWRYYPVVKAVQAMRGVRLLVATGVIAELGDLTRFDHPRKLMSYLGLVPSEHSSGGKRHLGAITKCGNSRARRLLFEGAHSYKHNANISKEMQLRQEGLSKEVIDMAWQAQLRLCRRYSRLMHKGKHRNVVVTAIAREMIAYIWAISREVVLPVVDVKLRLSRVPA

SEQ ID NO: 437529 - protein, 369 aa, unidentified
MDHYAGIDVSLEYSSICVVDATGPIVREDKIASEPEVLIAWFGSLGYALTRIGLEAGPLSQWLYAAMKKAGLAVELLETRHVRDAFKAMPVKSDRNDARGIAQLMRLGWFRPVHCKSIGAQEIRAELTARKLVESKLRDTANSLRGILRGFGLKVGATTERSFPGRVRELVKGHPVLEAIAESLLSVHEVLLREFNGFQKRVQSAACSNVKAKLLMTTPGVGPVISLTYAAAVDDPARFKSSKKAGSHFGLTPKKYQSGETDRSGRISKIGDASVRAALYQAAHVILTKPVKGCPELKSWGMRLAKRAGQEKAKVALARKLAVIMHRMLADGTPFNPTAKAERMAATAAKAARKVLALPANGATVTEAV

SEQ ID NO: 437530 - protein, 317 aa, unidentified
MTESVRVNVGIDVSKDFLDVHVGDVALRRVPNRSSGLSVLKRILSRYTVSLVLLESTGGYENLAVTYLQSLGYDVCVINPRQARDFARSMGRLAKTDKIDAQILCRLADVIDASPERARFIRPLTDERRQRLVSMVRRRRQLCDLMIAERNRRAKTDAYGSESISTVLDFLTDEVARIDRDIAAHVGSCFSDISSLLQTFTGIGPVTASTLLGELPELGKLNRRQITALVGVAPFNRDSGYMRGRRRISGGRSGVRNVLFMAALSAVRFNPVLKAFFARLVSAGKPKKVALVACMRRMVCILNAMLRDGSRFEVAVG

SEQ ID NO: 437531 - protein, 390 aa, unidentified
MDVLYQSCAGIDVHQANIVVCILHGSLTSTRPKREMATFDTTTKGLRACHDFLSQFHVEAVGMESTGVYWRPVWHALCDDFELILAQPAHMKAIPGQKTDKKDAHWIAKLTRIGLLPRSFVPDETIQELRELTRQRKHYVESRNKETNRIHKILQSGGIKLTTYIEDIMGASGRNLLQLLIDKTPITPRIVHQSVYTSLKKEVPQLLNAMDGYFSDHHGFMLKQSLELHDFYQKQIEILEDRINGYLSQYEKQVEILDSVPGIDVITASVIISEVGVDMSQFPTAGHLASWAGLCPGNNESAGKKRSTKIRHGNSYLKKCLCQAAFAIKRQKGSPLAERFYQIQSRRGSQKATIALAHQLLKIAYILLKEQITYPEFLAQKETTRDELVA

SEQ ID NO: 437532 - protein, 459 aa, unidentified
MNRKRSKPKIDRKMPMVHPNAAAVDVGATMHMAAVRPDRTPEPVRSFGTFTTDLHRLVEWLKECGVETVVMESTSVYWIPIFELLDAHGFTVFLVNARDAKHVPGRKTDVSDAQWLQRLHSYGLLRASFRPKGQISELRAYMRQRERLLEYAASHIQHMQKALTEMNLQLHHVVTDITGATGLRIIRTILAGERDPKVLARLRDYRCHSSAETIEKALTGSYRAEHLFALEQALALYDAYHEKASACDARIEAVLKELSIGRGRCSGTELPSPRRSRTDQANALAFDVRAALFALLGKDITKIDGLGPYLSLKLIAECGDDLSAWPSPKHFTSWLCLAPSNKISGGKVLSSRTRRSGSRAAALLRLAAVTVGRTDTALGAFYRRLSARIGKAKAVTATARKIAVLFYNAVRYGMEYVDPGASFYETRYRTRVVDNLHRRAKAFGFVLMPLEAPPSVVVS

SEQ ID NO: 437533 - protein, 247 aa, unidentified
MENEIHFIGIDVAKAKLDVDMLRPDGRHRSKKFANTPGGHDELVSWLQGHQVIHAHICMEATGTYMEDVAAHLSDAGYQVSVINPMLSKAFVQSQGIRSKTDTVDARQLAYFCREKRPAIWEAPHPVERALRALVLRHQALTEMHVQEQNRRESARDVQLPSIDMHLLWLDTELKRLEKQIKDLTDDDPDMKHRRKLLDSIPGIGPKTSAVLLAYVGLKERFREARQFAAYAGLTPRQHESGSSIRR

SEQ ID NO: 437534 - protein, 328 aa, unidentified
MESVKYIGLDVHQSTISVAVLNSEGKLLMQLVIATKATAVLDLLQGLRGDLHVTFEEGTHSAWLYDVVVRRVARVVVCNPRKNALLKSGNKSDRIDACKLAELLRVGMLSPVYHGEQSTRTLQHLVASYSALMGKRHRAEWMERLSDSGQRRRAEWLYEELDAVQGLRRQSRQAVMVECGKYQAAKLLRTMPFLGPLRAAMLIARVQTPHRFRTKRQFWTYCGLGLETRSSADYVAKDGQIVRRRKPVYIRGLNWNYSHELKNVFKRAATTASAMEGPFREFYETRVAQGMVPAMARLTLARKMAAIALILWKKGETFEAEHLKLQAA

SEQ ID NO: 437535 - protein, 342 aa, unidentified
MSEVITIGLDLAKNVFQVHGVDGTGQTVIRRQLRRSQVVAFFKKQPPCLVGMEACATSHHWARAITALGHEVRLMPPRYVKAYVKRNKNDAADAEAICEAVTRPSMRFVAIKTVEQQSVLVLHRTRELLVRQRTGVVNAIRAHMAEFGVVARVGLPQVKLLIEVIADAEDARIPPEARICLKGLVVHFISLTREIVGAERRIQKWHRSNQASRRLETIPGIGPITASALAASITDPSLFKSGRDMAAWIGLVPREDSSGGKQRMGRISKQGDQYLRWLLVAGAMSVIRQAKRRGTNIPWLADLIARKPTKVAAVALANKTARIAWVLLSHDVTYRKPAPVAG

SEQ ID NO: 437536 - protein, 407 aa, unidentified
MQEATQHDAVDVFVGVDVDVDVDVGKGRHHAVALRRNGKRLYNKALPNDEVKLRALIAELKTHRRLLFVVDQPSTIGALPVAVARAEGVLVAYLPGLAMRRIADLHAGEAKTDARDAAIIAEAARSMPHTLRSLRLADEQLAELTMLRGFDDDLAAQVTQTSNRIRGLLTQIHPALERVLGPRLDHPAVLDLLERYPSPSALAAANEKTLANRLTKLAPRLGKNWAAEIVQVLNEQAVIVPGTQAAAIVMPRLAQQLAALRKQRDEIAAEVERLVLAHPLWPVLTSMPGVGVRTAARRLTEAAPKAFATATHLAAYVGLAPVTRRSGSSIRGEHPSRRGNKVLNRALFLPAFAALRDPVSRAYSSRKIQQGKRHNQALIALARRRCDVLFAMLRDGTIYPPKSAPDA

SEQ ID NO: 437537 - protein, 338 aa, unidentified
MDQVTTIGLDIAKNVFQLHGVDAAGNVLLRKQLRRGDVLRFFSGLSPCLVGMEACATAHYWARELVKLGHTVRLMPPAYVKPYVKRGKTDAADAEAIAEAVTRPTMRFVAVKTAEQQAVLMLHRVRDLLVRQRTMLINALRGHLAEFGIIAARGPGGVTAAIVALHETQDSLPVLARVALHGLVDQLRIVRDEVVKVEKRIVAQHRADDASRRLATIPGIGPITASAIAAAVPDATLFKSGRQFAAWLGLTPRTHSSGGKERLVGITKQGDGYIRRLLVIGATAVIRLARRENASKAWAAKLLERKSARLVSVALANKTARIAWALLARNQSYVAPAM

SEQ ID NO: 437538 - protein, 366 aa, unidentified
MQEISTMQAIGSDNFKGPQVTIGLDLGDRSSNYCVLNATGDILLEDKLPTTSQAMKQLFGRMVRSRIAMETGTHSPWVSRLLTELGHEVIVAHAQKVRLIVKSRKKDDRIDARTLARLARIDPQLLNPVQHRSAQAQVHLTEIRARAELVRARTALVNSARGLAKSYGERLRKCGTQQVGRELAMGLSAELRAALEPLLREIESLNEHIKEYDRRIEKMAKDTYPEVKLLKQVKGVGDLIALAYVLTIEDPHRFKKSRDVGCFVGLQPGRRNSGESEPQMHITKEGDRYLRTLLVQGAHYILGPFGEDSDLRRWGWKLSERGGKKAKRRAVVAVARKLAVLLHRLWVSGEVYEPLRNSQKAMSTAA

SEQ ID NO: 437539 - protein, 406 aa, unidentified
MNPLNVAPQRFIGLDIHKNYLVASGVNPNKEPVLGPVRVPNGRLEAWAEREVCSSDAVVLEMTTNTWKVVDTLEPFAHSVTVVHPPHVHLITRAQVMNDKKAALILAQLHAAGLLPPVWIPPQAVRDLRALIAQRWKMVRLATQAKNRLQSVLHKYHLQAPPKSDPYTPHMRAWWEVLPLEPLERFRLHSDLDTVAFAQQQLDRLEQCLARHAARDERVPLLVQIPGIGFINALTILAAIGEISRFPSAKHLVGYAGLGTKVHDSGQRQWRGRITKMGRRDLRRAMVEAAQSAVRCHDHWQAQFQRLCRQTARKKAKVAIARKLLVTVWHTLTKDEIDRFATPQQVACAFFGLAYKLRVRNLPDGMSALQFTRHHLDRLGIGQEVTHIPWGSKTFKLPPSRLPRAG

SEQ ID NO: 437540 - protein, 326 aa, unidentified
MNILGIDIAKTTFHVALMLPNGKLRHKQFANTAAGFTALSHWLSAHKINQVHGCLEATGTYGDALAEYLYQTGHRVSIVNPARIKAYAKSELTRNKTDRIDATLIARYCEKQQPPSWTPPAPELRELQILVRHLDHLIETRAGLQVRLSENRLVEPVAQSLRALIAAVDAEIKQLEQQIKRHFDQHPGLKAAHQLLTTIDGIGSITATRLLAEIEHLQDYDHARQAAAYAGLTPRQNTSGASLNGPTPLCKIGNARVRHALYWPAITALRYNPIIKEFGQRLAARGKHKMVIIGAAMRKLVHLAYGVLKSGRPFDPDFVKNRNVIS

SEQ ID NO: 437541 - protein, 349 aa, unidentified
MKVTTFGLDLAKSVFQLHWVDTATGEVCRRRLRREQVLPFFANREPAVVAMEACGSAHYWGRQVRALGHEVKLIAAQLVRPFVPTNKTDAADARAIWEAVQRPQMRFVALKDEGQQSVLALHRMREQLVKARTMQSNQLRGLLYEFGVVLPVGRERALLVLPDKLEQLASRLPAMLLTMLERQQARLAELTKDIVAIELQLKRWTKTNAASRRLQDIPGVGLLTATAAVAMIGEAKHFRSGREFAACLGLVPRQSGTGGRVKLLGISKRGDVYLRTLLIHGARAVLNRRREPEPWLQKLLARRPPNVVAVALANKMARMIWALLAHGRTYEPGYVSTRPVRGQPVPQGH

SEQ ID NO: 437542 - protein, 490 aa, unidentified
MTASVYAKPQPELRNLFDRAGDPRKVLCAPIDYAKRKHIVLFCNGVGDILKQAFSVDNSPTGLTDLLAQLNATCRHHHLERTSAFFGGEDVPAWAENFIAALRVKGFPVARVNAWEAKKQRENFQASSDTLDLLGIAQCLLKQRGKFNPPVADAYRHLRDLCRERHGFVTAATALTNRLHNYGDRLFPQFLNPNKSGIPPFTPACWWLLQDRFSAPQVAQRRTASLIKGLQRQGLPDAPTAAATLQALAREVLPPCPQYVATWQQLVKALADEGQSLQQIIAGLDHQIAPLLAKTPGAVLTSIAGIGVTLAAGIAGELGPPDQLPNLDLLCSYAGIVPATKQSGGPDQAPVVLGVRHRCNHHLKNYLVQAANKMGQMGPPELQQRYRDVQARNSHADFVVAKDLLGLGKSLMQRQTLYLPPDLYAPESCASARAAYYLDLWPKLLIKWQPKAPLAQVFAADTPLGKWRAMVQDICSISLPLPQRSRSAKA

SEQ ID NO: 437543 - protein, 417 aa, unidentified
MAYRIAGIDVHKKVLAVVVADVETRGEYEFQRRWCGTSPADLRELAAWLSEQQVEEVVMESTAQYWQPVWGSLERDWRPASGGGSAPGILHLAQAKSNRGARGRKRDFVDAERLVKRLVSDELTLSFVPDAEQRLWRTVARRKCQLRRNRVQLQNRLECLLEEAHLKLSSLVSDLLGLSARRMLAALAEGETDAAALAALADRHLRATPAQLSDALGVCATLHPVYRRLLKMTLVELELVEQQIAQLDQELAELLAAHQQAVERLAQVPGLGVDSAQQIIAEVGAEAATFASAGNLASWVGVCPGEEQSAGTSKSHRSPHGNRNMRRILNQCANAAVKTKGSIFEVHYRRLAPRLGHKQTIGAISHRLCRLIWKILHQGVNYEEYGPAVSERSRRTRTARMIRHLQKLGYRVEPLAA

SEQ ID NO: 437544 - protein, 342 aa, unidentified
MKDMMIGVDLAKNVFQVHGALRTGEVQFRKKLTRKQFHAFLARQDPCLVIFEACGSAHYWAREIEALGHEVKLIAPQYARPFVKRQKNDAADAEAIVIAARQPEMRFVQPKTIEQQSRAAVFRGRERLVHQRTADVNALRALLYEHGHVFPAGIRYLDRMTALAEEEASDLPVLIREECKDLLAQIAETTARIAERTAKLKALAARSDRARRLQTMPGVGPLTAVAVEAFGPDMAQFKTGRDFAAWLGLVPRQHSSGGKERLGRMTKAGQADIRRLLIIGAMSRLNWLGQRSIVEGSWLSCMLTRKPKMLVAIALANKMARQIWAMLTKNEDYRDPVLASTA

SEQ ID NO: 437545 - protein, 342 aa, unidentified
MQAITRIGMDTAKNVFQLHGVDADEAVVLRRQFRRREMITFFEKSPPVLVAIEACGSSHHWARLLQSFGHEVRLIPPQYVKAYVKRGKNDAADAEALCEAVTRPSMRFVPVKTREQQAACMLMTVRERLVGVKSQLSNAIRSYAAEFGIVGPAGRQNVKALIARILDDETLPDLARDLFRFQAKEYASVEARLAEIETKLMAWHRADDRSRRIATIPGIGPIGSTMLSMKAPPAESFRSGRQFAAWLGLTPKDHSTGGKVRLGGITKAGDPAIRSTLIVGATALLRHIRKGRTKPSPWLEALLNRKPPKLVAVALANKFARIAWRLMMSGGVYNPPPTTAAA

SEQ ID NO: 437546 - protein, 421 aa, unidentified
MTEYAACLGIDWADKKHDLCLFDAATGKKTKQVLPHTPQAIAEYFSNLRARYRGQQIAVGLEQSRGPLLFALLQYDFLVLYPINPTTLAKYREAFSPSRAKDDPTDAEYAAELLMQHSDRLKAWHPDDDETRTLRYLVEHRRRLVGDRTRISNRMTSLLKCYFPQVLSWFPELSTVLVCDFLLRWPVLERLRGVKQTTLLNFFRAHHSVRADTLEKRLAAIKESVPLTTDRAIINSSVLMITLAAQLKTTIEAIRQFDLEIEKLCVAHPDFPLFQSLPGAGEVYASRLLAVMGTDRTRWTTAAELACLSGIAPVMERSGQSTWIRWRYFCPKFMRQSFHEYAGESVKHSFWARAYYEQQIAKGKTRQAAVRALAYKWIRVIWKCWQTRTPYNEVRYLENLRKKGSPLLSYAAKNAPESKIS

SEQ ID NO: 437547 - protein, 388 aa, unidentified
MKSNRIIGLDLHPDVFAAAALNGANPLEARTEWVHDRQETARLESWAKKHLAAGDTVVMEASGNSFEVAHRLHECGITAIVLESAQASHIRHNFCNDDRHSAVKLARVYLSGLAKTVWQPDAVTRERREVFFAHRNAVKDTTRCRSRIRSFANEYCVRLPAGTALTQESGRHAVLSRRAWTPLQTELIGQMFEQLWAGEKRRQALERVMVRELAGDPGWARLWRLMGVRHRVAFALMAMIGDIHRFPTAKKLVGYLGLSPRREQSGNAARGREKGLGSNGRGDVRALLIQSAQNALEQREAPLHKWGWKLAMKKHRHHAVAAVARKLAVAIWHLLMGHFTPLMEASAHLTTKLLKLATVLGRDTLNQLGFANRQAFVDQQIKLIQLST

SEQ ID NO: 437548 - protein, 423 aa, unidentified
MMKLKYPICCGLDVHKNVIVATIVITNRDGVSEYRQKSFSTINSDIQKFHNWLIENNCYHVCMESTGKYWIPIFNYLEKDIEVCLTHPKYVKAIKGKKTDKKDSKWIADLYKFDLVRCSFIPPKDFRQLRELARYRFKLVCMKSSEKNRIQNCMTVSNVGIASVLSDPFGKTATEIMSYLLEHTADSIDEKAVRKLIKKGAKAKSDEIIEAIRGCNIETDQAKKLELALGHLEYLDGMITQTEVELYVRIKPYYEFVEFVSTMPGMTELSSTIVLAETGVDMNIFDDARHLCSWCGLSPSNNESAGKKKSVRIAKAGAYLKPMMVQCALAAIKNKKQPYFAIKYGRIKKRRGHKKAIIAIARMMMVCIYHMVSEKKPFTPADYEELMKPQNHVERVVLNENNVFAYLESLGYDSSKLVKRNDN

SEQ ID NO: 437549 - protein, 342 aa, unidentified
MEDVALVGIDLGKHSFHLHGQDKNGKEVFHRKVTRKQLVQLLANFPTCTIAMEACAGAHFMARTLSSFGHKVRLIAPHFVRPFVKSNKNDFADAEAICEAASRPSMRFVTPRTESQQVLLALHRVRDSFVRDRVGTGNQVHAFLLEFGVSLPVGSTAMKRLPAVIAEHPLPPQLVAILERLHTHYKYLDAQIAEIDKELARQLAVDDLGQRLMTIPGVGPVTASVLSAEVGDGKQYRNSRDFAASIGLVPRQYSTGGRANLLGISKRGDKNIRRLLVQCARSYMRDVDKRVGALAEWVRALLARRHSSVVACALANKLARVAWAIAAKHTTFIASNRQLLPA

SEQ ID NO: 437550 - protein, 423 aa, unidentified
MMKLKYSICCGLDVHKNVIVATIVITNKDGISEYKQKSFSTINSDIQKFHCWLIENNCYHVCMESTGKYWIPIFNYLENDIDVCLTHPKYVKAIKGKKTDKKDSKWIADLYKFDLVRCSFIPPKDFRQLRELARYRFKLVCMKSSEKNRIQNCMTVSNVGIASVLSDPFGKTATEIMSYLLEHTADPIDEKAVRKLIKKGAKAKSDEIIEAIKGYNIETDQAKKLELARAHLDFLDDMITQTEVELYVRIKPYYEFVEFVSSMPGMTELSSTIVLAETGVDMNIFDDAKHLCSWCGLSPANNESAGKKKSVRIAKAGDYLKPMMVQCALAAVKSKKQPYFAIKYGRIKKRRGHKKAIIAIARMMMVCIYHMVSEKKPFTPTDYEELMDPQNHVERVVLNENNVFAYLETLGYDSSKLVKRNDN

SEQ ID NO: 437551 - protein, 342 aa, unidentified
MDAKRYIGIDLHRNCFTACMRLENGREYLKEWKLEDMAKFTAKLRSCDEVAVEVTGNTRLFHDAVAPHVGRVVAVNPSQFKVITHSVKKTDSNDARSLALYLAKDLLPEVRMKDKTQAQIASLTQTRDTMVKLRTALKNKVNNLCSAHGVNLNKESLGTEKGLRAVLAMRFDPLVNLELKIIIDQIRSLNQSIAELEETIGKEGQKLEGHKNLTSIKGIGGLSAGILLSIIGDIGDFSDEGKLAAYFGIVPRISNSNETEHSGRITKRGTKLGRTTLVQCALIAQRYSPYLKSYYEKKKSRGTGKAIIALARKFLGIIYRTLKNKWLFEDFPNFVLAEAATA

SEQ ID NO: 437552 - protein, 470 aa, unidentified
MIPRKQKNVVMRRRPAEPLRVSNPHAAGIDVHAAVHWVAVPPEAAPPPPKNQPTNLPPWVRSFGTCTADLEMLADWLKECGVTTVAMEATGVYWIALFELLERRGFEVYLVDPRQSKRAPGRPKTDVLDCQWLQRLHSYGLLTASFRPADQVVVLRSYLRQRQMLISYGGQHIQHMQKALEQMNVKLAEVVSDITGVTGMTIIKAILQGQRDPLELAKLRNDKCKRTEAQIARALYGNWRAEHLFALEQAVSLYETYQRHLRECDARLEAHLQTFEDKSGGEVLPRKPRQRRRANNDARFDVRQRLFDMAGVDLTLIEGIDEATALVILSELGTDMAKFPTVKQFTSWLGLCPQHQGSAGKIKSRRIRRGQNRAARALRLAGQGCHHAKNALGAFYRRIQTRAGGPKAVVATARKIAERVYRMLKYGESYVRQEMALAEEAYRLRVLNGLARKAQELGYQLLPATAAVQT

SEQ ID NO: 437553 - protein, 368 aa, unidentified
MKEQTSAATETLNKGKTMIDFTGKTIYVGIDVHKKDWQVGQFHAGLVLGNHRITGNSQELIDFLKKRYGGATLKCVYESCAWGFNLQRSLTAAGIECIVVHAGDVPGSDKEKKNKTDKVDAVRLARHHAAGLLEAIDVPDEELQKERNLMRFRKKLVGDLNRSKNRLKSLLKFQGIEIPANMDNPNWSRNFINWIEEQAAKDTLLHDTVELMLEEVKMQRQLLLKTEKKLRQLMSSKKYEAKTKLLMSIPGIGRTTSTLFLLEAGEIKRFKGFDALNNFVGFYPGSNSSGDKDMDTGISKRRHNQLRTMLVEAAWQAIRKDPALLDAYEQLTKRMKGNEAIIRIARKLLRRMRAVLISAVEYQKGVVK

SEQ ID NO: 437554 - protein, 338 aa, unidentified
MKANVIGLDVAKNIFHMYSIGEDDKPIKKKLKRAELLAFFANYPVSLIGIEACGSAHHWARELIKLGHEVILLNARYVKSFIIGNKTDFNDAAGIFDAVTRPNKRMVMIKTIEQQDIQLVHTVRNGLIGKRTALVNQTRGLLSERGIVIPRSINQLRKQLPLILEDAENSLTPLSREMFAEHYERLVVLDDEIKAQDQRISRLCQANELSQRFTEVRGVGPLIATAILFDIGEGKGYARSSDYAASLGVVPRQNSSGDKQVYLGISKRGNRYIRTLLIHGARSVISHCDKKQDKLSLWLKALVERRGFNRTAVALANKNARILWAMTMQGTKYDESRV

SEQ ID NO: 437555 - protein, 368 aa, unidentified
MGKSSTVFVGMDVHKDSIEVGLAEMGGEVRHYGGVGGEAPAVDRLVRKLRSVHRELVFVYEAGPCGFWIYRRLTAQGLTCWVVSPAMTPRRAGDRVKTDRRDCLALARLARAGELTPIYVPDAVDEAMRDLVRTREDAVAMQRQARQRLAALLLRNEIRYVGKSAWTQAHRRWIAHLKLPSGPQQIAFEEYVQAVEEAGQRLGRLTRAIEAELEHWRWRPVVEALQALRGVSGIHAVRIVAELGDLSRFAAPRQLMGYLGLIPSEDSSGPRRRQGSITKAGNSSARRALVEAAWAYRHPARVSWVIARRQSALTQRLCDLAWKAQLRLCTRYRRLTARGLHKNKIVVAVARELAGFVWAIAREVKPAA

SEQ ID NO: 437556 - protein, 345 aa, unidentified
MNKQVSAPQATLFCGIDVSAASLVVALIAPDGSLARREFPNNASGHEALSVWLKKRDSRVRVSLEATGIYSLDLALALDAEACVELMVLNPKLVNRFQQTVCRSKTDAADAMVLAEYSQRMPFCRWQRPAASHLALRTVSRYIGSLVVEQAGLKNRLRSAESTATTPRAVRVDLKRTLAAMERRVDRLRAEALKLVESEVELRQRYQLLTTVPGIGAVSALTMLSELILLAPGMTVRQWVASSGLDPVHRQSGTSLNKPSRISRAGNRRLRAALYMSALSASRYDRHLAAFYRALRARHKTGLQALMAVARKTLHAIYGIFKSGTPYDGRRLFPNIQTEVESIAR

SEQ ID NO: 437557 - protein, 326 aa, unidentified
MEHELHYIGIDTAKEKLDVDVLRPDGRHRTKKFANTTKGHDELVSWLKGHKIDHAHICIEATGTYMEPVAECLYDAGYIVSVINPALGKAFAQSEGLRNKTDTVDARMLAEFCRQKRPAAWEAPHPLERALRALVVRHQALTDMHTQELNRTETAREVLRPSIDAHLLWLEAELKRLEKQIKDLTDDDPDMKHRRKLLESIPGIGEKTSAVLLAYIGLKDRFAHARQFAAFAGLTPRRYESGSSVRGASRMSKAGHVSLRRALYMPAMVATSKTEWGRAFRDRLAANGKKGKVILGAMMRKLAQVAYGVLKSGVAFDASRHNPVAA

SEQ ID NO: 437558 - protein, 355 aa, unidentified
MDQKKYIGLDVHQASISVAVRDAAGKLVTESIIETKATTILEFVRGIRGSLWITFEEGTSAAWLYDLLKPHVTRVIVCNPRKNALLNAGSKSDRVDARKLSDLLRAGMLAPVYHGENGVRTLRELGRSYITVTKDLTRVMNRVKAVYRSWAIPCAGAKVYSPRRRHAWLEKLSEPGVRRRGEQLYQQLDALRKIRREVRAELLAESQRHPAHQLLRQIPRLGPVRVALLIGLIQTPHRFRTKRQLWAYCGLALQTRASGEYRFSGGELQAAKKSPALRGLNVNHNHDLKNLFKGAAMHVSISTDPLGDFYRNLLAKGMKPSMARLTLARKMAAIVLTVWKKGARFDPQELKHQAA

SEQ ID NO: 437559 - protein, 354 aa, unidentified
METTVGMDLGDSTHASVVLDDGGEVVRRVAVVSTEESVNKFLDGFPDPQSVTVAIETGTHSPWMSDLLERRGFRVLVGKSRALRAIWDTDVKDDWRDAELLARMARFDPKMLSPIRHRGRSAQADLAMVRSRDSLVRARSSLASSVRGMVKSFGDRIPDCSVEALPSKAEEHIPKDLRPALAPVLSSISSLTVQIRAFDKSIERMCGKKYPETERLAQVAGVGLLTALAFVLVLENPRRFRKSRDVGPYLGLVPGRDRSGQTDKPLPITKAGDTLLRRLMVGSANYILGPFGPDCDLRRYGERIAGSGGKVAKRKAKIAVARKLGVLLHRLWVTGETYEPLRNSNRNKKSAKAA

SEQ ID NO: 437560 - protein, 446 aa, unidentified
MSRKKHTHLRGERGQAFADKMRGIPVEQILCVSLDIHKYFHVVMMHNALGEIVTVPFEIDIFQAGFDRLCQAIDAAVTRTNAQVVLVGMEPTGHYFENLARHLHHDHRSPRPVTLINSFAVSRNRDQQMMHREKDDEIDVAAIGDLLRRGEGTPFRPIDGLYLEMQHLARVRLSKVKMQTALKNQILGHLDRIFPGLVIQGKVARERYEPLFVADFWSCQTLQHLIRVCPDPRQLATLTPHELRNAFHEQAFALGVKTAAEIITYAQKVLLPNPEVIAIRRELLARDLAFLEEVERLIAELEDRLHALLRQTPYWVWTKVRGLSETQVASLAAAVGDPAHYTYAAQVFRRSGLVSGRNDSGTRRHKGKGKRVVKTGDVYLRRALMNAIMSLIRHQPALQDYFNELHRSKHAGVARVATARRAVGILWAMQRDQQSRTLVLKRGAKM

SEQ ID NO: 437561 - protein, 344 aa, unidentified
MKLFIGLDVSLAKTAVCIVSEHGKIVKEAEVGSDPAALTQFALEQQGEIAMIGMEAGPLSQWLHRGLTEAGLEVVLMETRQVKGALKAMPIKTDRRDAEGIARLLHLGWFRPVHCKSVSAQEIRALLGARKSIQQGVIALEMSLRGLLRNFGLKVGAISKGRFDARIQEQVASNTTLVAATEPMLRARATLRHELARLERHVRSLAQDDPTCRLLMTMPAVGAVVALTFKSAVDDPARFSSSKKVGPWVGLPPSRQQSGERDVTGGITKAGDAHLRRALCQAATVMMNRGRGSWLRTWASRVAKRRGTKRAMVALARRIGVILHRMWLDGGNFRWEGAPEPIHA

SEQ ID NO: 437562 - protein, 415 aa, unidentified
MKVVFPTCCGVDVHKTFVVATIITTPADSLQPHYQKKRFSTFNSDLNRFADWLLEHNCLDVCMESTGKYWVPVFNILEKRGIRVVIANPKWVKAVKGNKDDTKDSKWIGDLFRIGLVKSSFIPDLNIRILREFTRYRYKLVSMKSSEKNRFQNAFTVCNVALDSVVSDMFGKSATAITDYLTSDESFDPEHCVSLLQRSLKKKAEQVLESIEGFSIADEQKARIKIIREHHDFIKEMIAKVDTCVNEMVAKYEGKINLLCTIPGIDRRSAITIISEIGTDMSQFGSSKRLCCWAGLTPGNNESAGKKKSVRISRAGVYLKPALVQIAHAAVKDNDHPYYKLKYERIAKRRGKKRAIIAIARMILTAIYSMFCTGEVWNPVDLFKIDMPEHLKEQQLAKAIKQAKRFLEKQGLSVA

SEQ ID NO: 437563 - protein, 355 aa, unidentified
MNSVRYIGMDVHRDTISVAVLDEQGRLMMQSVLATRAAAILDFIHGVRGTLHVTCEEGTHSAWLYDLLVRRVAKLVVCNPRKNALLKSGSKNDAIDAHKLAELLRADMLSAVYHGETSGLEVQHVARSYTMLTEDTTRVMGRLKAVFRGQAVSCAGKKLYGKRQRGDYLAQLGTGGLRRRAECLYRELDVLQQLRRQSRRELIVECRKHAAARWLQSVPFLGPIRAGLLIGRVQTPHRFRTKRQFWAYCGLALETRDSGEYRVVNGQVERKHKPALIRGLNWNHNHEMKNLFKAAATTASIREGVFREFYLGLLAKGMRPEMARLTLARKIAAIALKIWKKGEAFDAEHLKLQAA

SEQ ID NO: 437564 - protein, 356 aa, unidentified
MTMLAEQVDGVIGVDTHRDTLAAAAVSPIGAVLETTDAPAHGRGYQRLLDFALSHVPDRRCWALEGTGSFGAGLAAFLEDAGERVVEVCRPKRPPVRGGRKTDMLDAIRAAREALAAEHVIQPRMRGAREAMRVLLATRQGAVHASTAAINQLKAMIISAPDDLRAELRRLNRPAQITRCASLHDRPALSIEHRMTIRALRSTAQRVRHLQVEARDLENEILQIVRQQAPELLALLGVGPITAAQILVSWSHPGRFRSEAAFASFAGVAPIPASSGLTNKHRLNRGGDRQLNRAMHTITLIRMRLDPTTKAYVARRISEGKSSRDAQRCLKRNVCRQIFKILERRSQNEDELSQAA

SEQ ID NO: 437565 - protein, 407 aa, unidentified
MNQLFVGIDVGSRDNAVYIMLPDGSKYCAFEVQNNLGGAQSISKRVSSALAEKNLSAVAIGIEATGVYGDNLMCFLREDGSLGRFERKLFVLNPKQVNKFKEAYSDLPKNDPVDAFVVADSLRFGRIGSPVYMDDYRYKALQTLTRARFHAVHNLVREKQRFMNYLFMKCSGLAQKKVFSDNYGAAALAVFEEFGTPDDIVNTGIEKLTAFIAQKGKNRSPRPEELAKAVQTAARGSYRLPKTVSDSVNQVLSISISSMRAIQSQIKTLEKEIARQLDNIPNPLISIPGIGPVFSAGIIAEVGDINRFGGQAQLAKYAGLAWTQYQSGMFEAQNTRLIRSGNRFLKYYLVEAANSLVRCDTEFRRFYDLKFNEVNRYQHKRALALTARKLVRLLFRLLKDNRLYRPA

SEQ ID NO: 437566 - protein, 348 aa, unidentified
MRFYTRQHRHYCGVDLHARTMYLCILNAAGEVLLHRNCRATPEAFLHAVAPYRDDLVVAVECTFTWYWLADRCAQEGIAFVLGHALYMKAIHGGKAKNDRLDAHKIASLLRGGMVPRAYVYPPAMRATRDLLRRRTHFRRKRAELLAHIENTASQYNLPAFPKKLTYRTNRRDVATHFADFPSVQHSIAVDLALIDTYDRLLRELEQALLASAHHQDAPTLALLRTVPGIGKILGLTILYEVHTIHRFARVQDFVSYGRLVKCARESAGKRAGTGGAKIGNPHLKWAFSEAAVGFVRNNPRGQAYLQCLRQRYGRGKALTVLAQKLGRAVYYMWTRQAPFDPERFMRT

SEQ ID NO: 437567 - protein, 406 aa, unidentified
MKPTYFLGIDAAKHKMRAALSNRSEHVLFEKDLPVQATGLRQLLAAIKRQVKDPEQLLVLIEATGLLHLNWSAALTKAGYAVAVINPLIARRLYTLQNSIRDNKSDPIDARGLCTIGLLHGEKLLAHYRFSLRPEQFTLQRAQSVRKALRSALTNLKKTYQSLMDLSFPELGGLLQLDGVGIRQLLIQAPTPAAIASKRLSTLEKNWMVRPKAATLKALAADSMADPDLAAASGPALVALLQSVAAMEARLHALDQQIAKLACTSVDPQTKALIETIPGFGPVNAAKTLAWLPTEILHSGSNRKVAARLQAFMGNDPRLRQSGQWKGHTKMSKRGVEMLRTAFFQSAFSAAHNDPELRTYYQCKRAQGKTHEVALSHLMRILTRRLVAVLRSGKPYQSHYNLKNAA

SEQ ID NO: 437568 - protein, 342 aa, unidentified
MQVTTIGLDIAKNVFQVHGIDAAEKVVVRKQLRRSQVLAFFKALPPCLVGMEACATAHYWARELTKLGHRVRLMPAKDVKAYVKRNKNDAADAEAICEAVRRPTMRFVQVKSAEQQGRLMLHRTRDLLMRQRTQVINALRAHLSELGIVAAQGREGIKELLKIIASEQDARLPVDAHTSLVVLAAELAALQTLIGSIEKRIMAQHRSSEASRRLESIPGIGVIGATAIAATVPDPKVFRSGRDFAAWIGLVPREDSTGGKQKLGPISKQGDRYLRRILVVGACAVLRYARQQPEKYPWLTQLLARKPFRVVAVALANKMARIAWALLAKGGTYRAPALAAAA

SEQ ID NO: 437569 - protein, 338 aa, unidentified
MKKKFFIGIDVSKHTIDVAFLEPNHSDKPKWKVFDNTDLGMQFFSEWLKEHAIAFSNSSLIVIENTGIYHRRLLNFCLSHKLPICVENGAQVKWSLGIARGKSDKVDSRRLAVYAMRFADRLKPASALAPGIQKLKDLISVRSRHRIQLSSLKAYLKELKQTSDSKNALHLQKMHEPFIKTAQQLIKKIEADIIKTLQADESTSRQYKLLISVPCIGPITAAYLIACTNSFTNCQSAKQLACYCGVVPFIHQSGISIKGRHHVHKMANKTLKALLHLCALAAIKYVKEFQDYFNRKVLEGKHKMSVINALRNKLVLRAFAVVTNDRPYVDNRFWNLEK

SEQ ID NO: 437570 - protein, 310 aa, unidentified
MGGVNVAIDVGKRQLEVALGSAGERFTEPNEPRALKRLTKRLLDSGCERVLIEGGSYQNLLVAALRAAELPVVIINPRRVREFAKSIGQLAKTDRIDARMLALYGERVEPPRRELPDEQSQALRGLWVRREQLIEMLVMEQNRLEHAPQALHQSLRAHIDYLRKELKHSDDELDLTVRNSPLWDKYEVLSSVPGVGPILSVALLADLPELGRLNRREIAALAGVAPFNRDSGSLHGARAIEGGRGRLRRVLYVATLAATRCNPVLKPFFQRLRAAGKPYKVALVATMRRLLLILNAMLKSKTAWRPPCPA

SEQ ID NO: 437571 - protein, 343 aa, unidentified
MQTITTIGLDIAKSVFQVDGVDAAGRVVIGRQLKRRHVLAFFQRLRPCLIGIEACASSHHWSRELQAVGHTVRLMPPVYVKPYVKRQKNDATDAEAICEAVARANMRFVPTKTPEQQSGLVLHRTRHLFVRQQTSVINVIRAHLAEFGIVAPVGRHGVEELLGIVADPSDKRVPEVARACLAALGAQLRVLKAQILEFDRMITAWHRSSETSRRLDDCPGVGPALATALVATVADPKAFRSGRNFSAWIGLVPKQHSSGGKDRLGSISKQGDRYLRSLFVAGALAGIRYAKIHGTKHRPWLTALLARRPTKVAAIALANKIARMAWAMMAKGERYKQPVALAA

SEQ ID NO: 437572 - protein, 359 aa, unidentified
MVYIGVDLHRKVSQVAAIQANGEVLWNRRIRSRPEEFAEIVGDLPASPVGVAFEATYGWGWFADLLADLGLPAHMSHPKATKAISAARVKNDAVDAETLAQLLRTNLLPEAWIAPPVCREARRLVRTRAALVRLRSRFKCQLLALLAEHGVQLPEVADPFGKEGRRFIQSVALAEQSQFCLTANLRVIDLLTTEVRQLDRELVSFFKTDPRIRRLQAIPGIGFYTAAVVLAEVWDVQRFPRPELLCSWAGLTPTERSSAGHIRRGHISKQGSRLLRWALVEVATAAPRHEAHRRYFLKVLHNDRRRAKIARLALARRLLTLCYYALRDEGGCRAYPVATTATVAGRGRAPAESGLRVRP

SEQ ID NO: 437573 - protein, 365 aa, unidentified
MKKITIAAKPSKKILQQRLTIGLDLGDRNSWYCVLDESGQIQREQRVRTNATALREVFGEMAHSRIALEIGTHSPWISRLLSELGHEVMVANARKVRLIGESRKKDDRLDAQTLARLARIDPQLLYPVQHRSAQAQADLMMIRARAGLVRARTGLVNTARGLAKSYGERLRGCNVRNMNPEKAEGLSPELRAGLEPLLACIESVSEQIGEYNERIEKLAQDSYPQVALLKQVKGVGTLIALTFLLTLEDPHRFRKSRDVGCYLGLQPGRRNSGQSEPQMHISKEGDPYLRTLLVQGAQHILGPFGVDCDLRRWGLKLAERGGRSGKKRAIVATARKLAVLLHHLWVSGEVYEPLHNSNQRAMPAA

SEQ ID NO: 437574 - protein, 364 aa, unidentified
MTGTILAIDLGKFHSVACFYEVADGRHEFKRIETTPRAMHDLLMERKVLRVVIEVSGQAGWVVALCRGMALEVEVVNANGEAWRWRNVKDKSDRQDALKLARMSVMKQLSLVHVPQKEVRQWRSLIQYRHTLVERRVAIRNSIHALLAVQGGEAVIRSWNERMVAELRKESRPLAECGKEELWRGQLGLELDGMEQLGELIEEVEKRLDEMAGEEGEQRAERVKLLRTIPGVGPRLAEMVVAWIDDPKRFGNGRQVGAYAGLTPRRYQSGESDRSGRISKAGNGRLRKLLVQVAWGMLRYNERGREVFERLCKGQKTRRKQAAVALARKILVWCWAMLRDGRAWQEDDRLGGVQGIGALEAVVD

SEQ ID NO: 437575 - protein, 355 aa, unidentified
MRKMQDYVVRGKRVFVGLEDAKRTWRLCVRSEQMIVQELSMPGEAANLLEYLRGRYPECEVTVMYEAGFHGFWLHDELVAAGYRCVVTPPHLVREAKVSKVKTDKGDARRLAQMLESGDYQVCHVPSRERREDRQLSRTLSDVQEDIVRTKNRVRRLLEFHGLDQGLKAGAWNKSDYERVWSLLPTLSKPLRQSLEMYQRGLVSLEVSRQELLAQMKTLQASDRYRRPVALKASCPGVGWLSAIRFTLEWGDMSRFESGKPLAHYLGLTPGEHSSGETKATGHITGQGSPQVRAWLIQCAWRAIRLDPVLSAKFRAVWHHSGSKKKAIVAVAHKLALRLRAIELSGQPYEIGVIQ

SEQ ID NO: 437576 - protein, 347 aa, unidentified
MGHYAGIDVSLECSSVCVVDASGKIVREGKVASEPVTLITWLGSLGVNLERIGLEAGPLSQWLYGALRETGLAVELLETRHVKTALSTMPVKTDRNDARGIAQLMRLGWFRPVHCKSMAAQEVRALLTARKLVQSKLYDIEMSLRGILRGFGLKVGPTTSQSFAARINHLVDGQTSLEVVAAALLSLHAVALREFKSLEKSVRQISRADARVRLLMSTPGVGPLVALTYVAAIDDPARFTSSKSVGAYFGLTPKKYQSGETDVSGRISKMGDGSVRTALYEAAHVILTRPIKGGALKSWAMKLARRAGMMKAKVALARKLAVVMHRMWIDAIKFDTDKASGCVRVAA

SEQ ID NO: 437577 - protein, 321 aa, unidentified
MELWVGIDVSMETLDFGWITTTGKKHFKVANTPDGFREALSKTPQDAKFVMEATGTYYLNLAFYLHERGHFLSVVNPLCTKSHMRTELRRSKSDKTDALALSRFGQEKKPERWVAMRPEVLQMRQLLGVCDTLRDAMGAFGNKIHAMEQCVYSSTYAIGVLEAARDQLEAQLQEAEASLDELANKTMARTIEIIDSIPGIGRETAVRMAVLVGDFQRFSNCRKLVSFCGLSPTIAQSGTSVHSKGAISRMGGHKIRSMLYVCTWSTLRHNEQAKTVWKRMKENGKPGKVIIMALMNKMLRQMYSMVIHDTMYNPNFVAQAA

SEQ ID NO: 437578 - protein, 363 aa, unidentified
MKTILALDLGKFKTVSCLLTEDHSSIPVFKTIMTNPKTFEQFLIDVKPSLLVLEACGVSGWVVDLARKLGVEVLVAHPGGEAWQWGKVKRKTDKDDALKLAQMARNNEIESVHVPSPEHRQFQQLVRYRKKLQSQATATQNAIRSNLMAQGEECAAGKIAWSKSYIENDLGKLRKPFEECTVSEYWRGTLDVQLTHLVATLKLMRCIEKQLALISKPDPRIEIVQSIPGVGIIGSQVIVAHIDDAKRFESARKVSSYAGLAPKKWQSGKMDRQNHISRRGPRLLRSVLTEVAWCAIRFNPYFKDLYDRVRGGSKSRKKQAIIAVARKILVTAWAMLRDGKNWSPRDAKLIAQSAPTLPSTSTA

SEQ ID NO: 437579 - protein, 403 aa, unidentified
MNMNAVGIDVSKGKSMVAILRPYGEIISKPFEVKHTVSGIRSLIEQIQSIDGESRIVMEHTGRYYEPLVRELSKADLFVSAINPKLIKDFGDNSLRKVKSDKADAVKIARYTLDSWTELRQYSLMDEIRNQLKTMNRQFDFYMKHKTAMKNNLISILDQTYPGADTYFDSPAREDGSQKWVDFSATYWHVDCVRKLSLNAFIDHYQKWCKRRKYNFSRSKAVEIHEASKELVSILPKDDLTKLIIKQAVEQLNTASQTVEQLRTMMNEAASKLPEYPVVMAMKGVGKSLGPQLMAEIGDVSRFTHKGALTAFAGVDPGVNESGSYEQKSVPASKRGSSTLRKTLFQVMDVLIKTKPQDDPVYLFMDKKRAQGKPYYVYMTAGANKFLRIYYGRVKEYLSSLPE

SEQ ID NO: 437580 - protein, 347 aa, unidentified
MNFYTTQHKHYCGVDLHARTMYVCIVSQQGVVLLHRDLPCDPQKFLLTIQPFRDDLVVAVECIYSWYWLADLCAKESITFVLGHALYMRIIHGAKAKNDRIDSHKTAVLLRGGLMPRAYAYPADMRATRDVMRRRLHFVRQRGSLLAHIQMTHHQYNLDSPGKRISYRSNRDGLGEGFEDASVRDSIAADLALIDHYEVVIGELELAVLRQARVHDPNAFRLLTTLPGIGRVLGLTILYEIHDISRFPSVQDFASYSRLVKCEKNSAGKSLGTSGAKIGNAHLKWAFSEAAVLFVAKCAQGKTLLTRLERKHGKAKALSILAHKLGRAVYFMLARNQAFDLERFTKS

SEQ ID NO: 437581 - protein, 380 aa, unidentified
MSQCSVRSRESKLVRELKGVQEALVVGIDVHKRSYAVAFVRASSRAVAAGITMPADVKALGRLLGRVREQLHLCVYEAGPTGFGLARALQALGLPVGVVSLGSIPRATGQDNKTDPIDARRLAEYAAGGLLRCIAVPTEKEDEERQLLRHRAKARKDLTKAKNRIKMFLLYNGIKEPKGLGQWSVSAVAELERMTLRGLLREELDMLLSALRFAQSHLASYEALVRRLAKRGDHTEDCRRLREIPGVGLLTAMTVQVELFCPQRFHRPEQVARYAGLCPRLKQSGQTSSTAQLTTNGNRHLRHVLIQSAWRWVRQDATARARYEHLRKRTGCAQKAIVGVARKLVMIMWRMLVDRTRYKPSVAGATPAPAAPARPTPAAT

SEQ ID NO: 437582 - protein, 418 aa, unidentified
MMSEEILAWFVGVDWGSEAHQACILDLQGNIAGERSFPHSGAGLAELSDWLLSIAGAASGVAVAIEVPHGPVVDSLIDRGFVVHAINPKQLDRLRDRFSVAGAKDDRRDAFALADGVRTDRRLFRRLNVADPRIIELRAWSRLAQELTEERVRLSNRVHHELWRYFPQLPKLTDDLAAPWFLELWTLAPTPARARQLRKSMVEQLLKQHRIRRVDAETVIRTLREPAIKVADGVAEALSVHMRSLIARLRVINRELREAQRELDKICSAIGDSEAAASGDCLQRQDVVILKSMPGIGRINLAALLSEGSGPLSRRDYPALRTLCGAAPVTKRSGKSRIVIMRYAAHVRLRQTVYHWARVAAQHDPKSKARYVAFRRRGHSHGRALRGVADRLLGLACVLLQKQTPFDPQYGHPATIVR

SEQ ID NO: 437583 - protein, 340 aa, unidentified
MEAATIGLDISKHVFHIHAVDRQGQVAGRQRLRRGEIVSFFSSLAPCLVGIEACATAHHWAREIRQFGHDVRLIPPAYVKPYLRRGAKNDAADAAAICEAVSRPNMRFVPIKSAENQGFLMLHRARGLLVRQRTMTACAIRAHFAEFGIIVGQGRQRVDGLADLLDNEELTLPAHARIALAVLVSQLKELGRQVEVIERELAEIQRVNPMAKLLSSIPGIGPITATALAATVPDATMFRSGREFAAWLGLTPKQNSTGGKDRLGRITKQGDSYLRHLLVIGARNVVRYPKARSRVGGGWIEALLGRRRPMVVAIAVANKLARIVWAMMTTGEFYRPKLAT

SEQ ID NO: 437584 - protein, 341 aa, unidentified
MEQANTIGLDIAKHVFQLHGADAAGHLLFRKRLSRGKLLSFLAAQTPCIVAMEACAGAHYWAREIGKLGHAVRLIPPTYVKPFVKRQKNDVADAEAICEAAQRPSMRFVPVKSEEQQANGIVFRARDLLVRQRTQCINALRGHLFEYGYIFPQGITHVVALVAFVEDPQSSLPENVRIILRLLVDTFTALEGQIATLDGEITQRSKADPVARRLMTIPGIGPISATAITALVPPAQGFGAGRHFAAWLGLTPLQKSTGGKQRLGAVSKRGERTIRRLLIIGASAVVKQASRRGAPQGSWLARMLARKPKMLVIVALANKTARIVWALLVNGGTYRTATAAA

SEQ ID NO: 437585 - protein, 337 aa, unidentified
MQKSCLGIDVSKLSFDVSLIVVLKGQKQPVVTGKFDNNNIGLESFKVWLDEHNVTFDANSLLVIENTGIYHRLIWNFCSTHLLPIYIGNAADLKWSFGIARGKNDKVDSMRLCDYAYKNYDDIKPTTSLNKVLITLKDLLSNRSKLLKLRNAIKQTLNELKGSNDKTTQALMEKLNKAALEGLQKSIKQIDAELLKIVKQDQLILTNYKRMLSVPGIGKITATFIICCTNNFAIKVTGKQLANYAGVVPFENTSGTSVKGKSRVHFMSNKELKSLLTMGALSAIQAYPEFTDYYERKIKEGKKHLQVLNAVKNKMLLRVASVVNQQKDYVNNYKKAC

SEQ ID NO: 437586 - protein, 393 aa, unidentified
MYLVGIDIGKLKHSFCLLEKETGEILVEPVFFENSRDGFNVLLSSFKHLPQKDILIGMEDTGHYNLALLKFLLDRNYQVALINPIATNLTRKMQGGISKNDKLDTLTICDVLSSSQRVKSYRISKYSSFDLYEQKLLTREHHNLKEEENQLTNRLQKCIDVVFPEFNSLFKSKYGIVYMNILKEFGSADAIAHADIRTIRKCFDTGRGKHISLTAEELKEAARNSIGFPSSSEATQIKHLVARIELIKEQIAEIDKKIEEFSIQNNSPILSIPGISHFSGTSILAELGDIHNYSKPSQIIKFAGVAPLTYESSQFTAQHTAITKKGCKYLRKTLYQIITPVIQYNPVFRKFYLLKIAQGKGHRCAQGHCVRKLMRVIYHLLSTGTQFDPALLR

SEQ ID NO: 437587 - protein, 492 aa, unidentified
MRGNTSEKSQTSKSTHKRNRNSSTPPTSGKWSEMNRRARREVIRKMQSKDLSLEVVHPEAAGIDIGNESHYVAVPPTRDSQPVRRFGCTTAELKMLAEWLKQCGIRTVAMQSTGVYWIAVFDILEEAGLEVYLVNARETKNLPGRKSDVQESQWLMKLHTYGLLRNSFRPSRQIRMLRTYWRQRQDLVRSGGRHIQRMQKVLTQMNIQLANVISDISGTTGQAIIKAILAGERDPHELAAYRNARIEASEQEIAQSLEGNWQDDLLFVLGQEQSGYEFCQKQMAECDRQLAHSLAQLEDRSQGATMPQETRKNRLHRKKGNKPQFDLRAELFRRSGADLTQIDGVDVMTAMTIVSEVGWDMTKWKTENNFVSWLKLCPDNKISGDKVIGKGRMPTNNRATNALRMAASNLRLSGTYLGAQFRRLRSRLGAPVSTKAMAAKLARLIYRMLRYGMRYVDQGAEFYEAQYRKQQVSYLKRKALKLGLQVIEAVAA

SEQ ID NO: 437588 - protein, 423 aa, unidentified
MEVMHERVAGLDVHKETVVACVRIVAGGKVSRECRSFETTTAGLEALLAWLTQSGCTHVAMEATGVYWKPVWNILSDGKFALILANAAHIRNVPGRKTDVNDATWIADLAAFGLIKASFVPEEKIQELRSLMRARKQLVREQTRHIQRIQKTLEEANIKLDSVISDIMGLSGRRMIEAMIAGVRDPRKLAQLADRRIKASPKALYDALHGRLTDHHRFMLRLHLGQYDALASSIAEIDGQVDEAIARIDEEAAPGCGSFRELSALLDAIPGIASLAATSILAEIGTDMSRFPTAGHLVSWAGLCPGQNESAGKRKSSRLRKGAPWLKTLLVQCAWAAARKKDSYYKAQFNRLKSRRGPKQGICAVAASMLTAIYHMLKNGVEHQDLGGGYFDRRPVEQKANRLVAQLANLGFKAELQPLTKAA

SEQ ID NO: 437589 - protein, 310 aa, unidentified
MDKFVGIDIAKDSLDLCIEPGEEVLHLAYDDKGIAQVVKRLAQVAPTLIVMEATGGLEMRLASELAAQGLPVAVINPRQARDFAKATGQLAKTDLVDAAVLASFARAIRPAVRPLKDADTRDLDDLVTRRRQLIDMRVQETLRLGTASKVQRQSVAAHIAWLDKRIGKLDDDLTKRLRASEAWRTKDDLLRGIPGVGTVTTLTMLAKCPELGDLNRREIAALVGVAPRANDSGKHRGKRFVWGGRADVRAVLYMATVSAICCNSDIKAFATRLKQAGKPPKVVIVACMRKLLTIMNAMIKTNAQWHPKTT

SEQ ID NO: 437590 - protein, 423 aa, unidentified
MMRLAYPICCGLDVHKKVIVATIVTTDNAGISTYKQRSFSTINSDLRLFHDWLLENGCKHVCMESTGKYWIPVYNYLETDIEVCLTHPKYVKAIKGQKTDKKDSKWIADLYKFDLVRCSFIPPKDFRQLRELARYRFKLVCMKASEKNRVQNCMTVSNIALANFVSDPFSKTATDILSYLLQHTSDDICDKDIQKLIRKNSKASADEIFAAVKGYTIEADQAKKLELARNHLDYLDEMIKTTEVELYVRIKPYWEYVDIVSTMPGMTQLSSTIALAETGVDMNVFYDAGHLCSWCGLTPRNNESAGKKHSTKIMKAGAYLKPMMVQCALAAIACKKQPYFAIKYRRIKKRRGHKKAIIAIARMMMVCIYHMVKDKKPFTPCDYEELMDPQKHPQKVVLNDANVFEYLKAQGYDTSSLVKCNDN

SEQ ID NO: 437591 - protein, 404 aa, unidentified
MEVINARCCGLDVHKKTVLACVMTPEGRETRTFRTMTKDLLELADWLVECRVTHVAMESSGVFWKPIYNLLEGLDLTLLVVNARHIKAVPGRKTDVKDAQWIADLLRHGLLRSSYIPDRSQRELREVVRYRRNLVRERSRGVMRIQQVLEGANIKLSSVATDVVGVSGRAMLEALARGSEDPQAMAALAKGRMRPKRPELEEALRGMMGSHQRMLIQSQLRHLDFLNQEIVQLDEEVAARMAPFEEAIQVADAIPGVGPRTAQEILAETGPDMNSFPTARHLSSWAHVCPGNNESAGKRKSGATGRGNPWLRSALVEAAQAASKTKGTYLAAQYHRLAARRGHKRAILAVAHTILVTLYSLLRNGTTYRDLGENYFDERNQQATLRRSVHRIERLGYKVTLQAA

SEQ ID NO: 437592 - protein, 325 aa, unidentified
MKYIGIDISKANFVAAFPQERGYRTETFSNDAKGIRKFITKLDPQIHHCVMEATGNYCFLLLYLLDKDGIKASLINPKKIKNYFRVMMSVTKTDAKDACLIADFGERFKPEPYKLPSEQIMILKQKKTVLRQLQKQLTATKNLLSSLDPLPVKDKKCISSLKQTITFIEKQIKYMQQEMEAVVTDVFDKQLKLLTSIKGIGVTLATALIVATGGFTYFDNAKQLSRFIGICPTIEQSGTSVNIRGHINRNGDETLRSMLYVAAWSASQHNTTCKECYQRLRSNGKSGKVAMIAVANKLVRQAFAVVSTNKSYIDGFVSTKPDTAV

SEQ ID NO: 437593 - protein, 398 aa, unidentified
MEVMDAAGRRLSAAKLPEGIAGIARFHAMIAAQLDPDADLDAPAGQVLIGIETDRGPWVQALIAAGYRVYAVNPLQAARYRERLGVSGAKSDPADAHLLADMVRTDSHQLRVVAGDSHLAEAVKVVTRAHKTLIWERTRHTLRLRSTLREYFPAALAAFEDLTDADTLELLAKAPDPVSAARLTTTQIMAALKRARRHHRDRRAGEIQAALRTEQLGQPAVVARAYAVAVRAQVAILGVLNEQINLLQEQVEAHFGRHPDAEIYTSQPGLGQILGARVLAEFGDDPTRYGDTRARKNYAGTSPITRQSGKKKVVLARYVHNDRLLDALGGQAFAALTRSPGARAYYDKQRDRGLGHRAALRQLANRLVGILHGCLKTGTRYDEATAWSHAQQDQQVAA

SEQ ID NO: 437594 - protein, 337 aa, unidentified
MERQYVAVDLHGRRSMIVRENEAADERAVTKIDNDPAALAAAVADAGPNPEVAIEATYGWYWAVDVLEELGATVRLVNPSGLAWDDRRVKNDYLDCRELIDRMRLNKLPEAWIAPPELRELRELVRYRAKLVNLRTGLKAQVKAVLAKHCLHPPVDDLWGVAGPKWLDGLELPDGYHIRVESLRDLVALFDREVAMLERRIHQELREHPGYRAIQALNGVGPVLAAIFVAEIGDVGRFSSPEALCSWAGLTPKHKESDRKARRGKITKKGSRLVRWAAIEAVSKQRGGPKLKIDYHRIAARRGKNIAAAAVARKLLTLVYYGLRDGDIRSLAHAEAA

SEQ ID NO: 437595 - protein, 408 aa, unidentified
MQVLYTRCAGLDVHKDTIVACVRCVSPPMHQEVRSFGSTTTGLLALADWLAEHGCTHVAMEATGVYWKPVWHVLEDEFELVLANAAHIKNVPGRKTDVNDAMWIADLLAHGLIRSSFVPPQAIQQLRDLTRTRKQLVREVSQHSLRIQKVLEDANLKLGSVLSDVLGKSGRAMLDAIVAGQTDPEQLAALAQGTARHKTAELREALRGRISEHHRTMLKLHLQVVDALQRTLAELDTAVGKALAPIRQRARLLTTMPGVSDLTASVVVAEIGVDMSRFPSAGHLISWAGLCPRSDESAGKRRSTRVRKSGTWIKTTLVTAAWAAVRVKTSYLRAQFLRIKARRGAKKAIVAVAASMLTAAYHMLRDGTEYNDLGSEHFDHQDRSKTIRRLLKRLQDLGCDVPVAAYVA

SEQ ID NO: 437596 - protein, 337 aa, unidentified
METMHYIGLDVHKKSISYCIKSHQGRTLDQGSIASTRPALRDWLGQRDMPWLGAMEATMFTGWIYDFLKPHATELKVAHPEMLKAITAAKKKNDRADAEKLADLLRVDLLPECTMMSSELRELRRILRYRNMIVRTAVTMKNKIAGLLMETGVCYDKRRLHGKRYFNTLISQRLDDVPESVIELLQLSRSSLELFTAIQKRLVKVLREHTTIRQRVETLMTIPGVGEILALTWVVEMGEVTRFMSSRQAVSYCGLCSAQRESAGKELRGPLSKKRNKHLQTMLVEAAKLAPRYNLQLQAVHERVLKKGNRNRATLEVARRLVKYLLAVDRRGTPFVP

SEQ ID NO: 437597 - protein, 340 aa, unidentified
MSLYGGIALHANNSVIVLLNEQDEVIYRKRLSNDLPTILGQLAPYHAEMKGLVVESTYNWYWLVDGLMEAEYRVHLANPAAMQQYSGLKYTDDHSDARWLAHLLRLGVLPEGYIYPKAERAVRDLLRKRAHLVRQHTANVLSVQNIRGRNTGARFSVKRIQELTKQELTTLLAEKTQVLAVTSSLVVLDCRRQQIKMLEPSVHKRLHHTPSYEQLLTVQGIGTILAQTITLETGAISRFPSVGNYASYCRCVDSTKISNGKRKGTGNVKNGNPYLAWAYMEAAQFAMRFQPEAQRFYQRKLAKSRNNTVLARKAVAHKLSRACYYIMRDLVPFEATKAFG

SEQ ID NO: 437598 - protein, 409 aa, unidentified
MQVVHEVCCGLDVHKKSVTACVLWASGRRRQAREFGTFTKDLLEMSDWLQSCGVTHVALESTGVYWKPVWNLLEGQFVVLLVNAQHIKAVPGRKTDQKDSEWIADLLQHGLLRASFVPPTPTRELRDLTRYRASLAQEINRIANRIQKVLEDANIKLASVATDTLGASGRAMLEAIVNGEQDSQRLAEMSRGLLRNKIPQLQQALEGRVTPHHRFLLRELLDHLYFVESKMQRIEQEVAERLGPFQSEVARLCTIPGVDRVTAWGLLAEIGMSMKQFPDAQHLASWAGLCPGSHESAGKRKSGKIRKGSLWLRRCLCQGAWAVSTKKNNYLSALYRRLAVRRGSKRATIAVAHKLLVIAYHILRDGTCYSDLGADYFDRLNPEGLRRRLTKRLEGLGFKVTLEPLAQVA

SEQ ID NO: 437599 - protein, 369 aa, unidentified
MSDCITVHVGLDVHKESIEIATAGASGGEVRHVGRVGGDLPALDAALARLRCPTAGLQVVYEAGPCGYAIYRHLTARGIACAVVAPSLTPRRPGERIKTDRRDALKLARLSRAGELRAIRVPEAEDEAIRDLLRARDDSVRTQRDARHRLKALLLRQDVRYTGKTAWTPAHERWLARVHLPTPAQQMVFQEYVDSVHQATVRIGRLDRTINELLPTWSRYPLVRELQALRGVRQLHAAVLVAEVGPFERFDSPRQLMGFLGLTPSEASSGGKRRLGAITKTGNAFARRALVEAAWQYRFPARIGTTIAQRQDGCSETARAIAWKAQVRLCARFRRLSARRMLRTKAVVAIARELSGFVWAIACQYAAHH

SEQ ID NO: 437600 - protein, 433 aa, unidentified
MKKLLALKSIKLIKLGAMQKKDYVEFEQVVERGCGMDVHKETVVVTIRGKGIKTVTKSYSTFTRSLIKLREWLKKHGITHVAMESTGIYWKPVFNVLGDDFEILLVNARHVKNVPGHKTDKRDSRWLAKLLLSGLLKGSFIPKRAFRELRDLTRYKTKLTNQVSADKNRLLKILEDANIKLSVVLSDVFGASGTKMINHILEFEDYRPEELMQYVHGRIKASREDIKEALTGYITDHHRFMMRTMLGNMAKTESTILEIKERLDIALEPYKLERELLETIPGVGYDGAIGIIAEISTEMEHFPDHKHLASWAGMSPGSNESAGKNKSGRITYGNKYLRSLLVECGWAASRTKNTYMSSKYKSLVGRRGKKRAIIAVGHKILIAAYFIIKDKVEFKELGEDHLNNFRRDKLVAYYRKQLERLEFDTELEREVAA

SEQ ID NO: 437601 - protein, 317 aa, unidentified
MAEVTFPQLIQRACGIDVHLKVVVATIDGVGIQRDTRSFKTFASSLNELKEWLLSNGVTHVAMESTGVYWKPVYKVLEDSIPNVWIVNARHIKNVPGHKTDKMDSEWICKLLLAGLLKPSYIPPKEQRQLRDLTRYRNKLIQQIASEKNRMMRILEDCNIKLSGVVSNTSGTTATSLIDMLCEGKVLTLDDIKSVYHGKLSASPEELLEACTGFVEDHHIYLLQMIRKDIDQTQALVDDLSERIKRLLSKYDNVLELLREIPGFSTKVVEDLVSEIGLDMSHFPSEKHLSSWAGLSPGNNESAGKKKAHESLTETNR

SEQ ID NO: 437602 - protein, 400 aa, unidentified
MLSIGIDVSKGKSTVCGMKPGGEIVYAPFEVQHTREGMSELVSLLRSSGEEVRVVLESTGSYHCPVVAALLENGIFVSVVNSLRMKRFCSQSIRKVKTDRIDAMQIALYGLAYWQELQPTKLPEDTYRELQLLARQYYQMTSLLIKAKVDFNAICDQVLPGMQELMNDHAGRHKLSDFVLRYHHTTHILEMGETRFRKDYCKWAEKKGYRNCERMAVLIFATAQNGIPVLPNAPSTQIVITEAIRVLHTVEASRDAILTQMQALAKTLPEYSLVREMPCIGDTLAPRLIAEIGDVRRFHSKRALIAYAGIDAPPYQSGKFCANNRHISKRGNRYLRKTGYEVMQSYVMHKPANDPIFTFIEKKRGEGKSGKLAMVAGLNKFLRVYYGKVTELYRSLPAIE

SEQ ID NO: 437603 - protein, 416 aa, unidentified
MSTEISLPTERYLGIDLHKHSLVIGGVHAKQAIVLPPRRLDLDDWPKWAKTHLTKSDVVVVEATTNAWDFYDVTSPCVQRVVVANAAKIALITKTRVKTDQKDVMVLARLLAAGLIPEVWVPPVEVRELRSLISHRRRVIDTRTSLKNRLQSVLHRHHLVLPSGDPFAAIHRSWWDTLNVSPTERLHLKHDLTTVAQLDSQVAEIEVELQRLSCVAPWSERVTYLIQLPGVGLITAMTVLSAIGDITRFEHAKELVGYAGLGASVHDSGQTHHTGRITKQGRKELRTVLVEAAWSAVEYSAFWKAEFERLGRRLDQMKAIVAIARKLLVVVWHVLTEQAADKHAEVKLLATKLMRWSWELTDAQRGGLSTRQFVRLRLMRLQLGENLTHFTYGGMPRRIASVEEVLALNPELRCVD

SEQ ID NO: 437604 - protein, 339 aa, unidentified
MDGDTGELFQQRLCPDHREVLEWIHGLPAPVAVTYEAGPTGFGLARALIAAGVDCRVAAPSKLQRPTGDRVKTDARDAAHLARLLHLGQIVEVTIPTVSQEAARDLVRAREDCRGDLMGARHRISKLLLRQGIVYCGGQAWTGKHELWLRAQRFDTAGLQLAYDTAFDAMVCCVHRRDRLDEAIVGLAADSEFTPMVRRLGCLRGVSTLTAFGLAVEIGDWGRLTGRSIGAYLGLVPTESSSGATRAQGGLTKTGNTHARRLLIEAAWHHRAPYRPSRDLRRRWDAATAAARARGHAANHRLHTRWVGFDARKKRPVVANAAIARELAGWCWSLAILDG

SEQ ID NO: 437605 - protein, 348 aa, unidentified
MQIAVLGIDLGKNSCSVAGLDATGRIVLRRRMHRDSVIKLASRLPACVMAMEACCGAHHLGRVLQAHGHEVRLMSPEYVQPYVKAQKNDERDAEAIAEAATRPTMRFVELKSEMQLDVQSLHRARSRLVGERTALINQLRAVLFERGVTVAQGRRRLERYLALVLERDEAPTLQLSPRMRLLIDDMRAQWCELDRRIAAFDAEFVAAARSDETTRRLSTIPGIGAINATALVAAVGDARSFAHARDLAAWLGLVPRQATTGGRPRLLGITKRGNKYLRTLLIHGARAALPSLAATEGSLGNWLRGLSARAHRNTVIVALASKLARIAWAVLRSTATYNATLGDQAAAA

SEQ ID NO: 437606 - protein, 370 aa, unidentified
MSQSSTLYVGLDVHKDSIAVAYIAKDHEAHVISYGTIGTRHADIDQLTRKLQSKAKRLVFVYEAGPCGYWLYRYLTKKGYDCWVVAPSLIPKKAGDRVKTDRRDALQLARLMRSGDLTPVYVPKVEDEAIRDLGRAREDALRDLKAAKFRLKAFLLRHDIRYTGQATWHPAHLRWLSAVVCPTPAQQIVFQEYVRAVNEHTERLQRLEQELHEHVQTWRLHPVVEALQALRGVQCTVAVTTVAELGDLTRFDNPRQLMAYLGLTPSESSSGPRRRQGAITKTGNSHARRALVEGAWAYRYPAKVSRHLQLRLEKQPKVIQDISWKAQVRLCKRYRQLLARGKNANQIVVAIARELVGFMWAIASAVPVTP

SEQ ID NO: 437607 - protein, 404 aa, unidentified
MRCITMFYCGIDIAKYKHEASVIDMSGKALSNSITFANDRQGCEKVLAIFEKSEITPDNIVIGMEATGHYWLSVYTFFLELGYTVKVINPIQSEAFRKMYIRQTKNDSKDSYIIAQIMRFGEYSATSLSEENIIALRQLSRYRLALVDACGDCKRRVIALLDQVFPEYDKLFSDTFGKTSSELLLNCPTPEDMLAVSTRKLTNILNKASRGRFGKEKAEELKDAAKNTFGIAFAKDAFSFQIKQLMQQIIFTEKQLSELEEQIANLLHETNQYITTITGIGDVLGAIIVSEIGDINRFERPNQLVAFAGLDVTIKQSGEFSGTKNRISKRGSPYLRRAIWLAAQRAAFCDPILSEYYQSLKARGKHHLTAVGAVARKLCNIIFVILKENRPYFPTPPKKSQNLS

SEQ ID NO: 437608 - protein, 402 aa, unidentified
MQVDDIDVFIGIDVGKSEHWATALTTAGECLHDRPLPNDEARLREVYEHLGEHGRLLVVVDQPATIGALAVAVAQDMGITVGYLPGLSMRRIADLSPGSAKTDRRDAAVIASAARTMPHTLRSITSSDEDAAALSMLTGFDLDLARQVNQVSNRIRGLYTQIHPALEGVLGPWLEHDSVLEVIATWPTPAALRKAGRARIDAKLKANGCRRHAAWAQAIVEALSKQTVTVAGTDAAGVVLPHLARQLIALHTQRADIAAQVEALVEAHPLYPVLTSMPGIGVRTAAVFLAGTLGKTFTTGAHLASYAGLAPVTRRSGSSIRGEHVSHGGNKRLKRAMFLSAFASLRTDPVSRAYYQRKRAQGKRHNQAILALAHRRILTLHAMIRNGTLYNPQPAQPLTTTA

SEQ ID NO: 437609 - protein, 467 aa, unidentified
MKLLYRCCAGLDVHRDTVSACIRRRVRGQAEATIEEQVFGTFTQDLECLRTWLKKNKVRQVAMESTGVYWIPIGNVLERHSRFTLTLANPATVRALQGQKTDRIDARRIAEYLQYGLLRGSFIPPKPIRELRELTRMRVHIQQDRNRVINRIARLLETVNLKLASVASNIAGTSGMAMLRLLASGVRDPERLAQCAQGQMRIKIPALLLALDGRPDAHFRWMLSEFLTQLARLDEQRARVDARIEQLALPDEDRLRRLSTIPGVDRTTALVLLAEFGTDMTQFPTPGHLASWAGLCPGNAESAGKRFSGRTRKGDRYVRRILVQSAWAASRCHDCFLAALFFRTAQRRGMKKAAVAVAHRILIIAWHILAEAGVEYYERGGDHFDRRHPERTARKLTRRLEAIGYKVTLIAPPKPPRPCSKPRVGTPPTPPVHPSVCARCARWGMPRCICLVKRNRTPSPPQSERPL

SEQ ID NO: 437610 - protein, 422 aa, unidentified
MLEETQDTEELIERVAALDIGKAELVCCIRVPGEGKRGRRLQEVRTYTTMTRSLLVLADRLDELGVTRVVMEATSDYWKAPFYLLEAQGFEVWLVNAKDVKHLPGRPKTDRLDAVWLAKVAERQMLRPSFVPPPAIRRLRDVARYRADLVGVRTAEKQRVEKLLEDAHIKLSVVASDIFGVSGRQMLAALIAGERDPKVLAELARGRMRAKRSVLEEAFTGVFTDHHGFLLARMLGRVDGLDADIAELDHKLEELIIPFTAAADRLDEITGVGRTAACAIIAEVGVDMGRFPTPGHLASWARFAPGVKQSAGKTKGKSSTGHGNPYLARVLGEAAAAAGRTDTFLGERYRRIARRRGAKRAIVAVGRSILIIIWHLLADPDARFHDLGAGFYHTRINPERAKRNHIRQLEALGYKVTLQPAA

SEQ ID NO: 437611 - protein, 403 aa, unidentified
MLFVGDDWAEDHHDLYLMNEAGDRLASRRLPEGLAGIRLLHDLIAAHADDPAQVAVGIETDRGLWVEALTGAGYQVYAVNPLAVARYRDRHAVSGAKSDAADAKLLADLVRTDRHNHRLIAGDTPDAEAVKVLARAHQNLIWTRNRHTNALRSALREYYPAALEAFDDLSDRDALAILGHAPDPRQASSLSLAKIRSALKAAGRQRNIDIRAQEIQAALRSEQLAAPAAVTAAFAATTRATVGLVVELSRQIDDLENELAAHFETHPDADIYRSLPGLGVILGARVLGEFGDDPNRYTNAQCRKNYAGTSPLTIASGRKRAVLARHIRNRRLYDAIDQWAFCALTRSPGARQFYDHRRAEGDLHHQALRALGNRLVGILHGCLRHRTRYDEHKAWAHRTPAAA

SEQ ID NO: 437612 - protein, 339 aa, unidentified
MNSMAVGVDIAKQVFQVHYVDRGTGEIVNRQIKRAKFLEHFANRAPCLIGMEACGGAHHWARELTKLGHEVRLMPAEFVKAFNIRNKNDAADARAIWLAVQQPGKPVAVKTEMQQAMLALHRMREQLVKFRTMQVNGLRGLLTEYGEVMSKGRAALDKEIPAALGRIAARLPAALIDTLREQWNGLARLDEQIAEIERRMREWKQEDRAVKAISEIPGVGLLTATAAVAMMGDPKAFRSGREFAAWAGLVPKQTGSGGKVNLHGISRRGDTYLRTLLIHGARSVLMHAKEPGPWVEQMKQRRPMNVVIVALANKMARMIWAVLAHERPYRNDYVSVKPA

SEQ ID NO: 437613 - protein, 382 aa, unidentified
MRGEAFVPLDYDVFAGLDVDKKSISVTFTDHQRLIRSLRMPSKVEHLVGYVRRHFADQKVAFAYEAGPTGYGLYDGLKAQAYPCLVVAPSMIPKAPGRRVKTNRLDSRTLSENLRGGQLNSIHVPAQRYRDLRHLTQLRDTFVSEAKAMKLRIKSLLLFEGIDFPPAPPTSQWSARVKKALRELPCSHTVRFKLDALLDSLESSEKQVLKATREIRRFCKEDEELNQSIQLLMTIPGIGWIVASQLVARIGDWRQIGNVRQMASFIGVVPTESSTGERTKRGSITHAGHSRLRSKLIQASWSAIRKDGELREFFRSVGQRHAREGAKQIAIVAVAHKLASRVAAVLREQRPYVVRKKVLSAPLTQEETRPRERLDAGQNQES

SEQ ID NO: 437614 - protein, 370 aa, unidentified
MAQSTPLYVGLDVHKESIAVAHATGGRADPPVFVGAIGTRQADIDRLIRRLQGKAPELRFVYEAGPSGYGLYRYLTGKGLACDVVAPSLIPRRPGDKVKTDRRDAVALARLSRSGDLTAVYVPTVEDEAIRDLCRARDAARVTLKDAKLRLKAFLLRLGLHYVGRADWNAAHKRYLAKVVCPTPAQQIVFQEGVRAVDEQVDRLQRLEAELEDLAPHWRRYPLVEALQALRGVQWVVALTVVAELGDLTRFDNPRQLAAFVGLVPSEYSSGTVRRQGGITKAGNGRARRVLVEAAWAYRHPAKVSLHIQQRIDQLPKALQDLGWKAQVRLCKRFRRLVARGKHPNVVVTAIARELIAFMWAIARAMPTRA

SEQ ID NO: 437615 - protein, 428 aa, unidentified
MSIQAQCWYAAVDWASEKHDVVVTDYEGKRLGRLQVEHSGEGLARMADWLVATANGTPDAILIAIEVPHGPVVDTLIDRGFSVHSINPKQVDRFRDRFTVAGAKDDSRDCDVMASALRTDRHCFRRLATRDPTLVELREWSRMHEEHGRDRRRYVSRLREQLIRYFPAFLQLEGELDADWKLELLEPAPTPRSATALTKLRVSKILERHRARGRDAGQMLAVLQQKAVTTSPGTTKAAAAHVTALLASIRLAKQLAKEAKDNIERITYQLVDPNSDELESPCDAGKPTSEQSAPLRDAAILLSFPGIGPLNLATLLTEATDGVRDRDYQVLRCQGGVAPVTKQSGKSRYVVRRWACNKRLAHALLHWARVAVQHDPASRAKYRALRARGKSWGRALRGVADRLLYVACAALRSGTLYNPEFASKKSTC

SEQ ID NO: 437616 - protein, 340 aa, unidentified
MEAIAVIGVDLAKSVFQVHGVDAQGQVVMRKRLSRAKLLPFFAKLPPCLVGMETCASANYWARELMGIGHEVRLMPPQYVKPYVKRSKNDVSDAEAICEAVTRPTMRFVGVKSPEQQSVLVLHRTRSILTRQRTQIGNAIRAHLAEFGIVAPVGRQGLDRLIAVIGDEVDRRVPISARSCLAMLVEQHRLVLAHLLDTDRAIRADSRASELGRRLQEIPGVGPLVASALVATVPDPHVFKTGRGLSAWLGLVPRQNSSGGKERLGGITKAGDTYLRKMLFVGAMAVIRHAERHGTRRPWLIKLLARRSPRVAAIALANRIGRTAWALMTSGERYREPGIA

SEQ ID NO: 437617 - protein, 403 aa, unidentified
MKHVIAFDISMGKSYMVIYNAHKQCIFEQELKHSKPAFEELQEKILKLTNETGEPPAIVFEATGIYSRQLERFMQNNQYSYCLLNPLEAKLQCDSLRIHKTDRSDAHRLALTHFTVTRRVSHKTDNVYLQLRSLSRFYSELDGELSILRGRMHKVIQLTFPELEKMFTSKSDLFLNFVQLFPHPDYVVPLSKTVIKNRIRANTNKKISTTLAEKKALQILELAKHSYPAVSQDDVLCDQLKAYAKRYQELLHQKQCCINKMVDMAEKCPEYRIILSIPGIGPNTAVRLMAEIGDMTRFENNKQLNAYAGIDIRRFQSGKTFYKDKINKRGNKHLRKLLYLIIQNMIKIRRYGRNHLVEYYDKLKTQPHNKCHKVASIACVNKLLKLLLHLITHNIHYDYRLTA

SEQ ID NO: 437618 - protein, 333 aa, unidentified
MLYAGIDIHKQVFQAAVLDPETGELRESRFAATREKLDDWAMQWQGRLAAVAIEATTGWRWVARELQQRGLEVHLVDPGRASALQGRRRRPKTDRLDARWLAMVLARQLLSECEAWLPPAEIQRLRDQTRLRKTLAGERTGWAQRLHALLTHEGWPCARGRLLTVEGRRWVDGLALDPCVRAQVDVMLTMITALQQQLELLECELRRFARSDRRCQALQTIFGVGPILACHLLAEIGDARRFSRARQLVRASGLDPIVIESADSKRRGRLAKQGSRHLRWALVEAAQHAHRTTSPDRALYVSAVRRCGRGRARLTVARKIAHRAFHVLAVEAA

SEQ ID NO: 437619 - protein, 420 aa, unidentified
MRNAGIHANSLLEVRRMYNAVGIDVSKGKSTVAVLQPGGTVIRKPFDVSHTSQNLNELADYLSSLDGTTKIVMECTGRYHEPMVKALSEAGLFVSIVNPHLIKNFGNNSLRKVKSDPADARKIARYTLDNWTELRQYSGMDNTRTQLKTLNSQFSFFMKQKVAAKANLIALLDNTYPGVNKLFDSPTREDGSEKWVDYAYSFWHADCVRKIGLKAFTERYKSFCKKHHYIFQQDKPEKLFNASKELVTVFPKEKTYKLLIQQSIQQLNLASEHVERLRREMNELASTLPEYSTVMGIYGVGKTYGPQLIAEIGDVSRFTHREALTAFAGVDPGVDESGQHKSKSNRASKVGSARLRKTLFQIMTTLLQNAPEADPVYRFLDKKRSQGKPYYVYMTAGANKFLRIYYGKVKECLRNLEQTE

SEQ ID NO: 437620 - protein, 392 aa, unidentified
MDIRTTTSSPADRDSEAARIVVAIELSKKSWLVGIVTPLSDKLSLHTLPAGDGAALLAVLARTRRKVETAVGRPAEIVSCYEAGYDGFWLHRLLEGHGVRNHVFDPASLQVNRRARRAKTDRIDVAAMSRALRAHLRGEPRVVSVVRVPSVAEEDARRLHRERDRLIRERVQHVNRIKGLLATQGIYDYQPLRRDRHDRLAALVTGDGRALPARLGAEIARELRRLELVLDMIAALEAERNAIAEGRGAAHPGAAHPGAAKVQALAKLKAIGPEFATVLVGEAFHRTFANRRQVAAYGGLDPSPFNSGGMVRDQGIAKAGNAKLRTTMIELAWMWLRYQPDSALSHWFRERVGTLKGRPRRIAIVALARKLLVALWRYVETGLVPDGAQFKA

SEQ ID NO: 437621 - protein, 314 aa, unidentified
MKAIRTNVAGVDVHKEILAITVLIGKGDENPRVEQIECKTFTEDLIACGIHLKSLGVEDVAMESTGVYWKPVYNAWEPLGLKVVVGNATHMKNVPGRKTDMNDSHWIATLHRFGLIRASFIPSGEFQRMRLLSRHRTNLKDDSTRVKNRVQRVLEDGNVKFGVIASDVFGVSGLAVLKLIEKGEKRPERLIQAVTTKIKRKDEARKALTNTLTNEHCWLVGELMKQFRDIETRIKEVDKELAEKVLPYAHLVEELRKIPGIDKITAVGIIAEATTDMKHFSDERKFAAWAGVAAGNNESAGKKKDRNAGMEIQV

SEQ ID NO: 437622 - protein, 350 aa, unidentified
MKLYTGIDLHSSNSYLGIIDETGKRVFKRKLPNDPAAILETLAPYNNEIVGIVVESTYNWYWLVDLLMAEGYTLHLANPTAIQKYSGLKYSDDQHDAFWLAEMLRLGILPVGYIYPKEDRPIRDLLRKRSHLVKLRTSLVISLQNIINRNIGFKLRGSKIMASTTDHVTPLLEFNEDLALAGKVSKDSIDFLTLQVKALEATVAGKAELREPYAKLLTIQGVGKILGLTIMLETGPISRFDKAGNYASYCRKVSSKWISNDKGKGKGNKKNGNKYLAWAFSEAAELARRFYPEPRAYYNRKMKETNIVIAHAALAHKLARAAYYIMRDQVPFMPEKLFGSYGIVIGWRGR

SEQ ID NO: 437623 - protein, 306 aa, unidentified
MDTETGDLIERRLEHENGEARVFYCSLPAPARVGVESTAYLQWFGRELNKLGHELVVGDAAKIRAMVVRRQKTDSRDANHLLELLMNDRFPQIWVPRVEENDLRQLLWHRQKLVWIRASIKNQLHSLAMSQCVCRRSKLWNAEGRKQLENLTLDRWAGRRRDELLRMLDQLGQSIEQLSIAVEEAGQGREDVRRLLTHPGVGRIVALAFALTIGPVDRFPTSKQLVSYLGLNPSEHSSGGRQKFGAISKQGNRLMRALLVEAAQTAARVEPNLRRALSTFEVSQGQRGCQSGDRSQTGREIILDAP

SEQ ID NO: 437624 - protein, 346 aa, unidentified
MTIVETRAITGGVDTHADVHVAAALDPVGGLLGVREFPASPAGYAGLLGWLGGFGTIALAGIEGTGSYGAGLARHIAAAGVRVVEVDRADRQDRRRQGKSDPLDAVSAARAAQSGRARGAPKGRDGAVEAIRALMVAKRSAAGERTRTINQARALILTGPDDLRARFAQQAPAALVAGIASLRPRPGDVAGHATRVALREPGRRAAFLDGQLERLDELIVPLVSARAPGLLALHGIGPNTAALLLIAAGDHPGRLRSEAAWAHLCAAAPIPASPGKVTGHRLNPGADRQANHALWRIVFTRMGSDAATRAYVERRAKEGKSKAEIIRCLKRYVARQVYPYLRPGAG

SEQ ID NO: 437625 - protein, 415 aa, unidentified
MRSGDKEKERIHIYNKRNICFVGVDMHKEKHCAVVIDCWMEKIGEVNFENRPSKFPAFVEDIRKICGTRDFVFGLEDTRGFGRNLASYLTGRKFEVKHVNPAYTSAVRLSNPIVYKDDSYDAYCVARVLRDMVDTLQDAKHEDVYWAIRQLVKRRDMIVKNNVMNKNQLHSQLSYSYPSYKKLFAQVDGKSALCFWENYPSPEHIWSTTSEKIYETIKPVHQALKIERIHAIIDMIKKDGNTQKGYQEERDSIVRNIVKDIKNNQELIKDIEEQLRKLLPQTGYKLQTMPGIDLITESKIVSEIGDINRFPDSDKLARFMGLAPVHFSSAGKGKDERCRNGNRELNAIFHFLAIQMVAISPSGKPRHPVFREYFEQKVKESKNKPQALICIARRLVRIIYGMMKTKTEYRPYEKS

SEQ ID NO: 437626 - protein, 412 aa, unidentified
MFKIFRRNCCGLDVHKTWIYACIGMTDTNGLTEYKQARFSSFSKGLKELADWLAKYSCNEVCMESSGKYWIPVFNILEKTCFVTLVHPKYTKPQRGNKTDRKDAKWICDLFMCDMIKPSFIPSPEIRQLRDLIRYRTKLTNMLTGEKNRAQNCLTVSNLKLDDVFSDVFGKSSRSITNYMLDHPGETFDVAPFVDGRCKTPIAEIQAAVDGAISPEQAVKLRQCLTHIDELGAHRNVIEQTILLIAEPFSAVLDLLYTLPGLDKNPMTAIAILSEIGPDMSVFPSSKNLVSWAGCCPRNDQSAFKVKSTRISRAGYYLKPLLVQVANALIKSKKHPEFKERYHRIKSHRGHKRAIIAVCKMFLTAIWNMLSKLEPYNPDGFLEHRPVNEKKVLTKSQALELFRLRGYTITDD

SEQ ID NO: 437627 - protein, 347 aa, unidentified
MNANAKVAGLDIAKQVFVGVAQERNGKRVWQRKWKRSEVLQAFRELPPMAVGIEACAGSHYWARELIALGHDVKLIAAQHTRAFVTGNKNDTNDAAAIAEARSRSSTKYVPINTPAQQDLQMLHRARSALMTERVAMINRLRAFACEYGQVFAKGVARFRDGLMAWLADPKNGLSGSALATFRELKEQLDDKERRILAYERRLNQAAKAETAQKLMEIPGVGPITATAVMASVADPHHFRSGRDFAANLGLVPREHSSGGKQRLYGITCKGDSHLRTFLIHGARSALRSAANKPDRQLCWARKVAERRSFNVAAVALANKMARVIWALLAHGRSYVPAWSNSTTRPV

SEQ ID NO: 437628 - protein, 356 aa, unidentified
MSEKLNSEIAVIGIDIGKNSFHLVGQDRRGRIVLRQKWSRGQVEARLANLPPCLIGMEACTGAHHLSRKLQALGHDARLMPAKYVRPYSKGEKNDYRDAEAIAEAVQRPTMKFVATKSADQLDLQALHRVRERLVGQRTGIINQIRAFLLERSIAVRQGLHFLRAELPGILAKRSDVLSPRMLRVIEDLAGDWRRLDERIDALSDEIMTLARQDKGCERLMTVPGIGPIISSAMVAAIGSGDAFSKGRDFGAWLGLVPKQMSTGDRTILGSISKRGNRYLRTLFVQAAWVVLVKIKPEGWERYGLKSWIEAAKQRLHRNVLAIALANKLARIAWAVLHKGRAFECVKTNATAPRPA

SEQ ID NO: 437629 - protein, 374 aa, unidentified
MAAQHIIVSCDLHDKNMLTFIAADHHKPHKRTFANTETSRKKMIAHLKQFAQDEGAEHIVFAYEASSLGFGLYDELAEAGIECYVLAPTKLDRSAHQRKNKTDEKDARKILKELRSYVLCQDDQADFPSVWVPDHQTRADRELVRMRLRVGEDVAKCKTQIHAWLKVHGVAKPPGMNNWTRPHWAWLTGVAKKGQPGLERSAQLALQSYLRQLRALEKEADTLERHMEKLSQTPRYAQPVAELTKFTGVATLSAMVFLTEMGDLRRFANRRQIGAYLGLVPSQNESGETNDRKGHITRQGSPRVRKILCQSVWVRMAYDEATRAQFKQIADQAPYRKKTQVVAHMRKLAIRLWHAGLDAQVAAGSFDGPAPRPR

SEQ ID NO: 437630 - protein, 412 aa, unidentified
MQDILTCAMGLDVHRDIIVACLVKGAVDAEPEAETRTFSTLIPEMQKLRDWVIESECRNIAMESTGIYWQPIYEMLESCFDGEISILVVNARHMKNVPGRKTDMKDAQWIATLLRAGLLKGSFIPDKTFRELRHLTRYRKSVVHDITAQKNRIDKFLQSSGFRFTAFLSDTFGASGRNIIRHLIEHGSIDREALDKCLKTKTRNRIDEILVALNGSLSVHQRRFLNMVFLHLEDLEAHKHTVEDEITEEVLKHTDTLNLLCSIPGIDVTAAAAIIAEIGTDMSSFPDSQHICSWAGLSPGNNESAGKRKSVHINKGNPYLKSMLCEVAWIMASHRKLYLSGWYWKVKQRKGAKRATIALARKILSIIYTMLKTGTPYNEECFEQRRLRCERKRANRLVNELQKLGYVVVAPD

SEQ ID NO: 437631 - protein, 351 aa, unidentified
MMRNHPRDCAVFGVDIGKTVFHVVGLDAAGAVLQKAKFRRDTLLQFFERARPALVAMEACPGSQWLARKIGLLGHEVRIIPAQFVKPYVKSHKNDVIDAEAIAEAATRPTMRFVGVKEAHQVDLQMLHRVRGRLVASRTKLICQMRAYCLEHGVAMRPGAGVFKIDILRVLDDEDNDLTDRARLVLRELHAELIELESRIRTVSTEIKNIADADETARRLMTIPGIGALGATAILAAVGDPRRFKKARDIPAWLGLVPQQHSTGGKQKLLGIAKRGSNYLRTLIVHGARSVFMHLDRSKDRLGVWADQLRGRMHANKVVVALAAKIARIVWVILSTPGATYERRPPKAAIV

SEQ ID NO: 437632 - protein, 348 aa, unidentified
MSKHSVPAGDIAGLLRRFAQLKEKARARTGRDFPIIVIQETGLDGFWIHRMLQSEGIESHVVDAASILISRRGRRAKTDRIDGETLVRTLMAFKRGEPRVCSMARAPTPQEEDRRRVCRERRTLVGERVTHVNRIKGLLFAQGVFGYQPLRKARREQLEELRTGDGRPLPVHLMAQIVRELDRLEVVLEQLKTVEAERNALLKPATGAAASPPAMLLELKGIGPETAAVLWSEGLFRQFDNRRQVAAYAGLAPTPWQSGSIDHEQGVSKAGNPRLRTTMVELAWLWLQNQPASALSLWFHERVRRLGGRMRKTTVVALARKLLIALWRYTTAGVVIEGAVMKAAPATI

SEQ ID NO: 437633 - protein, 408 aa, unidentified
MKSQIIFGIDVSSKSSTVCVVIDRIKQGESFKITNDSFGYQKLYERLNQYLVTPLVVFEATGVYSLSLQAFLEDYHIKYLKLNPLKAKKLMDNNLRHNKTDKVDAYRLALIQFNAPQKLRDPQPREYHELQNASRYYEELIRSTVIAKNQLHRNLQSTFPQIEHILSTPSGRVYWAIVSMFPHAKYVLEKNETQVKQMLDSISGIGRQRAQYLTARLYALAREAYPYDFKDSITVRAIQRNISTLFSLQQERDFTIDYMERLAKSVNARSLSIYLSIPGIAMITAVRLVAELGDLRRFNTSAQIDAFVGIDPGRYQSGEKDSSLGITKHGNHIARKILYRTITQMETARATEPCHITDYYDKKKRSSNSQGYKKIAIASVHKLIRTMFALIKHNQLYDYNVATENKRL

SEQ ID NO: 437634 - protein, 349 aa, unidentified
MERSITIGMDMGDKKHQVCLLDGDGNEIHAETISNTSKDMKRFFSAYTGATVAIEAGTHSGWVSRILEGLGCTVLIGNPRKLKAIWASTNKSDVRDAEMLARIARFDRKLLYPIHHRGEQAQKSLETIKARDMLVRSRSDLINHVRGAVKGMGGRIASCSTESFHYKAEEEMPEGLAAALIPLLKVIEDLTQRIRAFDKAIKELSCREYPETSRLRQVTGVGPVTALAYVLTLEEPDRFAKSRAVGPFLGLTQRRDQSGETDKQLRISRAGNEYLRRLLVGCAHYILGPFGPDCDLRRYGLRIAERGGKNAKRRAIVAVARKLAVLLHRLWISGALYEPLHAVNMKRAA

SEQ ID NO: 437635 - protein, 336 aa, unidentified
MFQLGIDVSKNTLDLCLLREGVKGRVKTRRLKNDVNAASSVITWLGKQQCAPADVHIIMEATGVYHEPLAYGLYKAGAKVSLANPHRSREFARGMDILTKNDQIDAYMLACYGALKEPEPWVPPPESIRYLSALLRRRDALVTDRSREKNRLEKCRATDIPPVIAESIENVLRNLSAEIERLDELLLTHLNQHPELKKDFDLLTSIKSVGFRLGLNMLVILRGHRFDTAGQLAAFLGVVPVEKSSGTSIRGKPKLSKNGPPEIRAKLYLASMCGLRFNPVMKAMYERLCLSGKAKMCATGALMRKLVHLCYGVLKTQKPFDAEHLSSDAPSACKAA

SEQ ID NO: 437636 - protein, 354 aa, unidentified
MKRTTKHVALDVHQATTVASVREESGRVIARSVLPTDAAPILEFFHGMRGTILVAFEEGTQAQWLHDLLAPRVDRVIVCDRRGEARHGNKGDQRDADGLSEQLWRGGLRAVYHGGGAGAELKELTRSYQNLVQDATRVMLRLKALFRARGIRTPGQRVYHPAGRAAWLARLAERGARLRAEALYAELDVLRALRPPAKAAMVAAARRDPAWAVLQSIPFMGPVRGAQLLATMQTPWRFRTKRNLWAYAGLAVVTRSTADYEIVAGQPVRRQRAPLTRGLNRNHNRMLKDVFKGAATAATARPGPLQEWYHGVLARGVPPELATVTLARKLAAITLRLWKKGERYDPAQLTTPAR

SEQ ID NO: 437637 - protein, 446 aa, unidentified
MRSGVGFDADDEVTIVERVAAIDIAKASGTVCVRVPHPSIAGRRSTRVWEIGATTNAIIGLVEELAEARIERVVVESTSDYWRPFVYLLQARGVTTWLVNARDVKQVPGRPKTDKVDAVWLAKLNERGMLRPSFVPPVEIRELRDYTRLRHDLSGERARHKQRMEKLLEDALIKLSTVATDIFGVSGRMMIDALIAGERDPRVLADMAHGRMKVKRNELIDALTGRFDAHHAELAQILLDQVDTLNERIDQLTARIEQLIAKILAAAAAPPTGDGGDGDQANPTRSVVERLDEIAGVGEHTAQVIIAEIGLDMAQFPTPAHLVSWAKLSPRTIQSGPKHRGGKTGKGNPYLRKVLGDAAAGAGKTNTFLGARYRRLVPRRGKLKAVTAISRSILVIAWHLLNDPNTRFHDLGSDYYDTRLNKDRKTRNLVHQLQALGHHVTLTTAA

SEQ ID NO: 437638 - protein, 348 aa, unidentified
MRFYTKQHKYYCGIDLHARSMYICILDQEGKTALHRNRKASPEAFLKAIEPYREDIVVAVECMFVWYWLADLCAKERIPFVLGHALYMKAIHGGKSKNDKIDSKKIATLLRGGNIPVAYVYPRKMRSTRDLLRRRNHLMRKRSELLAHIQNTNSQYNLPEFGKKLAYKANRDGVAEHFPDPSVRKSIEVDLQLLNFYDQLLNDLELYIVKKAKVDDVYSWYRLRSIPGVGKILSLILLYEIHDINRFPTVQDFVSYCRLVKCPRESAGKKFGTKNSKIGNAHLKWAFSEAACLFLRGNEQAQHYHARRVSKYGKGKALSILAHKIGRAAYFMPKRKEPFSMKVFFNET

SEQ ID NO: 437639 - protein, 370 aa, unidentified
MKNNTTVVGMDVHKETVVVAVMGPEETQAQEVATIINTPETIAKVVKRLSNRKPLAFVYEAGPCGYEIQRQITSLGHPCAVIAPSLIPVKSGDRVKTDRRDAQKLAKYYRSGELTEVRVPAEAEESARDLVRAREDALEDRLRARHRLQKFLLRQGRVYRETKGWSVKHRAWILVQRFNHSAMQQTFEAYLRSVEETENRLTVLNQQVDDLSTQEPYQTRVRYLRCLKGIDTLTAMTLLVEIQDFRRFTTASALMGFTGLTPSEHSSGPKVWRGSITKSGNAHVRRVLVESAWCSRNADIVSQTLAERRRGCPSEVIKIARKAQTRLHRTFWRLVNRRKAQPIAAIAVARELTGFVWAISQHFPEPGVTA

SEQ ID NO: 437640 - protein, 319 aa, unidentified
MKMTKATTLTAGIDTAKDKLDIAVHGSPGSLTVANSQAGWNKLAAHLAKEGVGRIGIEATGGYERGVTRHLQAAGFTVVVLQPLQVKAFAMLHLRRAKNDRLDAVLIAACTYLLDAQNKMAPDPRFDALADHLTYIEQIEEDIARCHTRIEHIADKRLRRLVTADTKRMQKRRTDELARLTAELREHADLAKRFDLVMSIPGIGARTALALIVRMPELGQVSREQAASLAGLAPFVHQSGKRQGETHIGGGRSRLRRSLYAAALPAAFRWNAALVALYGRLTAAGKPHKAALVACARKLLIYANTVVQRGTAWQDNPVA

SEQ ID NO: 437641 - protein, 320 aa, unidentified
MERSRFVGIDVSRDCLDLAFRPSGKRAQVSNDRPGITRLIRMLERSKPELVVLEASGGYEVAALERLLAKKIPVALLNPRHVHNFARASGRLAKTDVIDAEVLAHFADVMKPSPTRLTDPETRSLRAFVNRRQQLVQMVTAELHRSRRSLEVVRAGFAVTLRCLKKEIASIDRQMASLIGRISAFRQKAALLRTAPGIGPVAAATLLARLPELGNLDRKKIAALVGVAPFNRDSGRSKGKRMIWGGRADVRAVLYMSTLVAIRLNPVLQEFHDRLRRAGKLPKIAITASMRKLIVMLNAMLKSSSQFVQPGAPLLPAIST

SEQ ID NO: 437642 - protein, 339 aa, unidentified
MKYTPVGVDIAKHLIQVHFINEHSGEVVDKQLRRQDFLVFFSNREPCLIGMEACGGSQHWAHELTKLGHKVRLLQSRFVKAFVMGNKNDMMDARAIWIAVQQPGKEIAVKTEEQQSVLVLHRSRQQLVKFRTAQINALHGTLLEFGETIHKGRAAMDRELPAALERMMTRLPPYLISVLEDQYNRLSELDSLIDGLEKQLISVAWQSDTCKRLMDIPGVGPLIATAAVATMGEASAFKSGREFAAYIGLVPKQTGSGGKVRLLGISKRGDTYLRTLFVHGARAASLVAKEPGLWIEELKKRRPTSVAIVAMANKLARTVWAIAAHDRKYDKNHVSIRPY

SEQ ID NO: 437643 - protein, 323 aa, unidentified
MVVVAGIDVSKATLDVSVSEGPVLSFENSTTGIRKLLRHLERAGVTRAVCESTGGYERPVVGRLRETTIGVDVAHPVRVRAFARACGYEAKTDPLDAQVLSRYGVVFTESDTAQPEADPDREELRQLLGRRRQLVEQRVRERNRLDKGISGSVGKSIRRNVRWLDREIERLDEEYKELLKHSVSLSETAELYQTVPGVGQLTAATLAAYLPELGRWDGRSLTSLVGLAPWSRDSGKKRGSRSIRGGRATVRRALYICALAVLRVDGDLRDFYRRLRDRGKPGKVAVIAVARKLLMQLNAVARRGTPWMKQYESNCPSYQAGSA

SEQ ID NO: 437644 - protein, 428 aa, unidentified
MKNRMKFDHLSTLCVGLDIGSRINFLTALNFDSDRLINMRPVPNASNGVEAMESMILAVLEANPQFRYLLIAMESTSFYGVHVANYLSTTDKLKPYGVKVFCLNPKTIANYRKSFTGLGKNDGIDSFIVADYVRAGRINIEPWRGAQYLALQRLTRQRRHINEAIAREKNYVLNNVFLKFSEFALLSGEESPVSDKFSATAEAILTEYKTTEDIANAPLKELIDFISASGHGRFSDPDQVASLLQKAARNSYRLDKALYEPITTSIACSFNCIRAFEKEQKALDKAIAATVAGLNPTEYQILKSIPGIGPVYAAGILAEIGSVRCFNSNNALAKYSGIIWRDNQSGEFDSEDTPMMKAGNRYLRYYLIQAAGSVVRYCPEYTDYYNKKFAEVPKHQHKRALALTARKLIRLIFGLLDKNQLYSPAKSR

SEQ ID NO: 437645 - protein, 369 aa, unidentified
MLYLAIDQHAKQITVCVRNEEGDTLLRRQVSTRPEKIEAFFQQLTGMDTEFMAILEVCGFNDWLIEKLRKWNCREIVLIHPEKPSKKKTDRRDAHKLADLLWLNRERLAAGQTVHGLRRVYLVTQKEREDRQLTALRKTLGQRRTRTLNKIHRIINRHNLIWDYPTKSFQTQAGRRWLEKLTLPEIDRLEMEMLLEEWKTWDEQIAKVDERIMQRASQVEPGKIVSPTQILMTAPGVSYYSGLTLASRIGPIERFPRPRSLANYFGLTPGCRNSGNVQDRLGSITKEGSKIARFILGQLVLHFLKKDRRMREWYRRIKLRRGSKIARVAVMRRITTVFWHMLTHEEAYSIGGPPPRLRREPKTERSEAA

SEQ ID NO: 437646 - protein, 355 aa, unidentified
MSKRITTASGLTIGLDLGDRFTEGRVLDGSGEVLEVFRVRTTEPALSARLAGFAPSRVVLEVGTHSPWVSRCVVRHGHEAVVANPRRVRLIAENDSKSDGVDAELLARLGRVDPSLLKPIVHRGEQAQRDRILIQARAGFVRARTQLVNQVRGFAKALGTRVPVSSTEAFPKRVRATTSMDLFPGLETLLETIEQLTATIRQMDREVERLCHERYPETELLRQVPGVGAITALYYVLTIEDPSRFAKSRAVGAYVGLRPRQRDSGEQSPQLRITKAGDRLLRCLLVSCAHYILGPFGPDTDLRRAGLRMAERGGQAAKKRAIVAVARRLAVLLHRLWVTGEVYEPLRRSEASQAA

SEQ ID NO: 437647 - protein, 354 aa, unidentified
MKRYGKALEPGEALFIGVDLHKLTWHVTVRTVDVELWSGSIPGRWEALRLLLERYRTCKIQLVYEAGCFGFWLHDLLVEHGVECIITPPSLIPQESGNRVKTDRKDSRKLAQLLAKGLLKRIFVPSRQECYHRQVSRRRRMLIGDRVRVQNRIKAELRFYGINLKEPVGKWTKGYVENLERIRFPDRFMQESYNRLLEQYRFLTGQIEKQTALLNELSKQELYRERVEILTSVPGVGTIAAMELILELQDVSRFRKAEELAAYVGLTPSQYSSADKVRMGRITKVGKHSIRAILVQSAWQLIRKDKAMREKYERIKIHSGGKRAIVAVARTLLLRLRRIWLDATPYRLAMSASN

SEQ ID NO: 437648 - protein, 396 aa, unidentified
MGKNIKELKEKEQSRDKRAGGGLLRKLEIARKKKEKAAESERVEYYIGIDLGDRKSFYCVLDEGGEVLAEGSVPTTASGIEGHFKGLGRSRIALEVGTHSPWVREALEEQGHEVYVANPRKMNGGKKSRRRKNDRLDAEMLARQVRSDPKQLYPIRHRREKSRRGLVLLRARDAMVSARTKLVNCVRGLVKSSGYRLPRCGSEVFHKVSLTELSEELREALTPMLEQIGHLTEKIKGYDKEVKRVSLKEYPETKILMQVKGVGELVALAYVLTMEDPGFFRKSRDTGPYLGLVPRQYDSGDSSPQLRITKTGDRMMRKLLTQSAQYILGPFGEDTDLRRHGKKIAERGGKNGKKRAVIAVARKLAVLLHRLWQTGEEYKPLYNSQATDENELREVA

SEQ ID NO: 437649 - protein, 322 aa, unidentified
MSATTTATKVYAGVDVSKGHLEVFVLPTGERFSVPNDDSGVEELLARLDEPSSPALVVLEATGGFERPVAAALAVSGLAVAVVNPRQARDFARATGKLAKTDRIDAESLARFAEAVCPAPRPILDEEARALGEILARRRQLVGMLTAEKNRLLTATTRRVKKRIEAHIRWLEKELTRANGDLQEAIEESPVWRENEALLRGVPGVGPVLARTLLAELPELGELKNKQLAALVGVAPLNRDSGILRGRRTIWGGRGGVRAALYMGALVATRCNPAVKVFYERLLAAGKPKKVALVACMRKLLVILNAILRNRTPWSPSHALAP

SEQ ID NO: 437650 - protein, 455 aa, unidentified
MPRRRPSTRPVTMPILHPHAGGIDVGATEIYVCVPLDRDPQPIRRFGTFTEDLHALADWLTQCGVTSVAMESTGVYWIPLYQILEVRGLAVCLVNARHVKNVPGRKTDVQDCQWLQYLHSVGLLRASFRPPETVCAVRSLLRHRDTLIQLAATHTQHMQKALNQMNLQLHHVLSDVTGVTGLAILDAILAGERDPQVLARHRDGRIKASRETIAKALVGDYRPEHLFTLRQSLASYRHSQCLIAECDGEVETLLGTFASQIDPAAHPLPPAPAARRQPHRKTPRFDLRAELYRVLGTDLTQVPGLQTPTVHTLFAELGADLSAFPSGQHFASWLGLCPDNRISGGKILSVQTRHVKHRVAQALRLAAQSLSRSQSVLGRFFRRMRAKLGAPKAITATAHKLARIVYHLITTRQPYQESRLAAADAAHRRHSESRLRAQARALGFQLVPVSEQAVS

SEQ ID NO: 437651 - protein, 319 aa, unidentified
MSPTRIYVGIDVGQTRLDVAHGTEGWWVANDDRGIADLVARLEALQPTLVVLEATGGIEMPLVGALAAAEVPVVVVNPRQTRQFAKATGRLAKTDAIDAQVLARFAEGVQPALRPLPDAATQKLSSLVTRRRQVVEMLTAEKNRLRTAAPAVRGHIKEHILWLERSLSDLDSELAQAIHSSDIWRAQDDLLQSAPGVGPVLSTTLLAELPELGRLNRKQIAALVGVAPLNRDSGTLRGRRAIWGGRSQVRATLYMAALVAARHNAVIRAFYDRLIAAGKPKKVALTACMRKLLTILNAMIQHHSPWQTTDLTLDLKDSC

SEQ ID NO: 437652 - protein, 412 aa, unidentified
MKIVHEICCGIDVHAKMLVACLILADGKKEIHSFSTMTADLLRLRDWLVATGCTHVAIESTGVYWKPVFNILEDALTVILINPDHARALRGRKTDVKDAEWLGDLLRHGLLRASFIPPLEIRELRELTRYRQSLVHEQSAVANRIQKVIESANIKLGQVASDALGASGRAILWELTRGETDPVKLASLAKGKLKEKRSELERSLQGRLTPNQRFVLRESLSHWEELERAEGRVTKEIDQYLNDRPKLAQARDNLDSIPGLATRAAENIVAEIGVEMEGNFPSDAHLASWAGMCPGNKATGGKRLSGRTRKGNTYLRSALVQAAWGATMKKNCYLSSQYTRLAKRLGRKKALVAVGHSLLIIIYHVLQSGQSYTELGGDYFDRNHVEHQRDYFIRRLQMLGLKVTIEESSAAA

SEQ ID NO: 437653 - protein, 403 aa, unidentified
MNAVGIDVSKGKSMVSILRPYGEIVCPAHEVRHTSDEIKSLIQEIRSIEGETRIVMEYTGRYHEPIARLLSEASLFVSAVNPKLIKDFGSDSLRKVKTDKADSVKIARYALDAWPKLRQYGAMDELRNQLKTMNRQFAYYMKQKTAMKNNLISLLDQTFPNANDFFDSPARSDGSQKWVDFVYTYWHVDCIRKMSLAAFTDHYQKWCSRKGYNFQPDKPKEIYKAIQNLIPVLPKDEMTKFIIRQAVEQVNTASKTVELLRSRMNEVASKLPEYPAVMAMKGVGPSLGPQLMAEIGDVTRFDHKGALTAFAGVDPGKNESGSYAQKSVRTSKRGSSTLRKTLFQVMDCLIKTMPKDDPVYAFMDKKRSQGKPYYVYMTAGANKFLRVYYGRINEYLSSLEKSE

SEQ ID NO: 437654 - protein, 349 aa, unidentified
MANATANASNGPALFVGVDIAKKEFVWAIHGQPQTCALSNDEAGFQALLHALQGQEVGLVVLEATGGLERALAGFLLRHELAVAVVNPRAAREFARSMGHLAKTDAIDALALAHYAQTLASKADQQGVRFTPPTEQVQQLQARVARRAQLLNMRTAEKNRLSAAIHGLQPSIRAVIKTLEREIAKLDEDIDDLLHQHFKEQAAAFEQIKGVGITTCATLLAFMPELGTVPHGRAAKLAGLAPLNRDSGQSRGRRHVWGGRSIVRCALHMAMLSAVRYNPVIKTFYDRLVAAGKPKKVALTRAPTSCCAYSMPWLEPVPNGMMSGTMSVLDKEHSCSGDRPRYTLDEGWH

SEQ ID NO: 437655 - protein, 322 aa, unidentified
MNKYNETFGVDISKDVFDAHGSKNGHSQFKNDEKGFKAFLKSLPVQALVVMEATGYYHYRLAQFLYKNEVVVSVVNPLSVKRFIQMGLAKVKTDKSDAKAICNYALRNDVPLYTALTDVQSECLQLFRLLDSFIKHRTATKNKIHGEETLGVPSKAVYRSLKRNKKHLDKELAAIEERILSLVKKDQQHQLTLLTSIPGIGVKTALFLIVVTDGFSKFENASQLCSYVGITPVIKESGSSVKGRSKISKVGNKKLRNLLFLCSFNACKHNRACKGIYERLVNKGKSKKLALIAVSNKLLRQAFAIAKSGKPYDDEFVSVLKK

SEQ ID NO: 437656 - protein, 409 aa, unidentified
MRLFVGLDVSSFDMKVCILNGEGEKLNAFTVTNDLPGATLLKERLLHCIGDQEIDVLKIGLESTSVYSFHPSMFLHHDEDLKVFGAKVFVMNPKQIANFKKSYSDMNKTDEIDAFVIADYLRFGRNQMSVVKESQYVALQQLTRSRYQLIRMMTKEKQHFLQHLSYKCNTFSQEVDSSVFGNAMMELFLEKYSLEELAHLPLEELAAFLQEKGKNRFGDPKCVATSIQKAVRSSYRLDKVVEDSMDVILGTSIEVIRTFQKQIKEIDKAIKKLMAGLTHTLESIPGIGPVFAAGIIAEIGQIDRFDDETKVAKYAGLYWRKHQSGRFTAEDTSLSRNGNHYLRYYLVEAANSVRRQVPDYRDYYVKKYSEVPKHQHKRALVLTARKLVRLVDALLRSHQLFTPERGVKI

SEQ ID NO: 437657 - protein, 360 aa, unidentified
MIVQGTSVGLDVHALSVVAHAVDEETGKIARARLCPDHREVLGWLHQLRAPVRVTYEAGPTGFGLARAITEAGMECLVAAPSKLQRPAGDRVKTDARDAAHLARLLRLGEITAVRVPEREIEAVRDLVRAREDARADLMRVRHRLSKLLLRQGIVYSGGTPWTCVHEEWLRRHRFDDIHLKAAFDHSFDAVLAATAARDRLDEQILVVAASPRFADPVNRLGCLRGISALTGLALTVEIGDWSRFSGSSIGAYVGLVPCEYSSGNSRVQGSITKAGNTHVRRLLIESAWHHRKSYSTSGPTLRARWAKVDPALRARGHAGNRRLNKRWRSFTERGKNPLVANVAIAGELAGWCWSLAIMH

SEQ ID NO: 437658 - protein, 364 aa, unidentified
MTKKAYYIGMDVHKTSVQMAVFEETGDDPICERRLDNDTALLVKEAARFSREGKTEVAYEAGCLGYVIQRAMEKVGITCHVLPANKVAKKRTERIKTDKRDARLIGRELRSRTIRPIAVPDETDEAARDLQRCREDASEDLRRMKQRLLKFLVRHGHIYGNETGHWTLKHWQWMDKIEFGNGHEKEVYEEYRSQIRALEERLTRQERRLTEIAESPRYKAAVNKLRAFKGIDYIIALAVVCEIGDFRRFADAKSFMSYLGFVPSENSSGGKRHQGGITKAGNGHLRRLLIEGAWHYTKSARAGKRLEQRRQNSPVSAIEAADRALHRLHKKYIRLLMKGKHKNVAVTAVARELAGFIWAVQVSA

SEQ ID NO: 437659 - protein, 414 aa, unidentified
MRMIHTHIAGLDVHKKTVVAAVIVQQADGSWRQARHSFGTMTVDLLALSDWLMGQGVTHVAMESTAEYWKPVFNILEHNFEVILVNAQHLSKVPGRKTDQGDAEWLAELLQYGLLKASFIPPLGQRELRELTRFRATFVRERATLSNRVQNVLESANIKLAGVASDVLGVSGRAMLEALIEGQASPEQMAELAKGRLRDKRDELVKALEGRMKAHHRFLLTELLCRIDSLEETIARFDQEIADYCRPFEEAIVLLDTIPGVARPTAAAIVAEIGTDTSRFESADHLASWAGVAPGNIESAGKRRSGRTRQGNQPLGAALNQAAHAAARTINTYLAAQYRRLAARRGKKKAIVALMHSILVIAYHMIQRKEPFRDLGGNYFDERKPEATAYRLVKRLEKLGFQVSLVQVAAASVN

SEQ ID NO: 437660 - protein, 478 aa, unidentified
MAAKKKDARTGPDRTTADAAAEHGGEGAEVAEDRVQVVEYAAAIDVAKGSGMVCTRVPGSRPDRRRQTVWRVEATYAAVTALMDHLRCEGIQRLVLESTSDYWRIWFYLAEAAGLEVWLVNAREVKHLPGRGKSDRLDCVWHCKLNERGMLRRSFVPPEPVRDLRALTRTRARLAQDQARHQNRVEKILEDAQLKISVVISDLFGASGRRFLDALVAGERSPKALAALGDPRLKATRQQLEDALTGRFRDIHAFEISTHLRIIDAINEEITRLDGKIEEQLALVPRTAPACVACGLAGGGHAPGCADEQVPLLGLAARLDEITGIGECNARAIIAELGTDPSQFPTPGHAAAWARLTPRTRQSGETARPGRTGKGNRYIRGALGQAAMTAAKTDTRLGAMYRRIARKRGKQKAIVAVSRIICEIAWILICDPAARYHELGPDYYTPRSPARQTRDKIREIERLNPGKKVILADADAAA

SEQ ID NO: 437661 - protein, 340 aa, unidentified
MSLYGGIDLHANNSVTVLLNEQDEMIYRKRLPNALPIILEQLAPYHTEIQGLVVESTYNWYWLVDGLMEAEYRVHLANPAAIQQYSELKYTDDHSDARWLAHLLRLGVLPEGYIYPKAARAVRDLLRKRAHLVRQHTANVLSVQNIMARNTGARFSVKRIQELTKQELTTLLPEETQVLAVTSSVMVLDCLRQQIKTLEQTVHQRLHHTPSYEQLLTVQGIGTILAQTITLETGAIHRFPSVGHYASYCRCVDSTKLSNGKCKGMGNVKNGNPYLAWAYMEAAQFAMRFQPAAQRFYQRKLAKSRNNTILARKAVAHKLSRACYYMMRDLVPYEATKVFG

SEQ ID NO: 437662 - protein, 407 aa, unidentified
MRFVALDVHRDFCEVAIAEDGGVRLAGRVKTAPAALELFAQSLAVDDEVVLEATGNALAIVRIIEPHVARVLLAHPKAVKGLTQAGPKTDKIDACALAKLLAGGFVPEVWAVDEPTRVLRRRIARRAQLVRQRTREKNQVHAILIRNLRERAPSSDLFGVAGRRWLASQELPADEQEMVEACLRQIDFLNEEIERIDKALAELALSSPAMRRLMTLPGISFVTAAALMAAIGDVSRFPTAAQLVSYLGLDPRVRQSGSEPARHGRISKQGPGEARHLLVEAAWHAARTTGPLRAFAERIASRRGSKVAVVAVARKLVVIAWHMLSKDEDYAFARPSLVREKLRRAELLAGAERQQGKRNPVRVFATGAQHRLEKELAAQAEIAYRRLVKDWQPAIKQGAGATPGRAS

SEQ ID NO: 437663 - protein, 343 aa, unidentified
MEINTIAVDLAKNVFQVHGFSGAGERVLVKRVSRSRFEGLMRELPVGGEVVMEACGSGHFWGRFLQGLGYRVRLIPPQHVRAYVVGNKTDGKDADAIYQASRRRDLRAVPVKTVAQQDWLLAHRMRERRKKARVALMNQVRGFLAERGWVCGRGVAALRQLVQDILARPAAGEVTDYFLKQLAVLWEEWRQLDGQMADAERAIAEHFRSTVACQHIAEVEGIGPITASAAVAMVGDARSFRNGRQMAAWIGVTPKEHSSGETRRLGGMTKRGDPYLRTLLVHGARAAVRSALRKDDPRSRWIAALVQRRGHNKAVVAVANKNVRIVWAMLTTGECYRPATATV

SEQ ID NO: 437664 - protein, 410 aa, unidentified
MERMLERCAGLDVHKKTVTACVRVPGTHGDRTQHVRTFDTTTAGLLVLRDWLAAHAVTHVAMESTGVYWRPVYYVLEDAFACILANAAQIAQVPGRKTDVKDCVWIAQLLEHGLIRASFVPPAPIRELRDLTRYRKVLIQERTRHAHRLHKVLEDAGIKLTSVASRLLGVSGRAMLDALVAGTTDPEVLADLARGRLRQKLPALRQALVGRFRSHHAFLVSQLLAHVDDLDEAIQTVGGHIDEVMVPFTDELARRDTIRGINKRTAEVIIAEIGVDMTVFPTAKHLASWAGLCPGNHESAGKHRSGKTRPANRWLRAALIEAAVAASTRAAPGAFAARYRRIMPHRGHKKAIVAVAHAMLVTIYHQLTRQTTYHDPGTDYDDRRHAERLRRRALQTLERQGYRVTLEPAA

SEQ ID NO: 437665 - protein, 342 aa, unidentified
MNQVSTVGLDLAKYIFQLHGADSAGAVVFRKKLRRGQLLAFLATLPPCTVAMEACASAHYWGREIAKLGHTVKLIAPAYVKPFVKRQKNDMADAEAICEAAQRPTMRFVALKSANQQAAAVVFRTRDLLVRQRTQAINALRGHLTEFGVIAAKGPVHTSKLIAALEDPASDLPQAARAILAVLVEELRSLDERVAVLDREIARHAKENAVARRLMTIPGIGAVTAAALTALAPPAHTFRRGRDFAAWLGLTPVQRSSGGKERLGRTSKMGERALRRLLIIGASAVARWAARKGVPAGAWLGRMLARKPPMLVRVALANKMARIVWALLAKGGVYRAPVVAAA

SEQ ID NO: 437666 - protein, 355 aa, unidentified
MNSVRYVGLDVHRDTISVAVLDESGRLIMQSVLATKASAILDFIHGMRSIVHATFEEGTHAAWLYDLLAGKVAKLVVCNPRKNALLKLGSKSDAIDALKLAELLRAGMLSPVYHGERSALEVQQLARSYTMLTEDTTRVMNRLKAVFRGQAVGCAGKKLYAKRHRDGYLTELGTGGLRRRAECLYQEFDALQQLRHVTKRELIVECRKHAATKWLQSVPFLRPVRAAVLIGRVQTPHRFRTKRQFWAYCGLALETRDSGEYRMVNGQVERRKKPVLIRGLNWNHNHAMKGVFKGAATSASICDGVFREFYLGLLNKGMLPEMARLTLARKIAAITLKIWKKGEAFDSEKMKIQAA

SEQ ID NO: 437667 - protein, 354 aa, unidentified
MSQKLNSEIAVIGIDIGKNSFHLVGQDRRGSIVLRQKWSRGQVEARLVNLQPCLIGMEACVGAHHLSRKLQALGHDARLMPAKYVRPYSKGEKNDYRDAEAIAEAVQRPTMKFVATKTADQLDLQALHRVRERLVSQRTGIINQIRAFLLERGIAVRQGLHFLRAELPGILAKRTDVLSPRMLRIIEDLAGDWRRLDERIESLSAEITRVVEQDPACQRLTTVPGIGPIISSAMVAAISTGDAFAKGRDFGAWLGLVPKQMSTGDRTILGSISRRGNRYLRRLFVQAAWVVLVKVGPEQWERYGLKSWIEAAKKRLHHNVLAIALANKLARIAWAVLHKGRAFECVKTNASRPV

SEQ ID NO: 437668 - protein, 359 aa, unidentified
MQTKSKGLDFAGKRIYIGLDVHQKTWTACIFSEQLEFKKVSLPASAAALKGYLEQTFPGASYYSCYEAGFCGFHVHRELEAAGIRNIVVNAADVPATHKEYVQKDDRRDSRKLGRSLRSAGLTGIHIPTRKTQEDRSLVRLRYTVRKDLTRTKLRIKSFLSFYGIAHPAEYSSPSQHWSSRYMEWLRTIPMETAGGRTALQTLVLEAERMRQTLLDVTRAIRTLSKTAAYEKDYRLLSGITGMGLITGMSFLSEIEDINRFSSADRIASYVGLIPSSRSSGEKENNGAITRRAHFLLRDMIVESAWIAARHDPALHLAYCDLSKRMKPNKAIIRIARKLLNRIYFVLKNKKEYVSGTVK

SEQ ID NO: 437669 - protein, 325 aa, unidentified
MGSDEVALSCPSVYLTLMPLWIGIDVAKDTLAVHVLPLDQLLSFPNTAQGHQRLCDHLAGQCVGNALLEATGGYERAVMTALATAGIPVTRINPRRARAFATALGTTAKTDPLDAALLARMAQLVQAPAPVPDPLREQLRMLVQRREQLVQQRDDERRRLHQATLAMVRACLIEQIGDLRRRIQRMNQAIKQVRCQLDDALAHALGTVPGIGEVTTASLMAYLPELGTLDRRQIAALVGLAPYNVDSGQHCGKRRIRGGRATIRRVLYMACWSVVRTQASFKERYQQLRARGKPAKVAITACMRVLLIRLNAMARDRTPWREVIG

SEQ ID NO: 437670 - protein, 348 aa, unidentified
MRCYNQPHQFYCGVDLHARSLYAHVLDAKGQTVLDRDLPASPAAFLDAVQPFRDGLVVGAECMFAWYWLADLCEAERIPFVLGHALYMKMIHGGKAKNDRIDAAKLAGMLRGGLFPMAYVYPKAKRQTRDLLRRRSFFVRQRAQLIAHIVNTNSQFNLPPLSKKLSYAANRSDGIAERFEHPSTQLAIAADLALIEGYDAQIAELERHLVKNAKVDDPVTFGLLRTVPGIGPILGLVLLYEIDAIARFPEVGNFLSYSRLVRCSHESAGKVKGSGGKKIGNAHLKWAFSEAACLMLRSSPRAKAWMQRQEKKRGKRQALSVLEAKLGRAVYHLWRKQVPFDAKRFLAR

SEQ ID NO: 437671 - protein, 455 aa, unidentified
MRIVYQRCCGMDVHKDSVTACVLLIDEYGEWRSEKRKFRTMTRDLREMAAWLASLDVEAIAMEATGVYWKPVWNILEAEKKFHLLLVNAHHIKQVPGRKTDQKDSEWIADLLQHGLLKASFVPPPVIRRLRDLTRMRVKIRQMLATFANRIQKVLEDANIKLGSVASDVLGISGRHMLHAIVEGQHDPKQLAELAQGRLREKLGELQLALEGHITDHHRFQLKFLLEFVQFGEKQLSQLEAEIRCLLAQVEPASVPPEDTVTAELAAPGAGAEAPATAQKSPLQTVVELWDTIPGVDELTATTLVAEMGANMDQFPSAGHAAKWAGICPGNKESAGKRLSGKTPKGSVWLRRALCQAAWSASRTKDTYLAAQYHHLIVRKGKKKTIVAVAHTMLTIAYYIAKRQCPYQELGGGYFDRLNADTMQHRLVKKLKSLGYEVTLTPITPIVPEPIAQSC

SEQ ID NO: 437672 - protein, 404 aa, unidentified
MKGPIVSIDVSKGKSDYQAFKEMNVKYTGSRSIKHTKEGFDEIVSLVREMEKKLETEVCVVYEATGVYHRVLKKVLEDNNIKQFIINPLLSAKTRKNDSLRSPKTDKLDPKSIAKTYYSHSLHNSHKPETIYHELRELSRYYEDILVHLRKDKVAFRAQLDVVFPGYDTLYDDLYGPVALAVIEKYPHPEMLQKKKINTVSKVIQSKTCHRQAMSDTMADKAIEYSKTIYSGCDRDDIEVLILQRFIKKLKEDMAEAERTIGEMIKLAQELPDFSIIKSIPGIGDNLAARIIAEAGDMTRFKKKNELVAFAGLDPRISESGQNDGDHMHITKKGNKRLRCLLYLAVTCFIRLKRDDNSIKDFYIKKKQQSNPMCSKAAKTACASKLVRIIYSMCKTGELYQYNK

SEQ ID NO: 437673 - protein, 317 aa, unidentified
MTQTSTISAGIDVSKAKLDIAVHGLTGCWQVPNKTSGWRQLAIDLNKANVTRVGIEATGGYERGVIQYLRDTGFVVFLLQPAQVRAFARAQLRRAKNDKLDAILIAAFTALADLPERQTDERLAELARDLTFVEQIEEDIARFKTRLEHIDDARQRRIVMADITRLKARRLAEMQRIVRQLRLHDDLANRFKLVLSIPGIGERTALALIIRMPELGRISREEAAALAGLAPFDDDTGTHRGERHIAGGRGRLRRSLCAAALPAAFRWNPALIALYNRLIAGGKAHKLALIACARKLLIYANTIVQRGTPWVEKVPAL

SEQ ID NO: 437674 - protein, 378 aa, unidentified
MNDAKYIGLDVHQATISVAVLDVAGKLVMEAILETKAETTLQFVQGLRGSLHVTLEEGTCAAWLHDLLKPHVAQVLVCDPRKNTLGKVANKNDRNDARELAELLWRGKLKPVYHGEHGVRTLKELARSYLTITRDLTRVMNRLKAIYRSWAIPCAGQQVYAPRHRTEWLAKISEPGVCRRAEFYYQQFDALAALRQAVRRELLHESRKHFAVQLLRQIPSIGPIRAALLVALIQTPYRFRTKRQFWSYIGLALKTYGSGEYRFVGSQLQRSKKFLAIRGLNHNHNHDLKNIFKGAATWAAANSGPFQHFYQACLVRGMKPSMARLTFKKAVPWSSSLPPFARSEGGSRPSVPGATPIAEIPGSRWGGRSGKSPGCPPR

SEQ ID NO: 437675 - protein, 369 aa, unidentified
MGDSTMYVGLDVHKESIEIALASYDRGEARHYGRIAGDLEAVDKVISRLKKTHAKLNFVYEAGPCGYALHRHLTRKGFSCSVVAPSMIPKCSGDRIKTDRRDAIMLARLHRAGELTAVFVPRAEDEAVRDLTRSREDAVANHRRSRQQLGALLLRQNIRYTGKSAWTKAHLRWLSEVTMHQPTQQIVFQEYLNATQETDGRVSRIDEQLRIAVEGWRMAPVVSALQALRGVSLNVAATTVAEIGDMTRFDKPRQLMAFLGLVPSQYSSGPRVRMGHITKTGNGHARRVLVEAAWAHRFPAKIARAHQVRQENLPQAVRDIAWKAQLRLCRRYKRLLGKGKTKNVVVTAIARELVGFMWAIAREVKPIAA

SEQ ID NO: 437676 - protein, 342 aa, unidentified
MTMIGIDPHKATHTAVAVDDNEVVLDEFKLRASTVQAERLREWADGFEKREWAVESANGLGYLVAQQLIAAGETVFDVPPVLASRVRVLGSGRSQKNDANDARSVAIAALRSDRLAQVRPDDHTRVLRILAKRHRDMARLRNKHCCRLHALLLELEPGGIGSEISVNKANQLLTRVKVDSEVTRHRLVIATELVEDIARLDTMLKASKKRTKMAVAASATTLTDIVGIGPICAAIIIGFTGDVTRFPTKGHFATYNATAPIEASSGDRPRHRLNPRGNRKLNHAIHIAAVCQLRYPSEGRTYYDKKNAEGKTSKEALRALKRRISDRVYQHLITDARRSSTT

SEQ ID NO: 437677 - protein, 326 aa, unidentified
MKLKLGVDISKAKFDVALLLDGKKYRSKVFSNTGAGFRALLEWIASNVPGGQANVHVCMEATGVYHESLALFLHEQDIDVSVVNPMLVKRFVESEGARSKTDSADAKALARYADRTQPELWQAPSPAVRKLQALVGRLETLKGMRQAEDNRLEVAHEAVRSSLLEIISQLDASIEEVRAQIRQTINDDLDLKSRRGLLETIPGLGDKTIPQLLAYIGRPERFKSVKALIAHAGLAPMIQQSGSSLNKKRGTHPMGHEALRHALYFPAMVAGKYNPMIARFWQRLKEQNKPGKVIVVACMHKLLAIAYGVLKSGKPFDPARSLATPT

SEQ ID NO: 437678 - protein, 460 aa, unidentified
MKRAEDTSRQAKRYIGLDVHKHYITVGGMNARQELVLRLRNVEMDRFKRWAEENLRPTDEVVLETTTNTWDIYDTVAPRVERVVVANPAEVKQIANARVKTDNQDVIRLLRLLIAGMIPEVWVPPVEVRELRALISYRWRLVKMATAIQNRMHSLLHRHNIQAPKGKIDTGQNREWWEQVQLSGWERLRLNQELKTLRLVREHIEAVEKELGRLSTSERWAKQAVHIMQLPGVGIIVTMTVLSAIGDIQRFPSARKLVGYAGLGAGVEDSGQKHYEKGITKSGRKELRWALVETAWQAIRSNARLRAEYDQLCQRKHPNQAIVAIARKLLVILWCLLNRQESYNPATDEDLAYKMLTWAWHLDKSALRGMNNQQFARYGLIQLGKGQHLTKIVKGGRPRRIAPKEEVLALRPELSLQPSRSLTFVDLCQNSGVQLGRLPGGVAKHCLFSKFSFLWHRKRL

SEQ ID NO: 437679 - protein, 354 aa, unidentified
MMIIGCDYHPAFQQIAFVDTDTGELQERRLQQREEAEKFYRDLAAQGMKVRVGMEASGQARWFERLLAELNFELWIGDAAEIRTRRVRKQKTDRQDAQLILKLMLKDDFPQIWVPSWENRDLRQLLWHRHRMVQARTRIMNQLQAVALNEGLRCKKRLWREAGREQLEAFRLAPWASRRRRDLLELLDRLTPTIAELTQTIEQEAEKCLEAQRLMTHPGVGPLTALAFVLIIGRAERFQCGKQVASYLGLVPLEESSGNRRRLGHITKQGNALLRFLLVEAAQVSARSIPEWRNKYFHLAMRRGRKIAKVAMARRLAVQMFWMWRKGWDYQQVRKFGSHAGQPGTGRGVHSNTE

SEQ ID NO: 437680 - protein, 407 aa, unidentified
MRRVIGMDIHRTFAEVVFWEDGKLRPAGRVSMSRSGLEGFGRSLGKQDEVVIEATGNAMAVVRMLSPYVARVIVANPLQVKAIAHAHVKTDKIDAGVLASLRAADFLPEVWLPDPDTERLRRLVARRNQVVRHRTRIKNEVHAILHAHLILPCPHADLFGRLGRIWLAQQVMPDDECAAIERHLRELDRLSEDLGVLDTQIAQTGSADPAVKRLLTITGVNLIVAAGLVAAIGDVRRFTSPQKLVSYVGLNPRVRQSGLGLAQHGRISKRGRSHARAMLVEAAWAAAKAPGPLRAFFLRIRARRGHQIAAVAVARKLAVLCWHLLTKSADYQWARPALVANKLRAMELQAGQPARKGNTRGTAYAYNVKALRDAEIELARHAEQAYERFVSHWQRRGTAKQRTGAAK

SEQ ID NO: 437681 - protein, 392 aa, unidentified
MVEQVPRVVIGMDPHKRSVTIEVMLADETVVGGGRFDTTVEGYQALLGFVAAWPERVWAIEGCEGIGRHIAHRLLVDGQDIVDVPAKLSARARVFATGQGRKTDATDAHSVALVGTRMAGLRPVVSDEQLEVLQLLVDRRRSIGEEHTRKVSQLHRILLEMLPGGAKKCLSAAQAKVLLAGVRPRDPVGKTRKRVAAELVADLERIYARKKAADKELKTLVAATGTSLLGLHGIGPSGAARLLVEVGDLSRFPDRNHFASWTGTAPIDASSGDHVRHRLSRGGNRQINRVLHIMATVQLRTRTEGRAYFDRKKATGKTSMEAMRCLKRRLSDIVYRAMLGDYTAGKMTGPGGQRGNDSDSSATGSQPHTGTSDKPRPGPAGNKPTTTLSKAS

SEQ ID NO: 437682 - protein, 308 aa, unidentified
MEITVGIDVSKDRLDVFVHPSGERLAVDNEAAGIEVLVARLRAIGADGIGLEGTGGLEKLAVAELAAAGLPVLVLNPAQVRHYAQAEGKRAKTDRIDAAVIARFLAATKPQLRPLADAETVLLGELMARRRQLVGMLVAEKNRHARAAGRIKTSIARIIKALNDELASLDDDLDTAIRSSPAWRHKENLLASVPGVGKIISRTLMAELPELGQLDRRTIAALCGLAPFTRQSGRWRGNSMIAGGRPEPRAALFIGALVAARHNPVFKAFTNRLIEAGKPKRVALIACARKLLTILNAIIRDNKPWQTA

SEQ ID NO: 437683 - protein, 336 aa, unidentified
MLIIGCDYHPSVQQIAVLDQETGEYQELRLEHKNGEAERFYRKLAGRPVRVGVEATGGMRWFERLLGELKLELWVGDPARVRAAAARKPKTDKEDARLLLRLMEENRFPRIWVPTLEQRDARQLVLHRHRLVQTRTRAKNQLQALATNEGIQKRVSTQAGQAELNQAALSPWGRVRRQDWSELLTELNQRIVPLDQALKQQAEQRAEVQLLKTHPGVGPVVAAAYVATLCDPKRFANSKQVAAYLGLVPQENSSGKGRQRLGHITKQGNSLLRGLLVEAAHVAVRYEAEWKRKYTRLAMKKNRSIGNWDSTTSSSRNRTRSPVRMQSSLGSPVGFS

SEQ ID NO: 437684 - protein, 449 aa, unidentified
MSKRNSRPAGLPIVHERAAGIDVGSRFHVVAVPADLCDQPVQSFQAFTGDIQRMADWLTAVGIETVALESTGVYWVPVYEILESRGIEVVLANAREARAVPGRKSDVNDAQWLQRLHACGLLRASFRPGRDIAALRVYLRLRERHLDYAAAHIQHMQKALTFMNLQLQHVVSDITGMTGMKIIRAIVAGERDPRELAKMRDVRCKASTETVRAALVGNYQPEHVFALTQALTLYDFYQARVQECDTQIEGVLRMLAADKPVPSAPLPKARHRTRQPNEISFDVRSTLYQLAGFDLTQIHGLGAYLALRLVAECGTDLSRWPTAKHFTSWLTLAPGCKISGGKVLSAHTRKTTNRVTAHLRLAAVTVGRTNTALGAFYRRLAARIGKAKAVTATARKIAVLFYNALRFGMSYQDPGADSYERKYRERVIKQLHRRAAEFGYTLQEAAGVS

SEQ ID NO: 437685 - protein, 385 aa, unidentified
MTIQAQVSVNSQVFVAREYDVFAGLDVDHHSIAATFTDHQRLMQSLRLPYSARQLLNYVGKHFPGQRLAFVYEAGPTGFGLYDELASAGHTCLVVAPPMVPRAPGQRVKTNRLDSRKLSTALRGGDLKSIHVPSAKYRELRHLVQLRDTHLQQLTATKCRIKALLLYEGIAFPADAGKEKQWSQQVVNELLELPCSESVRFKLDQLVGTLHFNYNSAAAAQKQIRHFCQKDPELRQSVAWLKSLPGIGEIIATHLVARLGDPALITNVRQIAGFLGLVSSEHSTGDKQHRGEITRAGDSRLRNKLIQSAWVAIRKDPELREFYQRVYQRHPHKVAARKAIVAVTRKLTTRIYAVLKEQRPFVVRAVSTAPLTTEETGGHRGRLDG

SEQ ID NO: 437686 - protein, 376 aa, unidentified
MERGSLMLNTTTFVGLDVHARSIKAVALDAMTGEVRSATFGYDAAAVAEWVRSLDPSAKCVYESGVTGFDLQKRLASMGIDCVVGAVSKMIKPPADRKRKNDRNDAEFLARMLSVGNVVEVWVPDDGCEAARDLSRALDDAREDLKRRKQRLSKFLLRHGYVFSETTPTGRRKGNWTAAHWAWIKSISFPEKADNDVLAYYVDAVRQAMEDKARLERLVEAEASKPRWKRRIDSIRCLKGIDATSAADLVFEAGEFSRFKSARSFAAWLGLTPSEHSSGESVRQGGITKAGNKHLRRVLVESAWHYLGCSPRSKDLAKGQVPDPAARRHAAKGVRRLVERRRAMLERGVHKNKANVATARELAGWCWAVGRMIENG

SEQ ID NO: 437687 - protein, 401 aa, unidentified
MVYLERGYNLKELPWSKTVSNSFLFKEACMILVGVDVAKDKHDCYIMTSEGEVLFKSFTIANNMEGFNQLYEKILSVIDNFDNVKIGLEATGHYSYNILGYLLDKGLTPYVINPLHSNLYRKSLSLRKTKTDKVDSRIIASMLMSDVSLKPYSNTLYHNEELKSLTRYRFTKVQERAKLKISISRLVTILFPELEKLVPTLQMNSIYALLYEFPSAHAISKAHLTRLTNLLNTTSKGHYTKDKAVLIREAVKNSIGSNMPAKSLELKHTIKLIKELTSEINEIEEEIKIIMNKINSPILTIPGIGLSTGAQILAEIGDFKNFSSPDKLLAFAGLSPSTYQSGNMYSSNAKMEKRGSKYLRFALFNAAIYVSYWEPTFSQYLKKKRVEGKHYYVAISHVVKN

SEQ ID NO: 437688 - protein, 415 aa, unidentified
MKVVFPTCCGVDVHKTFLVATIITTPADSLQPNYQKKRFSTFNSDLNRFADWLLEHNCLDVCMESTGKYWVPVFNVLEKRGIRVVIANPKWVKAVKGNKDDTKDSKWIGDLFRIGLVKSSFIPDLNIRILREFTRYRYKLVSMKSSEKNRFQNAFTVCNVALDSVVSDMFGKSATAITDYLTSDESFDPEHCVSLLQRSLKKKAEQVLESIEGFSIASEQKARIKIIREHYDFLEKMIAKVDTCVSEMVEKHEGEINLLCTIPGIDRSSAITIISEIGTDMRQFGSSKRLCCWAGLTPGNNESAGKKKSVRISRAGVYLKPALVQVAHAAVKDKASPYYALKYERIAKRRGKKRAIIAIARMILTAVYSMFCTGEVWNPVDLYKVDMPEHLKEQQLAKAIKQATRFLEKQGLSVA

SEQ ID NO: 437689 - protein, 345 aa, unidentified
MELHTIGIDLGKTVFHLVGLNLRGEVVVHKKFSRKQLLHFTANLKVELIGMEACGGAHFLGRALREQGHEVRLMPAQYVKPYVKTNKSDYIDAEAIAEAVGRPKMRFVPIKSDDQLDLQSLHRVRERWVMRRTAVIDQIRGLLLERGITLRKGRCHVDAALPGILEDASAKLSGALRVLLAQLKLELDHLQMRIDEADAVIKKTAGDNEACRRLVAIPGIGPITATAIIAAIGNGAAFKKGREFAAWLGIVPGEYTTGGKQKLLGISKRGNSYLRKLFVHGARAVLQQSAKQSSGLSAWLAQLTARAHHNVVAVALANKLARMAWAVLAKNESYRPPVLVDVAAA

SEQ ID NO: 437690 - protein, 343 aa, unidentified
MQTITTIGLDIAKSIFQVHGIDADGQVVIRRQLKRRYVLAFFAKLPPCLVGIEACASSHHWSRELKALGHTVRLMPPAYVKPYVKRQKNDAADAEAICEAVTRANMRFVVTKTPEQQSCLTLHRTRHLFIRQQTSVINVIRAHLAEFGIVAPVGRKGVEELLDVVANPTDKRVPAIARACLAALGAQLRRLKEQILEFDRMIMAWHRSNEASGRLDAIPGVGPMLATALVASVADPKVFRSGRNFSAWIGLVPKQHSSGGKDRLGSISKQGDRYLRSLFMAGALAVIRYAKIHGTKHRPWLTALLARRPTKVAAIALANKIARMAWAMMARSERYKEPVALAA

SEQ ID NO: 437691 - protein, 359 aa, unidentified
MRTQSNKLNFEGENIYVGIDVHLKSWNVTIYTEYLHHKTFNQPPVPSILRDYLNTNFPGGTYYSAYEAGFCGFNIHFELKKLNINNIVVNPADIPTSQKEHVLKNDSRDSMKIARSLRANELIGIHVPFIETLENRTLIRTRDVMVKDMTRFKQRIKALLYFYGISYPPEFLRSTSHWSRRFLKWLKEEVSLNTANGNDALSLLIREVEQQRVLLLEINRKIHSLAVSEKYVKEIELIRSIPGIGLVTGLTFLSEIEDIERFANTDKLAGFVGMIPTCHSSGEAENYGEMTFRKKTILRRCLIESSWIAVRIDPALTMCFSQLCKRMEPNKAIIRIARKLLNRMYYVLKKRQKYECGVV

SEQ ID NO: 437692 - protein, 356 aa, unidentified
MFHSLRCKTLNTKAMKTKQYFIGIDVSSESFTASVFKLSDKTIHTFDEHLSNSIDGYKTLLELLERKHINKANSVVCLEATGVYGEGLCYFLCSQQYKVALEPPLKVKRSFDESSHKNDKVDSRQIAEYCWRFFDELHIWSPKDEILEQISTFLSVREQFVRQLTANQNVLAGLKRKYIQTPLAINMCKDTIENLKENIKDIDNQIKELIDKDKDYRGMVDKLKSIPGVGLFLAANLLVLTGGFKRTITSKQLASYLGICPLEHRSGKSVNRRPRSKGYGPSLMRKLLYLASLNLRKTQEDTKKYFFRKVAEGKPGKLVINNIANKLLKTICAVIRDKKPYIKNYVSVNPMILKSA

SEQ ID NO: 437693 - protein, 364 aa, unidentified
MIRLLHLIKQGDGSMNEITILGIDLAKNTFQLIGVDKHHKVVMKRRCQRDKLVEIATNLPPCTILMESCGTSNYWGRRFQEIGHTPKLISPQHVTPYVANHKNDYKDTEAIIEVGTRPRTKFVQIKTIEQQDIQSIHRVRERLVNNRICLSNQIRGLLLEYGIVIPQGFSSLKSKMIELLSPECDSVNKEIQEILVDVYDEFKILSERITKYDKKIETISNQQESCKLLKTIPGIGPITATALYASMGNGSQFKNGREMVAQIGLVPKQHSSGDRQILLGITRKGNRDLKQLLIHGARAVVATAGKKEDKRSIWVNKLAAKKHFNVVATALANRTARMAWAVLRSSKPYNANFSYVKTNEGGAC

SEQ ID NO: 437694 - protein, 412 aa, unidentified
MEVVYERCAGLDVHKKSITACVLWALPKGKKKQEKRRFGTFTAELLALADWLGECGVTHVAMESTGVYWKPVWNILEGHFEILLVNAQHIKAVPGRKTDQKDSEWIADLLQHGLLRSSFVPPTPVRELRDLTRYRVALAQECNRIANRIQKVLEDANIKLASVATDSLGASGRAMLDAIIQGESDSAELAEMSKGLLRRKRAELRLALEGRVTEHHRFLLDQFMTHLRFTEDRMDDVEKEIARRMQPYQADVDRLCTIPGVERVTAWGLLAEIGFNMDQFPSAAHLASWAGLCPGNFESAGKRLSGKTRKGSASLRRCLSQAGWAVSTKKDNYLAAFYRRVAARRGAKRAIIAVAHQLLVIAYYLLKRKEEYRELGSNHFDNINADRVRRSLVKRLERLGHVVTLQPAVQSA

SEQ ID NO: 437695 - protein, 341 aa, unidentified
MGRSIGVDLHKNCFTVCYMSKGSQDLSEYKVSPEGITRFKDSLKKTDEVAVESTGNTGYFAREIKAKVKRVAIINPTQFKIISHSIKKTDEHDAITIAKYLSKGLIPEVRMRTEEQARISSLIGTRDKFVKLRTAMKNKVHNILNANGIVTKKEMFSSEKALDKVCQIDLDIEYIFELEIVANQIKSLNKSIDAISKELNDRGKKLKGHKNLTSIKGIGDTNATILLSTIGNIEDFADDKKLAAYLGIVPRVSISNETSHYGRITKMGNKIARTALVQSTLIAIRYNPYLRSFYERLKAKKGSGKAIIATSRKLLTIIYRTLKNDWVFEDFSNYKLAASSG

SEQ ID NO: 437696 - protein, 361 aa, unidentified
MSESMALVGLDVHRAQSVAAVLDPVGGELRVERLRGMPCEVVPGFLEALGRPVRAVYEAGPTGFGLARVAAERGLDVRVIAPGSIPRSPGDRVKTDRRDAKRLVRLFAAGELSFAFVPSEEEERFRDLVRCIDDARKDLMRSRHRLSKFLLRRGLRFPGRAWTQPHQRWLGRLRFDDALSQAVLIDYMSAVDALLHRRRELIAVLVNAVPASAHAETIARLRCFRGIDTLSAAGLCAEVGDFERFAKPSLLSGFLGIVPSEYSSDSKRVQGAITKAGPTHARRLLVEAAHHYRRRPRVGLELAARQAGQDPRVVAVAWRAQRRLYARWTHLGADRGKPTGTVAVACARELAAFCWEAATMN

SEQ ID NO: 437697 - protein, 464 aa, unidentified
MAAGKDLWRNRKERKDWARRLQSEDPGLEVVHPRAAGIDVGNSAHYVAVRPDRDTEPVRRFECFTADLYRMADWLRSNGVKTVAMQSTGVYWIPLYEILEERGFEVYLVNARHTKNLPGRKSDVQESQWLLKLHTYGLLSNSFQPPAEIRMLRTYWRQRGTHVAGAATCIQRMQKALTQMNVQLANVISDISGLTGQAIIRSIVAGERDSQKLAALCHSRIHASREEVAKSLEGNWRPELLFVLQQEVEMYDTYQRRVTECDEQLQKHLANFTDTVSVRALKNKPKTKKAAAKNAPRFDLSSELERITGVDLTRIDGIDVMVSQTILSEVGLDMNRWKTEAHFASWLGLCPDNRISGDKVLGKGTRRVVNRAATALRQAANTLIRSHSYLGAQYRRLRTKLGAPKAITAMAHRLARLVYRMLKYGQTYVDKGTEYYEERLRQQQIQLLRKRAAKLGLHVMETQA

SEQ ID NO: 437698 - protein, 471 aa, unidentified
MGRPPALNLNQRNCMAPRHKGNSSKPKSAHPHLPTLHPHAAGIDLGAREIYVAVPPGSYERPVRSFPTFTEDLHVLRDWLKECGVTTVAMESTGVYWIPLFQILEAAGIEVCLVNARHCKNLPGRKTDVQDCQWLQYLHSVGLLRGSFRPTDQVCAVRTILRHRDALVRGASRCVSHLHKALTQMNVQLHHVISDLTGVTGQAILTALLAGERDPQKLAALKDHRIKASRDVIAKSLQGDWRPEHLFTLKQTHALWQQHQRLIAECDEQIAALLKAFDTRVDVQAAPLPPAKSSHKKAQRNEPQFNAREQCYRVLGVDLTAVPGFQTPTVLVLLCELGPEFAAKFPTAKHFGSWLGLCPDNRITGGKIYSVRTRDVKSRVAEALRLAAQSLHRAENYFGDLYRRWRARLGGPKAITAMAHKLARVLWHLLKYKQPFNPEVFAKEEAKMKRKKLARLQNMAASLNYQLVPQP

SEQ ID NO: 437699 - protein, 417 aa, unidentified
MNSPPETIPIQRYIGIDIHKYYMMIGGQNAHQEWILRPRQVQTVHFRTWAEKNLKEGDAVVVEATGSVWDIYDIVAPLVSKTVVANVHKVRQIAEARVKTDKEDIKRLITLLIADIVPEVWVPPIHVRELRSLISFRWRLTKQITMSKNRLHSVVQRFNLNAPKGGLLTDKNKSWWEKQEFTDLTGFQVDRDLEIVKILEEQKEAIDQKLAELSNTEPWASDIAFLMQIPGFGLIFSMVVLSAIGDVSRFSDPKKLVGYAGLGAGVHASGEKYQEKSITKAGRKELRWALVEAAWVAVRFDPYWKAQFIRLKKRMHVNKAIVAIARRMLVSIWYILTKRESYRHFDEETIAYKMLIWAQAIGKEGRQGLTRQQFAKYGLLRLGIGQDLERIVKGGGPRRIAPTEEVLALKPELAPPR

SEQ ID NO: 437700 - protein, 317 aa, unidentified
MNTINNQNEINVGVDTGKTQLDIYIRPLDIYFTVENNQSGIKHAIKILKKHPVARVTIEATGRLEQPFIIACAEANIPFVIANPVNIKRFAGAIGQKAKTDKLDAQLIAHFGEAIKPPLSSLKPEQMRLMSDLLSRRRQLMDMQTMEKNRSQIMPKTLSSLIKPILTALKNQIEKVDLKLQKLVSECDEYKAKNAIIQSVPGVGNVVAFNLLSDMPELGYVNNKEAASLVGVAPFNRESGVYQGKRMIRGGRPKIRTAMYMAMMSAIQCNSKFKDLYQRMVKAGKPKKVAIIACIRKLVVIINSMVRDGVMWDPKMV

SEQ ID NO: 437701 - protein, 389 aa, unidentified
MLQTNDLSRSFTALNQDNSLIVVIEMGQSSWLVAGMVPGVERQPLKKLEPNEDKLLKLMNRWRHEALQAGHAIERVVVAYEAGRDGFWLARWLRERGVEAYVMHPSSVAVSREHRRAKTDRLDTELLMRAFLGWLRGERRHCSMAAIPTIEEEDAKRPNREHEKLVGDRTRIVNRMKSTLARLGIPGFKPTLRKAEEKLRELRTAEGTLLPENTREELRRDMARLRVVREQIKEIEQQRLRKLEAATPAEKGPHAMIHLIARVIGIGIETADMLVNEILTRHLRDSKAVARYAGLTGSPDESGKRRREKGLARAGNARVRRGMIQLAWRFLRFQKDSVLAQWFRTRAADGRSGTRKTMIVALARKLLVALWRMVKTGEIPEGVILRPAA

SEQ ID NO: 437702 - protein, 373 aa, unidentified
MGWTAPDGIVMCQSEVVDFLKQREPPMEKLIRIGLDTSKSVFQLHGVSASEEAVLRKKLRRREMVAFFSRLDPVRIGIEACGAAHHWARTLEALGHEVVLLPPQYVKPYVKRGKNDAADAEAICEAMSRPSMRFVPVKSAEAQAALMLAGLRERLVRERVRLANAIRGYAAEFGVVAAKGAAKIEPLLERLQADETLPALARELFAEQAAAYADLQTRLQAADARLMAWHRASELSRRLARIPGIGPVTASLLAMKVPDPHAFRSGRQFAAWIGLTPKDHSTAGKTRLGAITRAGDETLRSLLVVGATAVIWQVRRGTGRQPSPWLVALLKRKPPKLAAVALANKIARIAWKLMTTGETYKGRHSPHAMTAAA

SEQ ID NO: 437703 - protein, 461 aa, unidentified
MKKPKRGATSKVDPGSKLSVIRPDVAGIDIGSREMFVCGPADQEGRREMRVFATTTQQIQQCVRWLKQQKVRSVAMESTGVYWIPVLEIMENSGLDVLLVDTRPLSRVPGRKTDVEDCQGLQTLHSHGLLRGAHRPSEQISELRTIVRQKAVLVREQADWIRRMHKCLDQMNVRVHHAVKDTQGVTGMALLRAIVGGERDPRNLAKLRDPGCQKSAAEMIELLTGNWRSDHLFNLRQHMAMYDTAARQIAVYEEEIQRRMQDVTPAARQDIQAPPLANIEKRKTMKKRHQEGKRQALYRMMGVDLTTIDGIGVETVEVIMSEYGTEMSKFPTEGEFVKHVGLAPHRPVSGGKVLKNKPKKQKGTRTAEVLRNAATSLKHSRSALGAYYRRMARRKDSGVAVFATARKLGGLIYRLIRYGQQYVDLGQAAYEKQYEEKRIRALRNTAHQMGYNLIQQEAASA

SEQ ID NO: 437704 - protein, 310 aa, unidentified
METVFVGIDVSQDRLDVHVRPREEAFAVARDGAGLAALVARLREVEPARIAVEATGGFETVVTAALAAAGLPVVVVNPAQVRHFAQAVGQRAKTDPIDAALIARFVEATRPELRPLADEATRLLADLVARRRQIVEMIGAERNRARRAPAGRIQRSIARLIAALEKELASVDGDIDAGVRGSPLWRAKEDLLASVPGIGPVIARTLMAELPELGTLSHKRIASLAGLAPYTRQSGRWKGQSRIGGGRKSVRSALFLAALVAGRHNPVLKAFRDRLVGAGKPKMVAVIAVARKLLTILNAILRDQTPWQSA

SEQ ID NO: 437705 - protein, 346 aa, unidentified
MLNIGLDLHKRETQVCILDETGAVQLERRIPTTRAAFTALLGGQASTRVLVEAGTESEWVAQHLEALGHDVIVADPNYAPMYSTRQRAVKTDRRDARCLAEAGRLGAYRVVHRPSARQRQVRAELAVRDSLVRTRTRYINLLRAQLRQQGLRLPSGSTEQVLPRLARVALPPTLTATVAPLVALLAPLQQELAAADARVAALAASDAAVRHLDQVPGIGPVTAAAFVATLDDVTRFHSAHQVQAYLGLVPRERSSGERQHRGTITKHGNTRVRWLLVEAAWRLRRSRHPAHAALQAWAARIEARRGKRVAVVALARRLAGILYALWRDGSTYGTRGARPGRVVSAA

SEQ ID NO: 437706 - protein, 454 aa, unidentified
MISFRRPTLRITHEVASLSKDMGLPMEATQKDSIMSQSFTCFCGIDIGKRKHVACLLDAQGQPLIKKLAFTNDVEGFARLRQHLQKTAADTAVLVGMEATGHYWYALHDQLRRWGYAQQVLNPLQSAQQIKNAIRKHKSDPSDAGHIAALVRNGEGKPALVPDDLAMTCRLLTRLWYALGKQRTAIKLLIYSRLECVWPEFETYLGDPFGATGRALLRAAPTPEDLVAMNHETLIELLRKASRNHIGATEAATIRASAQTSVGIRRGLEGMRVGIHTLLDQLEATMPVREQLEERIDELCSRLPGYLLTLPGSNPVRAVSLFGETDPISTFKNPEQLVAFAGLDVAVYQTGQFEASRRHISKRGSPYLRHTLWMMACAAVRSKGPLQRHYLKRRKRGLHHLAAVTATSLKLARIAWRICTDQRKTAFIKDGLTTFLRSIQMSKNIFFIQSLDFT

SEQ ID NO: 437707 - protein, 363 aa, unidentified
MNSVYHTELSSLEETRGQFNGGKADIKLGIDVHQDFYVVVMQVGGSNPKPPQRFHKQAFLLWAAKLKSRSAEVHAVYEACGFGFSLQRQLSQLSIHCYVSCPQKLDEHNKRVKTDSLDAKTLCLRLDRFVRGNREALAMVRVPSEEEERSRAIHRQREQLVKVRKILEAQGRSLMVNHGIEPVKNWWKRNNFAALPLPAWIKELLQNSQPILIALQQKISALTLQLQVAAAFNQPRGLGAMTSVMIDREIGDWHRFNNRRQIASYTGLCPGEYSSGHTRLQSCVTKHGKPRLRAALVELAWRLVRFQPNYSAVRKWKERLAKGTLTTGAARKKAIVALARQLAIDLWRIRTGRLSAEALGLEI

SEQ ID NO: 437708 - protein, 365 aa, unidentified
MDPIYIGVDFHARQQTICYLKTETGELVISELKHQDKEQVRAFYEQFQGCVIIGLEASGYSPWFEGLLEQLGCQVWLGDATEIRRRARWRQKSDRRDAELIWDLLTHNEFPRLHQPLPESREILRMLRYRQKLIKVRTMSKNSLQAIALQAGLAKGSRLFSQAGQQEFKAAPMSPVLQWQSEHWFALLKPLNEQLLETMAWFKAQSKDDVSIKRLRTHPGIGLLTSLCLLHTLQPVSRFRNQRKVVAYAGFDPMVRSSAERAIYLGISKAGSRMLRYLLVEAVHTAVRYDEDLKCFYKRVAERRGRPKAKVAAARKLLIRAYIMLRDEIDYAEFRRRAVAARLARGGQRPNVPEVLIGQPAFPEP

SEQ ID NO: 437709 - protein, 356 aa, unidentified
MGLYAGCDLHAKSNFWGIINGEGKRVFKRKLGNDPEGILEALRPFQGDLEGVVVESTFNWYWLVDLLVGQGYRVHLANPGAMQKYSGLKYMDDEDDAFWLAEMLRLGVLPEGYIYPKEERPVRDLLRKRAHLVRLRTSVLLSLKNIVSRNCGMQVRAYILKGRKGVGELLGGNDDLALAGQVSKEVMDYVSRKIEEVEEAILQRVEMQESYRGLLSIPGVGKILALTIMLETGPIGRFAEVGHYVSYCRKVPSRWVSDGKAKGGGNKKNGNKYLAWAFSEAAELARRFHAEPRAYYQRKMAKTNAMVAHSALAHKLARAAYYIMRDGVSFQSEKLFGLQRAGAESLKGGLVKNHET

SEQ ID NO: 437710 - protein, 408 aa, unidentified
MNPLFVGIDVSSRNNVAYLMKPDGSKYSSFSVQNNLGGAKLLSERIVSALGSMQLSDVVIGLEATSIYGDSLVYALREDGRLGQFQRKIHVLNPKQVRKFKEAYPDLPKNDWVDAFVIADHLRFGRIAREVYMDDYRYKALQTLTRARFEVIQNLTREKQRFANYLFLKCSGMAQDKDIANSSSTTIALMERFETVDDLANSDLEELTAFVTETGRGRFADPAATAKAVRAAAKGSYRLPKTVNDTVNQAMSVSIASMRALKEQVKVLDKAIEQQFEIIPNTLTSIPGIGKVYSAGIIAEIGDIHRFGSQASVAKFSGLVWHKNQSGEFEAEHSRMIKSGNRYLRYYLLEAANSVRRCDSEFRRYYDFKFKEVNKYQHKRALALTARKLVRLVFRLLKDNRLYIPPES

SEQ ID NO: 437711 - protein, 458 aa, unidentified
MNNFYLGCDVSKGYADFIIINEDKQIVLDSFQLDDTALGHQQLCSILGMFSGEHSGSVIYSAVESTGGYENNWYTSLWNLQSKMCIYVARVNPLGTNHNSKASMSRIITDKNAAKNIAEYLINHKKKIIFNKDDKFSSLRKQWTFVRMLTKQRTQLYNQLESILYIANPEMLIYCKHGYPNWLLTVILNYPTAKRLSKARVATLSSIPYLNEQKAISLINKARVSVAASDDDVTANLIISLVKQIIELSKTIDRQSKFIADNCKLPEIEILKSFPGIGDYSAIGLLLNICSTEYYQSTKNLASYFGIHPIWKQSGDGTWGMHMSKQGKKEVRNILYMVAKTAIVHNELIREIYARHLKKGMNKTAAIGVCMHKILRIVFGMLKHNEKFNPEKDSANSQKMLKDNKQVKAVTNKLRRYQKLDLAAPISRRQTKKRKEQEKSQNEITSFSTGSIPHSFSD

SEQ ID NO: 437712 - protein, 354 aa, unidentified
MRFYNYQHQFYAGIDLHARKMYICIIDTDGKKIYHKNMDANPFQLKQALEPYKTDVIVGVECVFTWYWIADCCEDNGIPFVLGHALYMKAIHGGKTKNDKIDSFKIASMLRGGMFPIAYVYPRKMRATRDLLRRRQYFIHHQSALLAHIQNTNTQYNYPVFEKNIARASNRINITNRFINYFAQKSIETDMNLLDSYHRILLDIEADIKKHAVHHDPISYHLLRTVHGIGPILSLVILYEINDIDRFPEVGNFISYARLVKCSHESAGKRVKGGHNKIGNAHLKWAFSEAAVLFLRNNEPAKRLQQRLTSRYGKGKAISLIAQKLGRTVYFMLKRKEPFEAKRFFKDSVHEPVA

SEQ ID NO: 437713 - protein, 326 aa, unidentified
MQGKEASEQETKTECNVGIDVSKDWLDVHVLPAGAALRVPNTCEGIRRLKRWLTRFDLALVLVEATGKWHRPLRRSLDGGAIPVAVVDPFRVRMFAKAQGILAKTDRLDARVLAQFAAVMAPPVRAPEPQMLEELRELVVARASAVEQQTALKNQRSAATVKFLQRQLDRRIERGDQDIAALDAVILKRINADDGLARRYAILTSIAGIGFVAAATLLASLPELGSSTVKQIAMLAGLAPIADQSGKREGVRVVWGGRANVRRILYLAALTATRFNTDMKALYQRMTAAGKPPKLAIIAVARKLAVLANTLIIQDRIWLPEAPKHA

SEQ ID NO: 437714 - protein, 367 aa, unidentified
MREKLRFLGLDVHAETIAVAVAEPDGEVRSLGTIANREDSIRKLIKKLGSPEQLRACYEAGPTGFVLYWQLAQLGVECAVVAPSLVPKKPGDRVKTDRRDALKLARSHRSGDLTAVWVPDENSEALRDLVRQREAAKQDQLRAKHRLTKFLLRTGRRPPQGMKAWTARYMEWLQQVRYTLPAQEATLVDCLNEVEHMSARVKRLEEAILEVVKLAPASVQEVIRGLQALRGIAHISAVTIAAELGNITSRFESARKLMGYSGAFPSEDSSGNRIRKGAITKTGNAHLRRIIVESAWSYAVANPPCSLANKRRFNPARIFPDYSSSLQKRKSLQQSATPRSLLASEGKRHSVKLIGHHAQHRSFDGIV

SEQ ID NO: 437715 - protein, 353 aa, unidentified
MNNIIAFDSHKHYTFARVENENGQNPQEFRIEHRRGSIAGFLSSQQPGSPVAIETIGNWYWIVDEIEQAGMEPHLVHARKAKMMFGCINKTDKLDAKGLNVLQRAGTLPTVWIPPGDVRDKRELPRTRMVFGGQRTRLKNRIHSVLDKYGLQDAFEDISDIFGRKGMKVMVSVLGQLPSHTRYTTELLLEQLDQIEQKVKAIEARMNKLFKETGQHRLLKTMPGIGFILAVVILQEIGDIGRFGSAERFASYSGVTPRVHASGGKVRYGRLRPDTNHYLKWAFSEAGNSVALNRNRFPDRHVSGLYNRIRGRKGHAKAIGAVARHLAEATYWILTKNEVYRDRGVLKVSPTGA

SEQ ID NO: 437716 - protein, 472 aa, unidentified
MKSKSSRKRNPVDPVAEEIPDAEHELVIERVAAIDVAKASGKVCVRLPGKTGRRFSRVWDVPARTGAVSELAEQLIESGVEKVTVESTSDYWRIWYYLLEAAGLDVQLVNARDVKNVPGRPKTDKLDAVWLAKLTEKGLLRPSFVPPAEIRQLRDYTRLRVDLTRERTRYWQRLEKLLEDALIKISAVASTLDTLSTRDMIEALIAGERDPGRLADLARGKMKAKRSELIAALDGRFDDHHRELARMLLDQIDTLTAQIATLTSRIEQLLAAMPDTRSRGDGGTGGDPDRPSTGHGVEPETAARFTDATLLTPVERLDEITGIGELNAQVVLAEVGLDMTRFPTPAHLVSWAKLCPRTIQSGPVTRGGKTGRGNPYLKGALGEAAAAAARTDTFLGERYRRIVKRRGKLKALVAVARAILVVIWHLLANPEARFRDLGPDYHTQRIHTERKLRNHIAQLTAMGYRVTLEPAA

SEQ ID NO: 437717 - protein, 337 aa, unidentified
MLFCGIDLHSNNSVVVILDESDKVIYSRKHPNNFDEICGALLPYQSQLAGVVVESTFNWYWLVDGLQAQGFQVHLANTAAIKQYDGLKHRGDESDARHLAHVFRLGLLPTGHIMPKEQRAVRDLARKRMQLVQQRSTHILSIETQMDQQRGAHLSSNLIKKLSCNDIDAMGLEAMASLAMKANVSLMQSTDQQIDLIEKALASHCRHHPGFPLLKSVAGIGDVLATVILLETGSIERFKDVGNYVSYCRCVGSIHTSNGKKKGEGNTKNGNRFLAWAYVEAANFAIRYSEAAKKFYQRKKAKRNGIVAIKAVAHKLARACFHMLKTGEVFSVERCFT

SEQ ID NO: 437718 - protein, 424 aa, unidentified
MYGGVAGISQGSNEFQEGGFSLVRYHVGVDVGKHRHHVSIRNLSQDDYCKAFSFTNDRDGFIKLIAVLEKLSSERTDFLIGVEACSYALNLSYFLMAMRFTLVEVNPFRAGQFRKAQGKKAKTDKIDARTIAAILPLGDHKSLSIPDPILDNLKELTRFRVDLVDEKSTVIIHLREALSVLFPEYEKVFRQLDSAGSLALLAAYPGPEHMIGAGEETVGKTLSLASPRRMSRGMARRIIEAAKRTVGVVQRQPSLGIKISILAKRIADLQATIRDLDRQITTLFNSLPCKPLGFPVGRAPSLATIISEIGDIHRYPTLKKFLSHLGWCPQSFQTGNYCLKHPKMSHAGNKYVRRIIWMLSIFAVQFVPRYREYFQRRVNEGKTKMHIIVAVGRKLLSALYAMLKNGVAYDANWEENSRLALARR

SEQ ID NO: 437719 - protein, 343 aa, unidentified
MQAVTTIGLDIAKSVFQIHGVDAAGNVIVRRQLKRRYVLPFFQRLPPCLIGIEACASSHHWSRELKALGHTVRLMPPAYVKPYVKRQKNDAADAEAICEAVTRANMRFVETKTPEQQSCLMLHRTRHLLIRQQTAVINAIRAHLAEYGIVAAVGRNGVEELLGVVADPSDKRVPEIARACLAALGAQLRMLKAQILEFDRMITVWHRSNETSKRLDAIPGVGPALATALVASVPDPKAFRSGRNFSAWIGLVPKQHSSGGKDKLGSISKQGDRYLRSLFTAGALAVIRYAKIHGTKHRPWLTALLARRPAKVAAIALANKIARMAWAMMAKGERYKEPVALAV

SEQ ID NO: 437720 - protein, 420 aa, unidentified
MKVVYQTCCGIDVHKSFLVATIIKTTSGVQPSYQKKRFSTFNNSILEFKKWLLDNSCRDVCMESTGKYWVPVFNLLEDEINVTIANPKWVKAIKGNKDDTKDSKWIGDLFRLGLVPGSYIPCKPIRILREFTRYRYKLTSCRSSEKNRFQNALTVCNVALDSVVSDIFGKSATSVIDYLLEQSDNSINHEEISSRLLRSLKKKSESVIESIEGYQMTDAQKYRMRLVHAHMDYITSTISDIDSMIDSLVKPYENAVQLLCTIPGVDRNSAITIISEIGTDMTQFSNSKRLCCWAGLTPGNHESAGKKKSVRITRAGVYLKPALVQVAHAAVKSNRSPYYKVKYERIMKRRGKKRAIIAVARMILTAVSHMLSTGEAWNPTDLYKIDMPEPLKNKQKEKAVKQAMKLLIAEGLIKESQLAS

SEQ ID NO: 437721 - protein, 443 aa, unidentified
MDDGRAEVVELQTRLEHVEQVAAIDIAKASAMVCTRLPHGSSPGRRVQRTWPVKATTAAIVELADRLVADHVELVVMEATGVYYKPFFFLLEAAGLRCQLVNAREVKNVPGRPKTDKLDAIWLAKLAERGMLRACFVPPRPQRELRDLTRMRKVLTEERSRYRTRIQDILEDACIKISDKTQGASDLFGVSGRAMLAALAAGERDPKTLAQLARGTMRRKIPALEQALTGRFNDHHARQISRLLRLHDNLTTEIDQLTAEIETKIAELDPTPPPDDDHPDRMSLLDRLDEIPGLGREAAATILGEIGFDMTAFPTEGHLASWAKLTPRTIQSGAKNTHGPAGKGNRWLKGTLGNAAVNAARTKTFLGARYRRIIKHAPKKKAVVAVSRNILEICWHLISDPDARYIDLGPDWHNRHVNTARKTRQAIHELEQLGFTVTLTPAA

SEQ ID NO: 437722 - protein, 335 aa, unidentified
MNYSHFIGLDISKTKIDVALFDKEKITIDLIFKNNPKDLKKAFIKLFKSEHLDTKSTIICAEYTGMYIYSIIQVCQELGIKLWLENPAQIKLCTGVHRGKSDKIDARRIALYSYRYQDKASFYVQKTENIQELEFIIAERELLIVDKQKYSTQLKDQKGHVNDSFYKNKASRLNKILKTLNALIKEIETKIDEIIKSDLKLAHQYKLITSVSGAGKQVAINTIVATQGFTKFDNPRKFACHAGVAPFNYSSGSSIRSKWKVSHRANKKLKKLFHMAALSAIQAPGELRDYYIRKVESGKNKMTVINAIRAKIIHRIFAVIKNNNPYEKNYINSLA

SEQ ID NO: 437723 - protein, 343 aa, unidentified
MQAITTIGLDIAKSVFQVHGIDAAGNVILRRQLKRRYVLTFFQNLQPCLVGIEACASSHYWSRELAALGHTVRLMPAAYVKPYVKRHKNDAADAEAICEAVTRSNMRFVATKTTEQQSCLMLHRTRHLLIRQQTAVINAIRAHLAEFGIVASVGRKGVEQLLAVVGNSNDKRLPDVARACVAALGTQLRMLKAQILEFDRLIIAWHRSNDASRRLDDIPGVGPALATALVASVADPKAFRSGRNFSAWIGLVPKQHSSGGREKLGNISKQGDRYLRSLFTTGALAVIRYAKIHGTRHRPWLAALLARRPTKVAAIALANKIARMAWAMMAKGERYKEPIALAA

SEQ ID NO: 437724 - protein, 443 aa, unidentified
MKKDGFKVVNPNAAGIDIASQMHYVAVPSDRDDQPVRKFGSFTEDLHEIAKWLKQCKIDTVAMESTGIYWIQLFLILEEYGFDVYLVNARHIKNVSGRKSDVLDCQWILQLHTYGLLNASFQPENMTRELRSYMRHRKNLTQSYASQIQLMQKAFEQMNIKLHNVLTDITGKTGQSIIKSILAGEKNPSKLAELTDIHVKTPKEEIVKSLQGNWRDEHLFELKQSYELYLIFKEKINECDSQIQNVLHKIQESSKLPNAAPPKQRGVYSKNRFNFNATNYLINILGTDVTKIFGISELLATEIISETGIDMTKWPSKKHFTSWLNLVPNNRVSGGKLLKPRKVKKKNKAGQAFLMAAYALQRSNHWLGDFYRRLKARNGPIVATKATARKLALIFYDMVKQKLEFNPIPIETYNRQFKERKLKYIKSQAFKLGLNLVPAESVS

SEQ ID NO: 437725 - protein, 397 aa, unidentified
MYIVGIDIAKRKHEAAVIDGEGTVIIKPFSFTNNCSGYNRLLAMLAKAKLPLDEVSFAMEATGHYWLALFTRLQKEGFRVQVINPVQTNSIRSFYIRQAKTDPRDALLIAEVIRFGHFSESTLHPENIYELRELCRGRHAIVSMQADVKRKVVALLDQVFPEYETAFTNLFGDTSMAILQTCPTPKELSEMPLEELCHLIEVSSHKRFRMAKARELQELARNSFGFAMAGDVFSMMIRLYAKHLVFLKQQVQEMDRKIAEIMDTLDTPITTITGIGPALGAYILSEIGDISRFSSAAKLAAYAGIDPTMRQSGEYNGVRNRMSKRGSPYLRHAIWLAASSAVLHDPALKLYFQKKRDEGKPYMASVGHACRKMVSIIYAVMRDNKAYTPYIPNEISA

SEQ ID NO: 437726 - protein, 431 aa, unidentified
MNYNQNHKIAQITPKTLVIGIDIAKHHHVARAQDYRGMELGSTCSFDNTQEGVRTFINWINQIKDSYEMESVITGMEPTGHYWLNLAHILKEEQIKFVTVNPLHVKHSKELDDNSPTKNDVKDAKVIAQLVKDGRYSEPTIPQGVFAELRVAKKLRDLLNVDLQIVQGQVHNWIDRYFPEFFTVFKSWEGKAALHLLKLEALPEELVRYTEEELLEYLRQAVKRSIGIKKIRALKEAANRSIGIRQGAMMAKMELKTLIQKYELIQNKFEELDQTLDTLLQDIPGVDQMLEITGIGRDTVAFFFAEVGDLSEYNHPRQITKLAGLSLKENTSGKHKGRTRITKRGRKKLRALLFRASMILVAKNKAFKALHHYYTTRPENPLKKMQSLIALCNKIIRILFSIGKKQFVFQEEKMLKDIPHMHAFIQEPIAA

SEQ ID NO: 437727 - protein, 339 aa, unidentified
MGNVTTIGIDLAKNVFQLHGVDREGKTVLQKRVSRLKFLEVMRELPKCLVGIEACGGSNYWARQLKTMGHNIKIMSPQRVKPYIGSTKNDYKDAEGICEAVGRPKMLFVPIKGVEQQDIQSIHRIRTRLIESRTALVNQIRGLLSEYGIVLAQGISHIRNGLVKIAEDGSNELTSSTREVMLDLYDELMMLDGKIKRYDTKLENIFKSNEDCQRIAKIEGIGVISATAAIATIGDARVFKNGRQMAAWLGLTPKQYSSGEKQKLLGISKRGDSYLRYLLVHGARSVIKVCGKKQDGKSSWINDKILRRGKNKAAVALANKNARTIWALLAKQESYRKAV

SEQ ID NO: 437728 - protein, 346 aa, unidentified
MLYAGLDLSRKRLDFHLLDSEGATVEVGAAPPDADGLLGLTRRLDRHREPIRAAIESMNGARFVHDRLELAGWQVEIADAQKVKGLAPLACKTDRIDAWVLAELTRRDLVPAIWLPDPMVRAERERARWRLHLVRHRSSLKQRVHAVLLTHGKPCPVSDLFGVRGRQLLARLGLPDPWQATIEASLRLIDELEREITDSERELRRLGADHRYVPLLLTVPGIGWVLAYTIAAEIGDIGRFPSPRKLAGYTGLCPRVYQSGERDLRGPLAKQGPKYLRWALVEAATHACTAAVYRDRYQQTKARIGKQRGAKVAQIDLARRLSEAIWHMLSRDQPFAPKGATDPLAA

SEQ ID NO: 437729 - protein, 431 aa, unidentified
MNQPLDPDPTNDYAAFIAIDWADQQHVWSLQVAGQTKKETGTLEQKPELIGPWVAKLRDRFGGRPIAVAVEQSRGGLIHALQSYDFLVLYPLHPLTVAKFREAFKASGAKSDPLDTDQILQILTKHLDLLRPLNPDTVQTRLLGRLSQDRRKTVDLRTSHIEGLCAALKEYFPQAIAAVGANLASRLAGDFLQKWPTLEAFQQAKPSTLKRFLYGHNVRSPKRIEGVLELARMAQPLTTDPAIVESGRRLAQMHAQTIQTLNPIIADYDHRIEQVFNQHPEVKLFNQLPGAGPAMAPRLLAFFGTDRARYAKANNVQSFCGVAPVTRSSGNTRAVFMRRACPKFARQTFHEFARLSIATSQWARNYVDYYKGKGKKFHAIIRALAFKWIRILFQCWQKRTPYNEELYLAALKKRGSIFATLHLKTASPNSL

SEQ ID NO: 437730 - protein, 363 aa, unidentified
MSVHNTFVGLDVHARSVKAFALEFGTGQVWRNSYGNDPGEVLNWCLTLPGPVLAGYEAGPTGYNLFRVFNQVGMDMVVVAPSKLLPQPGSRVKTDARDAQHLAELLMARLFTPVVVPSVEQEAGRDLFRCREDIQQQFKAATARLGHWLLRRGVVELPATEWNKTRLEALAKLKFTGQSTDQGVFEAYLGDVSALRLRRVDLDTQIKVAALGQPWRPVVEALCCLRGIDTLSGFGLAVEIGDWSRLTAQTIGAYLGLVPSEYSSGQSRQQGSITKTGNTHARRLLVEASWVHKRDYRPAVSPSLQAAWAKVVEPVRLRAHVANKRLHRKWDRFEVNKKKRVVANTAVARELAGFCHDLAVMVT

SEQ ID NO: 437731 - protein, 493 aa, unidentified
MTAVMIGVDPHKGSHTAVAISADECPLGRMGVRACPAQAEQLVAWAQAWPDRAWAVEGAAGLGHLLARQLVAAGEYVVDVPPKLAARVRLLEAGDTNKNDPNDARSVAVAALRSKAPRPVIAEDHAAVLKVWARRHRDLSRARNQAACRLHAVLCDLVPGGIPDEITAARAEGILGQIRPWSAAAGARCELAIEFLADIRRLDAQRGDAKKKLAAAVKASGISLTRKVFGVGPVIAATVIGDVRQVSRFPSRDHFAAYDGTAPAEVSSGNRKIYRLSLRGNRLLNHALHMAAITQIRHKHSDGRGCYERKIAEGKTHKEALRYLKRRISDAIYAVLVADARPAAAAPEGPGGQPGNLSVSPGGRLTPRAPALRTSHSRAPHHPTASRGRDAAASPPRGSADLENGCGWQLSHRTPQEPPPEIDLQGTQRNPLTTKGLDLDADGADLPTDGERAEICQFWCAASRPFVGDERASRRRACGISRHLPDVRAGLAY

SEQ ID NO: 437732 - protein, 358 aa, unidentified
MSRYATLEKKNNVVKQPVPTFCGIDYAKRFSYITIGDEEGRVLHQEPVPNEVGRLEKFFEQYPKLTIAIEACRGHEWLVDWLRDRKYVVHVGNVYAIKQIAQSRCKTDKIDSQILMELLAKEFLPTTYQPTKKERDYRELVRWRAQLVKSQTKYKLRVHALLDKENKGIASPFSAAGREALKQVELIGQKQAILKESMEVIEFIEQQIHEQDLKIRKLAKSNPDVYRLKHIPGFDVLTAMIFVAEVGDVKRFRNAEQLAAFTGLVPRVYASGGKMNTGRITKTGPGLLRRMLVQSAWAAIRCCPVLRSRYASISRRRGKKIAIIAIARMLAEIAYHVYLEKTPFDEMRLGAGLVRASF

SEQ ID NO: 437733 - protein, 352 aa, unidentified
MAATAQSAIAVIGIDIGKKSFHVVGLDGRGAIVLRQKWSRGQVEARFANMSPCLIGMEACVGAHHLSRKLKALGHDARLMPARYVRPYSKGQKNDFRDAEAIAEAVQRPTMKFVVTKTADQLDLQALHRVRERLVSQRTGIINQIRAFLLERGIAVRQGQRFLRVELPRILATPPDVLSPRMVRVIEGLASDWHRLDERIEVLSSEIEELAKRDAGCERLMSIPGIGPIISSAMVAAIGTGDSFSKGRDFAAWLGLVPRQISTGDRTILGKISKRGNRYLRVLFVQAAWVVLVKVKPTRWQGHGLRPWIEAAKKRLHHNVLAIALANKLARIAWSVLVHGRAFETNKRQAAA

SEQ ID NO: 437734 - protein, 419 aa, unidentified
MSKSLFCGCDVALENNTIWLMLEDGSQPVKLFGVENNQLGAEVLVERIYSIAKEHCVSDILIGTEATSIYDWHLLEYLSESKLALEFNLKLYRFNAKWIKNFKKSVAPRGKTDPVDSFAIAERLRMGRLPKEYVPDIKYQPLRKLTRFRFHLQQQIAREKDFFLANLFLKASAYSSVKPFGSTFSATSLAVINDFFSVDELAAASIEELTDFILKKGKSHFSHPDEIVNNLKRVSRESYRLKPELAPSVNLILASTFNNIRCYKEQVKLVDEAIAENLKAFKHTLDSITGIGPVYAAGILAEIGDVRRFPNDSALAQFAGLTWPKYQSGKFQAEETRIAKTGNQYLRYYLVEAADSIKRHDATYKAFYEKKYKEATKHHHKRALVLTARKLIRLVWTLLTKQVLYQPGYSSFEVLSKIG

SEQ ID NO: 437735 - protein, 338 aa, unidentified
MKLYGGIDLHSNNSVVALLDEQDQVVYRKRLPNDAAVILEAVAPYQEAIVGLVVESTYNWYWLVDALMETGYLVHLANTAAIVQYSGLKYSDDDSDACWLARLLRLGMLPEGYIYPKDERAVRDLLRRRSRLVQQHTANLLAIQNLFARNRGRSLSANEVKRLSAEAVNRLLPDPNQALAVQSTLLAMRGQEAAIDLLEREALAQVRLRPAYRHLLSVSGIGQVLGLTILLETGPITRFAAPGHYASYCRCVGSERLSNGKLKGRGNTKNGNKYLAWAYLEAANFAVRYNAVINRYYQRKRAKTNGVVAIKTIAHKLARACYHILRDGTNFDVARTFV

SEQ ID NO: 437736 - protein, 319 aa, unidentified
MNTTANANSKNHFRNVGIDVGKSTLDIFIYELDLHWQIANAEQDIRCLLATLRRYKLARIVVEATDGYERVLVEACMTKGLPVIVVQPAHVRQFAKAQGLLAKTDKLDARLIAQFGAVLQPEPRALPSQNVRQVKDLLARKRQLNEARTQELNRRQQATKALQASHTRVIKIYDKEIAWVNAQLEKAVAAVAEWHHTYELLSSVPGIGDGVTFTLLGELPELGQLTHRQISALCGLAPINRDSGNLKGKRRIRGGRAPIRTVLFMAMLSAIQHNPVMRRFYTRLVENGKHKKVAITACMHKMITILNAMVRDDRAWQMT

SEQ ID NO: 437737 - protein, 333 aa, unidentified
MENFYFIGVNVSKKKLDFCVMFEGKVVHEEETANHQSAIMSLLHHFEEDYGIDNTRMPVCAEHTGQYTFPLACACKTVECKLWLENAAEIKYSSGVQGGGKNDKVDAKRIAIYASRFQDKVRYYEHPTEDIERLKQLESERTLYVTDLVKYKGQMKDQKDYMPKALYERKMKRLQALMDDLKEAIQAITDEMDEVIASCPVLFRQQELLMSIDGVGRVVATNMIIATEAFTRFDDPRKFNCYAGVAPFSYSSGSSQHSKARVSHRADKVMKRLLHLAAVAVTHRVGGELKKYYERKVAEGKNKMSVINALRVKIVARMFAVIKRNEKYKPILS

SEQ ID NO: 437738 - protein, 465 aa, unidentified
MRTDKKLWRNRKAKKELARRLQSENPGLEVVHAHAAGIDVGNSAHYVAVRPDCDPQPVRRFECFTADLYRLADWLHSCAVKTVALQSTGVYWIPLYDILEERGFEVYLVNARHTKNLPGRKSDVQESQWLLKLHTYGLLNNSFQPPSQIRVLRTYWRQRLQHVTGAATCVQRMQKALTQMNIQLANVISDLSGVTGQLIVRAIIDGERDPHKLAELSHPRIQASRGEIAKSLEGNWRQELIFVLQQELEMYDTYQRRVAECDQQLQKHLRAFADTVPPPVEEVLPPKKKKKQNKNNPHFHLADELQRITGVDLTRIDGVDVIVAQTLVSEVGLDMSRWKTEAHFASWLGLCPDNRTSGDKVLARGTRRVLNRAANALRLGASTLLKSQTYLGAQYRRLRSRLGAPKAITAMAHRLARLVYRMLKYGQHYFDKGAEYYEQRNRQQQIEFLRKKAAKLGLQVTPAHA

SEQ ID NO: 437739 - protein, 340 aa, unidentified
MNIRTLGIDLAKNVFRVHGVDGRGKTVVQRELRRRQLLSFIARLQPCMVGMEACGGAHYWAREMVKLGHEVRLMSPRFVRPYVKSNKNDARDAEAICEAVGRPSMRFVAIKSQVQQDMMALHRVRSLLIRERTALMNEMRGLLAEYGVVVAQGAVALRRALATIVEDHEAGVSDLLREILSEMSERLRLFEERLKRYDLRITGLARADERAVRLMAVEGVGPLTATAMIAAVGDARQFRSGRELSAWLGLVPRQHSSGERTVLLGISKRGDRYLRTLLIHGARSTLRHVGRKRDPRSRWVEKLKERRGTNIAAVALANKNARVVWALLTRAEEYRVSAAA

SEQ ID NO: 437740 - protein, 316 aa, unidentified
MTVFGFDVAKDSVVVAGLDEQASVLERHTLVNSEEVIRVFLSDVQIRYPDSFAVVESTADYHRPLALAGIAQGLTVKLINPILTKQFTRSTVRKTKTDRTDAEIIAKLGLQGEGRIVTRETFAKTKTFVRTAESLAHTRISLHRMQTRLTQILPEEEALLTALQECQDQLEKAVVRFREEAKESTDPATGDLLRSIPGIGPVIATTLIAEIGTIDRFDSPEALIAYAGLDPKVRQSGTSLHHNTTLTKRGSNTLRTALFQAASVARQHDPELRAYYETKRSQGRQYREATVAVARKIANRVYAVWKRRSKFIPKTS

SEQ ID NO: 437741 - protein, 350 aa, unidentified
MLIIGCDYHPGFQQIAFVDTETGDLQERRLEHREEAEKFYRDLAAQGKDIRVGMEASGHARWFERLLRELQCELWIGDAAEIRTKRVRKQKTDRQDAQLLLKLLLEDRFPRIWVPDAENRDLRQLLWHRHRLVQMRTRIMNQLHVVALNEGVRRKKALWRPAGRSELESLVLAPWALRRRQDLLDLFDQLTPKIRELTRALEEEVEKRPVARRLMTHPGVGVLTALAFELVIGTPERFGCGKQIASYVGLVPTEESSGDRRRLGHISKQGNALLRFLLVEAAQVTVRSQPQWRSKFFHLAMRRGRKIAKVAMARKLAVHLYWMWRQGRDYGQLEKLGSHAGEPGNPHGEQ

SEQ ID NO: 437742 - protein, 356 aa, unidentified
MTRIAQLEPTRVTVGVDTHRDVHVAVALDQLGRRLGEIELATTRAGYQRLLAWAERFGAVEAFGIEGTGCYGAGLARHLRARKVLVIEVMRPNRQTRRRKGKSDRTDAEAAARTVLSVEAAGSPKAGDDLVEMIRVLRVARQTAIKARTQAINALRSLLVTAPPELRDELRALSTSRLVGKAARLRSGPLDSTLTASKRALRHLARRYQALEAEITSLDTQLAQLTAAASPRLVGAFGVGADTAGALLVAAGDNPERLRSEAAFSMLCGSSPINASSGKTNRHRLNRGGNRQANAALHRIVLVRMRYHQPTRAYVDRRFSEGKSKREIMRCLKRYVAREVYTALTQPGEQKLARAA

SEQ ID NO: 437743 - protein, 369 aa, unidentified
MSKTVKYVGLDVHKNTIAVAVAEDGKRGEVREHGEIANTPTALTKLLGKLGGPGVELHICYEAGPCGYGIQRQVAAADHSCVVVAPSLIPSRPGDRIKTDRRDAVKLARLHRAGELTPVWIPDSAHEAMRDLVRARLAAVRSLRHARQQLSGFLLRHGHHYHRPAWTQMHRRWLSGLRFAEDAHHIVLEDCIATVDAAKERRDRLTVQIEKRLVDWTLAPVVEALQALRGMAMVAAATIVAELGDISRFSKAEQLMSYLGLVPSEHSSGKRRRQGGITKAGNGAARRMLVEAAWSYRFPARISREQLLRQEQLAAPIRAIAWKAQERLCLQYRKLSRAGKPITTVTTAIARQLAGFVWAIAHEVGMPKA

SEQ ID NO: 437744 - protein, 408 aa, unidentified
MNTLYVGIDVSSKSNVIYLMLPNGDKHSNFSVANSHEGSTQLVKRILSVLTSHSLDTVLIGLEATSVYGDNLVYFLREDATLAPFNRKIHVLNPKQVKKFHDAYNDLPKNDYVDSFVIADCLRFGRINKEVYMGDYRYKALQNLTRARFFAVQNLVKEKQRFMNVLFKKYSTMTQEKVFSDTFSTTALAVYDEFESAEALANMDLHELTDFIMEKGKNRFPDPDAVAKAIQKAARSSYRLPKTMNDSVNQVLSISITSMKALESQIKEFDKAIKAQMELLPNVLISIPGIGPVYSAGIMAEIGEIDRFNSQAALAKYAGLAWKQHQSGGFEAEVTRLIPSGNRFLKYYLCEAAFSLVRCDKEYSDFYRLKYKEVNRCQHKRALALTARKFVRLVFRLLKDNRLYCPAK

SEQ ID NO: 437745 - protein, 353 aa, unidentified
MKYVGLDWAYRTAQWCALDPGGEIAGEGRFAADRDGLARLVLELGDEVTACLEMMSGALWARDELVACGWQVQVADARKVKTVAPLAAKTVKVDARLLAELSRRQLVPALWLPSLDERALRERLRRRMHLVRLRTSAKGRIFGLQTQWGVRISLRRLRRADGMTLLERAGMPAVWRHSIGECLALIDFLDARIVALDAELRPFAQADPRAVLLDTIPGVAELLALTIAVEIGEISRFAGPEKLVSYGRLAPRVRQSGEGRPHTGPLNKSGSRLLGWAAVEAAQHAWRESNPWHQLYLDVSRRSRNHNSAKAAVARKILIAAWHMLSRNEPFKPAPRSTEGTPVSASSRLALAA

SEQ ID NO: 437746 - protein, 370 aa, unidentified
MAQSSTLYVRMDVHKESIAVAFVAQEFGAAVVSLGTVGTRQCDIDKLIRQLQSKSKQLVFVYEAGPCGYWLYRYLTKKGHGCWVVAPSLIPKKTGDRVKTDRRDAIQLARLMRSGDLTPVYVPAVQDEAIRDLSRAREDTLHDLKTAKFRLKAFLLRHDIRYTGRATWGPAHLRWLSEVVCPTPAQQIVFQEYVRAVTEQTDRLQRLEQELHEQVTAWRLCPVVDALQALRGVQFTVAVTTVAELGDLTRFDNPRQLMNYLGLTPSEYSSGERRRQGGITKTGNSHARRALVEGAWAYRYPAKVSRHLQLRLEKLPKPIQDVSGKAQVRLCKRYRQLSTRGKNPNQVVVAIARELSAFMWAIAQQVPVTA

SEQ ID NO: 437747 - protein, 341 aa, unidentified
MNTYIGIDLHKRTQTWVALSEDGQSKLFTRTFAVTPEGVTEAIKLAQSLNHKHLIAAIEPVCGWWWVVEMLRKEGIEVHISNPRKTKAISDSLQKTDENDAHLLARLCKTGLMYESFEVSSEMQKLRSLVRERGFLIRTRAGMKCRLESIVTRSGRHLISSSLQSKKGTEAIIASDEEEWKRALDTITDLGKYISELDRAVAQYAREKVPTLLMSIPGIGPVTAVSVWAEVGDFARFPSSEKLCAFAGLVPTERSSGEVRKLGCITKAGSKVLRYVLVESAMHIRDNEKSTVLYNFYYSIREKRGAMRARVALARKILSICWHMVKKGEVYEQRLQTPKTI

SEQ ID NO: 437748 - protein, 341 aa, unidentified
MNAVGIDVSKGKSMVAIMRPFGEIVSAPFEIKHTASDIHSLVELINSVEGESRIVMEHTGRYYEVLAHQLSEANLFVSAINPKLIKDFDNDSLRKVKSDKADAVKIARYALDKWQNLKQYNVMDELRNQLKTMNRQFGFYMKHKTAMKNNLIGILDQTYPGVNTYFDSPARSDGSQKWVDFASTYWHVDCVRKMSLNAFIDHYQNWCKRKKYNFSQSKAEEIYGKAKELVPVLPKDAITKLIIKQAVDQLNSASTTVESLRTLMNETASKLPEYPVVMAMKGVGTSLGSQLMAEIGDVSRFTHKSAITAFAGVDPGVNESGSYEQKSVPTSKRGSLSLIHI

SEQ ID NO: 437749 - protein, 371 aa, unidentified
MSDVSSTAPVDVRLWVALDVHKLSIVAASLPAAGGQPELHRIETTERAIRRFIERLGGAQGLACCYEAGPGGFDLLRLLSRIGVACDVVAPSLVPVRAGDRVKTDRRDAQKLVRLFRAGELTFVAPPSPATEGLRDLMRCRDDLRCARTAARHRVAKQLLRHGRIYREGKKAWTKMHREWVARQRLDDALAQRALEQMLIHLDGLDRQIDALDRDLEQIASREPWREAVKRLCAFRGIRTRTALGLIAEIGDFRRFSHPRELASYLGITPSEYSSGQQQHRGHITKTGNRHARRLLIEAAWNYRHRPRRPDRDPQPSERAWQAQIRLHRRWGHLALNGKPHNVANVAIARELTAFLWAEMTNQPTRKEPVS

SEQ ID NO: 437750 - protein, 408 aa, unidentified
MELTPLYKRVIGLDVHQAKITACAIIKHENGQVDVILREFGAFKRDRRALAEWAQEMAPEVVVMESTGVYWKSPYAALEKAGIEAWVVNARHVKAVPGRKTDVADAQWLATLARAGLLRGSFVPPTQMRQLRLVSRQRQKLVGQCSAEKNRLHKVLTDAGIRLNVVVSDIHGRAARSMIKALIDGRPLHEVLDRKGRLRADRNELFEALSTEQFSEPHRFVAEEILAHIEELEQRIARMDQYLLEGLKDHEALLTLLQTVPGIDRQGAAMLLVEIGTDMSVFGSAERIASWVGICPGNNESAGKRKSGRIRRGNPWVRRLLCEFAQAAARTRCGLKAKFESLMIRKGYKKAIIALAHKMLRILYAILSNGTHYQDSTIDYEALTVARNAPRWLKMLRKHGFITDATTA

SEQ ID NO: 437751 - protein, 356 aa, unidentified
MEPIKSNCVGCDAHRRYSVFVLMDERGHTGKETRVEHSRELYRHFLSTLPPGSPIALESIGNWYWMIEEMERAGHQPILAHAKKAKLMMGLTNKTDKLDARGLALLLRNGTLPSVWIPPGELRDQRELPRMRMVFARIRTMLKNRIQSTLAKYGIQIDEVSDLFGVMGRGLLQNRLNELPQETQRSIQEHLKLLDGVLEQIEGTEKRIKEVIKETPQMQLLMSLPGVGPILAIVIILEIGDIERFPGAPQLASYAGTVPQVKSSGGKTYYGKVRPDVNRYLKWAFIEAANSIVVHQRRMPNRHVVQVYHRIMKRKGHPKAIVAVARHLAEATYWMLKKNEAYREPTSSRWISPTQK

SEQ ID NO: 437752 - protein, 372 aa, unidentified
MAKSGLLGVVDDLQDSYEAGEGSVTIGIDLGDRYSYCCVLSEEATVLAQGRIRNSAETLQRYFRDIPRCRIAIEAGTHSRWIYELLSSWGHEVIVANTGAIPMISASNRKSDEADAQMLARLARADPKLLSPIRSRGKSGYEDVVCMNARDLLVRTRVKLINAVRGMVKSSGSRLPGSTTESFITKAAPYIPDLLQPALAPLVENIARLTEQIREFDKRIEHLARTRYPETARLRQVSGVGPVTALKFVLTIGDPHRFEKSRDIGPYLGLVPRRHQSGAVDKQMRISKAGNRQLRVLLVQCAHRMLTRSSPDSDLKRWGTRMAAHGGKSSRKRAVTAVARKLAVLLHKLWVSGNTYRPLFNATSLAPSQPAA

SEQ ID NO: 437753 - protein, 434 aa, unidentified
MEEVTDEPLYRDRVCGIDIGKAGLVATIRVPSDRDPARRMQETRSFGTTKREVLALADWLRCWQVPAVVTEATGDYWKGPFYRLEAEGFECVLADAKQVKNLPGRPKRDPADSRWLAACFERGAITSCFVATPEFRIIRLHTRYRRDLTEERTRDKQRAEKLLESAAIKVSSVLTDLHGVTGRDITGHLIAGERNPKVLAQLARAAARRKISQLEEAVEGAEFFTAEHAALLKIMLARIDRLTAGIDQLTAVIEQLLAPYEEQLQQAESMPGWGRRAAQDAVAETGVDMTRFRTGPHLVSWAGRAPLDHQSGKRAGRAKAKKGNRYLGAITGETAVAAGRTQTREGARHRRLARRRGTAKACVATGNTQLKASPLLADPGMRYQDLGPDYYERQRDVRRQVAHHVGKLGSPGFEVTLCRIPEPDPDGTGPAQAG

SEQ ID NO: 437754 - protein, 466 aa, unidentified
MGPPGCDATKKKNDMSRGRKTKVQKIQPKINPYTAGADIGAREIYVGVAVELTATPVRRFGTFTEELRQLVAWLVELKVQTVAMEATSVYWIPLAELLEEAKIEVCLVNPRHVQNVSGRKSDVMDCQWLQYLHSVGLLRAAFRPAAHVRGVRALWRHRDALVRQTGWYIQHVHKALDQMNVQVHHVLTDLTGVTGTAIIEAIIQGQRDPRVLASYRDKRVKATEQTLVAALTGDYRREHLFCLQQAYEAYQFTERQIAAVDQELAAELARLDPNQSPDAATPPIPCRPKASIKHPPSYPAHTRLAGLCGVDLTTIPGIQVLTAHTIWAELGSDLSAFPTSKHFCSWLSLCPDNRTSAGKCLSTKTRASANRVAHALRMAAQGCHHAKHELGDYYRRMRAKLGAAEGLVATAHKIARILYAVMTTRRPYDPALHEYALLQTKRRNLTRLHTLAKKLGFQLVPDQQPV

SEQ ID NO: 437755 - protein, 379 aa, unidentified
MGKDIRFVGLDVHGETIAGAVSEQDGSELELGVIANRPEAVRRLIKKLGPVEKLRVCYEAGPCGYVLYWQLTGLGVDCQVVAPSLIPQKAGDRVKTDRRDAKKLARMYRAGLLTAVWVPDAEQEALRDLVRAREAAKKDELRARHRLGKFLLRRGCRAPQGVEAWTKRHSEWLRSLRLEHAAQEVVFIDYLHEVDHAQERLVRLERAIDEAVERVPASKRAVIEGLQALRGVSKVTAVTVCSEVGELSRFARPKLMMGYTGMVSSEHSSAGRIRRGGITKTGNAHLRRVLVQAAWAYCRRPNLSPALKKRQAGLSEEIKEISWKAQHRLYGRYRRLVSKGKTPQQAITAVARELVGFIWAIGVDVEGRIRQESQGHAAA

SEQ ID NO: 437756 - protein, 342 aa, unidentified
MTKMLRQVVGIDVDMKNLVVSLGRLHENLEAEVFAHKVFSNNTKGFSALTSWAKERFDDSIKPLFLMEATGVYHESLAYYLVESGHEASVVLPNKISNYARTLDVKTVTDKTSSEAIARFGLERKLELWQRPNPVLKRVKQLCRERDQIVSERTLVKNQLHAEKSEAQPNKSSIARMNKRVEILNKQEKEIGKELDGLVKQDQKLSEDIKLIRTIPGVGTLTAATILAETNGFNLIRSSRQLTSYAGLDVKEKLSGASVKGKPRISKRGNKFLRKCLHMPALAAIRKDAHFKALFARLVSKHGIKMKAVVVVQRKLLELTYTLIKNKSEYDEHYQRQVVLEA

SEQ ID NO: 437757 - protein, 419 aa, unidentified
MSFKILKNNCCGLDVHKTWIFACIGITDSHRRTEYKQARFSSFTKGLQELCDWLAKYNCTDVCMESTGKYWIPVFNVLEKNNIWVTLSHPKYTKPQKGNKTDRKDAKWICDLYMCGMVKPSFIPPADIRQLRDLVRYRFKLTCMITSEKNRAHNCLTISNFKLDEVFSDIFGKSSRSITEQILQHPGETFDVAQFVDGRCKTPIEEIQAAVDGAISTEQAVKLRQCLNHIDELEKHQAEIEREIFRLSDKYEEVLNLIRTVPGFDKNPMTAIQVLSEIGGDMSVFPTAKNLVSWAGCCPRNDQSNQKIKSTRISRAGSYFKPVLVQVANALIKSKKHPEFTTRYRRIKARRGHKKAIIAICRMILTAIWHILTDLKPYTPEGFLDSRPVNKEKVLTTSQALNLLKQRGYFIKDDPLSVS

SEQ ID NO: 437758 - protein, 338 aa, unidentified
MTTRISVLAIDLAKGSFQVCAVGPDGAVLYNRVLSRARLATLLAEQPACIVAMEACATSHHWGRVAQRHGHEVRLVPAAYVKPFVKRQKNDRADAEAIAEAALRPTMRFVAVKSVETQGRAVAFRTHQCLVRQRTQLINALRGHLAEFGLVAPKGPASLKVLEIALADETGELPGPVREMGAVYLEQISRLTEVIERLADDLEKATRTDATLRRLRTIPGVGPVTAGAVAAFAPDLGTFDSGRNFAAWLGLVPRQRSTGGKVRLGAISKMGQTDIRRLLIVGAMSVIRWVVRKGGSSNRWLAALVARKPKMVAAVALANKMARMIWAVTTKQEDYRMA

SEQ ID NO: 437759 - protein, 350 aa, unidentified
MDALNKLKRYVYFIGIDISKETLDIAVMVQGSVLVHNTIPNEPKAIKDHMLHLKASLKFTTRNTVVGMENTGIYGNHVINKLKTLKIDTVVDPPLRIKNSSGLIRAKTDKKDAERIALYLYKSRDILRLRIPRRPIIEQLAGLSALRKRLQSLHIAMRVPLKEHTGFVKKGLIEQNNRLCSRSFEALRLDIKDVEDSIEATWKADEETNRLMTLMQSVPCVGPVVALEILICTNEFKNIRTIRQFASYAGIAPFPYKSGTTIRKKTRVSKIANKKMKALLHNSAVLAKKFIPDIKAYYHRKTDIEGKHKMSVLNAIRLKIAARVYSCIKNNRLYEKIHEYKPAKDLAPPI

SEQ ID NO: 437760 - protein, 343 aa, unidentified
MDYFAGLDVSVKETSICIVDDAGKIVREVRVASEPEALLQVLTNNNYRFKRIGLEAGPLSQWLFSALAEAGLPVICVETRHMRAVLKAQINKTDRNDARGIAQMMRVGLYRPVHVKTLRSQKLRMLLIHRKLLQSKAIAIENDLRASLRNFGLKMGLVGTVRFEARIKELVENLPDLAALVEPLLIVRRVLREQLGILHRRVLAVVRDDEVCRRLMTIPGVGPVVALTYRVTVDVPARFRNSKSVGAVFGLTPAKDQSGERDRSGAISRCGDELMRVMLYEAAQIMLVRSAKWSWLKAWAMKIARHRGMKKAIVALARRLAVIMHRMWVDGTNFRWTREVAAA

SEQ ID NO: 437761 - protein, 396 aa, unidentified
MTTVGIDIGGKSHAVGRCRTGEARADRAVLRVAQSRAGFDALDAWLASEPEPIELVALESSGHYWMALASHLHRQGVPVAVVNPLRAKYFAKSRLARTKSDPADARSLAELAMREPLPRHDPLAGVELRQAARFAMTLVNEQAIVSQRLYRLVELGFPELLELFEHPQDRLSREILRLAPTASAAARRRTTTLADVNKGPGRHRLGTARAARLHAAAVDSIAVPELQPEVAYEVGLLLDQRDLLERQITAADAHVATLLDGDLARRLQTIPGLGAATAATLIAEIGAIERFETFDQLLAYAGIHPAERSSGRKGADPETAWRMSKAGNAYLRTAVYRLALVGIVHNPVIAAHYARKRAAGKSKMNAIGHCMRKALSLVWGVWRNGQDFDPDWPTNA

SEQ ID NO: 437762 - protein, 401 aa, unidentified
MKRLSGGIDVGSESHHITILDEEDNVLYNQKVAHKLNEFTESIKLFKQIEKKEGGKLSFVLEGKNGYSAPLDRILLNQGFTLYNVDNLKLKRFRQAFAGEWRDDQRDSLMLSKMLKLKDYINSEREKVFIKIEKPSLLTESLKLLSRHQQTLINEKVRLINRLGKKLLEVCPQILKLGKLKNKKIIAVLAKYPDFSKYKRITLCSLLKIRGIGKKGAFFLLKRLNNIEYMPGLTDIYKTIILSYAKRILELQKEIEDIDKSLDEIGEKSKEVKHLKTIPGVATKLASRLIGEIGDINRFPSEKQLAIYCGIACVDNNSGKVTKARAVYKANKICKQALITMAGGSIRFSFQCKNYYLKKRAEGKSHNHTLRCLARQLIKVIYKMLTEERDYIVRKELKKVA

SEQ ID NO: 437763 - protein, 351 aa, unidentified
MNEITTVGVDLAKELIVVCAGDAVGRTLFFRQFGCAGFAGWMANLPPCTVGMEACSSAHHWARVLAGHGHRPKLMAAEFVKPFRKSQGAKNDRNDAQAILSAVREPNMRFVSVKSLEQQSILACHRMREGWHAERTALLNRTRGLLAEFGIWLARSSAALYRALPRLSQEETVPARVRALLGQAHEHLRQIDAQISHCEAQIRLHAKQSECAQRLTAITGIGPITASAVVATVANARDFRNGRQMAAWTGLVPRQSSSGGKERLGSITRRGDTYLRALLTQGARAALQAALMRAPEKRSRLEHWMVELRQRVGYHKTLVAIANKHARICWAILAKAEEYDPQAWQRHALAA

SEQ ID NO: 437764 - protein, 357 aa, unidentified
MESQEVKYVGVDCGKKSIEVVRINSENSLERRQFSTTESGINNLLQWLTLNDIVGLEAGSQSFRIAKSILNKGVQVIVLNPGNLATIYQSLKKTDKEDSLKIARLIQRYPIEELPTVPIPNDEEEDNRRLCSEHENWTKQLTQGKNRLHSLFTQAGLTHITKKHLRTKANREISVALLPSRYQKEAERILKVLDLVELNLKLIEKEIQEALKKNKAYVQTIMSMPGIGMITSLAIMSYMGDCKRFSSAKQAAYYAGLVPRVDISGDTVRYGRIINRGCHSIRRVIVQAAWSLVRCQHGGKVKEFYQRLYLKKGAKKSIIATSRKMIEVLYVMIRTGKLFDSMPENILNRKLTQYGLM

SEQ ID NO: 437765 - protein, 353 aa, unidentified
MRALVKVVIGVDPHKASLAVAVVDEATGELLEHTAFAQDRSGLRALERWAKRFPERRWALENSGGLGRHLAGRLTGSGESVVEVPPKLSARVRMLSSFAGNARKNDELDDLATALAASRNERLAAVDPEAASEILRLLSERREDLVAERTRALNRLHALLRDLVPGGVAVKLSADRAARILRGIRPQDGASAHLRRRLASEVLRDIRTLNRKIADLDGRIEAEVEASGTTLTEIFGIGPILAARIIGAVGNVARFPTKSRFASYAGTAPVEASSGEVVRHRLSLAGNRKLSYALHMVATCQARSDARGGTYYRKKIAEGKSRKEALRCLKRRVCDAVFKSLTADSQAPSSSVA

SEQ ID NO: 437766 - protein, 343 aa, unidentified
MSEITVIGLDLAKRVFQVHGADKDGRPVLRKRLQRNQVLGFFAKLSPCLIGLEACAGSHYWGRELQALGHEVRLIPPQYVKPYVKTNKNDATDAEAICEALTRPTMRFTAVKTAEQQSVLVLHRTRELLVRQRTMLVNALRGHCGEFGIIAAQGLSRAGELIKRVEDDADTSLPDLARQALQCLTAQLRAIQQQIASIEKTLRTWHASCQASRRLAEIPGVGLITATAIVASVGEATQFRSARQFAAWLGLVPQQHSSGGKERLGRISKRGDGYIRRLLVHGARAHLSWSRRKKEIRSAWLTALLARRPTNVVLLALANKTARIAWAMLRRNETYRPQIAAAG

SEQ ID NO: 437767 - protein, 395 aa, unidentified
MSAEGEAIRSNDYRKDTTVKAPSTRPAAVLGLDVGKSSHWACLIDRDGEVLASAPVRNREAELDALFASAPAGTLVVVDQFRNIGSLAVRRARAAGLGVAHLPGLAASRAAGLFAGEAKTDERDAAVIARTALGVPDSLSGVPGRGEALEAARALSSQRDHVVACATRDKNRLRAVLLESCPALEAAVDLSDRRWLELLAGFGGAWGIARSGAGGPRAEAAGEAAAASTAPPPALVEAENRQVRFLAARISEALDEAGALDAETAALLEGDETYACLLTVPGIGPRTAAQLAVSVDIGRFPDHDHLASYCGIAPRVRSSGTSVRSVRASRRGDARLKSLLIFSCNSLVRSSGRYGEYYRACRARGMGHGRALKAVARKRLRAIYAVMRDRVPYRE

SEQ ID NO: 437768 - protein, 325 aa, unidentified
MDVLGIDVAKATLVVVLLVGERQQRAEFANTSAGHTKLLRWLAKRGAAPVHACLEATGTDGDDLAQALYDAGHTVSVVNPARIAAYAKVQAARHKTDQADAALIARYCQREQPAAWTPPPPELRELRALVRHLDTLQQQRQAEQNRLGAGGHPSVVTQAIQAHLTFLSEQIATVEQQIAAHFDQHSDLKRQRELLDSIKGIAVRTATRLLAELGDWKQFTNARAVVAYAGLNPRPYRSGSSVQRRTRLSKSGNAAVRAALYFPAIVAKQHNPLVQALCARLTARGLCPKAVIGAAMRKLLQIAYGVLKSGQPCDPNYAQAVTAQG

SEQ ID NO: 437769 - protein, 359 aa, unidentified
MQKQSNQLDFKGENIYCGIDVHKKSWTVTIMLKNISHKTFSQPPSARALAAYLNYNFPGGSYHSAYEAGFCGFSVHRSLIAKGINNIVVNPSDIPTTDKDKRQKEDKRDSRKIAKTLRSGDLKAIHVPTLETEELRTLVKCRGSLVKEVTRYKNRVKSLLFQYGVAPPGNFDNGSKHFSKAYVNWLKGVDFQTGNGKFALNSLIEATLFLRKELLRVTREIRLIARSPKYAGLVNLLTSTPGIAEYTAIVFIAYIEDMGRFNSLDNLCSYVGLIPSTDSSGEKEKVGKITRRSNKLLRGLIIEAAWVAARRDPALILAYQTLCKRMKPSKAIIRIAKKLLSRLRHAWMYGEEYEYAIVA

SEQ ID NO: 437770 - protein, 355 aa, unidentified
MDKTKYVGMDVHKETISIAVVDSTGKLVKEVILETKANTILEFILGLRRNVHVTFEEGTWAAWLYDLLKPHVANVVVCNPRKNALLNDGNKGDETDARKLAELLRGNFLKPVYHGETGTRTLKELTRSYIAISKDLVRVMNRIKALYRTRGIACAGILVYAPRHRSEWLARITDAGGCRRAELFYQELDTLQVLRQEARRDLLAEGRKHGATELLCQIPCIGPIRAAQLIALIQTPHRFRTKRQLWTYSGLGLEMHASAQYGYVKGQLRHSKKPHRFHGLNRNCNHDLKNIFKGAAAKASICAGPFHDFYEGLLMKGRKPAMARLTLARKIAAITLIIWKKGVSFDAQQLKQQAA

SEQ ID NO: 437771 - protein, 344 aa, unidentified
MEYFAGIDVSLEQSSVCVVEGAGKIVRETKVTSEPEALVRFFGVLEIGVTRIGLEAGPLSQWLHAGLVAAGFEVVLLETRHVKAALSAMVNKTDRKDARGIAQLLRMGWFRPVHAKSPGAQEVRALLVARKLLQTKLLDVEFSIRGILRGFGLKMGKASKGQFVARVRELAVGHPMLELITEPMLRAREVLRTEYARLHGEILAIAKPDPVCRRLMTAPGVGAVVAITFKSAVDDPGRFIRSRALGAYFGLTPKKYQSGERDVTGAISRVGDAMVRATLYEAANVMLSRVTRFSSLKRWALDVAKRRGLKRAKVALARKLATVLHRMWIDGTTFHWGKQAVVAV

SEQ ID NO: 437772 - protein, 416 aa, unidentified
MIPAVIERCAGIDVGKKFLAVCVMTGPAKEEAHYEVRKFGTVRAELVRVREWLKAEGCTHVVMESTGCYWKPVLNVLEDDPDYELHVVLANPQQVKAITGHKTDPHDARWLAHLLRHGMVRPSFIPSRALRDLRDFTRRRKQVITAASQERNRVQRVLEDANVKIGDVLSDVFGLSGQLMLEALVEGRASHIEIAQLAKGNARRKIAELEAALEGHQMRQAHRMLIRHAMQHMAFLAREVEELDKEIEDLIRQAGLTESWKLLQTIPGIQETAAATILAESGAEMAQFPTPANFSSWSGVAPGNNESAGVKKRAPTVRGNPHIKAAMVESGWSASRTKDSEFQDRYNRLKVRIGHKRAIVATAHFLALTIYEVLATRAPYQPSQPRFEVRRITRLRRHHSRRLRTLDHWLREQDCG

SEQ ID NO: 437773 - protein, 319 aa, unidentified
MVIGIDVAKAELVVARGSSGEVATYANDEGAVRTLVQELAGRSVELIVLEATGGYEVLGASALASAGLPVVVVNPRQVRDFAKATGQLAKTDRLDARVLALFGERVRPAVRALPDEQTRELEAVLTRRRQLLEMRQAERNRLLQGVGHGARPIQHSLKKHIAYLERELELTETDLRRRIQESPMWRARDNLLQSAPGVGTVTSETLMAQLPELGQLDRRAIGKLVGVVPLNHDSGTWRGRRTIYSGRAQVRAVLYMATLAAKRCNPVIKAFYERLLAAGKPKKVALVACMRKLLTILNSMVRTSQHWRTPDHPVPTMAQ

SEQ ID NO: 437774 - protein, 398 aa, unidentified
MSQVSYAVFLGLDVGKEEHHACALNTAGERVYDKALPQSEAKLGEVLTELSERGPVLVIVDQPASIGALAVTLARAMGIDLAYLPGLAMRRIADLHPGAAKTDARDAFIIAEAARTMPHSLRRVSTDDEALADLEVIIGFDDDLAGEVTRITNRIRGLLTQVHPALERVLGPKIHQRAVLELLARFGGPQGLKAAGRRRLTATVKPRAPRSYTKLVESIVEALDQQSVTVPGTRAAETVLPQLARQLSGLLDQRATAAAQIEDMLDAHPLSKVLTSMPGIGVRTGARILLEVGDGSAFPTSGHLAAYAGLAPTTRRSGTSIRGERPARGGNKQLKRAFFLAAFASLSDPTSRAYYDRKRAQGKRHNAALVCPPRRRIDVLHAMLRNGAFYDPPTPAAA

SEQ ID NO: 437775 - protein, 360 aa, unidentified
MAYYIGLDVSQKNSAICIVDDKGKVVIEGGALSRPHDIYGWIKNRVEISEVAKVGLEAGNLSSWLYSGLIKDGLPVIVLEAFQAHRFLATQRNKTDKNDARGLAQLVRMGEDFLKLVTVRSQASQEARALLGIRQHLVNQKVDLENHISGILKPFGLLVVRGNVCAEAFRNRVVDVLCVADDRGINVREIIMPSLNLYRSACEQLAILTKRVEDIANDNPVCKRLMTVPGVGPVVSLSFSTAVDYPERFKKSSDVGAYFGLTPRQYQSGETNHIIGISKRGDPMVRRHLVQAATVLLMHNKRWCPLKAWGVKLAKKHGISKARVAVARKLAIVMHRMWINAEDFKWQAVAKEELEGLQLS

SEQ ID NO: 437776 - protein, 400 aa, unidentified
MLSIGIDVSKGKSTVCGMKPGGEIVYTPFEVQHTREGMSELVSLLRSSGEEVRAVLESTGSYHCPVVTALLENGIFVSVINSLRMKRFCSQSIRKVKTDRIDAMQIALYGLAYWQELQPTKLPEDTYRELQLLARQYYQMTSLLIKAKVDFNAICDQVLPGMQELMSDHAGRHKLSDFVLRYCHTTHILEMGETRFRKDYCKWAEKKGYRNCERMAALIFATAQNGIPVLPNAPSTQIVITEAIRVLHTVEASRDAILTQMQALAKTLPEYSLVREMPCIGDTLAPRLIAEIGDVRRFHSKRALIAYAGIDAPPYQSGKFCANNRHISKRGNRYLRKTGYEVMQSYVMHKPANDPIFTFIEKKRSEGKCGKLAMVAGLNKFLRVYYGKVTELYRSLPAIE

SEQ ID NO: 437777 - protein, 340 aa, unidentified
MQVTTIGVDLAKNVFQVHGITASEEVVFNKPLRRTQFLPFFAKLDPCLIGMESCSSAHHWARELTALGYEVRLIPPMYVKPYVKRGKSDAIDAEAICEAVTRPTMRFVATKTVEQQSLLSLHRARDLLVRQRTQLINNLRGLVAEFGIFIPKGLARVIGFAEDITLGEVLDLPDIANEVIRNLSEQLMALHKQVRWYEERLKQVAKEDARVRLLRTIPGVGAVTASAIIASIGDGHQFKNGREFAAWLGLTPANKSSGGKEKLGRITKMGDQYLRSLLVVGMTSLVRQTRSHPERASKWLTSLLERKPARVATVAMANKTARIVWAVLTRNEPYSPRTVA

SEQ ID NO: 437778 - protein, 352 aa, unidentified
MDYFAGLDVSLEMTSICIVDADGAVMKEAKVASEPGDLVAFFEQCGMVMKRIGLEAGAPSQWLYGGMAEASLPVVCIETRHAKAALSAMPNKTDRNDARGIANIMRTGWFRAVHVKTQTAQELRFLLVARQTLVRKLMDIELAIRGMLRSFGMKMGVVSKRNFEARVLELAGGRAMLMRALNPMLTARRALAIEYANLQKVAMDFARDDDVCRRLMTVPGVGPIVALTYRATIDVPSRFRRSKSVGAHLGLTPRAYQSGEVDWNGRVSKSGDAMARAALYEAAHILLTRVKRWSSLKAWGMRLVKNRGHKRAVTALARRMSVLMHRIWVEGTVFIWKTGDSQVVAPAAVGGA

SEQ ID NO: 437779 - protein, 421 aa, unidentified
MGKLIERCAGIDIGKRFLVCCVMTGAAHEEPRSETRRFDTTVPGLKRLRNWLNEERVTDVVMESTGSYWIPVFNLLEGHVRVVLANPEEVKNRKGHKTDRKDAGHLADLLRHNHVKSSYIPAEPVRQLRDLTRRRVQLTQDATRERNRVQKLLEQVNVKIGSVLTDVFGVSGLHMLLALLDGRAAPEEIAGLARGSAKRKTPQLIEAIEGNRMSDHVRFLIRGCLRHLACLEEEVEELDTEILRRMQLFTFQKAFTLLQTIPGVGQLSAATILAETGPDLDAFPTIEQMASWAGLCPGNRESAGIQKGPQTTHGNPYLCTALVQCAWAVTRKRDSVFRSRFQRLAPRRGEKRAIIAVAHHMLIILYCMLKRGVPFLGAEHAPKQRRRERRAHHHLRCLRRLGFSVAIRLSSESTPPDTISR

SEQ ID NO: 437780 - protein, 338 aa, unidentified
MKLYGGIDLHSNNSVFAIKDENGEIKARKKLPNDLNMIFQFLGSFENELVGLVVESTFNWYWLVDALMDAGFCVHLANTTAIQQYSGLKYADDNSDAAWLAEMLRLNILPEGYIYPKAERAVRDLMRKRMQLVQQATKNLLSIQGLYMRHLSYKLSNNKIKQLSAEDIEKDFLSTNVSQATVCNLAVMNCLKTQIKTIERVILEQVKLRAQFQQLTSIDGIGNILALTIMLETGDIKRFDKVGNYASYCRCVSGARYSNGKKKGSTNSKNGNKDLAWAFVEAASFAIRYNKTVKSYYQRKAAKTNQTVAIKTVAHKLARACFYVLRDDVPFEAKKAFC

SEQ ID NO: 437781 - protein, 403 aa, unidentified
MTVRPLVWVGIDVGKTSHHACAVDETGKVLWNQKVSNEQRAIEQLIARAHKGADEARWAIDLTSPMALMLITVLLGAEQSVVYVPGHVVNTMTGAFRGEGKTDAKDARVIAETARMRSDLSEVAMPDELVVELAQLTGYRTDVMADWVRGVNRLRSLLGSIFPGLEAAFDYSNRTPLILVAHLCTPAEIRAAGSKGVTAYLGDNGGWPTAIAKTAATAVAAAKQQPLALPGEAGTAALVKRLARKLLDLDHEIKDIDKTITERFRDHPFAHIIESLPGFGPGLGAEFVVVTGGDLASFATAGRLASYAGLVPVPRDSGRISGNLHRPKRYNRRLRRVFYMAALSSIRGDGPSRQFYDRKRGERLIHSQALLALARRLVDVLWALLRDGREFTPDKPTPATAAA

SEQ ID NO: 437782 - protein, 328 aa, unidentified
MKAFIGIDIGKEKLDVSFLRDVVKNKLKTKVLKNTTQGYQELVNWLVKNTGLEAQNIVITTEPTGIYSEPLMYFLYEQGFTLLHVNPGKAKQYANSLGLVHKTDKSDATMLARYGHDQQYSLSSWQPEPVEARELKAMVRRLEALEKDLQREENRYEAAEFSDASARVAQSLKDMIAVLKAEIDKLKNEIDEHIDRHPQLKKNRQLLESINGVGEVTSRIMVCLLACKRFKSAKQLASYLGLIPKHNESGKRAGKTSLSKEGPGYIRAKLYMAAVAAGQHNPDIKAQKTRLLAQGKTKMQALGAAMRKLSQICFGVVKNQAEYQPQVS

SEQ ID NO: 437783 - protein, 321 aa, unidentified
MAYFRDVVGIDVSKQNLDLYVLSGQQRRTVANTAAGYGDLVSWLKSLGVRMAVMEASGGYERDVAKALRQAGFDVRIVDPKRVRHFAKAAGRLAKNDRIDAEMIAEFGAVFAAAQRCEIPLDTKREHLAGLVAARQALVGHQTSLQNQISACPKGPARQALAAALKPIPASIKQLDRLIAKAIAAHPQFAALAARLDTVPGVGPVTIAALIAWLPELGRLDRRALAALVGVAPFDDDSGKRTGQRYIKGGRGKLRNIAYMAVMGAATKHNPVLKAYYDSLLNRGKLKKVALIACLRKLLTILNTMVAKQQDWNPASMAIAA

SEQ ID NO: 437784 - protein, 416 aa, unidentified
MNAVGIDVSSRKSTVAVLRPLGEVVCLPFDVTHDIAGLASLVEKLKALDGETRVVMEHTGRYYEAVAKALHEAGLFVCAVNPLLIKEYGANSLRRVKTDKADAVKIARYALDNWADLRDFTPMDAIRYDLKTLNRQFQLASKQRTASANNLIALLEQSFPGIRKCFDSPVRSDGTQKWVDFAHSFWHVDCVRKQPFPAFCERYRKWCKRHAYLFKLSNAEEVYALAKRAVVLTPKAKVVKVLVQEAANQLSSISRSVEVYRAEMDRLAAMLPEYPVVMAMYGVGKSYGPQLMAEIGDVRRFERKQALVAFAGIDPMPNQSGDKNVRSNKSSKRGSPYLRKTLFNVIRTYLQCAPQDEPVFQFLNRKRAEGKPFYVYMLAAANKFLRRYYAKLRDFFASLDTLQPVAPIPTILKATL

SEQ ID NO: 437785 - protein, 352 aa, unidentified
MALPTLPHPQVLVTPDVDTHADSHVTAALDQAGRPLGTRTISTTPGGYAALLGWARRFGTVDRIGVEGTGSYGAGLARWLRAHGQLVIEVDRPDRAARRRQGKADDLDAHAAARALQAGTATSQPKAGDGTVEMIRSLRLVRRSAVKARTQAANQLKALLVTAPDGLRAQLRRLPPAELVTTAARLRAATKPATPTDAAKLALRSIARRWLQLTQEITALDTQLERLVAMAAPALVAVKGVGTETAAVLLVAAGDNPERLRSEAAFAHLCGVAPIPASSGKITRHRLNRGGNQEANWALYLIAVGRMAWHGPTHTYVERRTKEGKSKAEIIRCLKRHIARELYGILASRPAT

SEQ ID NO: 437786 - protein, 371 aa, unidentified
MELLHRRCCGLDVHKDTVVACLRLVSDGKVTTEVRTFRTTTADLLKLSEWLAANECTDVAMEATGVYWKPVWHILDDGEFGLVLANAAHVKNVPGRKTDVNDAMWLAELLAHGLIRASFVPDSQTQEMRNLLRTRKQLVREQSRHLQRVQKTLEDANIKLDSVLSSLMTKSGRAMIAALIAGETNPVKLARLADPRVKASSQDLREALRGRVTDHHRFLLRLHLKQIDGLAAAMAEIDAQVETNLGPFRTAVDLIKSIPGFNDLGAHVVVSEIGIDMSRFPSAAHLISWAGICPRNDESAGKRRSNRLRKGAPWLKTTVVQCSWAAIKKKGSYVQAQYHRIKARRGAKKAIMAVAASILTAIYHMLKDGTM

SEQ ID NO: 437787 - protein, 434 aa, unidentified
MSYRIAGIDVHKKMLAVVVSDVEIEGEFQFERRMFGSNPDQLRALVEWLQQQKAEEVVMESTAQYWRPVWETLERYWKPTRQKREGARSTSGTLHLAHAQSNRGRRGRKKDFLDAERLVKRLVARELNLSFVPDAEQRLWRTVTRRKCQLRQNRVRLQNRVESLLEEAHIKLSSFVSDLLGLSAQRMLRALADGETNPAALAALADRKLHATPEQLCDALGACTELNVVYRRLLNMMLGELRLIDEQIGQLNQEMANLLSEHQDAVQRLAEVPGLGVDSAQQIIAEVGATAATFPSAKQLSSWVGACPGEEESAGVNYSHRSPKGNRNMRRILNQAANAAVKSKGTIFEIVYRRMVLRLGHKQTIGVVAHRQCVLIWKVLHDGVRYEERGPAVNKESKQRRTARMNPATPKPRLSDRTSDPELLSKSVFYRRAF

SEQ ID NO: 437788 - protein, 356 aa, unidentified
MKNDNTRLPGSGLTVGIDVGDKYSQICVLDVAAEVIDEGRVRTTWSAMGGRLGAMARCRVVIEVGGHSPWLSRLLEELGHECIVANPRRVRLIADSAKKNDRIDAETLARLGRADPALLSPVFHRSEQAQADLAVIHSRRALVETRTGLVNRVRSLAKAYGARLPPCDARYFPERVAEHVPPQLGEAIRPLLEVVATVSAQIKTLDGRLESMIAERYQQARLLEQVTGVGPVISIGYILTIGDPHRFKSSRQVGAYLGLVPRQHSSGEKTPELGISKTGNVYLRQLLVNGAHYILGSRGPDCDLRRWGLRKAEGGKNAKKRAVIAVARKLAVLLHRLWITGEVYTPLLHEEEVKAA

SEQ ID NO: 437789 - protein, 352 aa, unidentified
MRYYIGCDAHKKYSVFAGISEAGEVIPAQRVDHDRESFRRFLTTSLPRSEIAIESVGNWYWLVDEIEKAGHTPILTHAAKAKLMMGQINKTDKLDARGLAILARNGTVPAVWIPPGELRDQRELPRMRMAMSQVRTKFKNRIHSTFAKYAITFDEVTDIFGGKGRKLMEDALDELPPETRRSVREQLLLLDQVEDSIKKAEKRIRQVIKVDDTMQLLQTMPGVGPVLAIVIALEVGCADRFPTAENLASYAGKVPRVSSSGGKTRYGKVRPDVNRYLKWAFTEAANAIVLQQNRCPDRHVVRLYQRVRKHKGHAKAVTAVGRHLAEATYWMLKKNEPYREPGGEHPVSSTQR

SEQ ID NO: 437790 - protein, 407 aa, unidentified
MRPIYGRCCGLDVHKKTVVACRLTPEGSQTRAFGTMTTDLIQLREWLLAGGVTHVAMESTGVYWKPVFNLLENHGMELWVVNARHVKAVPGRKTDVKDAEWLAELLQHGLLKASFIPDRESRERRELVRYRRSLVEQRAHLVQRIQKLLEGANIKLGDVASDVMGVSGRAMLQALAQGVDDPAAIAGMAKTGLRNKIPELERALTGSVGHHQRFLLRSQFRLLESIEAEIARLDEEVAERMRPFQVALERLDEIPGIGRRAAEQILVETGTDMRRFPTSAHFASWARVCPGNNESAGKRQYASIGGGNRWLRNALLEAAWTVSHSRKQTFFTARYRRIASRRGKKRAAIATAHSLLIAVYHLLRDGVVFQDLGPAHFERRNVDAIVRRSLHRLEVLGYKVTLEAMPA

SEQ ID NO: 437791 - protein, 441 aa, unidentified
MRGIPEEIPDVDGEQILARVCAIDVAKQFGMVCTRLPSQGRRRTSRVWQVAATTNAVTDLAGDLLAAGVEKVTVESTSDYWRIWFYLLEAAGLDVQLVNAREAKNVPGRPKTDKLDAVWLAKLTEKGLLRASFVPPAPIRELRDYTRMRVDLVRDRTRYWSRLEKLLEDALIKISSVASSLTTVSTRAMIEALIQGEQDPQALADLARGRMRGKHDALVEALTGRFDKHHGELARILLDQIDRLDVEIAKLTDRIGQLFDQLDPPTPPQGPTAGDPAAQGARQRLSAIPGISTESAQLIIAEIGLDMTRFPTPAHLVSWAKLCPRTIQSGTSLRAGGAGKGNPYLKGALGMAAAAAVRTKGTFLAERYHRLVKRRGKAKALVAIARTILVIIWHLLADPTARFHDLGADYHDRRVNTTRKINSLVRQLQALGQTVTLQPTS

SEQ ID NO: 437792 - protein, 420 aa, unidentified
MMRLPIQEFAAFIGLDWADATHAICLQAAGSDTRESGMLEHTPEAIDAWARALRSRFGGQPIAVCLELTTGPIVSALRTHDFLVLFPVNALTVAKYRQAFTPSRAKDDPSDAEIQLELLLKHRDKLQVLTPQGATMRTLDQLVEFRRRLVEDRVRLTNRLTSALKNYFPQVLSWFSDKDTTIFCDFLTQWPTLKAVQLARRATLERFFRQHHVQTRVIAPRIQAIKSASPLTTDAGVITPHVCLVRALVAQLRVTVQAIDDFDHAIAQLAPTHPDFALFQALPGAGPVFAPRLLVAFGEQRERYASASELQQYAGIAPVTERSGNTCRVHWRRQCSKFLRQTFVEWASESIRHSFWARAYYAQQRAKGSTHQAATRALAFKWIRILYRCWQTNTPYDESTYLNALARRGSPLIRHLANVS

SEQ ID NO: 437793 - protein, 361 aa, unidentified
MKTTTQHLIAEVPLSSSKAEMTIGIDLGDVWSHYCTLNPDGEVVDRGRFRTTPSGVDKWFTDLPRTRIAMEAGTHSIWISEHLQELGHEVLVANVRELRAISHSDRKSDQVDAEKLARYARLDPKILRPISHRTVAQQEALTLIRARNLLVRLRTAAVNAVRGLAKPCGYRLPASSTLCFAKRCMEVLPPGLVQALEPVLEQIASLTMKIKHYDRLVKKLTETEYVETQALIKVYGVGQLTALTYVLTLGSKQRFQRSRDVGCYLGLRPRRSQSGSHDPQLGITKAGNIYLRSLLVECANHILGPRGKDSTLRRWGLHLGSRGGKQSRNRAIVAVARKLAVLLHRIWVTQQPYVPFYAEAA

SEQ ID NO: 437794 - protein, 342 aa, unidentified
MKDTTIGIDLAKLVFQLHGVNEHGKTVLKKPLKRAQMIPFFTNLPPCLIGMEACGSAHYWANKLQGLGHTVKLMAPQFVKPYVKTNKNDAADAEAICEAVTRPTMRFVPIKNAEQLAILALHRARQGFVKARTAQANQIRGLLAEYGLILPQVITHIGKHVPELLEDSENGLPGAFRQLLMRLHEHLKELDKQVRELEEEIELWHRDSVASQKLAQLPGIGPITASALVASIGNAQNIKNGRQLAAWLGLVPRQHSSGGKQTLLGISKRGDSYLRTLLIHGARSVLRVAERKEQFTGSWLAGVMARRNPNVAAVAQANKTARIVWALLAHDRNYDARYGVAI

SEQ ID NO: 437795 - protein, 376 aa, unidentified
MTMIGTERPDTGVAVILGVDTHLEFHVAVAIDHLGRRLGETSVPTTAKGYERLLRWAEAFGPVRCAGVEGTSSYGSGLARHLRTRSIEVLEVERPRHRRRSSRRNRQKSDSSDAEAAARAVLAGEASGVPKSADGTVEMIRTLRAARSSAVKARTQAANQLQGMRATAPEQLRRRLRGLSTKELVSVAARFRLGDDPRDVPTATRFALRSVARRYEALSEEITELEAHLERLVGQVAPELVSLPGIGTDNAATLLIVAGDNPQRLGSEASFANLCGVSPIEASSGKVVRHRLNRGGNREANRALYMICLARMRRDHRTQEYVARRTQEGKSKREIIRCLKRYVAREVYRVLVSCGAGSSPTGPKAEFHIASGSSAA

SEQ ID NO: 437796 - protein, 299 aa, unidentified
MLQAHTLSVGMEGPTEAIAVASVAQEQGADVIALGTLGTRPGASDPLIRPLQSQSTPRVCVDDAGPCGAGLSRSLTQTGAVGWVVAPSVRPTKAGDRVTTDRRDARPLARRMRSGDLTPVAVPAVHEAAIRDLRRAREATLRDLQAAQVRLTACWRRQDSRSTGQAPWSPAPRRWRSAGGCPTPAPPMVWQEAVQTVTAPTARWPRREHARQAQVPPWRCAPVVEALQALRGVQCPVAVPPVAALGDLTRCETPRHRRHDLGRTPSESSRGARHHQGSMTPTGTTHARRALVAGAWASR

SEQ ID NO: 437797 - protein, 333 aa, unidentified
MKNYTTYLGIDVAKLTLDYCVVTDDQELERGQILNTEKSLNSFLKNLKKTGHKLEEMLFVFENTGIYSSLLSLVLSENELDYAQVPALEIKRSLGITRGKSDKVDAKEIAFYAKRNTDKITLSVLPEVNLQQLKIVFAEREKTIAAIKVFERTMENEMFLSKEVFGSVKSINRQTVKYLKKQLSMLDDRIKKLIREDETLYKQQQLLKSIPGIGEITSVYLLMVTKGFTAFTNGRKFACYSGVAPFEHSSGTSIKGKTRVSHLADKKMKSLLHMVSLTAIKYDPELKEYYTRKKSEGKHTMLVLNNIKCKIVYRIFAVIQRESNFVNLHKFAA

SEQ ID NO: 437798 - protein, 397 aa, unidentified
MYIVGIDIAKRKHEAAVIDGEGAVIIKPFSFTNNCSGYNRLLAMLAKAKLPLDEVSFAMEATGHYWLALFTRLQKEGFRVQVINPVQTNSIRSFYIRQAKTDPRDALLIAEVIRFGHFSESTLHPENIYELRELCRGRHAIVSMQADVKRKVVALLDQVFPEYETAFTNMFSDTSMAILQTCPTPKELSEMPLEELCHLIEVSSHKRFRMAKAQELQELARNSFGFAMAGDVFSTMIRLYAKHLVFLKQQVQEMDRKIAEIMDTLDTPITTITGIGPTLGAYILSEIGDISRFPSAAKLAAYAGIDPTMRQSGEYNGVRNRMSKRGSPYLRHAIWLATSSAVLHDPALKLYFQKKRDEGKPYMASVGHACRKMVSIIYAVMRDNKAYTPCIPNEISA

SEQ ID NO: 437799 - protein, 466 aa, unidentified
MARKRKNDKSKKNRRPIRSLETIQPNAAGIDLGSREHWVAGPPQEDKAPNVERFGTTTPELLRLADWLTQQGVKTVAMESTGVYWIPLFEILESKGFEVLLANARQVTHVPGRKTDMLDCQWLQLLHACGLLRGSFRPADDMCRLRALMRERNTMVEQRSDWVRRMQKSLNQMNVCVHHAVSDITGVTGMRIIRAIVDGQHDPHVLARMRDRRCRKSVEQIAAELTGNWRVEHLFNLRQALKMYDQLCTVVTDYDSEILDYILRLQPADNTDTTAPPPVSKSKARNIAKQGQEPLRQALYRFSGFDLTTIDGIGVDTASVVVTELGLDYTMFPAENNFVSYLRLAPNLSISAGKKVPSKSKASTCTRVASALRMAALTLRNSKTALGAYYRRVAWRKGASVAVFATARKLAQIIYRLVRYGQDYVNTGAQAYEARFNKRRLKFYTKALKEMGYIVEPLSTAEASTT

SEQ ID NO: 437800 - protein, 325 aa, unidentified
MKKIFIGIDISSKTLDICLKMDSTVQYFTIQNELKAISAFFKKHTVEGSVVAMENTGRYNWTLFEVLSKMDLCVYVLSPLHLKKSLGLSRGKNDKIDSLRICSYIEKNQQESTLWKPSSLSIRKLKILLTERESRVRMKGQLARQHHDYKLMKSLEMDKELLKLNKKLIEAIDTQIKKIESDIQKCITEDGELKQKAELIRSVPGVGKVVCWMMLAKTEGFTTITDARKMACYCGVVPFDHQSGTSIKYKARVSVFADKGLKSLLHLAAMSAIRLNNELRVYYRRKVEDGKNKMSVLNAVRNKIIHRIFAVIKNQTMYKNDLVLS

SEQ ID NO: 437801 - protein, 340 aa, unidentified
MQVTTIGVDLAKNVFQVHGIAENDDVLFNKPLRRAQFLPFFAKLEPCLIGMKSCSSAHHWARELTALGHEVRLIPPMYVKPYVKRGKSDAIDAEAICEAVTRPTMRFVAIKTVEQQALLSLHRARDLLVRQRTQLINGLRGLVAEFGVYIPRGLARVIGFAEDITLGEVLDLPDIANEVIRNLSEQLMALHKRIRWYEERLKQVAKEDARVRLLRTIPGVGAVTASAIIASIGDGHQFRNGREFAAWLGLTPANKSSGGKEKLGRITKMGDQYLRSLLVVGMTSLVRQTRSHPERASKWLTSLLERKPARVATVAMANKTARIVWAVLTRDEPYSPRAAV

SEQ ID NO: 437802 - protein, 406 aa, unidentified
MRKLYVGIDLGCKTCAGAVRDSKGKLLETYSFPTSAKNLIDFVGKQKGEVRVLVEECELAGWVYRTLLPHVQSVEVSDPKHNAWIARSKRKSDPVDAAKLAELLRGGFYRAVYHPEDEEMANLKIAVQHYDQMTRTTTRLQNQIKARFRQQGIMTTGKGVYGLAGRQKVISLVKSEAIAEMLRQDFRLLDHAQKERAAARRLATKLSGDLPVIKRLKRIPGVGTISACRFVAYVANPHRFNTKGLVSFSRLAVVKKESGESSIGREHLSKEGNGAMKDLSRTVFNGAMRTRRTNGIRDYYQGSLRRTRNETHDQHNRKRVYPASNQVRLALFVLAYNMGNFLRRFALPSKVAHWSLSSIQLKLIKIGAKVISHSRRTIFQMAEVAVSEALFSALLERIRCLAGAPT

SEQ ID NO: 437803 - protein, 343 aa, unidentified
MKIYALGIDLGKTVFHLVGLDSSGQVVVRKRCSRTQLLAFTGNLQVQLIGMEACSGAHFLGKALRAQGHDVRLMPAQYVKPYVKTNKSDYIDAEAVAEAVQRPRMRFVPIKTEEQLDLQALHRVRERWVMRRTAVVNQIRSLLLERGLTLPKGRSHLGQMLPRILEDAELKLSGAFRVLLAQLKLELEQLAARIEQMDMVIQQEARENESCQRLTTIPGVGPVTATALIAAVGNGSAFGKGRDLSAWMGIVPGEYSTGGKQKLLGISKRGNKYLRRLFVQGARSVLQHRDKQAPGLNCWLAQLLARTHQNVVVVALANKLVRIAWAVLCKNENYRAPVLAATT

SEQ ID NO: 437804 - protein, 342 aa, unidentified
MDHFAGLDVSVKETSVCIVDDTGKIVREVKVASEPEALLAVLKNPAYRFKRIGLEAGPLSQWLFSALAEAELPVICVETRHMQAVLKAQINKTDRNDARGIAQMIRVGLYRPVHVKTLRSQKLRMLLTHRKLLQSKAIAIENDLRATLRNFGLKVGMVGTVKFEARIKELVENQPDLASLVEPLLIVRRALREQIVILHRRLLAIVRDDEVCRRLMTIPGVGPVVSLTYRATVDVPARFRKSKAVGAVFGLTCSKYQSGEVDRSGRISRCGDEMMRVMLYEAAQSMLRSKKWSWLKAWAMQIARRRGMKKAIVALARRLAVIMHRIWVDGTEFRWTREAATA

SEQ ID NO: 437805 - protein, 357 aa, unidentified
MNKITRIGVDLAKNVMQLHAVDEAERPIVRKAVSREKFLDWFANREPCLVAMEACSASHFWARRLRALGHDVRLLAPQFAAPYRKGGSRVKNDALDAEAICEAASRPHMRFVAVKTPEQQSVLVLHRIRTGFVEQRTSLVNRMRGLLAEFGVFLPQGIDRFREQFVKALEDGANELTGIARAALMRMWAQHKTLDEEICWLDAQLAEHVKNDADAQRVMAIVGVGTVTASAAVATIGDPRQFKNGRQFAAWLGLVPKQASSGGKTRLGRITRQGNDYLRTLLVQGARSAVVTAARRHDRVSRWIVQLQQRVGYYKALVAVANKHARILWAILARGDQFDPSRVPARHEQPDPCPIPA

SEQ ID NO: 437806 - protein, 382 aa, unidentified
MPAYADPTPKPISADTIFLAFELSGTSWLVALHAPDADKVERHRLPAGVAAEVLGLIARTKARVTRRLGTTPRVACCYEAGRDGFWLHRVLEAEGIASHVMDPTSLQVDRRARRAKTDRLDALALLRALMAWSRGERQVCSMVRPPSPEHEDERRLSRERGTLLKERLRLSNRIKGLCAAQGIYDYEPLGADRRERLARLVTGDGRALPGRLAAEIGRQLDCLELVLRHLAEVEAVRDARAAQARKEGGSKLAALLRLKGIGPEVATVLELEVFHRHFANRRDVAAYAGLAPSPYASGGTSREQGISKAGNRRARKVLIELAWLWLRHQPESALARWYRDRVGTATGRVKRIAIVALARKLLVMIWRYVETGLVPAEAAVRT

SEQ ID NO: 437807 - protein, 405 aa, unidentified
MEVVYNRCCGLDVHKKTVVACIITPEGKEIRTFSTMTDDLISMVDWIKDKGCTHVAMESTGSFWRPIYNLLELEGIQALVVNAKHIKNVPGRKTDVKDAEWIAGLLRHGLLQGSYIPSRDQRELRELIRYRRSLIEERAREINRIQKVLEGANIKLSSVASDVLGKSGRAMIEAMIAGEEDPEILSELAQRRLKNKKADLRRALKGLIGPHQKLVLKTQMRHIDFLTDEIKKLDEEVKKRMLPFEEDLGLLDTIPGVGRRTAEQILAETGTNMDQFPSAAHLCSWAGLSPGNNEIAGKRKSVRTRKGNQKLRSALVEAARAAARTKNTYLSSQYHRLAARRGANRAAVAVAHSILTIVYYMLKQKQRYIELGPAYYEERKRETVIRQSIKKLESLGYKVTVELIA

SEQ ID NO: 437808 - protein, 349 aa, unidentified
MSVAADADFVAGVDTHLDTHTAAISDGRGHLVAGRQVPASEAGYQELLAWARAQAAGRTLVWAVEGAGHYGLNLARHLAAAGEQVAEISHTPHVGKRRAGKTDAIDALRAARELLAAPRPAQPRADGDREALRLLMTDRDHAVRSCRSARALLAATLVTMPGWLRDQLRALPPGRRARACAALAAPEGADRLATIQHQTLARLGQRIEDLAGQARQIEAEIAQIVEDLAPGLVAAEPGLGYLSAAQILLSWSHRGRVRSEAAFAQLAGVAPIPASSGRTIRHRLSRGGDRQLNRALHAVIITRTRSHQPTRDYITRRQADGRTPKEIRRCLKRYLARHLYRELNRLDTT

SEQ ID NO: 437809 - protein, 420 aa, unidentified
MEVFVERCAGVDIGKDEVVACVRTPGPGGRGRRKETRTFSSFTGELEAMADWFGAEGVTAVVMEATGSYWKPVWYVLEERPFELKLVNARHVKIVPGRKSDVLDAEWLAELLEHGLLRGSFVPPPAIRELRDLTRYRKRLVQAHTSEGQRIAKTLEDAGIKLGSVASSVLGVSGRNMLRALCDGERDPEVLAELAKGTLRKKIPELRQALRGRFREHHALIIGLSLDHLAHLEAAQAALDARVDAVLAANISEAGIPFQRARDHLDTIPGVGKRAAETIIAEIGVDMTRFPTAAHLASWAGMAPGNNITGGKRGSGKTTAGDVWLRDVLTECAWSAARTRDCYLAAQFWRLARRIGKKKAAIAVGHSILTIAWHLLTNDSDYEDLGGDYFTRRANPDRQRDRLIRQLHDLGYQVNLARVA

SEQ ID NO: 437810 - protein, 436 aa, unidentified
MTLINFVAANQKYYAFNLLSVFIMVFWSVQYLLQHLLVQTQVSHQLLQPLILILQLPQTPQFRHARPGKFFLPVNGMDYFLPLRLTVRNVLTRRITVNIVFLGIDLAKNVFQLCGLNQAGKPVYTKRTGRKELLQTLANIPACLIGIEASTGAFYWQREFEKLGHKVKVISPQYVRPFVRGQKNDGNDAQAIAVALMQPTMQFVPPKSPEQQDIQALHRARQRIVNHRTATVCQIRGLLLDRGIPIGSAVSRARRAIPLILEDAENGLSSRMRRTIAELYDLFNDLGRRIHFFDKEIETVFRQSEACPRIAKVKGIGPKTATAVVAAIGKGTEFKNGRHFAAWLGLVPRQHSSGDRQVLMNMTKKGDKHLRTLFIHGARAVVRVATNNNDGHMNQWVNQLKERRGFNKTTVAVANKNARIIWSMLRNDTGYQVVCN

SEQ ID NO: 437811 - protein, 521 aa, unidentified
MSRPRANRSAKTRKAFLLQKPTGQFTPRVQAVGPEHFGIVAIDCAKARSRYLLADFYGRTLLEPTTLAHTAADFHNAIARIRQGLQQHDLRDVVVAIERTGEYHQPVQRAFRQARFETRLVHPFTAKQYRQPAAPGNKTDDTDLAAIFRAATQGFGLCEPTWPDTYVTLQLLRRHRRDLVSKNTILCCQIREVLHAAMPGYAECFDRLWAAPTALMLARHTTSAQAVNQAGRQGLQQIAADAHIPCQRGTLDKILAWAQQAPPGHDQSLHLRHILNVLDDDRRQKTQQILELERCLAHLVVATPYALLLRIPGINIVSIADLAGELGPIPLYLNANAITGRAGLMPCRYQSDRVDCANGPLQRRGHRRLRAVLMQCASNLVQYNHHFKARAQLWKLAGKDPRWIRVKVAKIFSRLLFASVAGRHVFPHPCCQPRHYILGKLLTFHQEHHTPPDQMRQDLEAVVEFLPASARADEAQPLQGLLDEQAKRRRGPQPLARVIPLVLARLGLTAVQSTGSESAGP

SEQ ID NO: 437812 - protein, 393 aa, unidentified
MIPQKLVGIDVSKDSFTLAILSPEDGSFSTHTLSFSHKDLRRLPFLLNYPCRIAVESSGPYSTLLMGNLRKMGLRPLLINPLRIKRFSSSLSLRLTKTDPIDARTIALFLASDHNTASSPDPKRQSLAELSRQVEALSQSIASLKNRIRQLLHTLFPELPNHINPFSKSVLHLLLAFPSAQALSRASLESIARALRRAVSKRGRKLSLSPHQLKELARGSIGLSDPAREALLQSLIRQLLLLEEEKRLLSQELIRQARKLAPRAWETLLTIPGMGELSAATLIAEIGDISRFPGAKQLVAYAGLDPSVYESGKIRRRSRISKRGNPHLRRILFILAQHLVRRTQTFYAYFHRLRQKGKAYRQAMVAVAHKLLRVIYALLTKGSPFQDNYSPNS

SEQ ID NO: 437813 - protein, 485 aa, unidentified
MGDRRLVGVDLGIASAHTVRVLDGQGNVVAKRRAWPTVESLSDIERAALAGAVEGTRLEVVMEPTGPAWLPIAVFFTSRGHVVHRVSSAKSHDLRKFLSRHTKTNGIDADTLARIPLFDPSGVQPLVLATEERAGLDRRVRATDRLTRAGADHKRRIKDLTRQVMPMTPLTGAISRSDLAVLERYADPNALVRLGAKRLAKIIAKASANKHGTDRAVEWIAAATSALELYRDHPAVAFVAIAEEIATEVRLLRAVEAERARHAAAREDRYLVVDPDQLARSIPGFSTIGGPSLVACMGDPARFAKGKQFRSFTGLTPKASETGNTDRKGQPMSKAGSSLLRTTLIRAADIGRRHDPQLARIYYIQMVERGKTHLGALCVVAANLAERAWTVMNRNSPYIVCDVDGTPVTNEQAKAIIADCWTVPAEVRARRRSAKATPKGKAPQAISTRQPTPYANGADTRDDLPRSTSSTPRPHQIKTLAESPA

SEQ ID NO: 437814 - protein, 314 aa, unidentified
MSTEYFVGIDVSKDTLDVCVYPTQDTFRVPNSPDGLDELIKRLKPIEPRLIVCEATGGYETLAVSSLAAAGLPVVVVNPRQIRDFAKSIGQLAKTDSIDAGVIARFASAVRPELRPVKDSPSQALSGLVTRRRQIVEMIVAETNRLQAATRRNRRDIQTHIGWLQKRLKQIDDEIKRDIKNGPLWRTTDHILQSTPGVGPATSAMLISCVPELGQLDRKKIACLIGVAPLNRDSGRYKGRRTIWGGRAQVRSALYMSALSAIQFNPVIRQFYQRLREAGKCFKVAIVACMRKLLIILNAMVRNQTKWRHGEINP

SEQ ID NO: 437815 - protein, 334 aa, unidentified
MNNANMASIGIDVSKDKLDVCLLKANDKTIYKVVSNDPKGFKQMLAWVKRMAPDFEMHYALEATGTYSNAVAEFLVQNELKVSVVNPALTHSAATTYKIGNRTDHTMAYVIAKYCRDEKPALWKMARPEIRRLTALVRRREALKVTLVQEENRIQAPGNEKEIILSIKKSIAFLTQEISAIESKIKDHIKNTPSLKEDAKLLESIPGIAAITTWAILAEMPDVEDFKEASSFAAFAGLAPYEQSSGSSVHKQTHISRQGSNLMRAQLYMPAVSAITHNPLVKALYDRLCAKGKPKMVGICAAMRKLLLLAFGVLKNRKKFDESWGVKSATLAEA

SEQ ID NO: 437816 - protein, 307 aa, unidentified
MKQQEIRFTQVVKVGCGIDVHKDIIVATIRKSNDEYETREFEAYTSSLTCLRDWCKTEEVSHVAMESTGVYWKPVFNILEESFEILLVNARHVKNVPGHKTDKKDSAWLSKLLLSGLLKGSFIPPCDIRELRDLVRYKKKVVAQAASEKNRIIKILEDANIKLSSVLTNVDGAVGSKIINSFIEGKTNVDELMKFYHGKMKASKSEFRKALEGKITQHHSFMLQLHKDSIVDKEILITRIDAQIDKATKAYQVEIDLLQTIPGVGKDSAVSIISEIGADMNVFPNENHLSSWAGMSPGNNETGGKKK

SEQ ID NO: 437817 - protein, 370 aa, unidentified
MNKIIRVGIDTSKSVFVLHGVDAAEQPVLRRKLRRSQMVEFFAKLEPTKIGIEACGATHHWARELCALGHEVLLLPPQYVKPYVKRNKNDAADAEAICEAMSRPTMRFVPVKSAEQQAALMLVGRRDGLIRRRTQLTNTIRGYAAEFGLVAAKGLNKIEPLLSRIAAEEDLPELAKELFADYGREYVELGKQITKINAKLMAWHKQNEQSRRLAEMPTIGAIGAALLTMKVPDPGAFRSGRDFSAWIGLTPKDHSTAGKVRLGVITRAGDEALRSVLVAGATAVIQQVRKGRGHPSPWLLELLKRKPPKLVAVALANKMARIAWKLMVSGERYDPQRAAGRLVPPTGRVAPRSPRQGRFAPPAGVAAGQP

SEQ ID NO: 437818 - protein, 394 aa, unidentified
MFIRSIFCAIYNGEDYSQVKEFSTMTPNIYSMGEYLQSEDVEEVALESTGIYWIAVWDMLYGMGFKLTLVNPYFIKQMPGRKSDVKDAQWIATLLHKGMLRGSFVPPPVIRELRIYSRKQGKLKQQVTRVLTAMDDILIKCGIRASSCLSSISTKSFMCIVEALIAGWSDPGYLTSLVYGNRKNKQSGKLKEALTGNVKAHHRQELSWIKQEYDMYQMQISECLSQMCRICDEHFSVMVKLLQTIPGISQIAAMTIIAETGGDMSVFESSDKIVGWAGLRPRNDESAGKYKSTATTKGNKYLRSILVQVSWAASRMKGSFFKEKFQHLAMRKPRKKALIAIARKLLVIIWNVLKYAEEYNPKLVPVQDPVKMKARMAYHKKEYEKAANLLNITG

SEQ ID NO: 437819 - protein, 337 aa, unidentified
MNKFCKPKTDGSVFKNMFVGMDVHKNYLQVAVLDERGKVLNNSRVDNNLIKVNEFFDTLHPGNNTKVVMESSGMWYNIYKILSEKNLDVRLSNPTKTRAIASAKIKTDKLDAVKLADLLRGGYIAECYIPTREMMDLRELVRHRAALVRMRTKLKNKIHSIIAMNGTSISYAGTTFTKGHIEKLKELNDYRINGYLRIIEPLNDEINAVSKKILLLAQEDEMAKLLMTVPGIGYYSALLIVSEVGDINRFPDSYHLCSYAGLIPSTHSSGGITYHGSITKTGSKYLRWIMLECLHAHIRNDKNSNITQFYHRISKKKGNSKAAVAAASKLLKVVYWV

SEQ ID NO: 437820 - protein, 412 aa, unidentified
MEGETVIAGVDTHKDVHVLCLLDGLGRKIWSGSFGADPEGYDRLAEAIGDPGGCMVVGVEGTASYGAGLTRRLVELGYNVVEVLRPKRDKVRPGEGKSDPLDAERAARKAASGKGCSVPKSQDGWVEAVRQLYVARRLAVATSTSCVACAKSMLTTAPSALRERFRGRERPKDLMPLLARGRKAGDALEESVLASLRSVAAVWKEARSQVESLDERIRALLEANAPALLGVEGCGTTTAAALVVAAGDNPGRLRGEAAFSMMCGASPIPASSGKTDRHRLNRGGNRQANWALYEIAIKRMAYDERTRRYVARRTSEGKSRREAVRCLKRYIAREVYRVLMDPNPDGAAPEGPELAKMRKAMRVTQKKAAAELGLSAATLGHLERGKRRSTKLERRYYELLCELERALPQTAS

SEQ ID NO: 437821 - protein, 419 aa, unidentified
MKEWKEITHYAGFDWARDHHVVVVVDRQGQIVADFQFDHSVEGWKRFRQKTAALESVAVAIETSQGAVVDQLLQYQYTLYPVNPAAAASYRQRKAPSGTKTDHLDAWSLADALRVDGHGWKALAPMDELSAQLRLLCRDEVALIEQRTALVNQLQQALLEYYPVALEAFEDWTMPSTWDFIIQFSTPEALVKAGKRRWKKFLHTHRLWRAQTLEKRLALFAQADQFKASVAITKAKSQLALSLCKLLRTLQEQLDQYRKQIEALFENHPDHHLFGSLPGAREKLAPRLLAAIGSDPKRYGSFQVLQSFAGTAPISFQSGQLRRAKVRWACDTFLRHTVHLWADCFRKASAWGQAYYRKKRQDGKSHACALRCLGQRLLKILFRMLTERKPYDAELHARNQQKHGSWVLALLPQPTPPPQ

SEQ ID NO: 437822 - protein, 501 aa, unidentified
MIQIPAVIERCAGIDIGKRELAVAVIVGPADQEGEVKTRVFGTTVPALEELKQWLIQEGCASVAMESTGSYWIPVKNILEGSVKIVLVCAKKHKPERGDKTDFRDAKNLGHLHRHGLLTGSFLPDRHIVELRDLTRRRKKLLSNLSAEKNRIQKVLEVANVKLGNIVSDVFGVSGQAMVSELLSGRELEAEQIADLAKRRLRQRIPELTDALQRHQMNDHHRWLIGQSVEHAVLLDRQMEELEAMIQKKLEPYRKQYELLQTIPGVKEMTAASILAEIGPDMNQFRSAKSLCSWSGICPGNNRSAGKSKQSHIKKGNKFLLAALAEAGWGAARKRDSIFQRKFYRWMNKLGKKKTNIAIGRSLLTVIYAVLKEELPYEEPDPEQMHELEKAKLVRHHSKRLRQLGADEDLINQMVGKLNAKPAVCPPTGEKQTEPVALTPPPRILKTSPAKVCRGALGFRARTTRKQKYSVVKERAAAAPSQARPQSKRKKPTQNETPKQE

SEQ ID NO: 437823 - protein, 362 aa, unidentified
MRKLSKQAQRKQWAQDKPAMTMGIDVGDRFSHVCLLDDEGEVVERDRVRSTEAAFRRHFEGAPRLRIALECGTHSPWMSRLLKQLGHQAIVANARKVPTITQSESKNDGRDAEQLALMAAFNPKLLSPLEHRSLLRQQDLNLIQARAILVKARTMIVNALRGLVKSAGGRLPACSTESLPDRAAGAVPPALTDVAGPLVEQIARLNLQIAAMDQQIEKLAIKYPEIGTLRSAPGVGALVAAAYVLTLDRPNAVPSSRSAGAFLGLRPGQSQSGDSDPQRRITRTGNTYLRCLLVQSAQYILGRFGPDCALRRWGLKLAASGGKRAKKRAIVAVARKLAVILLSMWRSGQRFQPFPLSAPAAA

SEQ ID NO: 437824 - protein, 421 aa, unidentified
MKFKAQDKQNQLIENITVHHLVVGVDIAQEVHVARAVNFRGIALGNPLEFRNDEEGFKSLHRWIRDLLVSYKLTTTIVGMEPTGHYWLGLAHFLKDSEVEAVLVNPHLVKKNKENRDNTRSKSDMKDALVIADMVKNGYYSPVRFHSAEYEELRVLMANRETVVKRLVSATNQIHRWVDIVFPELRQVYKVLTCKGALATLKLFPLPAELRKLEPDDIVSGWRTVMQRHSGFRRAKLLIDLAKRTVGSKQASYAYKLHLKHLLEEYDLASAQLRRIEEEAKSVLERIPYARKILAISGISSTALAGVLGEAGDLSKYAHGNALLRHAGLNITEARSGKWSGQLTLSKRGRPRLRHFLYLITMSMVMNNAEFTALHQLNVHVKKLKKMKSIMKLCGKLARLLVGLARTEEAYNPSKVLALAA

SEQ ID NO: 437825 - protein, 342 aa, unidentified
MEISTVGLDLAKSVFQIHGVSDAGDVVVRKALRRSQVLPFFAKLPPCLVGMEACGTSHHWARELIKLGHEVRLMPPAYVKPYVKRGKTDANDAEAICEAVTRPTMRFVPVKSPEQQAALALHRTRDLLVKQRTQLVNMIRGLLAEFGIEMARGLHHALALAKRLIDGHAADVPELAQRVVASLARQIGILQDELAALEKELLAWHRSSELSQRLATIPGVGVISATALAASVSEPERFRSGRQFAASLGLTPLQQSSGGKEKMGRITKMGDRYLRRLLVVGMTSLIRRARTAPESVDPRIPAMLERRPARVVTVAAANRTARVAWAIMTKGGSYRKPAAAIA

SEQ ID NO: 437826 - protein, 340 aa, unidentified
MQVTTIGVDLAKNVFQVHGITASEEVVFNKPLRRTQFLPFFAKLDPCLIGMESCSSAHHWARELTALGHEVRLIPPMYVKPYVKRGKSDAIDAEAICEAVTRPTMRFVATKTVEQQSLLSLHRARDLLVRQRTQLINNLRGLVAEFGIFIPKGLARVIGFAEDITLGEVLDLPDIANEVIRNLSEQLMALHKQVRWYEERLKQVAKEDARVRLLRTIPGVGAVTASAIIASIGDGHQFKNGREFAAWLGLTPTNKSSGGKEKLGRITKMGDQYLRSLLVVGMTSLVRQTRSHPERASKWLTSLLERKPARVATVAMANKTARIVWAVLTRNEPYSPRTVA

SEQ ID NO: 437827 - protein, 348 aa, unidentified
MGKIVKQVAGIDVAQKELVETLGHLLDDFSIELFAYKLFKNSDSGFKSLVDWANKLTNNEIDVHYVMEATGVYHQKFAYFLTDNNYRLSIVLPNKISNYMRTLELKTITDKSCSQAIAQFGLERKLDKWSKPKVTYKELQQLTRERDQIVQERSIIKNQIHAEITEAEPNQKSMERMQSRIRFLNSQEKEIKEDINSIVKENPDLRQIIDRITTIPGVGELTAVIVLAETNGFELIRNKSQLSSYVGLDVKEKQSGTSVKGKPRISKKGNRALRKSMHLPALTAVKWDDNFRETYARLVSKHGIKMKALVAIQRKILQLIYILFKNETIYDKDYKIKNSVKHIRFNTL

SEQ ID NO: 437828 - protein, 336 aa, unidentified
MFIIGCDFHTRFQQIAMVDSPTGEIIERRLDHESGEARKFYEALPSPARVGMEATGHAHWFERMLAEQGHELWVGDAAQIRAGIVRKQKTDARDAFQILKMLLENRCPRIWIPSPAERDLRQLLQHRVRLVRFRTSVMNQLHALAMGQGLCRRKKLWTTVGRKELEGLPFGPWANRRKQELLEMLDRLRPSIEELDLAVEKEAASRADAVRLMEQSGVGPVTALAFVLTIGPIDRFPKSKQLVSYLGLNPTESSSGGKQRLGSISKQGNSMMRYLLVEAAHVASRFDAELRRNYLRLMFRRGSAVAKVAIARKLAVRLYWKLRDVSQPSAAGSHAG

SEQ ID NO: 437829 - protein, 350 aa, unidentified
MTNLARSITGGVDTHLDVHVAAALDERGTLLGVESFATTESGYKKLLGWLSDFGTVELVGVEGTGSYGAGLTRHLQGENVRVVEVDRPNRQRRRLKGKSDPQDAITAARAALSGEAAGEAKTRDGNVESMRVLRVARASARKARTQALNQMRTLVSTAPDPIRAELRGLSVFNLLERGSSYRPGAKRDIVSLTKFTLRMLARRALTLEEEISEIDAILKPLVKETAPELVATLGIGTDAASALLVAAGDNPERMRNEAAFAHLCGASPLDASSGKNQRHRLNRSGDRQANSALWHIVLTRMVYDPRTTEYINRRRTEGLTKKEAVRCLKRYVAREVFSLLPHDTLGLDSP

SEQ ID NO: 437830 - protein, 342 aa, unidentified
MQVSTIGVDLAKNVFQVHGVDSAGKVVIIRQLRRKQVIDFFSKIPPCLVGMEACGTAHHWAREVSKLGHTVRLMPPSYVKGYVKRSKNDAADAAAICEAVTRPSMRFVPIKSADQQALLMLHRTRDLLIRQRTQLTNALRAHLAEFGLVAETGREGLAQLAAIITDESNREALPSAMKQALQAIVDQLAALELQIGTLDRAIHAHHRANDMSCRLETVPGIGVIGATAIASTVTDPSDFKSGRDFAAWIGLVPRQHSTGGKERLGGISKQGDRYLRRLLVIGATAVVRHARQCPQKHPWVMKLLGKKPAKLVAVAVANKMARIAWAIMAKGGYYRAPELAAA

SEQ ID NO: 437831 - protein, 329 aa, unidentified
MTPISVGIDVSYRKVDVSLSSATGGKAQSFSAENTSAGHQRLVARLLRYRRPVRVCVEATGVYGFDLALTLASTENIDVMVVNPRRARRFAEVMGLRSKTDRIDAYCLLQFCTRIEFEPWEPPLKHAIELRTITRRLNTVIDLRTQEKNRLHAANVTRELGVIREDIERLIEQLSESIDRLEAAAVKLINEHVSLREDFERLCSIPGIAQRSAVKLLGELVTMPSGLSARRATAYTGLDPRIFKSGSSVVKKTPISKRGNRYLRSALYMPAHNAIRLDPALKAHYDRLLDRGKTKMQAKVAIMRRILVIIQAIRRDKTYYRPETRKIAA

SEQ ID NO: 437832 - protein, 557 aa, unidentified
MIDRSWQQVYGARIDDLHLPGSQAGRRELMVRYGTDGYFLLEQVHGPGAPGWLRELPAVQALRRIWVQQFYREITGGRQEVRRREKLPGGDGLPPGRDCLISPYDLDARYGIKRETGWGGYKVHFTETCDAPEKHPGASPDTGPGQGDRPNLVTAVATTEATIPDSTMTTAVHQQLEERCHVRGTSPASVAAASTTYGLREQVPCPNSGRSSRRSLMSIVGAFDVHRRQLTFEYLDTVTGELKRGRVMPADRPHLRAWLSRFAGQEDVQFALEGCTGWRYVVEELLAAGIIPHLAESADTAALRGRKRHAKTDKTDTRHLRTHLMAGDLPECWISPEHVLEARATARLYKDLVDERGGWHQRVAATLFHQGVPAAVSVAKPDGRAAAEQAFLSPAGRQATETGLRQIDRLTAELEPLRRQLDMLSRRQPGCRALRAAHFGIGAVTSVAIWAELGDVRRFGNSDDVVRHTGLDITVWSSDGKGPPGRLSRQGPPLLRWALYEAAKCAARPAAPDYGYYAAARDDRGGGRATLSVARKLARRCYHTLRELGEDALAPAA

SEQ ID NO: 437833 - protein, 431 aa, unidentified
MNRSVEFLSVGIDVGADFSLLAFALPSQELLGKPYKIIHSSQRSLNGAVEKIKTLSQKYQLPARVFMESTGIYHYPLYHKMKDAGFDVFVLNPLVTHTGRDLNVRNIHNDKYDSQKIALLGLRSGLKTSLIPSDQVISMKVILREYYAVKKEISMYICRLKNQLRQAFPQFLPLFSKVNGVTAMAILCEYPNPESLLNAGEHAVADFMKSVSHNGPLKVQKKAAALIQAAQDARSFGHWNHGISILIRHYIEMIRLLDVRAKTLLAQAKALLAEQDSKTLAHQTELLQTIPGIGFLSALTLICELGDFSAFKRPKQLFSYFGLDPIVRQSGNYNGTNLKLSKRGSPFARRCIFVIALQSISLNIHKEPKNPVLRTFYEEKCMCKAKMTAIGAVMHKICNLIFAVLRNDAPFVLQTPEQHNAAYLSKTHSVA

SEQ ID NO: 437834 - protein, 440 aa, unidentified
MGCRARPWGVSTGSLERRGALADYGQLLGASARRTGLLFLGDDWAEEHHDVELQDHTGMRLAKARLDDGVDGVTKLHELVARHRDSVDSEVLVGIETDRGPWVQALIAAGYRVYAINPLQVARYRERRTVSGAKSDAGDAHTLADMVRTDAHQLRAVAGDSDLAEGIKVLARAHKTLIWERTRHVLRLRQTLREYFPAALHAFEDLDSPEAIELLAKAPTPVAAARLSITQIEAALRRARRRNISAKAAELRNVLRADHLHRSEQVTAAYAVTVRSLAALLATLNTEIATLAAEVETLFDRHPDAPVYLSQPGLGPILGARVLGEFGDDPGRYQDAGSRKNYAGTSPITRASGKKKYVLARYVHNDRLVDALGRQAYTTLTASPGARRYYDELRSRGISHHAALRQLANRMVGILHGCLKNRESYDESKAWSHRAKPSAA

SEQ ID NO: 437835 - protein, 350 aa, unidentified
MIIIGVDFHPEFQQIASVDTDTGEFQEKRLTHREEAEKIYRALACAGQKVRVGREASGHARWFERLLAELQIELLIGDAAEIRTKRVRKQKTDRQDAQLILSLLLEDRFPRIWVPSWENRDLRQLLWHRHRMVQARTRIMNQLQAVALNEGLRCKKKLWRERGREQLESFRLAPWASRRRRDLLELLDRLNPTIAELSQAIQQEVEKCPEARRLMTHPGVGPLTALAFVLIIGEADRFQCGKQVASYLGLVPLEDSSGNRRRLGHITKQGSSMLRFLLVEAAQVTARSLPQWRSKYLHLMMRRGRKTAKVAMARRLAVHLYWMMRQGWDYQQWIKFGSHAGQLGNRHGVQ

SEQ ID NO: 437836 - protein, 407 aa, unidentified
MAAVMIGIDPHKATHTAVAISAAEEPLGELRVRACAAQAERLLAWAAAWPERTWAVEGAGGLGHLLAQQLVASGERVLDVQPKLAARVRLLDAGATGKNDPNDARSVAVAALRSAACPPVRADDHAAVLKVWAKRHRDLSRARNQVTCRLHAVLCELVPGGVSQQIHAAAAARLLDQIEPAGAVQAARRELAGEFLADLRRIDAQRGDTRRTLAAAVRASGTTVTEVFGVGPAVAAAVIGDVRDISRFPGPDCFAAYNGTAPTEMSSGNRKVYRLSLRGNRRLNHAIHMAAVTQIRYRHTKGRAYYDKKIAEGKTSKEALRALKRQVSNAIYQRMKADARRAGAGPGGHPGNGSVASAAGSHPEHRLFGPATPGPEPTLRPRPGPSKATRPGSSRRTRRSVPAPGST

SEQ ID NO: 437837 - protein, 312 aa, unidentified
MKNICGVDISKARLDACIEPGSIRGSFANDPAGIAGLAAFCRQHRVELVAMEATGGYERRAFLLLWEQGLPCTVTNARQVRLYAEAMGVLEKTDTIDAHIIARFAQAKNLKPTPLPSSSQKRLKALVARLRQLTDDLTVQKQRRSSLFDDAEMLASIDEVIALLKRQSRTLEGEIGSMIDDDSLWACLSDTFRSIKGVADRTVAWIMADLPEIGTYSNKAIAKLVGVAPIANDSGKRRGKRPIRGGRAGVRSILFLVAAIAARYDKSLDEFRARLVAAGKEKMVIRIALARKLLVRLNAKARDARAQYANAT

SEQ ID NO: 437838 - protein, 435 aa, unidentified
MSNILFKNLFISVGIDVGADFSFMSIALPNQTFVGKPFKILHSDLNSLSLAVSKIKEAEELYSLESRIFLESTGIYHYPLFCYLRDKGFNCSVINPIITKNSTNINIRKVHNDRFDSKKAALVGLKPDLKVSLMPSDLALNLRNLSREYYDLMDNRSAYVNKLQGELRMVFPQYLKIFSKITTNTSLTLLEKYTSPEAFLNATKDEIIDSILSTARFGLKYAEAKYNAIIQAANDASTFGYSVSSNFKRIRLYIRLIRNYDDEISSILSDMHKLVDANETTDFVKQIHLIESYKGAGFLSAVSLMGEIGDFSAFHSPKQLFAYFGLDPAVKQSGKYEGTKISMSKRGSRIARRVLHTMALISISKNKNGSAKNPVLRDYYLKKCQSKPKMVALGAVMHKVCNIVFAILRDEKEFTIITPKEHQTNYLKAKCDKAA

SEQ ID NO: 437839 - protein, 341 aa, unidentified
MNSIYYIGLDIHKKVIAYCIKRIDGALIRQGTVAAERKALNRWLAELPGPWYGAMEATLFTGWVYDFLKPYAVELKVAHPAMLKAITAAKKKNDRADAEKIADLLRVKLLPECHMMPEELRELRRVLRYRNMIVSTAVKMKNKMSGLLMEVGAVYDKKRLHGKKYFGALLERVEDVPDSVKGLLKLSRNGFEMFDDIQKQLVAALRKNRMIRERVERLMSIPGVGELTALTWVLEIGEVSRFNSSRQIISYCGLCSGQHESAGKEQRGPISKKRNKHLQTKLIEAAKIAPHWNEQLALLHEKELARGNKNRATLVVARKLVEFMLAVDRRETNFELLKEAA

SEQ ID NO: 437840 - protein, 351 aa, unidentified
MDRYVGVDGHSRSCTFGIVSASGRRLESKVVETNGRALVEAVRLIPGRVHVCLEEGTQSAWLYELFKPHVAEVVVSMPSKAKGAKDDKRDAWARAQELRLGAVETRVFKAPQHLAALRSAVRAYGFAVTDVVRAKNRLKAVFLGRGIVADAGVYDPERRDGWLAKLSGPYRQLAEVLSRQLDLVVPAWDEAESWLLKESKSHPIIRKLLTAPGMGPIRTAQVVAIVAVPDRFRTRQQFWSYCGLGIVTRSSADWRPGRKGGLERAQTLSTRGLTRKRHPLLKAVFKGAAMTVITQLPNDPLHVHYQRMIEKGIKPPLARLTVARRIAATVLSMWKNQEVYDSKRHAVVEQP

SEQ ID NO: 437841 - protein, 411 aa, unidentified
MTLFVGIDVSAKDFKVRVLNSTGEEPAKRFKAENNLPGSQSLIAYLLPICRQHHVSRLVFGLESTSIYSWHLQMFLAEQDSLAAFAPQVYVFNPKVVANFKKAYVDLSKDDWTDAWVIADRLRFGRLPEHSQVDFRYLPLQRLTRFRCHLIQTITREKNYFLSNLFLKFCSLSQDGVFSNCLGASAEAVLLEFFSPEEIAASSLEDLIDFLMDKGKNHFRDPAKTALALKQAAGRAYRLKASLLEPVNLILATSLETIRTLELQVKKIDRAIENELSHFPSTRASMPGLGPVFVAGLIAEIGDIRRFPNEAALAKYAGLTWRTHQSGDFSAEDTPLTKTGNSYLRHYFVQGANSVRQFDPIFREFYARKVSESSKHAHRRSLVLTARKLVRVVDALLRSHQVYLPQGGRRA

SEQ ID NO: 437842 - protein, 338 aa, unidentified
MTYIGFDHHKKWTQAVGIDDQGKIIREMRVLNDSSSLKGFLKGLPKPLTGVVEAGPTWGWIYDTLTELGVKMIVANPSAVRAIAEAKIKTDKIDARMLASLLRVGLIPEVYVPTEEVRSQKMLWRERIWLVRMHVRLKNRIHRLLNHYHMEVPEFSDLFGVAGRRFLEELKLPEPGNRILKAQLKLLQSYRLQIEEVQRWAVKASQGHPNRAYLESLPGFGKIFAPIVALEIDDPKRFANPGKLASYCGLVPSLYSSGGKSWQGGIGKEGNHWLKWAFIEAAWAAIRSSAYFRLVYQRLRQRKTAQVCIIACARRLCEIAYHLLKEHRYYEERPFRFA

SEQ ID NO: 437843 - protein, 405 aa, unidentified
MPYILALDVSMGHSYSVLYKDDTCLFEDEIEHTQRGFHALLEEIQHLPERPLIVFEATGIYSRPVEKFFQDHHFSYCLLNPLEAKKQMEENTLRSWKTDKSDAHRLAQTHLKNQRQPKEVQSNFYLEMRDLARFYQEIEKKITRLRMDLHNCLQLTFPELEQFFSNRLTPYALTLIRLFPHPDFVLASTRTKIKNKLINETREKISANRAEQKADQIIHYAQCAYPAVEKDSIHCQKTIYYAELLQDLLEQKKALATQMIKKAEASPCFLLYQTFPGIGALTAALLLGELGDITRFKTHKQLNAFVGIDIRRYHSGKYTGQDRINKRGNPKARKIIFFTIRNMIRQQRAAPNHIVDYYYKLKKQPIPKKDKVATVACMNKLLKCMHAMVRAHTEYDYAYAVSVDH

SEQ ID NO: 437844 - protein, 404 aa, unidentified
MTYQQYIGLDVHKQFVFATKLDAAGQVVKQWRFATTPKALKSFAASLTQHDALCLESTTNAVAIYRLIRRSAGRVVISNPLQTKAIASAKIKTDKVDSRVLAELLRAEYLPTVWVPDDYTIRLRGLTSYRTALVRQRTQLKNRIHAILHRNLVAKPEVSNLFGKQGKAFLEQVKLSADERFQMDQELLLLTVLDAQITDADKRIAQTTIDTPQMRLLLTIPGFSLQVAAGVLAAIGDISRFGEPNKLVSYLGLDPLGKRSADQPFGPTRISKRGRSHARWLLIEAAHATVRSPGPLQAFYLRLRKKKAHNKAVCAVARKLVVLIWQMLTKDQPYSWAPPLRTHEKIRHIEIMAGKPKKKSGPKLGQPSQGGRRACLQQRKADHDMARLAQAQYEELVQLREISA

SEQ ID NO: 437845 - protein, 415 aa, unidentified
MKVVFPTCCGVDVHKTFLVATIITTPADSLQPNYQKKRFSTFNSDLNRFADWLLEHNCLDVCMESTGKYWVPVFNVLEKRGIRVVIANPKWVKAVKGNKDDTKDSKWIGDLFRIGLVKSSFIPDLNIRILREFTRYRYKLVSMKSSEKNRFQNAFTVCNVALDSVVSDMFGKSATAITDYLTSDESFDPEHCVSLLQRSLKKKAEQVLESIEGFSIASEQKARIKIIREHYDFLEKMIAKVDTCVSEMVEKHEGEINLLCTIPGIDRNSAITIISEIGTDMRQFGSSKRLCCWAGLTPGNNESAGKKKSVGISRAGVYLKPALVQVAHAAVKDKASPYYALKYERIAKRRGKKRAIIAIARMILTAVYSMFCTGEVWNPVDLYKVDMPEHLKEQQLAKAIKQATRFLEKQGLSVA

SEQ ID NO: 437846 - protein, 453 aa, unidentified
MELDIINPNAAGIDVGSKSHYVAVGQSLEDVKEFGVYAEDLTALCLWLLSYEITSVAMESTGDYWQNLYAELMKHGIEVILCNGKFTKHAKGKKTDVKDCRQIQKLHALGLLTSSFLPDDTTEKLRTYCRQRKNLIASASGASRKMQKYLKFLNFRLDVVVKDVCGLTGLAIIEDICKGNLDPKSLSEHRHYNCRKSKEEIAKALHGNNREDFLFGLKQEYQAYQFFQKQIEACDKEIDRFIKGELKKSPEKKKLKTTDKPYKRQNKNAISIKNFNQIAFQYFGGVDLMAIEGLSHSTVLSIMSEIGPDGFYKFGTSKQFVSWARLAPNNKISGGKVLSSKIPKGSNRLKIALRQAANAIGNLRDTHLSDFFRRVAYRKGREAAVSATARKLGVIIWTMVTKQVPYSPPKEYLFLDQKRKMGMAKRIKKQMAKFDIKPEEIGLGKSLITNYNF

SEQ ID NO: 437847 - protein, 322 aa, unidentified
MQYLGIDISKEKFDVALIVDTKNPEKVKQKNFSNDQAGFDKLGKWLSSRTSEPVHVAMEATGSYWEALAEHLYDVGILVSVINPSLIKKESQSWALRNKTDELDAKTIARFCLAKQPRFWVAPDPAVRELRDMVRHLGNLQSERQRHTNRLEARSCQTVEESLEKTIAFLDEEISMLEKLINSHIDSNPKLKQSAQLLNSIPGIGEKSIAVLLGELMNLTSFAHSKAIAAYAGLSPRRIESGKMKGRSRLSKMGNSRLRCALYFPALTAIRYNPVVKAFYEILLEAGKTKMSAIGACMRKLLVLVYGVLKNGKSFDPAFEKI

SEQ ID NO: 437848 - protein, 345 aa, unidentified
MPIVGGLDIHRKQITFDYLDTATGEIRRGQIAPADRAHLRAWLARFAGRDDAAFALEGCTGWRYVAEELAAAGVTAHVAEPADTAFARGRKRHAKTDKTDSRHLRVLLEQGRLPECWIPPAQILECRALLEAYHDLRREHTAWIERIHAVFFHQGAPRLGEGALRTDRGLAALREAAAIHLSPAGQLQVATALDMLAATEARMDTLRQQLLHAARHLAGARALQARLYGVGPLAGLAMTCWLGGAGRFSSSRKAVRFAGLDVTVYSSDGKRSPGHLSRQGPEILRWVAYEAGKTHGRASAPGHDYYAAVKDRTDGKIAALSQARKLIRQACHILAELGDDALTAA

SEQ ID NO: 437849 - protein, 340 aa, unidentified
MDEVTTIGLDLAKHVFQVHGVDAEGATVLRKQLRRAQVLAFFSRLRPCLVGLEACATAHYWARELRALGHEVRLMPAQYVKAYIKRNKHDAADAEAICEAVSRPTMRFVPVKTAEQQGSQLLHRGREQLVRQRTMLVNALRAHLAEFGMVAAQGLRNVGELIAIVRDDGDRRLPAVARQVLQVLANQIEQIEAAIAALERQLLAWHKTNPVSQRLASIPGIGPIIATAIASTVADPNVFRSGREFAAWLGLVPRQNSTGGKPRLGGITKRGNRYLRRLLINGASANLLRSKATKADPWVIRLRQRRPPLVVAVALANKTARIAWAVMQREREYQPRAVAA

SEQ ID NO: 437850 - protein, 346 aa, unidentified
MIVIGCDYHPSWQQVCWMETTTGETGEQKLEHASGEAERFYRRLPTPALIGMESTGNCQWFVDLVGALDHQLWIGDAAKIRATDVRQQKHDRRDAALILKLLLEGRFPRIWVPSGEEKDLRQLLIHRYKLVRIRAQVKNELQHLAMNQGVIRKRKLWSKAGEKVLRELPLRAWGSRRREDLFRLRGMLDEQIAPLDQAVAESAENHEQARLLMTQPGVGPVTAMAYVLTMGDVQRFRRGKQVASYLGLIPREYSSGGKQRFGSISKQGNRFLRMLLVEAAQVAVRCDPQMRNEYLHRCHSKAKGVAKVAAARKLAIRLYWMLRTNTAYPEVVRVESSSRVALVSAS

SEQ ID NO: 437851 - protein, 325 aa, unidentified
MQIHFVSGDGEITDKQVKRAEFLDFFRNRSKCLIGMEACGASQDWARKLEAMGHEVHLMSPKAVKPFVSGQKNDYNDAIGIYKAIFNGVRRVPVKSTEIRDLQTLRRIRSQVTKDRVKEINHVRGLLAEYGIVMGKSITAFNKGISSALESLKERGDVSPLVAEELQTTVESIKTKIERQKRLDREIEQLARGCKNYENFLKTPGVGPFTAAMLCVLLCDPAIFANGRQFAAYIGLAPRSRGSGGKNFIIGIPSKFNCDSESRAVFVECAQALARYKNKSPWVDGILRRKPKKVAVIAIANKLARQVWAMANKGESFKQMTILTA

SEQ ID NO: 437852 - protein, 406 aa, unidentified
MLMAAVMIGVDPHKGSHTAVVIGAAEEPLGELRVRASKTQVDELVAWAAAWPRRTWAVEGAGGLGRLLAQQLIAAGERVLDVPPKLAARVRLLEAGDTNKNDPNDALSVAVAALRSKASREVTADDYTAVLKVWSKRHRDLSRTRNQVACRLHAVLCELIPGGHSKEISAAQAAKILDQLAPSGAVALARAELAAEFLQDIRHLDAQLRDTKKKLAAAVRASGTTLTEIFGVGPVIAGTVVGDVAGVSRFPSRDHYASYNGTAPVEVSSGNRKIHRLSLRGNRRVNHAIHMAAITQIRHRHSEGRAYYDKKLAEGKTHKEALRCLKRQISDAIFARLRIDARTAAVSPAKGPGGHPGNDFASSAASSHPVCQLFGQATPGPGTSLRPSTTTGTPSKPVPRKARTTT

SEQ ID NO: 437853 - protein, 402 aa, unidentified
MNSVGIDISKGRSMVAAMRPFGEVVISSFEVHHTDSELSELAKLLKSLDGETRVVMEATGNYHAPVAQLLHDAGLYVSVVNAKLVHSYGNNDLRRVKTDRKDAVKLANYDLDRWLTLPRYIPEENTRLLLKNCYRQYRQYSKVQTVLKNNLISLLDTVFPNANRLFNSPARADGSEKWVDFVAEFWHCKCVCERSEKAFVNKYQRWCRKHGYNFSEDKAHAIYDEASGHIGVMPKAETTKLLVEQAVSQLRTTSAALAALKQEMHSLASQLPEYPVVMEMFGIGPTLGPQLMAEIGDVRRFYSKKALVAYAGIDAPPNDSGDVIGRHKSMSKVGASSLRRTLFLVMSIYLQTSPPDEPIYQFMDRKRTEGKPYRVYMMASANKFLRIYYATVKAYLESLEQI

SEQ ID NO: 437854 - protein, 354 aa, unidentified
MATSTPQIIGGVDTHRDLHVAAAIDPVGHLLGHRSFPATPAGYRALLAWLRGLGQLQRVGVEGTGAYGAGLLRHLRQARVTVVEVDRPDRRTRRRKGKSDPVDAEAAARAALAGTATGIPKGRDGRVEAIRALRVARRGAMKARTAAGNQLGCLVVSAPEPLRGTLRALSGKELVVAAAGLRPGPDLTDAVAATKAALRRVAHRYLLLSQEIAELDQALTVVVAKTAPRLVALMGVGTDVAGQLLVTAGDNPNRLVHEAAFAHLCGVAPLPVNSGRTTGRHRLSRGGDRAANNALYTIVISRLRWDPRTRAYMQRRTKQGMSKLEVVRCLKRYVAREVHQILTAPQPPERLDEP

SEQ ID NO: 437855 - protein, 380 aa, unidentified
MVSPFDVAHTGSDLRALADLIKKLPGETKVVMEATGNYFESIARYLHEQNIFVSVVNPVLISDFGGNTLRKPKTDKKDSVKIASYALTYWLDLKEYTSQEDLRKSLKLMNRQYQQSIKLKTMMNNNLISLLDLTFPGINKLFTSPSRESDGHEKWVDFVLEFSHCDMISKLTIKAFAKKYKKWSDKNSYHFTESSCEKIYAFAKDCVSSVSSDKAIVFSVVQAAKMLISATENCHAIQSEMNRVASKLPEYDTVMNMYGVGKAVGPQLMAEIGDPRRFHSRKAITAYFGYDSENNDSGQKTTRSNPMTKKGSGALRRTLFIIMQVLLQTKPQDNPVYDFLIKKKSEGKHYYSYINAAANKFLRIYYARVKEVLNVSEQMT

SEQ ID NO: 437856 - protein, 394 aa, unidentified
MKLIGIDIGKNKHFFCVMDQQTGEIISQPVSFSNDKEGFDFLLQKIKSYPKDSILIGMEDTGHYHFALLKYLLDLQYTVALINPKTTDFNRKMQGGITKNDKLDTINICDVLDTPERKKQYRITKVNSFDLYEQKQLTRHHHNLKEEENVYKNRLQKCIDIVFPEFNKLFNSKYGIVYMNILKMFGSAENIANTDIRTIRKCFEIEGRGNRISLTPERLKECARSSIGISSSAEVIQIKHLTAQIELIEEQLTEIDKKIEEFSIQNNSPILSIPGISHFSGTSILAELGDISNYSKPSQIIKFAGVAPLHYESSQFNAQHTAITKKGSKYLRKTLYQIILPVIRHNPVFNKYYQLKISQGKGHRCAQGHCVRKLLRIIYHLLKTNQQFDPQLLR

SEQ ID NO: 437857 - protein, 338 aa, unidentified
MNLSRIGLDLAKQVFQVHGVDRHEHVVCRRQLKRAQVRDFFRQLPPCLVAMEACGSAHYWARELRELGHTVRLIAPQFVKPYVKGDKHDAHDAEAICEAASRPSMRYVPVKSAEQQAVQSMHRVRSRLVRARTALCNEVRGLLGEFGLIATRRGRAATMALLETVMATEPAPLPAPMGKLLRELKDELQTLEARIARLERQIQAHVRGDARIQRLLAVEGIGPISASAVAASAGDARQFRTGRQFAAWLGLVPRQHSTGGQQRLGNISKRGDTYLRTLLIHGARAVVRCCANKTDARSRWLQGLLQRRPANVVAVALANKNARILWALLSRETCYRPG

SEQ ID NO: 437858 - protein, 414 aa, unidentified
MKHEKMNYTYIGIDSHKSTHTAVFIDFFFEKLGDLTFTNLPSKFDDFLKEAEKFKMDGTTLLFGMEDVSAYGRSLAVFLTEKGYQVKHVNAALVVKERKNRNVVEKTDSIDAECVARVLLSRFAELPDAHLDDKYHALRTIVVRRSFVVKDYSRLKSHLHTLLRAHYPNYNDFFRAIDCKTSLAFFKHFPSPHTLSGVSPEELATFLKEPSRGQIGVGKANTILSTLEKTTIEHQEIRDIAVQSTIRQLEFIILELEQLEESMAEFLKHFNCTLMSMSGIDIVTAAQMLSCIGDIKKFSSSAKLARYAGIAPVTYSSGKRDIRYATQKGNRELHTIFFTLSVRLIATKGSNSEIFNPFFYDYYHRKLKEGKTKRQALKCVERRLVNIIWTMLTYGEEYVNPPRYDAPKKDAKTT

SEQ ID NO: 437859 - protein, 442 aa, unidentified
MRIVYKRCCGMDIHKNSVTACVLLIDEDGEFRKETRYFSTMTRDLKEMATWLANLGVEAIAMEATGVYWKPVWNILEAENKYQLLLVNAHHVKHVPGRKTDQKDSEWIAELLEHGLLKASFVPPQTIRRLRDLTRTRAKIGQNVATFANRIQKVLEDANVKLGSVATDALGVSGRQMLKALIQGQRDPKQLAQLARGRLRKKLSELQLALEGHFTEHHGFQIKALLELVEFGEKQLGQLETKIQRLLLLQEPESRRPKGSAIAQVEPPSTPPTSPLQRAVELLDTIPGVDKVTAWTMVAEMGANMDQFGSARQLAKWAGICPGNNESAGKRLSGKTPKGNIWLRRALCEAAWAASRTKDTYLAAQYKHFIVRKGKKKTIVAVAHSMLRIAYYLLTRQCPYAELGGDFFDRLNQEAVRSRLVKKLASLGYQVTLTPVSSEATA

SEQ ID NO: 437860 - protein, 407 aa, unidentified
MIFVGVDWAEAHHDVHVMDEDAKRLGGGRLPEGVDGIARFHDMVGAHVEDPSEVVIGIETDRGLFVAALVAAGYLVFAVNPMSTSRYRDRHSSSGAKSDPGDAKVLADMVRTDRHNHRPVAGDSEEVEAVKVLARAHQSMIWSRGRQTNALRSTLREFYPVALVAFDDLASSDATEVLKIAPTPSLGAGLSLSKIASALRRGGRQRRIDERAVEIQAALRSPQLQGSVVVAAAMGASVKASVTVISTMTTEIANLATALEAGFEQHPAAKVVRSLPGLGTILGARVLGEFGDNPDRYATAKSRKNYAGTSPITRASGTKRVVLARYARNMRLADAIYLWAFASLTASPGARAFYDARRSAGDTHHAALRALGNRLVGILHGCLANGSFYDEHTGWAHRAKNNLIEAA

SEQ ID NO: 437861 - protein, 341 aa, unidentified
MAQVMTIGLDIAKHIFQVHGAGAAGHVLFRKRVTRSKLLGLLAAQAPCVVAMEACAGAHYWAREIGKLGHCVRLIAPAYVKPFVKRQKNDAADAEAICEAAQRPSMRFVPVKTEEQQANAVVFRARDLLVHQRTQCVNALRGHLFEYGYVFPQGITHVATLVALVEDPQSSLPESARVVLKLLVDTFTALDGQIAALDAEINQRSKADPTARRLMTIPGVGPITATAITALVPAVQGFAAGRDFGAWLGLTPLQKSTGGKQKLGAVSKRGERTIRRLLIIGASAVVQQASRRGAPKGSWLAQMLARKPKMLVTVALANKMARIVWALLVKGGIYRAPVAAA

SEQ ID NO: 437862 - protein, 315 aa, unidentified
MTQANTTTAGIDTSKLKLDIAVHGRTERWQFANALPGWRTLAASLVKAGVTRVGIEATGGYERGVVEHLLAAGFIVLVLQPVQVKAFGRVHLRRAKNDALDAELIAACTAAIDDPRIAPDPRLAEMAQNLTFLEQLEEDIARFKTRLEHIDEAGLQRLVNSDIVRLKARRATQMRSLAKRLRAHSDLARRFDLVLSIPGIGERTALALIIRMPELGLISRGEAAALAGLAPFDDDSGKHKGQRHIAGGRGRLRRSLFAAALPAAFRWNKALIALYVRLIAKGKAHNAALIACARKLLIYANTVVQRGTPWIENAA

SEQ ID NO: 437863 - protein, 338 aa, unidentified
MSIVYVGIDLAKNVFAVHGVDEAGRPALVRPSVARAKLHDLIAGVPPCTVAMEACTGAHHWARLFAAHGHAVRLIAPKFVTPYRMSGARGKTDAADAAAICEAVQRPAMRFVPLKSEQQQSQLMVHRARQGYVQARTACINRIRGLLAEFGHVLPLKADTVRRQAAGLLEDLPGWANTVIGDLLSELHRLDERIAQYDRHVAQIAREDERAQRLMQLSGIGATTATAMVAMIGNGHEFKCGRQFAAWLGLTPGQYSSGGKTRLGRITKAGDAYLRSLLILGARSVLALATSRGDALSRWALQLQQRRGYWKAVVAIAAKNARMAWAALRRGENFRLPA

SEQ ID NO: 437864 - protein, 345 aa, unidentified
MKKVVAGIDLHSNNVMIGIMDLDGKRLANRKVACELKDVVKFLAPFKTRLEKVVVESTFNWYWLVDGLQALKYPVVLANPAGMQQYSGIKHADDTNDAFFLAELSRLNILPTGYIYDAHLRPMRDLLRRRLMLVHHRTALMLSFKSLYARTTGQQMSLGRLKEMEVKEAHQLYAHPANQLIAGMQIKHMDQLTESIEKIEKAVLNSARDLPRYAKLTTLPGVGKILGMTITMEVGEIQRFGSAGEFASYCRTVEATRLSNTKKKGENNSKCGNKYLAWAFVEAANFARRYNPDCLAWYNRKAAKTSKVIATKALACKLAKAAWYLMAQNTDYQGQRMFGSTGATK

SEQ ID NO: 437865 - protein, 419 aa, unidentified
MSTERRKVCGIDVHKKFLIATILDHDGTSETRRIPQNTESLLALRNWIESENCDSVAFESTADYWRSLYLVLENHVPVTVANAHHIKHVPGKKTDITDSHWIAQLELNNLITPSRIFTGERYDLRTLTRSRELLVQNRTELKNKIHHLLDSTNIRLSSLLSDLFGKSGSIILKGLAQNKPLDEIIESLPKKMRGNADVISAAVPASIPPVVLVLLQSYLKLVDDLDAEIKLLEGRIRESLASKSREFQIITSIPGIGFIGASTLIAEIGDVHDFDTADKLTKWAGLTPTVYQSANVTRTGSITKQGSRHIRWILVELAHVAIRSPGRIKSFFERLMPKKGYKKAIVAVARKMLRIVWHLLVHDELFVDDFPRSKQVKFPKLPKKIQAVGINKLIELLSKASEVIFRDRDKEIFRLGMSE

SEQ ID NO: 437866 - protein, 350 aa, unidentified
MTRYIAFDVHAESTTCVVLSSAGKRLKEEVVETSASALISFLKTIPGRKQLVIEEGTQSAWLHETLSPFVDEFVVAIVDESNGAKNDSRDSWRLAEQLRIGALQRTVFKRPQELAALRAAVKAHRLLTSDVVRVKNRLRALFRSRGVAVTEEVYQPNARSVKLACLPQHVRYQAEMLGKQLDLLEPLRDEARGRLREEAKEVPSVERVATLPGFGVIRAATLVAATITPNRFRTTRQFWSYAGLALVTRSSSDWVRHEHGWKRAAVNQTRGLNRNRHPWLKDVFKAAATTVAAMPNHPLHADYQRLLQQGTKPNRAKLTIARRLASAALAVWRKQEAYEPNKHKSLIATP

SEQ ID NO: 437867 - protein, 392 aa, unidentified
MEATERSVALDVHKHYVMVAAINVAQEVVLAPRKMSLERFVPWAPEHLTQSDQVVLEATANAWTLYDQLSPLVHAVKIAHPLLVKLISAARVKTDTRDTLHLARLLAAGLIPAVWVPPPPVRALRMLVAHRQRLVRQRPQAANRLHSVLHAHQIAPPPGRLGSSESQTWWDQFELPALERLRVQQDRTILQTVERLIAEVDAEVTRLSTQDPWKALAPFVMQLPGFAVVTSMTGLAALGDITRFPSAKQLVGYSGVGASVHAAGQTSHTGPITKQGRRERRTVRVEAAWSAVTHHPFWKAEFERLVPSLGKGKAIVAIARKLLVVVWHVLTHQVADRHADRPMVTRKLQRWGASHGLATAAGLSRGTFAQQILDRLGLGGGETLVAHAGAGT

SEQ ID NO: 437868 - protein, 411 aa, unidentified
MEAAVITAVGIDVSKSKSTVAVRRPGGEIVLRPFDVRHTNSDLKKLTSTLKKLGGDIRIVMEHTSTYWRPIALTLKEAGFFVSVVNAMLIHDFSDNTIRKLKTDRADALKIANYALTFWDILPPFNNEEETRLLLKMQSRANERITATATALRNGLIALADQTFSGVNIAFAPNTKNANGHEKWVDFFLRYWHKDCVCQYSMEAFTESYRGWCKRKNYKFRTDTAHKIYLLAQESVATLPKCESTKMLITQACKSLNAVCEAKQSTQLEMQRLAAMLPEYEVVMQMEGAGPITGPALMAEIGDVRRFKNKKALVAFAGIDAPPFQSGAFESKSRHVSKRGSPHLRRTIFIVSNIILTRSNPENAVYCFMDKKRSEGKHYYVYTVAGSAKFLRVYYARVTEFLRSQPSPDAC

SEQ ID NO: 437869 - protein, 421 aa, unidentified
MRAERDEQPIRSYATFTRDLHALADWLSACEVDTVAMESTGVYWIPVHQILEARGFEVVLVNARHVRSAPGRKSDVSDCEWLRYLHSVGLLRGSFRPADEVCAVRALLRHRDSLVKTAARSVQHMQKAFDQMNVHIHHAISDLTGVTGLAITDAILDGERDPARLAALAHPRIRASRDTLIKALEGDWRSEHLFTLRHARQTYAHYQQLISECDREIEARIGAFEQTHEPPAATSTDPQAPQAPSQPPEPTVQSFHVSAHLTRLFGTDLTLIPGIGRTTALVLFSELGPDLSRFPTASQFASWLNLCPQTKITGGKVISSHTGPGVNRVAQALRMSTQTLYRSQSALGEFFRRKRARVGTPQAITDTAHKMARIIYHLVTRHELYDDRILFDQQRQNRTRHERRLRNQARALGFQLVPEAA

SEQ ID NO: 437870 - protein, 389 aa, unidentified
MQFYTKQHKSYCGIDLHARSMDVCVLNQDGDIVMHRNMKARPDTFLRTVAPYRDDLVVAVECVCTWYWLADLCAQEGIPFVLGHALSMQAIHGGKATNDTIDAHKIAVLLRGGMLPQAYVYPAEMRATRDLLRRRMYLSRKRAELLAHIQNTNSQYNLPEIGKKLAYKANRDGVAERFPAPAVQKSMEVDLALIGYDDHLLSDMELPIVKAAKQHDVQTLSLLQTVPGIGKILRLVLLYEIHDIQRFPRVQDVVSSCRLVKCAKESAGKRYGTSGSKIGNAYLKWAFSEAAVLFLRDNPAGQQYLARLEKKYGTGKALTVLAQKLGRAVYDMLRRNTGFDRDNLLHGEGSGAGEPAASLGHYGTSRVTVLCNKTSTASTNAHEHIGALS

SEQ ID NO: 437871 - protein, 351 aa, unidentified
MEYIAFDSHKRYTLASVEKPSGGQSCELRLAHQPGSIRQFLSRWTPGSPVAVETIGNWYWIVDEIEQAGMVPRLVHARKAKLMMAMVNKTDKLDARGLNRLQRCGTLPTVWIPSRELRDQRELPRTRMVFSRTRTRLKNRIHATLAKYGLSIPQVADLFGKKGRELLPQVLAQLPPHTLFSTEQLLAQLDTVEHQIQQFERRIKEVFAPSVELARVMSLPAVGFILGTVILLEVGKVDRFPSAAHLASYAGTTPRVHASGGKMHYGQLRPDVNRYLKWAFLEAANVICLNHRHLPQPHVHRLYQRVASRKGYQKAIGAVARHLAEATYWVLKKEEAYREPQASKKVSSTKG

SEQ ID NO: 437872 - protein, 404 aa, unidentified
MAYVLALDISMGKSYKVLYLDDLCLSEGEILHTKSGFNALLQEIWTLPEKPSVVFESTGVYSKVIETFCQNNHLSYCLLNPLEAKKQLDSGLRVLKTDKQDAHRLAQTHWQYERKIKRHQSTIYEESHDLARFYQELEAEIKRLRMYLHTALQLSFPELEILFSSRISKLSLNIIERFPHPDYLAGLSQTQVKNRLKKSTDKKLSDKKALDKAQQLLLLASNSYPAAAKTSIQVQKVQYYAQQLKELIQSKECLSKQLIEQTKRFTEFDLYQSVPGIGEVSAALIIGEIGDIRRFENHKKVNAFVGIDTRRYQSGKYLAQDHINKRGNPKARKILYFTVKNMIRQQAVASNHIVDYYYKLKTQPIPKKDKVATVACMNKLLKCLYSMVENETKYDYAYTVSKDQ

SEQ ID NO: 437873 - protein, 365 aa, unidentified
MPSVSHLGPTHLGLDVHKDTISVAILTPDRDGPDVERIPHDEASVRRLVGRLGDPRWLRACYEAGPTGYELARLLHSMGVRCEVIAPSLIPKAPGDKVKTDRRDCRRLARLHRAGELVAIRIPSVQEEAVRDLCRARADMVEDRTRARHRLSKFLLRHGRPWRGGNAWTLTHERWLLQQRFEEPALAATYAHYRAVLQGRDAALEAIQADLAVWYDLPPFADAVHRLSAYRGVTRLGALTLASEVCDWRRFGRAAAFTGFCGLVPSEYSSGTSTWRGHITKCGNAHLRAQLVESAWAYQHRPGVGVDLHGRQQGLDPQVVARAWAAQLRLCGRFRRLAARKDSKNVVVTAIARELAGFLWAEMAA

SEQ ID NO: 437874 - protein, 350 aa, unidentified
MPNAQTESKPSSRMVVGGVDTHADTHTVAVVDQVGRRLGCAVFPASRAGYRALTGWLAGHGEIYAVGVEGTGSYGAGLTRWLTAHQVRVVEVNRPNRAERRRRGKSDPVDADAAAAVLANTATTIPKARTGLVESLRLIHATRAGAVKARTAARNSFINTLRSSPDAVREALQPLSRARQLKAAAGYRPQGDDPVATVKRCLRRLAVRITELTAEITAADRDLDRLTQLLAPSMRSRPGFGPETTAQLLITAGDNRERIGSEAALAGLCGVSPVQASSGRTRYHRLNRGGDRQANRALHMIILNRLRHHQPTRAYLAVHSRDGRATPHLRRVLKRYLVREVYQLLSQLQP

SEQ ID NO: 437875 - protein, 371 aa, unidentified
MKQNTVSERVCDNGQYQASEERKSKGVLKLGLDVHYRQVTVAMQEEAGAIKAVGRMGHDGLGNWVERKLKAGWELYSCYEAGASGYWLHRELVKLGVKNLVVAPKAMGQDKRQKTDRRDSAELVDQLDRYLRGNRKALSPVAIPTTEQEQKRALIRYHRQIMADRTRYEARGKGLLCAQGIEVQGRWWQPEAWKELKTHGRFRGWMEIQLKGWRRKLLSAEQEQQKLRKQIEALAPALLPKGVGAYSAVALEYELKGLARFKTARALSSYTGLCPGIHSSDGRGKEGSINRCGNAAVRWNLVEMVWRLLKWQPDYQPVRQLAAGLVRSKRARKRLVVKAARQLAIDLWRLETRRVTAQELGLVMQPTSTAK

SEQ ID NO: 437876 - protein, 470 aa, unidentified
MAAVMIGVDPHKASHTAVAISAAEEPLGELRVRACVAQAERLLAWAAAWPQRTWAVEGAGGTGHLLAQQLVSAGERVLDVQPKLGARVRLLAAGDVNKNDPNDARSVAVAAMRSAGVQEVRADDHAAVLKIWSKRYRDLGRSRTQVVCRLHAVLGELIPGGVPKAITAARAARVLKAIRPEGAVQAARWELAAAFLEDLRRIDAGIRETRKKLAAAVAAAGTSLTGLFGVGPVIAAAVIGDVRDVSRFPGRDHFAAYNGTAPIEVSSGQRKVYRLSRRGNRRLNHAIHMAAITQIRNRHSQGRAYYDKKLAEGKTPKEALRALKRQVSNAIFACLQADARRAAARAKGPGGQQGNDSVASAAGSHPRRRLFGQATPGPGHHPTAKPGGPPPGPARSRDRAGHSPVAATLPPATPKVQVERLQRSEDERPGGAARRRPHSAARKATGQTAQVKTQRPKGTSQAAERTDGTS

SEQ ID NO: 437877 - protein, 359 aa, unidentified
MSELTFIGLDVHARSVAAGILEGSTGEVHGGPAPVVVAELVSWLRQQGESVSVAYEAGPTGFGLARACSAAGIPCLVAAPSKILRAPGERVKTDRRDALRLARLLRLGELTAVRVPTPSEEAARDLVRAREDARGDLMRARHRLSKLLLRQGLVWEAKAWTQAHERWLATQRFEERGLALAYEEGLAALSSVRARRDALDRAICEEAAKEPWAGVVGRLACMRGVSTLTAFGLATEIGDWQRFDGRSIGAYLGLVPSESSSGERRRQGAITKTGNGHARRLLVEAAWQQRRPSSHPSRELMRRREGQPALVRERAEAAGRRLQRRWRRFDARGKRSTVAAVAVARELAGWCWSLAIMED

SEQ ID NO: 437878 - protein, 405 aa, unidentified
MEIIVEKGCGLDVHKGTVVACIMGVGIKKEIRTYTTMTNDLLRLKEWLQNSGITHVAMESTGVYWKPVFNILEDHFEVILVNARHVKNVPGRKTDVQDSEWLCRLLRSGLVSGSFIPPRDIRELRDLTRHKRKLIQAIVAEKQRVEKVLEDANIKLSSIASDTFGASGKRIVEELIKGKLRAEEMAELSKGRLRQKREDLKQALVGEVREHHKFMIKASLKHIRAMEKILLDIERKIQEKIDRHYKEEYKLLQTIPGVKGEASTLIAEMGVDMERFPSEEHLSSWAGMSPGNNESGGKKKPGSTTYGNKCLKTMLTEFAWVASKTKDTYLRSKYHSLVGRRGKKKALVALGHKILIMCYHILKYRCAYKELGVDYLDKRRKDKIAKSYIKRLHHLGYEVTLKEAA

SEQ ID NO: 437879 - protein, 462 aa, unidentified
MGYYFNNIQGKKGSQFSSQLRGVNLEKVLIVAIDAAKYFQKALICNYFGDVLEKPFFFGLDQLGIDLICSKIERSQKEIEAERIFVGVEATGHYYEDIVRELGKRGYKVTIINAATTYEERSSSLNWSKTDDLDLYVIAHSLIQNKGMENKLPEGLYRKLMTLTRARRNEVRKRALLRVQIRTLMDHIWRDFQGYIEVENNKPKKKLIFSDFWGRSSLFFLEFYPHPSDVLELGIEKLSTIIKENKLRVRASTIHTLYQVAQTSIVKEKEEVSAELLILSMAIQDLKRLSENIKTLEKEIETALLQTDGRLLLTVPGIGVITAAEFYSELGDISNYENAGQLIKKAGTNPIIIQSGGTSGFYGKISKQGNKNLRFMVYTVGKCLAQHNKDLRPYYLKLKERGKHARKAYIALGNKFIRIAFSMLTHKKPFESKQNGYSIFEEIKKKLNFTKINTYLNIALAA

SEQ ID NO: 437880 - protein, 420 aa, unidentified
MPNQPSDFVAVIGLDWADKKHDLCLLETGQTTPEFSILEHDPLAIDAWAAKLRKRFGGRPIAVCVELARGPIVSALLEYDFFVIFPINPAMLAKYRRAFSPSRAKDDPKDAFLALDLFRHHFDRLSPLRRERPAMRALQCLVQGRRSLVEDRCRLINRVTYALKEYFPQVIRWFRDKHTEVFIDFVTRWPTLEAAKRAHRDTLVDFFHDHNVRGRKTAERRVEAIKAARSLTSDVAVIETNRLMAESLLTQIGVLSKAISRFDAEIAARVAELPDYKIFAALPGAGSALAPRLLAAFGENRDRFPDAASVQKCVGIAPVVERSGNKSWTHWRFIGPTFVRQTFVEWVGESVPHSFWAKAFYESRQSKGVPHHVILRALAFKWIRIIWRCWYDRQPYDEARYLLALQKHHSPIITNAAQLS

SEQ ID NO: 437881 - protein, 407 aa, unidentified
MTITCGIDWAEAHHDVAVMDSDGEVVGRCKIDTGVAGFGELMSLLAEHCDDPRLVPVAIETDKNLIVVALQTAGLTVFPINPRALARYRERHGQSGKKSDPGDAALLADVLRTDRHQHRPLPMITDGGRAVKALARQHQEAIWSLHQTTSRLRSVLLEFYPQALQAFPNLKHKAALTVLAAANTPELGSELTARRLVALLRRCGRRNDPALIEQILVDLKTTALRQPAVVEAALGTTVVGLLGIITAMHAAVEQLEAALAVEFEQHRLAPVLRSAPGLGPVLAARVLAEVGDDDTRFSTAGGLRAFAGTAPVTRASGRSRKVSARRVRNKRLGDACHWWAFAALTKSPGARAHYDRRRAAGDHHNAALRNLANKLIGRMWWCLHNNQNWDEHAAWKEPSTGNEQLAA

SEQ ID NO: 437882 - protein, 390 aa, unidentified
MDVLYQSCAGIDVHQANIVVCILHGPLTSTRPKREMATFDTTTKGLRACHDFLSQFHVEAVGMESTGVYWRPVWHALCDDFKLILAQPAHMKAIPGQKTDKKDAHWIAKLTRIGLLPRSFVPDETIQELRELTRQRKHYVESRNRETNRIHKILQSGGIKLTTYIEDIMGLSGRNLLQLLVDGTPITPRIVHQSVYTSLKKKVPQLMEALDGYFSDHHRFMLKQSLEIYDFYQKQIGLLEERMNVYLSQYENHVEILDSIPGIDVITASVIISEVGVDMSQFPTAGHLASWAGLCPGNNESAGKKRSTKIRHGNSYLKKCLCQAAFAARNQKGSPLAERFCQIQSRRGSQKATIALAHQLLKIAYILLQEQITYPEFLAQKKTTRDELVA

SEQ ID NO: 437883 - protein, 328 aa, unidentified
MKTIVGIDVSKNKLDIGFFRDLAAGKVKTKVLPNNAQGHRQVMDWAVRNLGMPIEQISFVMEATGVYHEALAYALHEAGAEVAIVNPAQVRDYAKSLAVHTKNDRKDSLVLTRFGLTQPWRAWQPEPPAIRELRALLARLTAVEKDLQRERNRQEKAQVGAAGDQVLASIELVIKTLEQEQQRLTRLADDHIDQHPDLKKDRKLLESIPGVGAVLGRHMLAVFHSRSFNTARQMAAYLGLVPVEHTSGSSVRGRPRLSKTGSAIIRAKLYMPAVVATTYNPAARATYERLLAKGKSKMSALGAVMRKLVHWCFGVLKHQQAYSPAVAN

SEQ ID NO: 437884 - protein, 326 aa, unidentified
MTAVAIDGAGRMLDEKTIAVGSDELIAWAAGLAGKRLWALEDCRQLTRWLERQVLGCGEELVRVPPKLLAPKRRAGRARGKSDAIDALAGARAALREPELGRPRPGEQVFRALKLLVDHRDDLVDERRRTQQRLRWHLHQLDPTFAVPLRMLGRPSQLERGSRWLARQEQELQVRLARELVTRCRSLTRAIVELDRELEQRTAATAPALLELPGCAAVTAAKLLAEIGPIDRFKSDAQLARHGGVAPLEASSGRVHRHRLDRGGNRQLNAALYRVAITQARYHPAAHAYLERKQAEGRSRREAIRCLKRLLVRVVFNTLKASPALT

SEQ ID NO: 437885 - protein, 417 aa, unidentified
MPLGPTLYVGTDISEAKNRTRFLDPGETEVGRGFSSANDLPGSEQLAEEALRRARTIGATEIRWGLEATNLFWWHLATFLTTHPDLVAAGLKVWVFNPRQVAGFKEAYGDLGKGDWVDALVIADRLRFGRLPAECYLDERYQPLQRLTQHRRHLVKTLVREKQVALGYVYLKLSAYHLTRPLADTFGATSQVLLTDYLTPDEIVAAPLEDLAVVIAREGRGKVADPQEVAEAVKQAARRSYRLPARMVEPVNLVLSSSLVTIRTLTAQIKPLDKAIAAEVGGVPAQTVDTVPGLGPVFTAGIIAELGDVRRFDTEEQVAKFAGLTWRRFQSGEFEGEDRPLTKSGNVYLRYYLVEGANSVRLKCPEFRSYYDRKFGEVTRHQHRRALVLTARKLVRLIDSLLRSGQIYRPPGARKAS

SEQ ID NO: 437886 - protein, 353 aa, unidentified
MQCIAFDSHKHYTWALVQNEKGKVLREERINHTRGALQGFLEEFDPGSPVAVETIGNWYWITNEIEAAGMVPQLVNARRAKLMSGSINKTDKLDARGINRLQRSGTLPTVWIPPRDLRDARELPRTRMVLVRQRTKLKNRIHANLAKYGLKTDGATDLFGVRGRRILDQRLGELPLQTRYATQSLLDELDHLQAGIEEFEARMADVFGEITALGIIKTLPGVALILGVVILTEVGDVERFPSSSHLASYAGMTPRVHSSGGHTRHGRTRPDVNHYLKWAYAEAANVAMMHRRRHPQRHVSRLYERVSRRRGHPKAIGAVGRHLAEATYWMLTKQEPYRDPATDRVEVESTREA

SEQ ID NO: 437887 - protein, 391 aa, unidentified
MSMYFIGIDISKYKHDCCIISAADQKVVSKVTIKNNKAGFNELLTIIHSLANPADIRIGFESTAHYALNLELFLENSLLTFMEVNPVLISEYKKSKTLRRTKTDSVDCESIARWLMTVEYKPHSKGFYHAYSLKSLTRLRDKLIRQRSFYLIKITNVLDHTFPEFKPFFNERLSKTALYLLENYGSAEKMARMNSASYEKLRSLSRGRFSPQQFLRLKELAANTVGVNNSIFDVELNSLLSLYKSLVKEINTIEKEINKLIEEVHPHYMSVPGIGPLSAAVIYSEYGDISNFTNPGQMLAFAGIEPGINESGTESHGGKMVKRGSSQLRYTLINCCLPLIRFDMTFATYYAKKRGEGKPHRVAITHVAKKLIRVIYALERQDIDFNAQKLR

SEQ ID NO: 437888 - protein, 389 aa, unidentified
MPQYTMNSDYAAYVAMDVHSRSITMHAVSLETGEPRTRRLTGCPGAAEVVEWAKSWLPDPILFVYESGPCGFQLQRDIEALGCACRIAAVTSIPRSPEDKYLKDDRRDARRLLSEITKMDGKVKFVYVPSPRMESLRDLTRARHDAVKAAKRSKQQAAGLLTRYGHVWDEKTPTGRRCETWTEKHKSWMKSAEFDQALTRRTLDLYVQNATEDIERVKNLTRLCLAEAEKPDVKPYVDALTRLKCVDVMTALAFLASMGDFERFSNGRSVSSYFGLTPRRSDSGEKTGRNGKITKAGDTLCRMLLTEGVGGIGAAKSNVKKLRKGQVVSPQVEAEARKCNARNRARYEHLTASGKHANVAKIAVASELVRDMWIIGRMVQREQAEQEAR

SEQ ID NO: 437889 - protein, 416 aa, unidentified
MNAVGIDVSSRKSTVAVLRPLGEVVCLPFDVTHDIAGLASLAEKLKALDGETRVVMEHTGRYYEAVAKALHEAGFFVCAVNPLLIKEYGANSLRRVKTDKADAIKIARYALDNWADLRDFTPMDAIRYDLKTLNRQFQLASKQRTASANNLIALLEQSFPGIRKCFDSPVRSDGTQKWVDFAHSFWHVDCVRKQPFAAFCERYRKWCKRHAYLFKQSNAEEVYALAKRAVVLTPKSKVVKVLVQEAANQLSSISRSVEVYRAEMDRLAAMLPEYPVVMAMYGVGKSYGPQLMAEIGDVRRFERKQALVAFAGIDPMPNQSGDKNVRSNKSSKRGSPYLRKTLFNVIRTYLQCAPQDEPVFQFLNRKRAEGKPFYVYMLAAANKFLRRYYAKLRDYFASLDTLQSVDPIPTTLKASL

SEQ ID NO: 437890 - protein, 368 aa, unidentified
MKELLKQSVGIDCSKDEFAVCFGVLDQDFKIVNKSTHIFPNSVRGFSALFKWVSKLVNSKLSVNFVMEATGVYHEKLAYFLFDKDCLVNIVLPNRAKNFSRTQKVKTVTDKEASKMLAAMGLEKDLEPWKKPDILYSSLRQLTRERESLLESKNRIGNQLHALLHQALTSKAGIKRLKAQIKLIEKQVKEIEIEIKKTIKTKPQIDNKIKKICTIKGIGVITAATIIAETDGFNLFNNQKQLVSYAGYDVIEKQSGTSVRGKSKISKRGNKHIRRALHFPALQAVMRNKEHKDLYERLYDRQRIKMKAYTAIQRKLLVLTYTLWKKDEAYIKGYLNIKLEQPGNQAALTELDKIRPLDTQNYKKDLVF

SEQ ID NO: 437891 - protein, 423 aa, unidentified
MEKSSKVFVGMDVHKESIDITLAEEGGEVRRLGQIGGDRGSLLKMVRRQQSKGRELVFVYEAGPCGFWIYREITALGERCMVVSPALIPRRAGDHVKTDRRDSARLASLARAGELEAIHVPDIRDEAIRDLVRGRDDAVIAQRRVRQQLKALLLRNDIRYVGKSSWTGAHRRWLSELKLPEPAQQIVFEEYIDAIVVATGRIERLTWAIETEVASWRFAPVVAALQAMRGIQFVHAVTLIAELGDLTRFASARQLMGYLGLVPREDSSGEHRRQGSITKAGNSYARRAMIEAAWAYRHPARVTRIIATRQTGLPKAACDIAWRAQLRLSAKYRRMNAGTSITTRSWWRSRASSRALSGRSARASSRSELKDRNRPSIAARPNRLAKGGPRHPPLMPDRQRGAAAERRTLVERYWSGSRRHPRS

SEQ ID NO: 437892 - protein, 334 aa, unidentified
MENIALIGIDLGKNSFHIHCQDRRGKAVYRKKFTRPKLIEFLATCPATTIAMEACGGSHFMARKLAELGHSPKLISPQFVRPFVKSNKNDFVDAEAICEAASRPSMRFVQPRTESQQAMRALHRVRESLVQDKVKTTNQMHAFLLEFGISVPRGAAVISRLSTILEDNSLPLYLSQLLLKLQQHYHYLVEQIKDLESQLKRKLDEDEVGQRLLSIPCVGTLTASTISTEIGDGKQYASSRDFAAATGLVPRQYSTGGRTTLLGISKRGNKKIRTLLVQCARVFIQKLEHQSGKLADWVRDLLCRKSNFVVTCALANKLARIAWALTARQQTYVA

SEQ ID NO: 437893 - protein, 367 aa, unidentified
MFESKYIWVGLDVHMDSITAAVLEDDSNDAQVVKMSGDLMKVRRLFRRLSEKAPVKACYEASCAGYVLHRVLKRDGFHCDIIAPSLIPRKLGDHRKTDRLDAVMLAKLYRSGHLTPIHVPAEDHEAVRQLLRLRYSYQEQCKSTKRRICSILLAQGLIYRDGKSLWTKKHKLWLTELRHRLEGPLKTALTAELEHFEYLEMQRNALDRDIDMFSQQSPYSKYVDALCCLRGVKTLTAMTLLCEIDDIHRFRSPRALMAYFGLVPSEHSSGSRERKGPITKAGNGYARRILVEAAWNNRHNAGADLILNRRRQGQPPEIVAIALKAQHRLSRRFYYLSHKKHLHVAITAVARELCGFVWTIMKAAPQH

SEQ ID NO: 437894 - protein, 309 aa, unidentified
MKQEIVYVGIDVAKAHLDVAWEKQFHRLPNDVAGTKQLLCLLKAIAGQVQVIWEASGGYERSVMQTLQRGGIKASVVQASRVRQFARAIGILAKTDCIDAAVLCAFGKAMQPQVTAPSNPQQERLREMESHRRHLSRLLVAEQNRRAQLTDPTVLALTERLVGQIQKQIERIDLLIKELIEGSPGLSSKAQKLMALTWVGPRTAALLLAQMPELGQLNRREAAALAGLAPFNRDSGKLRGRRTIFGGRRAVRTGLYMAALVATRHNPILAAFYRRLRAAGKPPKLALSATMRKLLLTLNTSLKPQPILA

SEQ ID NO: 437895 - protein, 338 aa, unidentified
MIVIGVDVHKHSLTAVAVDEAGRMLDEKTVTAADGELVAWASGLAGERLWALEDCRQLTRALERQLLAVGEQLVRVPPKLMAPERRAGRARGKSDPIDALAVARAALREPRLSRPRPDEQPFRELKLLVDHRDDLVDERRRAQQRLRWHLHQLDPSFVVPARRLDRLTHLERVARWLARREQEVQVRVARELVARCRSLTRAIVELDRELEQRTAETAPALLELPGCAALTAAKLLAEVGPIGRFETDAQLARHSGVAPLEASSGRVQRHRLDRGGNRQLNCALYRIAITQARYHPAARAYLERKQAEGKSRREAIRCLKRQLVRVVFNTLKASPALT

SEQ ID NO: 437896 - protein, 429 aa, unidentified
MDEVDDADLVVERVAALDLGKAGLEACVRVPHPQRPGRRMQELRGYATTTAQLLAMAAWLRHWQVQRVVMESTSTYWKGVYYLLEAEGFDCWLVNAREVKNVPGRAKTDRADAVWLAKVAERGMCRPSLVQPPEIRRLRDLTRYRRALVQDRTREQQRMEKLLEDAQIKISAVLSNLHGVTGRAIMDALIAGERDPRTLAGLAKGLARKKTDRLEEALRGFFTDHHATILQMMLDNSDRISTQIATLDARIEEAIGPFSRPAARLVDLPGVSTVAAAELIAEIGVDMTRFPSAAHLVSWAKFCPQIHQSAGKSISKGRAKGNPWLAGTLGRIAFVNSRTDTFLGARYRRLARRRGKQKALVATGNSVLTVIYHLLSDPDARFCDLGPGYYESQINKHRRARDLATQLQALTGQHIAIRDGKAVITDTAA

SEQ ID NO: 437897 - protein, 344 aa, unidentified
MGKSTTIAVDLAKSVFEVAVSDCPGRVGERQRLSRAALLPFFAQRQPATVLLEACGTAHFWARELEALGHRVRLLPAQHVRRYRQGNKTDRADAKALLEAFRNEEIRPVPVKTPAQQELTVLHRLRAAWHGARTARINTLRGLLREQGVAIPTGAARFVSRALELAGDADSPLGESLRFAAFELVGEIRELERRIAETERRLEALGKQNALVQRLRSVPGIGLLTSTAIAGFVGDLRRFPSGRHFASYLGLTPRERSTGGTRRLGAITKRGDVYLRMLLIHGARAVLAAAAQQREPDSVRSWALAASQRLGHNKATVALANKLARFAWATATQERDFEFRNKAA

SEQ ID NO: 437898 - protein, 371 aa, unidentified
MNESSKTLFVGLDVHKDTIAVAYAPEDRGAEVVALGMIGTRQCDIDKLIRKLESKGARLAIAYEAGPCGYWLYRYLTRRGVSCAVVAPSLIPRKAGDQVKTDRRDAVTLARLLRSGDLSSIYVPTVDDEAIRDVSRAREDAVGDLKRSKVRLKAFLLRQDIRYEGRANWNPAHLRWLARVVCPTPAQQIVFQEYVHAVTEQTERLRRLEAELQTVAKTWRLQPVVEAVQALRGVDFTGAATLIAEVGDLTRFDTPRKLMSYLGLTPSEYSSGPHRRQGGITKAGNGHARRALVEGAWAYRYPAKVSRHLQLRLEKVPTEVRAIAWKAQLRLCKRYRRLSARGKHVNQVVVAIAREMAAFAWAIARTVPIAS

SEQ ID NO: 437899 - protein, 447 aa, unidentified
MKKVFVGIDVGKFKNSISIIDTEGNPIIKKGLSIENDYYGFARLEEQIDLIINNYGFTYDDCIAGVESTGHYWFNLRDYLKDIGIETVMIKTDSVKHRRALEEGQKGKNDTLDARVIASCLRNGNYVYIRENERELRALQKLTRMRNDISDELVALKNKIHRCIDICNPVFFKIFENLNSKTGVALIKLYPSPEDIINVNLDNIKRELGEIVDKPNMRMVSLYKEECEIWGRLIKEPSYAEKVEMVAYIDKFLLQNKSKEHLDKQIKEIAKNIIPLYSEFEQIKGIPLIQLISVLSEIGDIRNFKNTRAILAFLGLSLKGNASGKYIGERRINKAGSRIVRKHLFNIMDTLVKHNEYFRIAYCYYKSYNHKNPTKKRSMQIAVMCKFVRVMYGMLKHNTNFDYKEMLKGYYFGDCNMKVFKEEFEGEKRTKKIENYKLGYSIFINYS

SEQ ID NO: 437900 - protein, 372 aa, unidentified
MLIIGCDYHPSMQQIAYVDTETGEGGERRLMHRDGEAERFYRELKQRAIEVRVGMEATGYARWFERLLTELGFELWIGDPARIRARRVRKQKTDRKDAQLLLRLLLEGDGFPRIWVPSPENRDLRQLLWHRHRLVQMRTRIMNQLQAVAMNEGLRRKRALWSESGRKQLESFLLAPWATRRRQDLLELLDRLNPTIQELTAAVEKEAENKPEVQLLMSHPGVGPLTALAFVLIIATPERFQCGKQMGSYLGLIPCEDSSADQQRLGHISKQGSSLLRFLLVEAAQVAVRVNPEWRRSISAPSHATGTEDRQGRHGAETGRRSVLDVAQGMELPASCEIRFARGTARVTPWCAVDHRVVDWASRSHLFRGSSN

SEQ ID NO: 437901 - protein, 356 aa, unidentified
MTISTKYIGLDVHKESISIAVRNSVGKVLMDCVIETKASTILQFIDGLRGDLHVTFEEGTSAAWLYDLLKPHVTKLVVCDPRKNKSMREGNQNDKIDARRLAELLRLNHLNPVYHGEHGLRTLKELVRSYLTVTKDLARVMTRVKAIYRSWAIPCSGKQVYARCHRAEWLGKITEPGVHRRAEFYYQQLDALRVLRQEARRDLLAESKKHKAWKRLCQIPAIGPIRAAVLLGILQTPHRFRTKRQLWNYGGLAIEMHSSADHRSVDGELQRSRKNVLVRGLSRNCNHDLKNLFKGAAAVASSKPGPFEKFYAALVAKGIRPEMARLTLARKIATIVLIVWKKGVSFDANHLKPQTV

SEQ ID NO: 437902 - protein, 378 aa, unidentified
MKNDIRFVGLDVHAETIAAAVVEPDGEMRFLGTIPNRPEAVRRLVKRLGPATRLKACYEAGPTGYVLYWQLTGLGVHCDVIAPTLVPQKPGDRVKTDRRDAEKLAVLYRGGHLTPVGVPDQAHEALRDWVRAREAAKSDQLRARHRLQKFLLRHGRRPPQGIKAWTQKHLDWVRREVHFEAPAQEAVLVDHLAEVEHARERIRRLEGAIDVAVEAAPTCMRAVIEALQGLRGIAKVSAATIVSEVGSLSRFRKPRQLMGYSGGVPREDSSGERVRRGGITKTGNAHLRRIVGEAAWSYRHRPTVRGELLKRQAGLSEEVKAISWKAQHRLYSRYRRLIGKGKAKQQVVTAVARELLGFIWAIGVHVEQQHGTAARRAA

SEQ ID NO: 437903 - protein, 400 aa, unidentified
MTTIAREIVGGVDTHADTHHAAVIDTAGRRLGDAEFATTPAGYAALLAFLVSFGVLLCVGIEGTGSYGAGLARFLRGQGVELAEVIRPNRQVRRMRGKSDPIDAYAAAATVLAEPGLPVPKTADGTVEAIRQLLVTRRSAVKARTAAQVQIKTLLITAPDLIRTKYRGMTDAALITSLSRTRGNDDTTTDSALRALRSLARRHQHLSVEITDLDQALEQLVTDTNPALAATKGVGPVTAAQLLVTAGDNPGRLRSEAAFAALCGVSPIPASSGKTTRHRLNQGGDRQANAALHRVALVRMTYEPRTRDYVAKKRAEGKSTKEIIRCLKRAIARETFTLLTQRVDVPRIDDLRPLRQARGISLETVAQHFNVWPMKISTIERGKRRDDDFANTYRQWLLTA

SEQ ID NO: 437904 - protein, 345 aa, unidentified
MEHTIIAVDLAKSVFQVAVSRSSGHVDEERRLSRDRFLAFFVQQPPATVLMEACGSAHYWARQLQPLGHTVRLLPAHDVHRYVRRNKTDRTDTKGLLEANRNDEIHPVPVKTLEQQAIASLHRLRSTWLATRTARLNTVRGLLREFGVVIPLGAHQVVPRVRTLLEAVEDTSAVPLVLRSALAEACDEIEVLETHMHGVDRQLVALARQLPDVELLQSVPGVGVLTATALVALVGNIRRFPTGRHFASFLGLTPREESSGLRRRLGAITKQGDVYVRMLIIHGARSFLWRAKGCATPDQLQRWALTAQQRRGHNVAAVAVANKLARIVWAVWTQQRPFAAEHRTA

SEQ ID NO: 437905 - protein, 470 aa, unidentified
MNDKHSSTDPKRKKYRWRWGPKLPKHLDQINHNAAGIDVGARKHYVAVPEDRDEHPVQVFEPFTPDLIEMVQWLKQCGIDTVVMESTGVYWIPLFQVLQDHGFEVLLVDARHVKYVPGRKTDVFDCQWLQQLHTFGLLRGAFVPDKDIAALRTYSRQRKQLVQSCSREIQHMQKALTQMNLQLPVVISDITGVTGMRIIRAIVAGERDPVVLAKMKHPGVKSSEETIVKALSGNYRHEHVFTLTQALDLYDIYQGKIAQCDQALARRMQAFEVKADPKELAAKPSKRNKRKRRKNEPHFDLRAELYQMTGVDLTQIDGIDAMTALSIITECGFDMQRFPTEKHFASWLGLCPNNTVTGGKVKKTRSRNVHNRAAQALRIAAQSLHSSTTYLGAHYRRMHARLGAPKALSATAHKLGRLVYHMLKYGQDYVDKGQQYEEEQYRKRAERNLRRRAHAMGYQLICLDTGEILA

SEQ ID NO: 437906 - protein, 411 aa, unidentified
METICNDPQVCRIVDLPVYYELETNNGNRDYRIQIGGHYMNYNTVYVGMDVHKESFTLCSCKYEDEKASHYQRTPASYKNVLRYLEFLRTIYGEYTRFVCGYEAGCLGYSLYHQLENFNVECVILAPTTMLEQRSKRRIKTDKRDAEIIARSLAQHNYSPVHIPTETDNQTKEFIRMRDDHKAELKKIKQQILSFCLRQGYQYDGSGNWTAKHVKWLRSLKPAGLYKEILDEYLLTYTILTDKLNRLDQRIEELASKEEYKESVSKLTCFLGIKTHTALSVIVEVGDFQRFVSARKFAGYLGLVPGQHSSGDDRNGLGITKAGNTHVRRLLVESAQSYTRGKIGYKSRVLRSRQAGNSPQVINYADRANERLRRRYYKMVLKDGKKYNIAKTAIARELACFIWGMMTDNIY

SEQ ID NO: 437907 - protein, 376 aa, unidentified
MAKFIIAGLDVHDKNVLMKIAADGESPDMRGFSNTRDGRRAMIAELRRRRKKAHASRVVVAYEASGAGFGLYDDIVDAGLECHVLAPNRMGRSQKGRSMKTDERDAEMIFEHLRAHLLANNDLCDVWIPDHQTRDDRELVRSRLNASEDLATLKGKVKNLLKRNGFRRPKRTGKGWTDAYRGWLLDLARGKNGPLGVGTRRALQAHLRQIRMLEEEVATLDGHVSELAQTPRYRLMVEALVSELKGVGVHVAMVFLTEMGDLTRFSNRREVASYIGLVPSSNESGEKDDNKGHITHQGSWRLRKALCQAAWSRARTDETERAVHARICAKNPKRRKIATVALMRRLAIRMWHVALDARPDPARAAEGGRGPISMTG

SEQ ID NO: 437908 - protein, 338 aa, unidentified
MTQFSSFVGVDIASASFMACVGTLPWKLVVKPVKFDNHEDGFAFFLGWLKENGLVPEKTVVCMEDTGVYSEGLAYFLFASGYAVAVEPPLNIQRKFPSNASKTDELDCQYIAEYACRYADKLALWKPRAEILEKVKLLLTTRQHFTVQLTGHKNALIAVNRKKVSSDLAKQVHQDMIEQIAKHIHSIDKEIRRLIESDPTFYQTLLLLLSVPGIGLQLAAHLLIIMQDSLDPRVLAAFIGICPIEHQSGTSIYSVPTSRHYGPPILRKLLYLAACSVRTHKKQFQLYFFRKVAQGKNKKLVLNNIENKILKIACAVVRTQKPFVPNYVSVNPLILKKA

SEQ ID NO: 437909 - protein, 482 aa, unidentified
MKPKQQEKTKEATCRTTQGNWQQMNRKQRREMTRKIQSEDIRLEVVHCDAAGIDIGNESHYVAVPPARDGQPVRRFGCTTAELKEMAVWLKQCAIRTVAMQSTGVYWIAVYDILEEAGLEVYLVNARDTKNLPGRKSDVQESQWLMKLHTYGLLRNSFRPSQEIRTMRTYWRQRNDLVQSGGRHIQRMQKALTQMNIQLANVLSDVSGMTGQAIIKAILAGERDPHKLAAFRDPRVKASEEEIARSLEGNWEEDLLFVLQQEQDGYEFCQKQMAECDQRLAQYLERREDRSAGAHLPEEKRKGRLKKKSGNKPRFDLRTGLFRMSGADLTRIDGLDVMTAMTILSEAGWDMSKWETEDHFVSWLRLCPDNRISGDKIIGKGRLPTNNRVTTALKMAANSLRTSKTYLGAQFRRLRSRLDTPVAIKAMAAKLARLVYRMLRYGKKYVDRGAAFYEAQHRQLQIKHLKSKATKLGFQIIQVPTA

SEQ ID NO: 437910 - protein, 347 aa, unidentified
MSNTNLVTIGIDLGKNTFHVVGLDATGAITLRKKRSRNQLDQSLGNIPRCLIGMEACAGAHHLGRRLEKLGHQVRLLPAQYVKPYLKGHKNDFRDAEAIAEAAQRPTMRFVPVKSAEQLDLQALHRVRSRLVTQRTAVINQIRGFLLERGLPVRQGAAALRLALPQILSAPNDNLSPRVIQLIQDLAEDWRYLDRRVASLTKEIDELADQDPHCRRLMSAPGVGPIISSAMVSAIGTGDAFHKGRDFAAWLGLVPKQISTGDRTILGRISRRGNRYLRTLFIQGARAVLLQRQSWPRHGFAAWLEAASKRLHSNVLVVALAAKLARMAWSMLAKGRDYDANLLGRTA

SEQ ID NO: 437911 - protein, 345 aa, unidentified
MQKISTTRTNGRKIFKGQLTIGLDLGDRSSSYCVLDEAGKILLEQRLPTTPETMKEIFGRMARCRIAMETGTHSPWVSRLLLALGHEVIVAHAQNVRLIVKSRRKDDRIDARTLARLARIDPELLSPVRHRSAQAQLHLTEIRARAGLVSARTALINAARGLVKSYGERLRKCGSFQVSREIGSGLSTELREALQPLLREVESLNERIQEYDRRIEKMAKERYPEVALLKQVKGVGDVIATTYVLTIEAPHRFRKSRDAGCFVGLQPGRRNSGDSEPQLHISKQGDEYLERCWSRERTTFWDLLGKIVIYGAGDRNSPSEEVRTPRNERWWRWHASWQYCCIGCG

SEQ ID NO: 437912 - protein, 422 aa, unidentified
MNEQEPVVYSAYVGIDWADKKHDVCICPADSDTRELDVIRHCAEDIDAWVKGLHQRYEGRIAVAVELSKGPIVSALQKYDFIDLFPINPSTLAKYREAFQPSKAKDDPTDAQLAVDMLLRYPEHFKMLKPQSVEMRTLATMVEQRRRLVSEQGRITNRLRSALKQYYPQILEWFEHIDTPLFCAFVKRWPTLTQARRARANTLKLFFHEHHMYRGDVVERRRQAIKAASPLTLDEAVIVPYRMQVLVLVDQLELMFKAIDQFDDEITKLASQHPDYALFRPLPGAGPSLTPRLMVAFGEQRERFSSAADIQKLSGIAPVTERSGQKHWVHWRLQCPTFMRQTFVEWAAQTINKSYWAGAYYRQQRDKGSTYQAAVRSLAFKWIRILYRCWKTGVVYDESRYLKALERRGSPLVKNREMLESA

SEQ ID NO: 437913 - protein, 341 aa, unidentified
METQRHIGIDLHRNQFTCCVRLENGRNYLTDWKLEDLPRFIKKLRPNDEIAVEVTGNTRLFRDAVAPHVARVVAVDPNQFKVISHSVKKTDPNDARNLALYLEKDLLPEVRMKDKTQAQLASLTQTRDTLVKLRTALKNKVNNILSAHGINLEKEALSSEKKLNEILAMKFDPMVKLELEVITEEIRSLNQRIAKIEKAISEEGSKLEGHKNLTSIKGIGPLTGSILLSVIGDINDFADEGKRAAYFGIVPRISNSNETERSGRITKRGSKLGRTALVQCGLIAQRYSPYLKRYYEKIKARRGTGKAIIALARKLLGIIYRTLKNKWVFEDFPNFVLAEGD

SEQ ID NO: 437914 - protein, 355 aa, unidentified
MLYLGIDQHARQITISLRDENGDVLVARQVSTQSERINAFFQQLTRERLRKGESFVAVLEVCGFNDWLIRMLRDYRCHKVILIQPDDRKKRKTDRRDAAGLSELLWVNRDRLLLGKPVRGLRQVDIASTTDQENRRLTTLRKEAGQTRTRIVNKIRHLLRRHNLQWGMPTKRLPTLAAIAWLKKLMLPEIDRLEMNHLLADLEHGQQRLKELAGVIGKRSGASKEAAIIATMPGVSHFTATSLACRVGRVERFPRSHSLANYWGLTPGCRNSGENHQRLGSITKAGSAMARWLLAQVTHKVLRKDVRLREWFQRVKRRRGATIARVAVMRKLATIIWHMLSKRKTFAECRALAAA

SEQ ID NO: 437915 - protein, 313 aa, unidentified
MHCIGIDMSKASFHAALNDSSVEVFANTPEGIEQFMGALRTCECAPEETTIGVEATGVYHLLFSRILTTDGWKVMVINPMLSHRVINSSLRRVKTDRHDAQSLREATRMGFGYRFTDTPDVLALKALVTERAALAKMRGQIKTMIGSHTIREEAAGLQFHDSFAATLVTLSSEIAIIERKMDTYGTDTQKLLRTIPGIGKTSAAFLVAYIGDINRFENSEKLTAYIGLDCRVHESGTSIKGKGYLTKRGNTYLRHVLFMGAFVAAKKNLKLKAYFEKKRAEGKHYHSALCAVERKLVHLIYAVWSRRAPFENR

SEQ ID NO: 437916 - protein, 342 aa, unidentified
MTAIGVDTHKATLAACAIDELGRVVGEATFGNDPAGHLAFIAWARSIEPEATIGIEGSSSFGAALARSAQSAGLVVREVPPHLSRFERRRTRRPGKSDPGDALAIARVTARETNLPPIRLPDRTNEIRLLLEAREDLIGETTRARNRLHAHLRVLLPGYGGKVANLVAARHRTMVRRLLRGNATVQGELARSLLDRLLRFERECDVLTRRLEALVDGHPLLGLPGAGPITVARLIGEAGDMRRFRTPDAFAALAGVAPIPASSGQVQRMRLNRGGNRQLNRALHVIAVTQARFYPPAKAYVTRRIEADGKTRREAIRALKRQLVRPVFRLLVEGSEVSLEAA

SEQ ID NO: 437917 - protein, 355 aa, unidentified
MSSVKYIGLDVHQATTVAAVLDVSGKLVMQAIIETKASTVVEFIRGIAGEVSVTLEEGTCAAWLHDLLLPHVQRVVVCDPRKNALLKQGNKSDKIDARKLADLLRSNMLSSVYHGQTGAGALREMARSYLALTQDTTRVMNRIKAVYRGRGIGCAGQKVYTARHRGEWLDKLSEASRRRRAERLYEQLDQLERLRKQARHDLLQESRQHPATPWLRQIPSIGAIRAALLVALMQTPHRFRTKRQLWAYSGLGLETRDSAEYRFRDGQLQRARKQVTVRGLNRNRNRHLKELFKSAAIGASTQPGPFADYYAGLLQKAIKPAMARLTLARKIAAIVLAVWKKGERFDQTKLNTQAA

SEQ ID NO: 437918 - protein, 371 aa, unidentified
MDESSKTLYVGLDVHKDSIAVAYAPEDRGAEVVSLGAIGPRQCDIDKLIRKLQAKGATLVFVYEAGPCGYWLYRYLTRIGLVCHVVAPSLIPRKAGDRVKTDRRDAITLARLMRSGDLSSIYVPQVEDEALRDLSRGRDDAMQDLKRSKRRLKSFLLRQDIRYEGRANWNAAHLRWLSEVVCPTPPQQIVFQEYVRAVTEQQERLQRLERELHEAVKGWRLYPVVEAIQALRGVELTGAVILMAELGDLTRFDTPRQLMSYLGLTPSEYSSGARRRQGGITKAGNSHPRRALVEGAWAYRYPAKVSRHLQLRLKKLPAEVQAIGWKAQARLCKRYRQLTARGKHVNQVVVAIAREMAAFAWAIARIVPLAA

SEQ ID NO: 437919 - protein, 319 aa, unidentified
MPQPDLFVGIDVAKNELVVRLHPLGEEWRFPNDKAGLKALERRLKALAARYHLLIGFEATGGYERKLAALLDRLGLTAYLLDPARVRSFARAERQLAKTDPLDAAVIARCLAALHPELTPYRHDPQAARLAEHVRMRDLAVAQRIQLGNQLESLDDPAMRRLVKAQVGKLKALALRIEKAIAALIAASPDLATRDRLLRSAPGIGPIVAACLHAHMPELGMLSSRQAAALAGVAPFDRQSGATRKPGRCAGGRPAVRRCLYLAALAIARSKKGPLAQTCQRLRDNGKPAKVALVATMRKLIITLILLSHEIVAGGGFAD

SEQ ID NO: 437920 - protein, 391 aa, unidentified
MICVGIDVAKDKHDCFIINSEGKVLANVFTIQNSMEGFGYLLEKIRACSLPLDKIKVGLEATGHYSYNILGFLLDNGLDTYVINPLHTNLYRKSLTLRKTKTDRVDARTIAAMLMSDVGLKPYTDTAYHNEELKSLTRYRFDKVKVRAKLKSSIARLVCILFPELEKLVSSLHMASVYALLDEFPGAKQIAVAHLTRLTHLLAESSKGRYGRDKAIEIREAARQSIGSVTTAKSLELRHTIRLIRELDAEIAEIEQVIQRIMDKMLSPITTIPGIGYRMGAMILSEVGDFSRFDSPDKILAYAGLSPSTYQSGQLKNCYAHMEKRGSRYLRYAIFNATKFVCLWDPVFAAYLARKRAEGKHYNVAISHAAKKLVRLIYALEKSGEPYRLAA

SEQ ID NO: 437921 - protein, 666 aa, unidentified
MSDQPALPTADAVETFVASLRQRAVPLNTIKSYAHDLRLFVQAMPADLVIVTSEQIQAFLTSDEHHSVATRRRRYSTLCTFYHWLLRHDVLETNPMERNLQRLYIGRRSESTKAIGENGVVGIHWSLGGQESALTTLGSYTAPRLRMPSSRPGDPIRNIGAVCGSRPLISCKLGCISSPVIGLDLGNEPTDDLSAKRVCFPLRKGGPMNTIGLDLAVEAAHKAVVIDEQGRFITPVFTLRTRPSDLEQLLARARHGDQDAALQVVMEPTGMAWFPIAVYLVRHDVTAYLVNSQEVADLRRYYQRHAKSDRIDARVLARLPLVNPEKLHRLHLPSATTLACQRSCKQLDRLSTLITAIQNRVQAIDRFAWPGLEEQVFADPFAPAARWMRTHWYDPQRVLEAGAATIREQWEGSSEAAESAGAWCETLVALAAQVLALYGSENQYLDFAQLQAEVCREQAWLATLEQQHQTLRKQTVRPLYRQIHPSRNLETLKGVGQDSAAVYASFIGDTKRFSSSRLFRGWSGMVPESAQSGDTEAKGLHMSQAGPDLVKKYAYLDAEIARRWDPQIAAIYYDQMVHKGKHHKQAVCACATHLLDRVLAVLRQDQPYQLRAVDGTPVTVEQAQRLIAERYRVSPEVRRRTTKHQRKERAERQAEHNSKGKAVSAS

SEQ ID NO: 437922 - protein, 358 aa, unidentified
MQVQRNKLNFEGQNIYIGIDVHKKDWTVCIFSEHLEHKKFSQPPSAEALKSYLHRTFPGAKYFSAYESGFCGFHVHTKLQEAGITNIVVNAADVPTTHKEKNNKDDKRDSRKLGRSLRAGELQGIHIPSRKTQEDRSLLRMRYTVRKDLTRMKLRIKSLMNFYGIEHPERFSSTSKHWSGKYMGWLKTIRMEEDSGQSTLQTLISEVEEMRKVQLKVTRKIKILSQTQSYEKDYQLIYGIPGIGLITGMSFLTEIEDINRFSSTDRFASFAGLVPSCHSSGERENNGDITSRANKLMRDMIVESAWIAAEKDPALHMAFGKLCKKMEPNKAIIRIARKLLNRIYHTLKTKTAYVCGVV

SEQ ID NO: 437923 - protein, 322 aa, unidentified
MQGKMTSVRAGLAVYAGIDVCKAQLDVYLHPTGQSFRVPNSMEGLKRLALELTSANAVLIVMEATGKLHRLAHRKLSAAGFAVAIVNPYRSRKLADAFGQLAKTDAIDARMLALYGEAIGPGATPVPAKTLAELQELVLARQAAKAGETALKNQYGAAESPVLKRLLKAQLDAQARLIQGLKAAIEAILSKDAALKRRFEILASIKGIGPIVAATLVACLSELGVLSGGKIALLAGVAPINCDSGEMRGQRHIKGGRAHVRSALYMAAVSAIRCNPDLKAFNSRLRAAGKAPKVALTAVMRKLVRLANTLIREDRLWTPKHA

SEQ ID NO: 437924 - protein, 388 aa, unidentified
MTHLPVPYPVPATPDYDRTLVLAIELSNKSWVLAAQVPGLPRVKAKRTIEPTAEALLTAIQGYRERAKAAGRPVERVIATYEAGWSGFWLARWLSTHDIETHVVQPSSVPVDRRARRAKSDGIDAELLLRTLLAWLRGEPRVCSMVPVPDEADEDARRCIRERTELVAERVALVNRIGAVLATLGVGDYNPLLRNRRERLDALRTAQGTPLPPHAHAKISRMLDPLDLVRTQITALEQERDAVLEDEVPDRAGAMIQQLATLRGVGVQSATVLVREAFVREFANGKALGSYAGLCATPYSSGGTEREQGISKAGNRRLRTVMVELAWLWQRYQPGSAEVSWFRERVGGTGARVRKVMVVALARKLLIALWRFATQGVVPDGAVMKPTS

SEQ ID NO: 437925 - protein, 365 aa, unidentified
MKKISTMRARGKDIFKGQLTIGLDLGDRSSAYCVLNETGEIVLEQKVATTAEAMKQVFASMPRCRIAMETGTHSPWVSRVLSALGHEVIVGHAQKIRLITKSRRKDDRLDARTLARLARIDPELLSPVKHRSAEAQLHLAEIRARAVLVSARTALINAARGLAKSYGERLQRCHTQQVRRETANGLSAGLREALQPLLQEVESLNERIQEYDRRIAKMINERYPETALLKQVKGVGDLIAATYVLTIEDPHRFRKSRDAGCFVGLQPGRRNSGESEPQLHISKEGDEYLRTLLVQGAHYILGPFGEDSDLRRWGMKLAARGGKAGKKRAVVAVARKLAVLLHRLWVSGEVYEPLRNTQKAMTAAA

SEQ ID NO: 437926 - protein, 394 aa, unidentified
MRKRYESVAYGGMDVHLNFSQVTFRDPEGKVVCRERLEHRDRKGLREQIRRWPRGSVMVLEASYGWGWLSDELEAAGLKPQLSNCYKVDRMREARGMAKTNEKDADLLSLLPAEATRWWEVWRAPPAVRDRREWMRYRSDVVGVQTETKNRIHALFHRQGVFYEESTDLFGGRGRRFLLALCEDGRHAGGVLEGGVLEALRGLVDLLMYLRKQLTTVAKHLRGQLERDPLIRRLDEIPGFGLILSHTVASEIGEIGRLRSHRALASYACLAPRSWDTGEGDPTRAPLGRHLGDRGNRTLKWAFIEAAHGAVRSGGKWRALFDRVTQGGKKNTGRGYIKVARELVTVVFVVWSRGVRYTETPPARPGSRPRRRTRKDSRPGTGQPCHAMVHAARR

SEQ ID NO: 437927 - protein, 372 aa, unidentified
MKEDSVIFIGLDTSKLKISVAIADGSRNGELRFFGDISSEPASVASMVNKLSKRGAKLHFCYEAGPTGYGLYRQIVELGHDCVVVAPSLVPKRAGDRVKTNRRDAMSLARLYRAGELTAVWVPDEGHEAIRDLVRAREAASDALKQARQQLQSFLLRHGRIYAGREPWTRAHRRWLTCQAFDHPAHQILLAEYCQAVADASVRLDRLTKLVVETAASWSMAPVVAAYQAMRGVAFMTAVTFVVEIGDVRRFDNPRQLMAYLGLVPSESSTGERVKRGGITKSGNTRARRVLIEGAWTYRFPARVSPKIQARLDDLPRTVREIAWKAQVRLCARYRKLIAAGKPKVVAVTAIAREMAAFLWAIGQEVAPTAKG

SEQ ID NO: 437928 - protein, 420 aa, unidentified
MRNAGIHANSLLEVRRMYNAVGIDVSKGKSTVAVLQPGGTVIRKPFDVSHTSQNLNELADYLSSLDGTTKIVMECTGRYHEPMIKALSEAGLFISIVNPHLIKNFGNNSLRKVKSDPADARKIARYTLDNWTELRQYSGMDNTRTQLKTLNSQFSFFMKQKVAAKANLIALLDNTYPGVNKLFDSPTREDGSEKWVDYAYSFWHADCVRKIGLKAFTERYMSFCKKHHYIFQQDKPEKLFNASKELVAVFPKEKTYKLLIQQSIQQLNLASEHVERLRREMNELASTLPEYSTVMGIYGVGKTYGPQLIAEIGDVSRFTHREALTAFAGVDPGVDESGQHKSKSNRASKVGSARLRKTLFQIMKTLLQNAPEADPVYRFLDKKRSQGKPYYVYMTAGANKFLRIYYGKVKECLRNLEQTE

SEQ ID NO: 437929 - protein, 331 aa, unidentified
MGHTRKEQNMSTNAVFAGIDVSKAHLDVAVRPDEIEWRSPNTDTGAREAANKLKDLDPDLVVLEATGGMEIPAASALAVLGVPVVVVNPRQVRDFAKSTGRLAKTDALDARVLAHFAEAVRPEPRPLPDEQARQLSALLSRRRQISEMLTAERNRLQSADSTVCRRLNVHIRWLERELSDIDNDLDEAIKASPLWRVKSDILKSVPGIGPVVSFTLLSELPELGQLNRKEIAALAGVAPLNRDSGTLAGRRTVWGGRARVRAALYMAALVASRYNPVIKDFYLRLCARGKPKKVALTACMRKLLLILNSMVKNKEKWNASNTRDRGVLISA

SEQ ID NO: 437930 - protein, 360 aa, unidentified
MSFNGTSVGLDVHALSVVAHAVDEETGRVKRARLCPDHGEILDWLHCLRAPVRVAYEAGPTGFGLARALAAAEIDCTVAAPSKLIRPGGDRVKTDARDAAHLTRLLRLGEITAVTVPEADVEAVRDLVRAREDARADLMRVRHRLSKLLLRHGRVYSGGHAWNGVHETWLRRQRFDDSRTAAAFDHHFDAVLSATAARDRLDEQIGTIAASPRWADPVDRLGCLRGISALTGLALSVEIGDWTRFTGSSIGAYVGLVPTEYSSGTSRVQGSITKAGNAHVRRLLIEAAWHHRAAYRNPGPTMRARWAKVDPALKARGHAGNRRLHQQWCRFNERKKHHVVANVAVARELAGWCWSLATLN

SEQ ID NO: 437931 - protein, 332 aa, unidentified
MLDEAGEVLLEQKLSTTPKAMKEVFGAMPRSRMALETGTHSPWVSRVLSELGHEVIVAHARNVRLIGESRRKDDRLDARTLARLARIDPQLLAPVQHRSAQAQADLMVIRARAGLVRARTSLINTARGLTKSYGERLRGCSPRNMNAEKARPLSPELQAALEPLLAAIEALSERIYEYNQQIEKIAKESYPQAARLKQVKGVGTLIALTYLLTLEDAQRFRKSRDVGCYVGLQPGRRNSGQSEPQLHISKEGDPYLRTLLVQGAHHILGPFGADSDLRRWGLKLAERGGKNGKKRAVIATARKLAVLLHRLWVSGEAYEPLRNSNRAMLAAA

SEQ ID NO: 437932 - protein, 320 aa, unidentified
MRNTVGLDISKLTFDATAIVGNAEYSAKFDNDSKGLDQFSDRLKSLGCQNLHICMEATGNYYEEVADYFAQYYSVYVVNPLKISKYAESRFKRTKTGKQDAKLIAQYCRSAQESELVKRQKPTDEQYRLLRMTAAYAQIKSECAAMKNRHYAAKDEEAAKAYAEIIKAMNEQLEVLKEKIKEQTEKPNCKEGVKRLETIPAIGRMTAAVLFHHLTSSKFETSNKFAAFAGLSPQQKESGTSVRGKGKLTKFGNRKLRAVLFMLTMVAYRIRAFPDFIKRLEEKKKPKKVIIAALMRKLAVIAYHVHKKGGDYDPSRYKSA

SEQ ID NO: 437933 - protein, 348 aa, unidentified
MVLIGCDFHPSWQQVSWMNEATGETEDREIVHTSGEVEKFYRQFPAGAIIGMEATGNCQWFLELMASLGHEVRIGDAAKIRASDVRQQKHDKRDARLLLQLLAERRFPQIWTPSSEQKDLRQLLIHRHKLVRVRTQVKNALQHLAMNQGVLKKRKLWSAAGQKALCELPLRPWASRRREDLLKVMSMLEEKISVLDQAVAEAAAKDEKARLLMTQPGVGPITSLAFVLTMGDVRRFPRGRQVASYLGLIPREYSSGGHRRYGSISKQGNTFLRMLLVEAAQIAVRCDPGLRNEYLHRCHRKPKGVAKVAAARKLAIRLYWMLRTNTGYPEVVRVESSSRVALVVRHGG

SEQ ID NO: 437934 - protein, 397 aa, unidentified
MENYYLGIDVGKFEHQATLVNEQKEIVGQSIRFSNNQDSFGNLLSQIKKGIPEDSNIQAGMESTGHYWLNLDAFLKSSGIENVQIINPIETQKISKTRIRKVKNDKVDSYEIAKIVCDRKNVPIAKQNEKLIKLKRLTRFCDKMKRQEKFIKREIVNLLEVICPEFEGLFKNIFLKTPLSILEKYSDLRKLERVKKDSFAELLKKKSRGRIGETKSELILQTLNNSVGKNYWDEFSIMQIKMLLDNFHLIQKQVEELKKEIEKFSDQFEEKVYVNSVVGVSSFSAAVYLAELGDIERFKNKHQLTAFAGIDASVFESGEYKRKQGNRISKRGSKYLRKQLYYAAKTAIIFDPEMKKFYEKKKKEGKHYNVIMIAVARKILMRIYTVLKQKRLYEVRS

SEQ ID NO: 437935 - protein, 389 aa, unidentified
MKIFVGIDIAKLNHFAAAISSDGEILIEPFKFTNDADGFQLLVSKLESFDKNSIIIGLESTAHYGDNLVRYLVAEFYQVCVLNPIKTCQMRKNNVRKTKADKVDTFVIAKTLMMQDDLRFITFFDLDMMDLKALGRFRQKTIKQRTRLKIQLTTYVDQVFPEIQYFFKSGLHQHAVYALLKEAPSPKEIASMHMTHLANLLKVNSHGHFTKEQAKELRVLAQKSVGANDSAISIQITQTIQQIELLDSQLEKIEAEMTDIMRFNDSVIMTIPGIGYINGGMILGEIGDIHRFSNPNKLLAFAGLDPSVYQSGNFQAKTTRMSKRGSRVLRYALVNAAWNVVRNNATFEAYYNAKRAEGRSHYNALGHCAGKLVRVIWKMLTDEVDFNLE

SEQ ID NO: 437936 - protein, 453 aa, unidentified
MQEEKQIKMEVVNPYAAGIDIGSRSHFVAIGQKETDVKEFGVFNEDLFAIAKWLRDSQIKTVAMESTGTYWQALYAVLIAEDFQVILCNGKFTKNIKGKKTDVQDCQWIQKLHSIGLLTGSFLPDLQTEELRTYCRHRAGLIDTAASTSKKMQKYLRLLNLRLDVIVKDICGLTGLKIIEAICNGEKNPLKLAALRNGNCKTSEAEMAKALQTNGRKDYLFTLHQEYKIYHNLQDQIKLCDIEIEKLLNHQINNNDHKKQHHVEPKAHKRVNKNTPKNIDLNLIGYQYFEGVDLLEIEGFSHQTLLTLMSEVGLEGIKKFETAKQFASWLRLTPNNKISGGKVLSSKVPKGSNRLKIALRNAANAIGNLKESTPLRDFFHRINFRKGRVSAISATARKLGVIIWNMVVKNIPYKNPEDYLFVDQKRKLAVLQRVQKTINKFDLKTDIQGFVNA

SEQ ID NO: 437937 - protein, 351 aa, unidentified
MMVVGVDPHKQSHTAVAVDELGRKRAQQTVRARRDGHRELIGWARTVAAAGRVWAVEDVRHVAGGLIRELLAAGEMVVFVPPKLMAGVRRGGRERGKSDPIDALAIARAALREDAALPAARLDEQVLEVRRLADHREDLVAERTRVISRLRWLVHDLAPELAPAPRALAGSRARAKLEAGLRTLPGSAGRRIALSQLARITALTAEAGQAEQELAVLVHRLVPALLQVTGVAVITAAKILGETGDIRRFRSLAAFARHNGTAPIPASSGNHEVHRLNRAGNRQLNAALHRIALVQGRCHDGARALLARRGETAHETRKASLRVLKRHLSDIVYHALTADAWRLDNPPQPAN

SEQ ID NO: 437938 - protein, 412 aa, unidentified
MIHPLLVGVDVHRKTNTISAMDVSGREVTSRFTVENNRPGTAALAQELSSLAAEGGYDAILLAAEATGWYWWHFFRALDEDPNLQRTPLTLYPFNPRLTAHFKKTYADLDKADLIDAFVVADRLRLGRDLPQPFAYDEPGLRLRFLTRHRFHLVHQIVREKAYFLAHLYLKASEYTHLKPFGDVFGATSRALIQGYPSIEELAAIPFDDLVEIIDLQGKRRFADPADNARQMQAVARNSYQLPQALQVPVNLILQQSLQQIAALKRQMQRTESAIAEALQPWPHTLDTVPGLGPVFSAGVIAEIGHLARFDYDEAKVAKFAGLRWHQSQSADFQAEETPLTHSGNRYLRYYFCEGANSVRMCDAEYRAYYERKFHEVRLHQHKRAIVLTARKLVRLVVRLLTTNQPYRPRRA

SEQ ID NO: 437939 - protein, 356 aa, unidentified
MQTQVTKKIDFKGKDLFIGLDVHKKSWSVTILVEGMEHRTFTQPPDPRTLYAYLQKMFPGGTYYSAYEAGFCGYGIHRALNDLGIKNIVINAADIPTSQKDQIHKLDPVDSRKIARALEKGLLRAIHIFDRDREELRSLNRTRFYLMRDLRRSKNRIKSFLQYYGIPIPPEYDNNLWTLKYIAWLKQIQMKTSSGKDAFSNLISSYEYHREQILILSRQIRIRMREYDNELYNLLKTVSGIGPLTSSALITELGDINRFPHINHLSSFVGLVPRVKQSGETSYNAGMTFRCNEYLRTLLIESSWQAIRLDPALMQYYQQHIINNKGQKVIIKVARKLLNRIRYVMKNRQPYVTGVA

SEQ ID NO: 437940 - protein, 426 aa, unidentified
MSESKVPGQEPQFAALVGIDWADQKHAWCLQAADATQRENGEVEHTPEAIEAFVGQLCRRFGHRPIAVAVEQVKGALVFMLSKYGPLHLFPVPPAMSAKMREALYPSGSKDDPRDADLLLELLLQHRDKLRRLSPDSEATRRVQNLVEERRNLVDEKTAQTNRLTNQLKIYFPQMLEWFEQLDTELVCTLLERWPTLEELQKVPPARLRTFFYKQRCRYPELIERRLVGIRQAMPAIRDVAVIEAKSAAVKVSAQVIRSLVRGIADLDRKIEEAAAAHPDFFIFESLPGAGAVLAPRLLAAFGSQRERYTNAEEVQTYSGIAPVTKRSGKKKWVHFRWACPKFLRQSFHEWAGHSIAHSRWARSYYQQQRERGKGHHAAVRGLAFKWIRIVFRCWKDGVAYDESRYLAALAKRNSHLAAVAGGTIL

SEQ ID NO: 437941 - protein, 403 aa, unidentified
MNNVAGIDVSKGKSMVSVLRPFGEVVAKPFSIGHTGSELKELADYLKSLDGETRVVMEHTGRYYEPVARFLHDEGVFVSAVNPKLIKDYGNNTLRKVKTDKADSRKIARYGIDNWAELRQHTPMDTIRMQLKTLNRQQSLYSKTKTMMKNNLIALLDQTYPGVNALFDSPVREDGSQKWVDFATTFWHVDCVRNMSLTAFAERYRKWCKRHGYNFSQSKAVEVHAGAQDLIAMLPRDALTKTMVRQAIDALNAVSASLERLKAEMQALAAQLPEYPVVMAMHGVGDSLGPQLMAELGDVTRFTHRNAITAFAGVDPGADQSGTHEAKSTRVSKSGPPELRRALFLVMDCLLKTQPQDDPVYRFMDKKRAEGKPYLVYMTAGANKFLRIYYGRVKEYLASLEEN

SEQ ID NO: 437942 - protein, 353 aa, unidentified
MTSVTDLRDVVDTVIGVDTHVQTHSAAVVDARTGGVLEEITVEATTDGYARLVEFANEHAALRAWAIEGTGGHGAGLTRHLERNQEVVVELDRPERAKRRNGAKSDPLDAIRAAREALSRAKLGTPRSGGDRQALSVLLAARRSAVNASTDAQRQLFSLLIAAPEPIRERFRGQKVPAMIRTAAKMRLNSTWDLETTTTVRTLRALARRARALSKEAAEHENAIRAIVLAWRPDVLAQPGVGPIVAATVLCAWSHPGRIHSEAAFAMLAGVAPIPANSGQVTTRHRLNRYGDRQLNRALHTIALSRIHYDQTTREYVTRRTAEGKTNREITRCLKRYIARDLYRLLEAGPIRP

SEQ ID NO: 437943 - protein, 458 aa, unidentified
MLGRPRKAADNSSRVCLSFRRNVAGIDLGSEQHWVCAPTLDGNGRERASFGATTPELIGMAEWLKARPVEWVAMESPGVYWIAPHEVLEAQGLQLLLVDTRQLARVPGRDKKTDPTDCEWIQRLHSCGLLRGSFRPEEAVCMLRTLVRDKANLVAESGDWLRRMQKSLDQMNVRVHRAVSDIDGVTGMAILRAIVGGERDAQKLAKLRDQRCSKTEQEIAEQLRGHWREDHLFSLQQALKMYDAVQERIAAYEKEILQRLGEMERDEQRGQTAPPLPNANKAKAIKKRGQEPMRQALYRMSGVDATHIDAIGVETLEVVLSEYGPDLSRFPTEKQFVSHVTLAPHVPTSGGKPLRKRKRNSTSTRVAAALRMAALSLRHSQTALGAYYRKMAQRLGGDIAVFATARKLATLIYRLLRWGQPYVDEGANAYEARYRQQRIGRLAATAKQLGYQLAPINA

SEQ ID NO: 437944 - protein, 347 aa, unidentified
MGKSITDLSSVTTVGLDLAKHVFQVHGVDASGRVIVAKALRRKDVLAFFAQLPECLVGMEACGSAHHWARELIKLGHDARMMPPAYVKPYVRRQKNDAADAAGICEAVTRPSMRFVGVRTLENQAALMHHKLREMLVAQRTQLINALRGHLAEIGVIAAQGLKNARELAWVILAEGDETIPACVRAALAPLVRQLHALDQELARSDQTIAAMARDDEMARRLMTIPGLGPVTASAMATSVQDVSVFSGPREFAAFLGLTPRQNSSGGKERLGRVSKMGNRYLRKLLVVGAHAVLYHRKPHDDALRSWAKKLMQCKPFKVVAVALANKMARIAFAIMRGKTVYREIPV

SEQ ID NO: 437945 - protein, 349 aa, unidentified
MIMIGVDFHPEFQQIALLNTTTGEVEEKRLAHPGEAEKFYRALASANETVRIGMEASGQGRWFERLVAELQFELWIGDAAVIRAKRGRKQKTDRQDAQHILQLMLKDDFPKIWVPSWENRDLRQLLWHRHRMVQARTRVMNQLQAVALNEGLHCKKKLWRERGRQQLESFALAPWASRRRRDLLDLLDRLNPSIAELTQAIEHEVENYPAAQRLRTHPGVGVLTALAFVLILGDAERFHCGKQVASYLGLVPLEDSSGNRRRLGHITKQGSSIVRFLLVEAAQVTVRSLPEWRSKYFHLVLRRGRKIAKVAMARRLAVQLFWMMRKEWDYEQLKKFGSHAGQPGNRHGV

SEQ ID NO: 437946 - protein, 346 aa, unidentified
MTILEDTRVITGGVDTHADMHVAAALDPLGGLLGVREFPATAAGYADLLGWLTGFGDLALVGVEGTGSYGAGLARYLAAARVRVVEVDRADRQDRHRQGKSDPLDAVSAARAAQSGRAAGAPKGRDGAVEAIRALMVAKRSARNERTQAINQARALLVTGPDDLRARFAGLTAAALAEGIAALRPRPGDAAQYAVRIALRELGRRVEFLDGQLERLDDLIVPLVTARAPGLLSLYGVGPDTAALLLVAAGDHPERLRSEAAWAHLCGVAPIPASSGKVRRHRLNRGGNREANHALWRIVITRMSAHPATRAYIERRTKEGLSKKEIIRCLKRYVAREVYHHLRAGG

SEQ ID NO: 437947 - protein, 342 aa, unidentified
MEEITIVGVDLAKSVFQVHAANSDGRAIIRKRLPRTRFLSFMSQVRPCVVAMEACATSHHWARELTALGRDVRLIPPIYVKRFVKRQKNDANDAEAIVEAAMRPSMRTVPVKSPEQQALAMLFRTRELLLTQKTQLVNALRAHLAEHGVIVAGGRRSIDPFIRVLDDVTNALPPGVRKVGAIYLDRIARTAGEIEDLERQIDEQAKEHEMAQRLRTIPGGGPVTAMAIEAFAPAMESFARGRDFSAWLGLVPRQHSSGGKQRLGRTSKMGQRDIRRLLISGAMSIIHWRGRNGGKPGSWLARMLACKSRMLTAIALANKLARIIWAIMTRKDVYRDPVGAVC

SEQ ID NO: 437948 - protein, 353 aa, unidentified
MEKKNSSSVFNGKDLFVGIDVHKKRWVVSVRCDTLELKTFSMSPTAEELEKFLVNTYPGALFHIVYECCFSGFWIYDYFHQRGYDIIVTPTNRIYRDGSIVKTDKIDARKLSHQHCKGLLREVKVPSIKIREYRSLFRIYDKEKMREGQILRQIRCILECKNHELKWSKWNKEFIERLKQVRFQEEIFNRKFETLIKEYEFVKEQIKDTEKRIKEIGEDEELHDKVKRIEQINGIGIVSAVRLVVYLFDMDGRFESGEKLVHYVGLTPGEQSSGETIIRSRTGLIGSRQLRSIIIQLAWVAVRKDGNLLNKFERVYRSSGSKQKAIVAVARKLMMKVHAITEKEEEYEINKAA

SEQ ID NO: 437949 - protein, 391 aa, unidentified
MIFVGIDVAKDKHDCFILNSEGTVLADVFTIANNRIGFETLLSRIQSCSQGESKIKVGLEATGHYSYNLLGFLLDSGLATYVINPLHTNLYRKSLSLRRTKTDRIDARTIAMMLMSDVDLKSYSNTAYHNEELKSLTRYRFDKVKERAKLKSSVARLVNILFPELEKLVSSLHIAVVYALLSNYPGASYIANANTEELAETLCTASKGRYTKSKTAEIQVAAGVSIGSKMPAKSMELKHTIALIRELDKEISEVESTIDKITSQMDSPIFTIPGIGRHMGAMILAEVGDFSNFASADKLLAYAGLSPSTYQSGQLQNCYAHMEKRGSRYLRYALYNATKYVCQWDESFSAYLAKKRSEGKHYNVALSHATKKLVRLIFAMEKSGRTYQPAA

SEQ ID NO: 437950 - protein, 320 aa, unidentified
MAQQGRIVGIDVAKLKADACIRSLQLRLSQPSTAQGQQDMIAWLRRHEVGLAVMEASGGYERVWAEALRAAAIAVRIVDPKRVRYFAKSAGRLAKNDPIDAEMIAWFAETFAVAAEPAHDADRDALNRLVTARRLLVRLATPIRQLGEHGQPRVVENAQRAILKTIKAQLAKLEAAIEAKIAANAQFLARRAIIASVPGFGDHFVAGALAWLPELGRIGNKAAAGLVGVAPYDDDSGQHRGERHIKGGRRDIRTLLYMAALGAATRHNPVVMAYYKRLRAKGKKTKVALVACMRKLVVILNTMLARGEMWNPTPRTTAVA

SEQ ID NO: 437951 - protein, 345 aa, unidentified
MKIIHWIGIDDHADKWTIAQFRGHEKKPAREFELVPDEAGYRKLIAFAKALDGTVRIVYEAGPCGYELYRRLTKAGLQCEVAAPSLTPHKPGHRVKTNRRDAAKLAHYLRSNELTLITVPNQERESLRDLMRGRAAAQKDLYGRAWTLRFWAWLNKVTLVGHSQFVLEEMITTHTERVERLARYDGEIEAASKKPEHRLYVAALSVLRAIDTLSAMTILAELGDLRRFPTAPQLMAAIGLVPAEHSTGDKTTRLSITKTGNAHVRHIAVQAAWHYQRRITNGPTIQQRRKDQPRELLEIAHRCNARLNRKFFRMTSRGKRSQVAAVAVARELIGFIWAIGQIVHP

SEQ ID NO: 437952 - protein, 500 aa, unidentified
MKTKGSKAKIRAGRKSISVPCSEPAQELRILRPDAAGIDCGAQEHYVAVPPDRASAGQPTVRRFSAFTEGLDAVVDWLKDCRVTTVAMESTGVYWIPLHQKLETAGIEVYLVNARHVRHVPGRKTDVQDSQWLRQLHRFGLLNASFRPEDIICRLRSLHRHRDNLVSSSASEIQHMQKALQQMNLHLHHVVSDITGLTGLRIIDAVLAGQRDPEQLVRLRDRRVYKSTPQEMQAALVGDYRGEHLFVLSQSLQAYRFYQARIEECDREMEPLLEKLAQQIEATSANLMLDALEPSGSKGESNRPEQLPEPKPTSGPKSKRKRKPRANEPKIQLAGLLERICGIDLTQVVGLNVLNVLLIVSEIGVDMSKWRSAKAFCSWLGLCPGNKISGGKLLDSRTRQVVNRVADALRLAAQSAGRTQTCLGIFYRRKQAHLGAPKATTATARKLACLIYHLLKNKQPYQEPDSASYQLRLQKSALSKLQRQAIALGYTLLPTAPVPA

SEQ ID NO: 437953 - protein, 410 aa, unidentified
MKDSGKRYIGLDVHKHYLIALGVDEDLNIVLPARRVEFSYLETWMKKTLTQQDEVVVEMTTNTWQLYDELVVHAGSVMVVHPPHVALITRSQVMNDKIAASILARLLAKRLLVGIWVPPQEIRELRGLVAQRKKMTNMATQAKNRLHAVLQRHHLLLPEGNPFGASNTEWWQSLPIGKLEKLNLQSDLETLQFAEQQVNRMTEIMEGMTAEQEPIGRLLHLAGFGVVTAVTVWAAIGDIHRFAEPRYLVGYAGLGTRVHNSGMSTRSGQITKAGRRDLRTVLIEAANVVANSHPHWKAEFARLEPRLGHNKAIVAIARKLLVAVWYILSQNKTDRFAQPQAIAQKLLGFAYRVGKENRPAGQSAAQFVRERLDTLHLGVELTHISWGSKRPIPLPPSSLKTERSDVPNTK

SEQ ID NO: 437954 - protein, 342 aa, unidentified
MQISTIGFDLAKNVFQVHGIDANEKVVVRKQLRRSQVIAFFEALPPCLVGMEACATAHHWARELRKLGHEVRLMPAKDVKAYVKRNKNDAADAEAICEAVRRPTMRFVTVKTVEQQGRLMQHRVRDQLMRQRTQLINALRSHMAELGIVAAQGREGLKEVLAIVADANDGKLPVDAKASLMVLAAQLQACQTLIGTLEKRIRAQHKSNERSRRLETIPGIGVVGATAIDATLTDPKAFRSGRDFAAWIGLVPRQDSTGGKQKLGRISKQGDQYLRRILVVGAHAVLRRARQHPDKYPWLTALLARRPFKVVAVALANKMARVAWALLAKGGTYRAPQLAAAV

SEQ ID NO: 437955 - protein, 341 aa, unidentified
MEKCYVGLDVSKDETSICVRNLTGDLLSTARAVTDPDVIFGALSKHMGSIQCVVLETGRMANWLYNELSDRGLPVVCIDARQAHAVLSQMHNKTDDNDAAMLAELARTGFYKKVEVKSRVAQERRALLKAREIALKARVNVENTIRGLLASFGLRLPKHLSTYEQRVHALLRDRAVLSGIILPLMELRTAALRQAAALTKEMARYAKDDEACQRLMTIPGVGPVSAVTYVATIDDPRRFAKSRSVGAYLGLTSRRYQSGDMDFGGRISKRGDAMLRSTLYEAASSLLNRVKPGKGAGLQAWARALKARTSHKKAVVALARKLAVLMHAIWTNGSTFQPKEA

SEQ ID NO: 437956 - protein, 398 aa, unidentified
MTKLIIGIDIGKYYHQATIIDESGHILGGSLRFPNSLTGAELLLKKLSAVNPEGLPMLFGLEATGHYWLALHAYLTEKGHQIVVLNPYQSDAFRKVSMSSTKTDKEDAFLIAELLRFGSFPQTKMADKDMVALRRLTRFRLTLHQQVTDSKRRILTILDQVFPEFESLFSDIFGKTGRSLLKRYPTPEEMETVSLRKLTRLITKLSKGHFKKEKAQEVLEKAKTSFGITLALESLTLQLKILLETLEFTEKQLQVVDAEIEQLLPVTCVLLTLPGVSKTLAAAILSEIGDIKRFRNSSQLVSFAGINPTVRQSGNFLGNRNHMSKKGSPYLRLALWQASITSARFNPVLKEYYELKIKEGKSHMTVIGAVARRLTGIIFTMLKEQTVFDKNYKPSHLR

SEQ ID NO: 437957 - protein, 413 aa, unidentified
MERVLERCAALDVHKAQVTAWVRVPDGRGGREDLRARYSTMAADLLALRDWLGGLGVTHVAMESSGVYWKPVYYVLEDDFELLLVNAQHVKNLPGRKTDMKDAEWLCQLLECGLLRASFVPPREFRELRDLTRYRKSLISERQREANRLHKLLEDAGVKLSCVATNVLGMSGRAMLEALISGTRDPEVLAELAQGKLRKKIPQLKQALDGRFSAHHAMMLGHILAHMDYLEEAIDRLTAEIEERIAPFAGKGERLDTIPGVGELTAQVILAELGEDMTRFATHRHAASWVKLCPGNHESAGKRRSGRTGKGNTHLRTALVEAAQAAAHTKDTYLRAQYEQIKRRHGHNKAIVAVAHSILVAAYYILRDDVPYQDLGADYFTRRSDPERATRRLIAQLERLGHKVTLESLPKAA

SEQ ID NO: 437958 - protein, 377 aa, unidentified
MAHQTPVVPVALREGATIYVAVELSMSSWVIGLVDPRSGKISRHQIPCGAIERLMDLIERMRKACGCARVVLCFEAGRDGFWLYRALVQRGLEVLVLDPASLPVDRRHRRAKTDGLDVEMLLRGVMAHERGEPRACSIVRVPTAEEEDIRRLPRERERLQRECTAHSNRIKGVLAVQGVYHVSPLRPDFVERLKERRTGDDRPLPLHLLREVEREVERLRQVQGALKQVEKEMADLRALDSPIGRMIRMLMRFKGIGPVLATVLVCECLYKDFANRGEIGSYSGLVPTPWRSGGIQREQGISKAGNARVRTSMIELTWLWLQWQPDSALSKWFHQRVGPLKGRMRKIMAVAMARKLLIALWKFVTTGEEPEGAILAA

SEQ ID NO: 437959 - protein, 453 aa, unidentified
MKEEKKDDSQKENVKKKSFSQGLPVFNPYAAGIDIGDKSNFVAISDGATGFEVREFKTFTEDLKEIVKWLKSAGITTVAMESTGIYWLSLYLMLEEAGIEPYLVNAKHVKNVTGRKKDDSDAIWLQKLHSCGLLQKSFQPEAEIRTLRNYVRQRRNLVSISSDSVRRMQKAFELMNVKLHVVISDLLGKTGLQIVEAILNGEYNPDELIKLKDRRIKASDEDIKKALVGIWKEDYLFMLKQAYEEYVFYQNQIDACEEKIVEQLLKQVAIVLDGDITNIVVKKKSKKNQFSIELQPILKEIVGVDLCKIEGISEISCLEILSEIGTDMSKWKSDNHFSAWLNVAPNTKITGGKIISSKMQKKKNHAGQTLRMSASNLSSNKSPMGDFSRKMKSRLGKKGGVVATAHKLARIIYKMIKEKKEYDPEIMNKCNEKWKANKIKFLEKQLSQLKSAV

SEQ ID NO: 437960 - protein, 344 aa, unidentified
MKNCNVIGIDLAKNIIQVCIINKHGEVRSNKAISPLKLKEFLTKSSPSIVAFEGASTCHYWGRFASNLSHDVRVIGPRKVKAFLQGQKTDANDALAIAVAATQPGMLFSQLKNEEQQVLQSLETSRRFLDKHRVSLENHIRAFLYEYGITVARGAKYLRQSVLDILSEGSDELPHHLLAPLLSLWEQYRDTVKRVAAIEKELTQLVKRTDACQRLKALEGVGDVCAIKLFTSLGNGEGFKNGRQASAYIGVTPKQYSSGGKVSMKGIDKVGGNKVLRANLFMGARAVIKALPDKPRTSKEQWLIALIKRVGEKRACIALANKTVRTAWALLASGEKYKSTALVA

SEQ ID NO: 437961 - protein, 337 aa, unidentified
MEELHYIGVDVSKHTLDFAVYDGCLDLKDGHIQVGNDSKGFTTFARWIKGKGIEYDQVRLCMEFTGLYAHEFRCWLEQKDITYYMIPPKKMHDFQVPTNIHGLGHVKTDRMDSYKIAIYSYKNSMDLQPSRLPSAAFFKLQRLMAERRQYVRQRQLYKFHTHDIGAYESDESRTRRKVMSKALLKSIQGVEQEIDNVISSDESIKKNYELLTSIISIGRVCAITTIVLTENFTAITNPRSYANYVCVAPYKKESGTSVRRKAMTSSEGVRQAKADLTIAALSAIRWDPGTTSYWKRKKAEGKHSGVVLNAIKFKLIVRMFAVVKRARPYVKMHIFGK

SEQ ID NO: 437962 - protein, 347 aa, unidentified
MSNGNRWVGIDLHRRRSQIAIIDEHGELTLQKRIATGREPILELLGDPESTHVALEATYGWEWLAELLEDAGFDVHLAHPLRTRAIAAARVKTDAVDARTLAHLLRTGLLPEAYIAPPELRDLRDLLRHRATLVHLRTSIKNRVHALLARQGILPEYTDLFGTAGREFLASLELPDGPRRRLDSLLTLIGDFDREITTTTGEIDQRAKADERVKLLCQIRGIGHYTAMLIIAEIGDVKRFPTAKHLCAWAGLTPTIRSSDGKARLGHISRQGSTILRWALCEAAQHTPSGGGPLRAQYERIGKRRGSKIARVAVARQILTLCYYGLRDGEIRCLSKQPATKDLAEAA

SEQ ID NO: 437963 - protein, 465 aa, unidentified
MTKDSVRYVGLDVHKRVVEACFIDTRGKVVHRERFVLNRQVLTTFATDVLRPTDYVAFEATTNCWAVADVLRPHVAKIVVSNPMATKAIAQAKVKTDKVDALVLAQLLRCEYLPEVWQPDEETRRLRELTGRRATLTGQRTMMRNRIHSVLAMRLIEEPKWLFSSKKGFEWLAKVEIDEQGRVLIDSDLRQMAFLQQEIDLLDAELARRAYKNDPVKLLMTLPSIDVATATALLAAWGDHTRFSDADHAASYLGLVPSTKKSADRCYHGRITKQGNAQARWMLVQAAQHLGKNPGPLGHFFRKLLRKKKRNVAVVAAARKIATIAWRMLAANEPYRYAVPRSTEKKLRRVRVKATGERRVGSSSKGTKNKAKLPSVPGGSRQIKSLATLYESEGLPPPKALSAGERRTVRAAGASKFVAEIAKTHRVPRQSGKKPVAETAETTTTRRSGKNPGETATTRRSAKRT

SEQ ID NO: 437964 - protein, 385 aa, unidentified
MASTEVCLPAGPHPRSATRPRSPDGIPTPGRLAVFGIDPHKATHTVVAVDALGRQVTQRTVAARTPQHRELITWARTIADDRVWAVEDCRHVSRRLERDLLAVGERIVRVPPKLMAATRTSIRSAGKSDAIDALAVARAALREPDLPTAQLDEPTRELKLLVDHREDLVAERTRVQNRLRWHVHELDPELQVPAGAMDQTVWLDQISLRLRPQRRGVSAVLVAIVAELVERVRVLTRQVDQLTRQITVRVQRQAPQLLTLAGCGPLCAAKLLVETADVRRFKSDAAFAMHAGVAPIPASSGKLQRHRLNRGGNRQLNAALHRIAITQLRVCPQTQAFRQRRLTAGSTRAEAVRALKRHLARRVYHLLHNAQQAQHHQHQHERGTA

SEQ ID NO: 437965 - protein, 383 aa, unidentified
MSKPDDLSKPLVALDHDSTLVCVIEMSGSSWLVAATVPGVSRRPLQKLPVDPARLLAQVERWRQEAARAGRTITRTVVAYESGRDGFWLARLLRGHGIEVYVIHASSVAVSREQRRAKTDRLDTEMLMRALLGWLRGEPGHCRMVAIPTVAQEDARRPGREREGLVAERTRLTNTIKAELALWGIQGFKPGLRKAAEHLEALRTVEGEPLPPNTLARLHRLLKRRTLISDQIKAIELAAAQAIERDPTGPNAMVLMLAQIKGMETAQMLVHEVLSRNLRDRRAVARYAGLTGTPDESGSKRREKGISKAGNPRVRRGMIQLAWRLLMFQPDAALVRWYRERTAGGKGAIKKTMIVALARKLLIALWSYATAGVMPEGVVLKAV

SEQ ID NO: 437966 - protein, 338 aa, unidentified
MKLYAGIDLHANNSVLVVIDEEDHILYQKRLHNELGALLQALAPYQETLQGLVVESTYNWYWLVDGLMAAGYRVQLANTTAIEPYKGLKHTEDESEARWLAHVLRLGILPEGYIYPKEERAVRDLLRKRSQLVRQRTSNRLSIQNLLTRNTGSSLSGNRGKQLTVEEGEQLLPQAELALAGKSNLAVLQCLEEQLEQREEVVLAQLKLRDGFQPLLTVSGIGQILGMTIRLETGEIGRFATVGDFASYCRCVGSQKLSNGKRKGQGNVKNGNKYLAWAFVEAANFAVRYNAQIKRFYQRKQAKTNGVVAIKAVAHKLARACYYILRDQVPFEVNKAFA

SEQ ID NO: 437967 - protein, 379 aa, unidentified
MTNQTDDRNLCCIALELSKTIWVCAFSTPDGGRTNTYKLRAGDVDRLLTILEEGRVKATRQVPGAVEIVVCYEVGYDGFWLARLLETRGIRTIVFDPASFLRPRRGRLAKTDRLDAEEMTRILRTWLSGDVGIARSVRIPTVEEEDAKRIARERKHLVEQRTRIVGRIKGLLALHGVWLMYKRINKSLAQQLDTIRTGDGRPLPPFLRRDIERMLRHYAFICEQIAEVEADRNTALAEETSSFPHRDKVHRLATLGGVGETSATVLVAEDYHRSFASRRHLASFIGLAPSPYASGDVSRDRGINKAGTKLARQTLVELAWFWLRYQPQSKLARWWRERFKNQGMRGRKVGIVALARKLAIAFWRFVEHGVVPEGATLKA

SEQ ID NO: 437968 - protein, 315 aa, unidentified
MTSTPVFVGIDVSKDQLDVALRPSAERWAVANDDAGIATLVDRLGALTPALIVLEATGGLELPLTGALAVGLPVVVVNPRQVRDFAKATGKLAKTDALDAAVLAQFAEAVRPALRPLPDAALQALSALLARRRQLLEMRTAEQNRLGMARPPVRKGIRAHIAWLDRRLAQTDDDLARAIRESPVWREKDDLLQSAPGVGPGLARTLLADLPELGTLNRKQIAALVGVAPLNRDSGTLRGRRSVWGGRAHVRAALYMSALAATRYNPVIRAFYQRLCAAGKAKKVALTACMHKLLGILNSMVKHRTPWRKHFAYTP

SEQ ID NO: 437969 - protein, 338 aa, unidentified
MYYTGIDLHKFTSYLTTVDTVGNIVKQADIKNVNHNFVQYFSDLGDENLTTVESTMTWYWLNDLLSSLNIPLVLAHAKYVKAIAYAKVKTDKVDSHILAQLLRMNFIPAAHKISNDNRLLRDALRARLKIVQRHTSITNSMHLLLAKYNLDSPKQLDGIPKFQFEQLSKVEALLKEQMLDLEKQLYPFLIPNDDIQRLLWIPGIGKMNAFTIMLEVDDINRFANVKHFFSYCRLVPSARNSAGKTKQRSSKDGNKYLKVAFSDAAIHAVQYYSEIKKYHNALTRKKNKQIAKTIVAKELANIVYHVLKNKTPFNNTFKGQILIHQKSLQWPRVVSPDA

SEQ ID NO: 437970 - protein, 346 aa, unidentified
MTIVEDRCAVTGGVDTHLDVNVAAALNDIGGLLGVERFSTDAAGHLRLLGWLQSLGTVVRVGVEGTGSYGVGLARALRAAGIDVVEVDRPNRLARRRQGKSDPLDAVEAARAALSGRASGSAKTRDGNVEAIRALLVAKRSGRSTRTQSLNQLRHLGFCAPDQLRQRFHGLTTAQLASDAAGLRPSRGSDPVVFATKTAMRALGRRVLLLDQEKADLDELLGELVTTTSPELLAVYGVGVDTAAILLVTAGDNPERLRSEAAWAHLCGVAPIEASSGKVTRRRLNRGGDRQANHALWRIALCRMRHDARTRAYVERRTSEGRSKLEIIRILKRYIAREVYRQLPRS

SEQ ID NO: 437971 - protein, 345 aa, unidentified
MEHYAGIDVSLESASLCVVDATGRIVREAKVASEPEVLIGWFSRLGFPVTRIGLEAGPLSQWLYAGMRDAGLAVELLETRHVRDAFKAMPVKTDRKDARGIAQLMRLGWFRSVHCKSLPAQEMRALLTVRKLLQIKNHDVEMCVRGVLRGFGLKVGPTTPRTFAARVRHLVANHTTLSTVAEAMLAARETLFGEWQKLEKRLRSLAREDSRVRRLMTTPGVGTIVALTYVSAIDDPGRFRSSKTVGAHFGLTPKKYQSGETNVTGRISKIGDGSVRTALYEAANVILTRPVTGSALKSWGMRLAARAGMRKAKVALARKLAVVLHRMLADGTTFLADKAAATVTR

SEQ ID NO: 437972 - protein, 371 aa, unidentified
MKQGTTFVGIDAHKKDLFVAMLIGTAATPVTWQLANEAGAVRRLVRKLEREASGPVRVFYEAGPCGYALQRQLTTARVTCDVIAPALMPRKPGERVKTNRRDARKLAELGRAGLLTVVQPPTPADEAVRDLARARDDAREDLQRCRHRLGKLLLRRGLHYAGRNWTQAHRRWIDSLTWTHAAERAVVDDYLLAIDHTEARLLELDARLAEIAAQEPYRVPVGWLRCFRGIDTLTAMLILAELHDFRRFRSARALMAFLGLVPGEASTGEKHRRGRITKMGNALVRRILVEASWHYQHRPGVGRALNARRTGQPSRVIAIADKAQQRLCRRFRRMLAEHKPAPKVAVAIARELTGFVWAALQPAPATVTLAP

SEQ ID NO: 437973 - protein, 318 aa, unidentified
MYYIAFDVSKKVLCGFDGEKELAFDNKKGLKALKSYLKKKYEDLNDLVIVFEATGVYSNYLKAFCADNNLKVYIINPKRSSNFSKAIGNRSKTDKIDTKQTIYEYRKIIGPKDIKVPKIDQVAQTLSAYLTSYKFTVKKRVSISNHLEALERNTSSLELVALLKGELKQTKKTEEKIKAKIEEYIKKDSQLNEDYKRQMTIPGVGKVSAICLLTLFNQYKDTNQAQITALVGLDPTKRESGTSVKGKMKISKNGDRMIRGTLYFPLLSAIRFNKKIKALYDRLLANHKPKQVALIAAMRKLILISHAIYKNKTVYSAG

SEQ ID NO: 437974 - protein, 444 aa, unidentified
MGHRTVGIDLAIRGDHVARILDDGRPHAKSIRFRLTSDSLNGLIGRLRDGLAPASTITAVMEPTGMSWFPVAHWLEQAGIKVIRVKGQRVRALRRYLSEHAKTDSADAYVLGAIPLFGGVPTDAVYVPDAERHALQRLTRQRERLEEELNSIKRRVLDLVRWACPAIEAALPDFRTNLSLAVLHDLFDPACVIKMRRAALRGFVAKHASGNHPHSGPFAERLIDDLRAAAAETHRLHGTAVDFEYLQLEVALEIDRLRLLEAQISKLSREIEVLYDKLHPSDALRTIPGIGEALAPLVLGVLHEARRFAGLHQLRGFCGLFPRINSSGGANQPGQSITQSGNNRIKRALYLAADAARRIDPGLAEVYWRLMVRKGHHHKQALCAVATRLVNRIGKVLRTGEAYELRDTDGQPISVAEGRSIVAERFSIPKEILDARRRHREERT

SEQ ID NO: 437975 - protein, 345 aa, unidentified
MYRTKVGVDLAKEVIQVCIYRNKKVQSNIEMTPSEFLCWLVNAKPVTIIFEACGTSNYWRQKAIEAGHDARLISAKLVSVVRQNQKTDKNDALAIIQTSLLPDVTFIGGKTVEQQQLQSIKRLRELAVKHQGASQKQLVSLLLEMNIRVSNRKGGIICAIEGVLEDATNGLSAECRAAIFTSKEHLQSLIKAVHRYDDCLEKSVIAHADCKKLLKLEGVGTMNAINLYIALGCWDIGVFTKGKDASACIGLTPIQHSSGGLVKLGSIGKHCKNSILRSQLVCGAMAAVTQAVNREAKTKKDVWIKGLVERRGKKCAAVALANKTVRTAYAMLTQGTEYKAELLSA

SEQ ID NO: 437976 - protein, 353 aa, unidentified
MKFYTTFHQYYCGIDLHARLLYVCILNERGEKVLHQKINADPKQLHRLLKPYIGQIVVGVECMHCWYWVSDFCRDIKVEFILGHALYMKAIHGGKAIHGGKAKNDKIDSYKIASLMRGGNFPLAYNYPKEYRATRDFLRRRTHFMRHGASLKAHVVNTDSQYNLPAQSLNLKNVSARESLRHHYDDPVIQRMITFEMNILDCYIRELKHVESFIEKEARGDFPVLSNIIRTFPGIGQIIGLTILYEIGDIGRFTSVQKFASYSRLVKCKAESAGKVYGTSGNKIGNGYLKWAFGEAAVLYLRNNDKAKRYLAKLQKRMNKAKALSALAHKIGRCVYFMLRDKKVFDKDKFLKG

SEQ ID NO: 437977 - protein, 341 aa, unidentified
MLIIGCDFHPTFQQIAFTDTETGEYGERRLHHPQEAEQFYRTLAEGKVRVGMEATGSFRWFRRLLSGLGHELWLGNPTQIRASAPRRQKTDKRDARQLLKLLLEERFPQIWLPTVAEEDLRQLLWHRCRLVRLRTKLSNQLDAIAKNEGLVGQRVGTQKGRRQLEALPLSGWYQQRRQDLLELLDQLEQRLAPLNQAVQQRVAERADTQRLMTHPGVGPVVALGYVLAIGDWQRFPRGKYLASYLGLIPEEDSSSNKRRLGHITKQGNSLVRWLLIQAATKAQQSDPAWHRQYLRLARNKHHGVAKVAIARKLAIRLYWMLRSGQDYEQVRERGSHAGQSV

SEQ ID NO: 437978 - protein, 307 aa, unidentified
MTLKTKNYIAIDVAKDSLQVQAPNFACALNYDENAIKELIARTPKGTIIVFEATGGYERTLMQTLIDHRIAYALVSPFRVRAFAKSEGIKAKTDPIDAKILLRFAEKKQLNPSNPPERERAELVALLDRRSHLSSMHAQEKNRRQNSDPQIHKDIDQCIDFIEGQIEQIDRRIRALVNEHTVMQTQSRLLQSITGIGEITAWSIIAYLGTISTMKRNQLIALAGLAPFNKDSGKTCKKRSIQGGRAKVRRALYMAARTAAGHNPHIKNYVEGLRARGKPYKCAIVAAMRKMLIHAQSILKNHENALA

SEQ ID NO: 437979 - protein, 418 aa, unidentified
MSKIKTKGRKIVNEKTLLVTVDIGKTMNMGYCRCPDKTEVKPFEFQNGYQGFNKFLNIIFKTQATKKLEHIVVGFESTGAYAEPLMHFLRRKGIQLVQVNPLHTKRLKELQGNSPNKTDKKDPKVIADIIELGHALTVVIPEGAAADLRRLTNARERALQRRTALLNQLQDIVFISFPEFLGIMKDVKTQTAHYLLKHYPTPADILASGLDRLISEMKKVSRGKLGIERATALYEAAKTSVGIQEGDIGLALELQEFLLSIEECERFIERVEKEISCCLRDIPYSSLLLSMKGIGKITVAGLIGEVGDFRKFHSISELLKYAGLNLYEISSGKRKGSRRISKRGRSLMRKLLFFAAIRTVRKNGIMYDHYQRYLQNGTKKIKALVAVSRKLLGIMFALVRDHNLYQENYVKTQYLNAA

SEQ ID NO: 437980 - protein, 392 aa, unidentified
MVVSVGIDVSKDKHDCFIVSSEGEVLADAFIIPNTMDGFHYLLQRIRHCTAPQDKIKVGLEATGHYSYNLLGFLLDNGLTTYVLNPLRTNLYRKSLSLRKTKTDRVDARTIASMLLSDAGLKPYTDTAYHNEELKSLTRYRFDKVKERAKLKSSIARLVCILFPELEKLVPSLHIASVYALLEEFPGAKQVANTHLTRLKALLETASNGHYKRDMALEIRNAAKNSIGSQMPAKSLELQHTIRLIRELDREIDEIEEQIQSIMDELHSPITTIPGLGFRMAAMILAEVGDFTRFDSPDKLLAYAGMSPSTYQSGQLKNCYPHMEKRGSRYLRYALYNATKYVCHWDPAFADYLAKKRAEGKHYNIAISHAAKKLVRLIFAMEKSRQPYCSAA

SEQ ID NO: 437981 - protein, 464 aa, unidentified
MHPQMPAAFFRSLPIRSAARQRQRQNLHIKNPKKLVMNQKMDSGAELPPGEFAALLGLDWGDKRHAIALQVRGADRIEFLELEHSAESLHAWLDQLRERFAGQRVAVALEASKGAIVAALLEHSWLVIYPVHPATSRRFSMAFSPSGAKDDRPDAHTLLTILRGHRERLRALLPHEEATRRLGLLVEARRTMVDRRTLLSNQLTSLLKNYYPQALLLTGEKRSAALALDFLERWPELKSLQRALPQTLRRFYSAHAVRRPEAIATRLELVRTARPLTTDRALCEVSILEMRVLVAEMRLLEKHIAQIEKTISAAFHDHPEAELFAHLPGAGAALAPRLMVLFGEDRERWLSPAQMQTYYGIAPVIEKSGRQRWVHWRWNAPVFARQTLVEWAGVTVKFSAWAKAYYQQQRTRQKTHAVILRSLAFKWLRILWRCWKERKPYHEPTYLARLQQRNPALFALIPTT

SEQ ID NO: 437982 - protein, 397 aa, unidentified
MYIVGIDIAKRRHEAAVIDGDGAVIIKPFSFTNNCSGYNRLLAMLAKAKLPLDEVSFAMEATGHYWLALFTRLQKEGFRVQVINPVQTNSIRSFYIRQAKTDPRDALLIAEVIRFGHFSESTLHPENIYELRELCRGRHAIVSMQADVKRKVVALLDQVFPEYETAFTNLFGDTSMAILQTCPTPKELSEMPLEELCHLIEVSSRKRFRMAKAQELQELARNSFGFAMAGDVFSTMIRLYAKHLDFLKQQVREMDRKIAEIMDTLDTPITTITGIGPTLGAYILSEIGDISRFSSAAKLAAYAGIDPTMRQSGEYNGVRNRMSKRGSPYLRHAIWLAASSAVLHDPALKLYFQKKRDEGKPYMASVGHACRKMVSIIYAVMRDNKAYTPYIPNEISA

SEQ ID NO: 437983 - protein, 341 aa, unidentified
MSELAMVGIDLGKHSFHLHGQDKTGREMFRKRLSRQQMMRFFSNLPACTVAMEACAGAHFVARQLMVMGHVAKLISPQFVRPYVKGNKNDFVDAEAICEAASRPSMRFVSPKTETQQTLSVLHRLRESLVRDRTKTANQMHGFLLEFGVSLPRGLAAMKRLPVILTEHELPTRLMSLLDRLREHFNYLDAQIKDLDKDLACQLADDDLGSRLLSMPCVGPITASLLAVEMGDGKQYAGSRDFAASIGLVPRQYSTGGKANLLGISKRGDKNLRRLLVQCARVYLQQLKSQHGALAEWVRSLLIRRHSNVVACALANKLARIAWAISAGHGVFNAGPDAVAI

SEQ ID NO: 437984 - protein, 359 aa, unidentified
MLIIGCDFHTRYQQIAMAEDSTGELLFERRLDHESGEAHAFYRSLQGAVRVGIEATGPLHWFERLLAELGHELWIGDSAKIRASEVRKQKTDQRDAALILDLLLAKRFPRIWVPTPVERDLRQLLWHRHKLVCLRTMLGNQLHALAMSQGLCRKKRLFTRKGRVELVSLGLAPWASRRREELLKLLDQLESPIAELDRAVLEQAQRREEAVRLMTHPGIGPISALAFVLTIGTVTRFCCSRKLVSYLGLNPSEHSSGQRRRLGAISKQGNTMLRWLLVEAAQKAARCDPALRQDYQRLKFRRGHAVAKVAIARKLAVRMYWMLRSGADYARLVRMQGSRGAPWWTQVHREFDWAPCSPV

SEQ ID NO: 437985 - protein, 340 aa, unidentified
MNATTYGLDVAKRVFQLYWVDTQTGEIANRRFGRDDLIAFLAQRPAGRVALEACGSAHWWARKIQALGHEVVLLHAQFIRPFVQTNKTDAADAKAIWTAVQQPGMRTVAAKTEDQQAMLSLHRMRSQLIKFRTMQVNQLRGFLYEFGVTFRTGRAAGLAEVRQRMAELEDTLPASIMLNLQDQLRRINAFEDDIDQLEERIGAWQKQEVACRAISDVPGIGRLTATALVATIGDARTFRSGREFAAFLGLVPRQSGTGGKIRLCSISKRGDPYLRTLLIHGARSVLCHTKVPTAWQKGIQERRPANVVAVALASKMARTAWAILAHKSSYEANHVSIRPA

SEQ ID NO: 437986 - protein, 322 aa, unidentified
MRYIGIDVSKATFVVAYSSDKGGEIRTFNNTTAGIRQFIGTLPKDGSIHCVMEATGNYSALLLYMLNVAGITVSMENPLKVKNFAKAMLSTIKTDKSDARLITLYGEKMNPRPFKVQGEAILRLRQKRTVIRQLTKQITAMSNLRGSLACLPVPDKGATHTVDETIKFLEKKRDRLQSELTDLVEVEFSRQLALLTTIKGIGITLATALIITTGGFTYFQNAKQVSRYLGICPTYEQSGTSVNIKGHINRNGDAYTRGLLYIAAWPASRFNAQCKETYTRLRQNGKSGKLAMIAVVNKLVRQAFAVVAHDKEYVDGFVSNRP

SEQ ID NO: 437987 - protein, 342 aa, unidentified
MNAATHTLGIDIAKGNFEVNLRTLEPGQARQSSSFPNNLKGFGALQGWLIQQGIRQASHLHACLESTSRYGDALAAWLLSQGYQLSMVNPRRTRHYADSQLCRTTSDRIDAAIIADFCADQRDKLRLWEPLPKDHRQLQDLTRTRLALVEHQDGLANLLESATGLARKAVQRQCANLQREIQRLEQEIKKLLDQQPDSKLSTQVALADSIPGVGLLTAATVLAELPPIDSLEHVNQVIGLFGLDPKSKTSGSSVKTPARISKMGSKRGRRALYMPALVALRCNPLIQALGHRLRAKGRTGKYIVVAAMRKLLRQIFGVVKNGKPFDPQWLNSPTTRPPQEVA

SEQ ID NO: 437988 - protein, 430 aa, unidentified
MKSNTQNAKIEAITETTLVLGIDVGSETHYARAFDFRGMEYSKKPFKFSNNEAGFMTFKAWILNIKEKHGKDKVVPGMEPTGHYWFNLGKFLQDNEMKPVLVNPHHVKKSKELDDNNPTKNDRKDPKVIAGLVREGRYMIPYLPDGVYADLRTASNMRFQLQAELTRIQIRISRWFNIYFPEYKTVYGQPDAKSGMMILKIAPLPEDILTLGIDGVNQIWRNAKLRAVGKARAKTLIEAAEHSVGSKEGALSARMEIRMLLEDYESRNARLQEVMALIEELVKQIPMAEKLLEIKGVGIKTVSGFLAEVGDISRFDNPKELQKLAGLALVENSSGKHKGKTTISRRGRKRLRYLLFEVAMSLVAKNPEFRELHVYYTTRKRNPLKKMQSLMAVATKLIRVFYAMLTKGVDYDPKKMISDIKRPAVYLQAA

SEQ ID NO: 437989 - protein, 429 aa, unidentified
MEQSISEQRNYQEIKAKLDVHKTAGVVGIDVAKSKHFAVVLDPLGQTIQPPFSFTNDAEGFQHLRDRVTELGDRHLIGQWLFGFEASGGYEKPLASYLADSGYDVVQVSSYAVKRYREMMTGSVDKNDAKDCVSIAYLMRQGFVEYYHLRGLQEENLAGLVLINEHLKARRTQLKIKIKQNVLKYTFPELEGFCKNIESHFAMELLTHFPTPHDIVKAGKLEFKKAMVPRLKGHRIAFYLDETYSLAEHSVGLKMDRWTAKALELRTYIAELRVIEQQREMISKRLKNLLESNTDFVLLCTIPGIGLENGSALLAEIGDIQRFGTDRHLLSFAGLDLVNYQSGNYEGKPRISKRGRPLIRKAAYQAVNVSLLAPRDNLFKRRYREIIARQGDTKDVRQKAKTKLCAKLLRIAFAVLSKKQPYQEAAMDL

SEQ ID NO: 437990 - protein, 389 aa, unidentified
MIAVMRPFGEVVISPFEVQHTASELSELAKLLKSLDGETRVVMESTGNYHTPVAWLLHDAGLYVSVVNAMLVHDYGNNSLRRAKTDKKDAVKLANYGLDHWLTLPRYVPEEDTRLLLKNCYRQYQQYSKVQTMLKNNLISLLDVVFPEVNRLFNSSPRADGSEKWVDFVSTFWHCQCVSTLPLKSFSARYLKWCRKHGYYFSQEKALEIHSKAKNCIGVMPRNETTKLLVQQAIAQLKATAAALAALKQEMQSLAASLPEYPVVMEMFGVGSTLGPQLMAEIGDVRRFHSKKALVAFAGIDAPPCQSGQMDIHSRSISKRGSAALRRTLFLVMGIYLQSAPLDEPVYQFMDKKRSEGKPYKVYMMASANKFLRIYYASVTAYLNTLARI

SEQ ID NO: 437991 - protein, 352 aa, unidentified
MIVGAFDVHRRQITFDWVDRETGEARRGQFAPATREVLRGWLGELPAGGGDVAVEGCTGWRFVVEELQAAGVTAHLAEPADTAALRGRKRRAKTDRADARHLRELLEQDRLPESWIAPAHLLDLRELVRLRKTLIDQRTQWKQRIHAVLFHHGLPKPPGALSTQASRAWLAGVGLPPPSRLLVEVGVAQIGGADAWLEPISGWLRAYAARQPGCRALMRELYGVGLLCAPTILAELGDARRFGDGDAVVRYAGLDITVWSSDTKRSPGHLARQGPEVLRWALFEAAKSSARRTAPDHGYYAQVKDRLSANRATLSTARKLARHARHVLVELGEEALAPVGGDLLPPLLPEAA

SEQ ID NO: 437992 - protein, 389 aa, unidentified
MSLRGVRYREPLARRTAPVPPQANNRGGALGPPNSRQTSIARTRQVTVAKIICGVDVSSFSLEPCTGPAGPTHSFPNTAEGVVELLAFCRQQGAELVAMEATGGYEKQSFALLWAHGLPVALLNPRAVRRFAEGMGLLEKTDRIDARVIAWFAAVKSSQPCAPVSAEQQRLKALVTRLRQLTELQTAQRNQRLLVSESTVLASFREVLTLVAYQIRTLEAAIAALIAADPLWQKLDQVFRSIKGVADRTVARLMAEMPEIGTASNKAVSKLAGLAPLARDSGKHQGQRAVRGGRRDVRAILFVVAGVVRRYDADFAAFHQRLSAAGKPKKVIRIALAHKLLVRLNAKARQVRNEFAALASCSQAPSQLLLKASGLTGTAATVPKATNSA

SEQ ID NO: 437993 - protein, 320 aa, unidentified
MSKKKSKSFIGIDVSKQQLEVAAHESDYQFRCRNKMSAFGELIAELISLRPALIVLEATGGLERAVVSALQASGLPVVVVNPRQVRDFAKALGQLAKTDRLDARVLAHFAAAIKPPLRPIKSKEEQELDALTGRRGQLVEILADEKNRRAAASSDTVREQIKQHIDWLEDRIAELDQQIKALLQTSSPWQIKDQILRSVPGIGPVASFSVIAGLPELGTLNRQQISKLVGVAPLNRDSGQQRGTRHIYGGRAGLRRVLYMAALTAARHNAVIKEFYQRLRRNHKPFKVAITACMRKLLSIINVMVRDSTCWKTKVQPVSA

SEQ ID NO: 437994 - protein, 343 aa, unidentified
MQIRSVGIDLGKTTFHLVALGDNGKVLLKKKFTQKQLIAFTANIQTCLIGMEACSGSHFLGRALRAQGHDVKLIPAQFVKPFVKSNKNDFIDAEAIAEAVERENMRFVPIKTDDQLDLQALHRVRDRLMARRTALINQIRAFLLERGIVFAKSPIRLREALPEVLENVNQNLTPRMRNLVAMLWSEWKDLELQIVEMNDEVERIAASDAACRRLRQIPGIGPLVATAIVASIGNGAAFRKGREFAAWLGLLPNQHSTGGKVRLYGISKRGNCYLRKILIHGARAVVLRSKRDRIAMGAWMTSLETRAPRNVLIVATAHKLARIAWAVLSTGQDYRAVPEALTV

SEQ ID NO: 437995 - protein, 339 aa, unidentified
MHYAGIDAHKNYLTIAIVDNQGELIREEGRVPVGDGEPLLAALEGPRPMEAVVETCPFWPWIHDVVGEETEVGFHLAHASRLEAIATSKNKTDSVDAELLARMLSAGLVPEVYPKPPEQRELCRLVRHRKTLVQERTGLYSRIHSHLLQQGLQVSRGRLMSETGRSWLEQEAWEWLRPEQRALVEGHLELIDQLNGQIEELDGRIRDEAEERAAARLLQTIPGIGPYRSVLLVAEVTPIDRFPSPDHLVSFAGLAPTSSDSGVGEVRYGPIPEGANRWVRGALVSAITSHMRSTPESSLGQFYRRKQEQIGMSTARIAAARKLCRAIHAMLSTGEVWRG

SEQ ID NO: 437996 - protein, 378 aa, unidentified
MYRIIKIGMDVHSTNYTLCAMEPVIGAEDRIFANIKVTPDYKNVLMFIENLKLKLGLNDTYDIECGYEAGCLGYSLYNQLTAAGVRCVILAPTTMLTQQGQRIKTDARDAVMIAQCLSYGGYHPVYIPAEEDDSVKEYLRMRDDHKLALKKVKQQINAFCLRHGHRYEKTKWTIAHLKWLKQLELSALYRETLDEYMASYDEQTAKIERFDKRIEELASQERYQKKVKKLGCFLGIKTHTALSLIVETGDFERFAKGNVYAAYLGLAPGERSSSDSINRLGITKAGNQHLRLLLIEASGGICKGAVGHKSKDLRQRQNGNPADVIAYADKANTRLRSRYYKFIRHGKKRNMAVAAIARELACFIWGMMTDHIQMQKAA

SEQ ID NO: 437997 - protein, 392 aa, unidentified
MVVSVGIDVSKDKHDCFIVSSEGEVLADAFTIPNTIDGFHCLLQRIQDCTHAQDKIKVGLEATGHYSYNLLGFLLDNGLPTYVLNPLRTNLYRKSLSLRKTKTDRVDARTIASMLLSDAGLKPYTDTAYHNEELKSLTRYRFDKVKERAKLKSSIARLVCILFPELEKFVPSLHIASVYALLEEFPGAKQIAAAHLTRLKTLLETTSKGHYKRDMALEIRDASRNSIGSWMPAKSLELQHTIRLIRELDHEIAEIEEQIQSIMDELHSPITTIPGLGFRMAAMILAEVGDFTRFDSPDKLLAYAGMSPSTYQSGQLKNCYPHMEKRGSRYLRYALYNATKYVCHWDPAFADYLAKKRAEGKHYNIAISHAAKKLVRLIFAMEKSRQPYCSAA

SEQ ID NO: 437998 - protein, 403 aa, unidentified
MNAVGIDVSKGKSMVAIMRPFGEIVSTPFEIKHTSNDINSLIELINSIEGESRIVMEHTGRYYEALAHELSAANLFVSAVNPKLIKDFDNDSLRKVKSDKADSVKIARYALDKWQNLKQYSVMDELRIQLKTMNRQFGFYMKHKTAMKNNLIGILDQTYPGVNSYFDSPARSDGSQKWVDFASTYWHVDCVRKMSLNAFIDHYQKWCKRKKYNFSQSKAEEIYGKAKELVPVLPKDEITKLIIKQAVDQLNSASTTVEELRTLMNETASKLPEYSIVMNMKGVGPSLGPQLMAEIGDVSRFTHKGAITAFAGVDPGVNESGTYEQRSVPTSKRGSANLRKTLFQVMDVLIKTMPQDDPVYQFLDKKRAQGKPYYVYMTAGANKFLRIYYGRVKEYLATLPESN

SEQ ID NO: 437999 - protein, 482 aa, unidentified
MKLRPTEKAKKATEHSTRGHWSEMNRQQRREMMRKIQSDDLSLEVVHPDAAGIDIGNEFHYVAVPPLRDSQPVRRFGCTTAELKAMAHWLKQCQIRTVAMQSTGVYWIAVYEILEAAGLDVYLVNARDTKNLPGRKSDVQESQWLMKLHTYGLLRNSFRPPQEIRTMRTYWRQRNDLVQSASRHIHRIQKALTQMNLQLANVLADVSGMTGQAIIHAILTGERDPQKLAAFRDPRVQASKEEIARSLEGNWQEDLLFVLKQEQDGYEFCQKQMAECDRQLEQYFQRREDRTQGASLPEEKRKTRLRKKNGNKPQFGLRAELFRMTGTDLTQIDGIDVMTAATIISEVGWDMSKWKNEDHFVSWLRLCPDNRISGNKIIGKGRLPTNHRVSVGLKMAASTLRVSNTYLGAQFRRFRARLDARVAVKAMAAKLARLVYRILRYGMKYVDQGAKFYEAQHRNRQLKHLKWKAAKLGYQLVQAPAT

SEQ ID NO: 438000 - protein, 380 aa, unidentified
MEERQTSLGKDSTGVPVNVYFGIDLHKDQITWHCIRRGRDGSIERSTGKISTSRILEDFVPMLRTENSYVIVEASCSTFFFHSLVEAHCTKAFVINPSAFREMYMTGKKTDRIDAKKLADRLIYHVEMNDAADGFPEVFVPDEESLKIRKLVTTYELMVKQMTQLKNQLKAVLRAKMIHDYEDALDEDIPTFLEDSRLDNADTAILRSIKAAYDGLRKEKETIKATILGIGVRRFRSETELLTTISGVSVMGAIVFMSDIVTVDRFASAKKMTSYLASVGKVDASGKVTREGGLNKRGRRTSYRFILQGLEHIVNGNDGFKHFKERHAAKKANKVRAAIVRKTFVAMYYMLKNDDPYRFMDKAIYQRKLREINKILKNVA

SEQ ID NO: 438001 - protein, 400 aa, unidentified
MLSIGIDVSKGKSTVCGMKPGGEIVYAPFEVQHTREGMSELVSLLRSSGEEVRAVLESTGSYHCPVVAALLENGIFVSVVNSLRMKRFCSQSIRKVKTDRIDAMQIALYGLAYWQELQPTKLPEDTYRELQLLARQYYQMTSILIKAKVDFNAICDQVLPGMQEFMSDHAGRHKLSDFVLRYRHTTHILEMGETRFRKDYCKWAEKKGYRNCERMAALIFATAQNGIPVLPNAPSTQIVITEAIRVLHTVEASRDAILTQMQALAKTLPEYSLVREMPCIGDTLAPRLIAEIGDVRRFHSKRALIAYAGIDAPPYQSGKFCANNRHISKRGNRYLRKTGYEVMQSYVMHKPANDPIFTFIEKKRGEGKSGKLAMVAGLNKFLRVYYGKVTELYRSLPAIE

SEQ ID NO: 438002 - protein, 377 aa, unidentified
MTGISAAISNERSVYAALELSKNSWLLAIQVPGRDNPSLHPIKGGDAEGLMAKLGAARERVAKVTGQTPTVTLCYEAGYDGFWLARLFEQRGIECLVMEPASLQVNRRARRVKTDRIDLERILHTLIAWCRGERHVCSMVVIPSVEEEDLRRSHRERDRLIRERTAHINRIKGLLFGQGIRGINVKSRYKTLTPAALVMADGRPLPERLGREIAREIERLALVQAQIVGIEHERDHPATSCVATERKRHDLLRLKGLGPALSSTLTREVYYRQFTNRRQVASYIGITPSAYDSGDGHRSQGISKAGNRLARVAMIEAAWLWLRHQPDSALSQWFHERTQGQKGRIRRVIIVALARKLAIALWRYLETGLIPEGAVVK

SEQ ID NO: 438003 - protein, 338 aa, unidentified
MSIVMGLDQHRGQITSEWIDTETGEVQRSRVTPADRARVREWLERFRGQKLEVALEATTGWRFLVEELRRVGAVVHLAEPAETAGLKGPKKRAKNDRADARHLRELLMVGRLPESWIPPDHVLDLRARVRLRHELGEQRSEWQQRIQAVLYHHGCPQRRQLMVGDGREWLAAQPLPETAREQVTVALAMIDALDLQMRPIEKQLRAYARRQAGCKALMAHYGIGELTAVTILAELGDCARFSSSRQAVRYAGMDITVYQSDQRRAPGHISRQGPPALRWALYEAAQVARRPGSPDRDYYVQAAERIGGNRACLSVARKLLKRCYHTMRELGEEALAPA

SEQ ID NO: 438004 - protein, 342 aa, unidentified
MDEYDGRQFVGIDLHRQRSVIVRQSESGDQLSAVRIVNDPVALRLELERAGTDPEVVLEATYGWYWAVDVLRDCGAQVHLAHPLGVKGFRYRRVKNDVRDAGDLADLLRMGRLPEAWIAPPQTRELRELVRYRAKLVAIRSGLKAQVHAVLAKAGVLITVSDLFGVGGRQRLAKVPLGAAYAERVRSLLELIDVLDGHEARFAGLIAKRLCNHRGYQALQQVPGIGPVLAAVFVAEIGDVHRFTSPAHLCSWAGLTPKHRESDTVVHRGHITKQGSKLVRWAAVEAIQRYPTTSKIALDRTRIESRRGKNIAKIAAARKLLTLVYYGLRDGHIRALDRPRAA

SEQ ID NO: 438005 - protein, 367 aa, unidentified
MIMGVGIDVHKATSSAYAVYAGKGIEKERHVKFLGEFNKEFRDFDSTPENYERLMAFVRVHECNVLIENSTKAHEVYWIFRNGGINVIVAHSTDLYRITRSHKKTDHHDSAELAGYMRRKLNGEVEFSESFIPSPEWMMKREVCRGALYEKTYLANVKRKIRSHLLLHGIKLRMEYRDITTRTALAEMGTIDDPYLRMLVRFAEDAKKRVFMAENTIRTMFSGDSICGLIDSVVGFSHTAAAYMSSLIVDFERFRSRSEFTASFGVVPRMRSSGASNPNCSTTHRGDELMRKRLIECTRAHIKFAKDSVVTVMYNRLINNGKPKKEALVAAARKLLTVVWSVLKSGEPYSSDPESLKGAREMEDSSE

SEQ ID NO: 438006 - protein, 339 aa, unidentified
MKKVFIGVDFSKLKFDAVLLIQGNKARSIHHIFDNEALGYKEFVKWIKSNTSIPKKQWLICGEHTGLYSLNLTKYLNQTGIDIWLENPLQIKRSMGIKRGKTDKVDALHIALYAYRFQDRAISTKLKSDVLDQIKDLQAYRKRLVNCRVALEVSSKELAAVKNDSSTDFIVADSQIHIQLINAKLKEINKKIKALITCHQDLFLNYKLLTSIKGIGPENAIMVLVLTGNFTLFNDPRKFGCYSGVVPFSHSSGSSIKSKDKVSELANKKMKTLLTEAVRAAIRYDKNINDYYIRKLQDGKDRFLVLNNVRNKLIHRMFAVVKNKTPYNPQYEQSNNNFA

SEQ ID NO: 438007 - protein, 393 aa, unidentified
MDKQLHLIVGIDIGKRYHQATVIDETGNILGGSVRFPNSTTGAELLLKRVSAVNPDGLPLHFGLEATGHYWLPLYAYLTEKGYRIVVLNPYQSDAFRKVSMSSTKTDKEDAFLIAELLRFGSFPQTKMADEDMIALRNLTRFRLSLNQQVTDSKRRILTILDQVFPEFESMFSNIFGKTGRHLLKKYPTPEEIETISLRKLTGLITKLSKGHFKEEKAQEVLIKAKTSFGITLALDSLTLQLKLLLETLEFTEKQLKVVDTQVENLLPDTCVLLTLPGVSKILAAAIISEIGDIKRFRTSAQLVSFAGINPTVRQSGNFLGNKNHMSKKGSPYLRLALWQAAITSSRFNPILKEYYSLKIKEGKNHMTVIGAVTRRLTGIIFAILRDQTAFTV

SEQ ID NO: 438008 - protein, 445 aa, unidentified
MGQRTVGIDLAIRGDHVARILDDGRPHGKPIRFRLTSDSLAGLVAKLRDGVTADATITAVMEPTGMAWFPVARWLKQAGVNVFRVKGKRVQALRRYLSEHAKTDAADAYVLGAIPLFGGAPTDPVFVPSAEQHALQRLTRQRERLEDELTSIKRRLLDLVRWACPTLEAVLPDLRTNLALAVLHDLLNPACIIKVRRTALLRFVAKHASGNHPHSGPFAEALVDGLKAAAIETMHLHGNAVDFALLQTEVALEVDRLRLIEAQLTRLSREIEILYAKLHPSNALRTIPGIGIALGPLVLGVLHEAGRFAGLHRLRGFCGMFPRVKASGGTSQPGQAITQSGNNRIKRALYLAADAARRIDPELAAVYWRLMVRKGHHHKQALCAVATRLVNRIGKVLRTGQAYELRDNDGTPITVALGKVIVAERFSIPIEIRNARRKYRMESTA

SEQ ID NO: 438009 - protein, 487 aa, unidentified
MAKRKKSTFERLSSGGMNRKQRRDLARRLAGQDPGLTIIHSNAGGIDVGNESHFVAVPPDRDANSVQEFGCWTADLKRMAAWLKACRIDTVAMQATGVYSIPLYDILTGYGIQVVLVNAQHTKNVPGRKSDVQECQWLMKLHTYGLLRDSFRLEETMESVRTIWRLRDRHVKDASRAVQHMQKALTKMNIQLANVITDITGVSGQAIITAILKGERDPWKLADLKHEMVKASREEVARSLEGNWRDDLLLELRQAVESYHFAHLQMRECDRQLERFLASLPTRILERPHPPSDTTAATAPQTKKARKPKKTRRNEPTVDLATELKRICGVDLTSIDGIDVITAQTILSEIGTDMSGFKTEDHFASWLGLTPNKDITGGKIIGSGKRKVQNRVAMALRMAATTLLRSQTYLGGRYRHLRKQLPSHASAIKAMARYLAVLVYRILTHGEAWVDRGAARFEQRRTELEMASLNSRALAKGFKLVPITEAS

SEQ ID NO: 438010 - protein, 347 aa, unidentified
MRFYTGQHRSYCGIDLHARSMFLCILDSQGTVLVHKNFPACPEDFLEAIAPYREDLVVAVECIFSWYWLADLCAREHIPFVLGHALYMKAIHGGKSKNDKIDALKIATLLRGGMIPQAYVYPAEMRATRDLLRRRMHLMRKRAELLAHIQNTTSQYNLPEFEKVIAYRKNRDGIADIFPDLAVRTSIAADLELIDHYDDLLKRLELFILRSARVHDPNALLRLRSVPGIGKILSLVILYEIHDIARFPSVQDFASYARLVKCPKLSAGKRAGSGGAKIGNAHLKWAFSEAAVLFLRGNSDAQKWLARAAARHGKPKALSILAHKVGRTVYFLLARERAFEMKRFLAA

SEQ ID NO: 438011 - protein, 422 aa, unidentified
MLNDVVDDGVIIERVAAIDVGKAEIVVCARVPSPTGRRSRAQEVRKFATMTAALIACSDWLTQLQVTRVVMEATSDYWKPVFYLLEAAGFETWLVNAKDVKHLPGRPKTDTLDAVWLCKVAERQMLRPSFVPPEPIRKLRDLTRYRVDLITERSREKNRVEKLLEDAGIKLSVVASDIFGVSGRAMLAALVDGERDPKVLAGLARTRMRTKIPALQEAFVGRFSEHHAFLLGKMLARIDAIDADLADLDAQIDALISPFGEAVDRLDTIPGVGATAARAIIAEIGVDMDRFPTAAHLTSWAKFAPGVNQSAGKTKGNGSTGHGNPYLARALGEAALAASKTDTFLGERYRRIARRRGTKKALVAVGRSILVIVWHLLKDPDAVFVDLGPDYYTNRVGTQRAVRNHIRGLNALGYSVTLSPAA

SEQ ID NO: 438012 - protein, 356 aa, unidentified
MSADTILAIDLGRYKSVACVYARATRDHAFRTIDTTPDDLARLLARHPGAVVVVEACANAGWVHDHAAAAGHVVKVANTAAEAWKFTHLKRKTDHDDARRLAELEAIGQLPTVALPDPPTRQRRMLIAFRQELVGRRVACQNRIRALFAGRGLPTPRGAKAWAAAGLAGIEGQARPLAECGPAELWRGLLHLAVAEYRALVDRIDEAEKRLDALAAADEATQLLESIPGVGPRTAEAVAAHLGDATRFPTAKQVGAYAGLVPRQYQSGATDRKGRITRRGPAILRKLLVECAWCMLRYNRWAQAQYQRLTAGGATRRKPAVVAVARKLLVRCWAMLRTKQRWRADPPPAVAPAAAG

SEQ ID NO: 438013 - protein, 427 aa, unidentified
MSEKKSLELRVGVDVGYRRHSVAIGLSNGEVLEEFEIVHRPEGFGEFFSRIEKHQRERGCAVAVAMEGYNGYARPLDSLVRQRGYRLYNINSLKLARFKEIFPGAAKKDQIDARKGLELFQLSDHLPLAKEVLQEVTGTPVENEVLKRLTRRRRRLVNERVRVINNLQADLQAVCPGLLEITSEAGNQWFLNFLVSADTLPQLVRLRKPRLLKIPAVGRKYASLILDWQKRAQFSGEVEWVNEMIHEDAQRCLELDDKIKALEAKIKEVARNSRIAKILLSIPGFGTICTSELAGEIGTVERFSKEESLALYLGMSTLDNSSGKYQGTKAPKHVNTRAKAAMMIALDRHRKYIPESQKYYEKKRTEGKAHNQAIRALGRHLCRIIYKMLKEEREYQVRPKKGDTQGRVRSRSCVKTKIRRPKISANS

SEQ ID NO: 438014 - protein, 349 aa, unidentified
MIAFDAHKRYTLSLVEDREGRVLTEARIPHCRGMIKHFLRKFTPGSTVAVETIGNWYWIVDEIEEAGMKPALVHARKAKLMMGSYNKTDRLDAHGLNLLQRNGTLPEVWIPPADLRDKRDLGRTRMGFTNMRTKIKNRVHSVLAKYALHDFEDVSDIFGKRNQERLNQHINELPPQTKFTSQCLLNELASVQSKIDAIEKQMNEVYETTPEIELLMTIPGVGFLLAVVIANELGDVNRFAGPASLAVYAGTTPRVHSSGDKVRYGPLRPDVNHYLQWAYAEAANSICVNRKRRPGRHVNRLYTRIRSRRGHSKAIGAVMRHLAEATYYVLKKMEPYREPKSKAASPRKA

SEQ ID NO: 438015 - protein, 404 aa, unidentified
MDLVLVGIDWAQSEHAVCVLDVQGQVRSQWTTAHTSAGLADLCRRLERFGPAASIRIAIERPSGLLVDTLVAAGFVGVAIHPNVVKAARPRYRAASGKSDRGDAYLLADLLRTDGHRFTPLQPPSDETRALRALVRTRDDLVATRVMIANQLRSLLESFWPGAAVLFADVDSPIALAFLSRFPTPQSAAHLGPKRLAAFLARHSYCGRRSVPDLLARLAAAPTGCAGPQESDAKGDAVLALVRVLTPVVAQIAEITAAVEHAVASHPDGPIVMSFPRSGRVNAAQILAELGDERARFASDDQLAAEAGVAPVTHASGKQRGVTFRWACNKRLRQAVVCFADNSRHSSVWAAHVYRRARDRGCDHPHAVRILARAWLRVLWRCWQTRKPYETALHRAANQLQTAA

SEQ ID NO: 438016 - protein, 310 aa, unidentified
METYVGIDVAKDKLDVHVRPGGEVFCVTRDAKGLADLVQRLQALPAPMLIVLEATGGFERTVAAALAAAKLPLVVVNPRQIRDFARAVGRLAKTDAIDAAIIAHFAEALRLKPRPIRDDEAQALDDLVSRRRQLIDMIVAETNRQKAIVNKRIVREIGRHLLYLQKLLTELDGDIDNAIRSSPVWREKEELMVTVPGVAQKTARILIAELPELGALDRRRIASLVGVAPMNRDSGTMRGKRRIRGGRANVRSALYMATVAAIRWNPPLRETYQRLRAAGKPAKLAIIAIMRKLIVTLNAIIRDKTPWKTA

SEQ ID NO: 438017 - protein, 391 aa, unidentified
MSMYFVGIDISKYKHDCCIISAANQKVVSKVIIKNNKAGFNELLTIIHSLANPADIRIGFESTAHYALNLELFLENSLLTFMEVNPVLISEYKKSKTLRRTKTDSVDCESIARWLMTVEYKPHSKGFYHAYSLKSLTRLRDKLIRQRSFYLVKITNVLDHTFPEFKPFFNERLSKTALYLLENYGSAEKMASMNSASYEKLRSLSRGKFSPQQFLRLKELAVNTVGVNNSIFDVELNSLLSLYKSLVKEINTIEKEINKLIEEVHPHYMSVPGIGPLSAAVIYSEYGDISNFTNPGQMLAFAGIEPGINESGTESHGGKMVKRGSSQLRYTLINCCLPLIRFDMTFATYYAKKRGEGKPHRVAITHVAKKLIRVIYALERQDIDFNAQKLR

SEQ ID NO: 438018 - protein, 337 aa, unidentified
MIHVGVDLHQRFCYVTVMDARGKILQQRAVGNEAGELRRWARSLPGPAQLVMEACSFWPAFQKNLSGEVEKMVLVHPARVKAIADAKLKNDRVDSETLAHLSRCDLLPEAWMADEATRQARQRVRLRVALGQQRARSKNLLQAVLHQEGQRKPVTDLFGKKGRAWLDEVELSTAGRESVNTYGELIEHYDRLIGERQQKLEQAAEQSAEARWLATIPGIGPYLAMVILAEIGDIARFRDKKALANYAGLVPRVRESAGKRHYSGLTYQGSKLLRWAMVQAAQGATRGSPAIRAWYEKRRQRKRPQVARVALARKLLTCVWALLRHGVSFEESVFATR

SEQ ID NO: 438019 - protein, 401 aa, unidentified
MKDVIYRRCCGLDVHKDTIAACVRWTEETGESHKENRVFGTTTQALEKLAGWMEQHQVRQVAMESTGVYWRPVWNVLEGRFEIRLANAQHIRNLPGKKTDRKDGEWIAKLLQYDLVPASFVPPTPIRQLRDLTRTRVRLVEERVAVTNRIQRILEDANIKLASVATDILGSSGRRMLEAMIEGQTDVEQLADLAKTTLRRKIPQLRLALDGSLNEHHRFWLRQMMDHLEFLEGKIFVIEQEIDRRSRPYEDAIALWITIPGIRRLLAITLVAEIGVDVDQFPAASHLASWAGLCPGNNESGGKRKSGKTRKGNAWLRRALCEAAWGASHTKNTYLVAQFRRLAARRGVKRATMAVAHTILVIAYHMLKNRCQYQELGGDYFDRLLQQLGLSVTVEPTRASA

SEQ ID NO: 438020 - protein, 325 aa, unidentified
MTAILSAILGIDVAKNKFDVALLSNGKYKTKSFDNKPAGFASLAAWLEQRDVANVYACMESTGTYGDCLARFLFDTGHTVSVVNPARIKAFGESELLRTKNDKTDAKLIARFCEKMKPTAWQPDPPEVEHLRMLGRRRDALICMLTQEVNRLGVADASVNESIQKVVIFLEQEIERITKCIKDHINNNPDLKKKRDLLKTIPGVGNVTIEAILSEANGFDGFDTVEKVVAYMGLSPKEKTSGTSVKGKSSICKIGSARLRKILYMPALSAIQHNPFVKALYNRLIAKSKHGMIIACACMKKLVHIIYGVIKSGKPFDPSYNIKTA

SEQ ID NO: 438021 - protein, 356 aa, unidentified
MRFYKAQHQFYTGIDLHARTMYVCVMDHTGSIVYHKNLPSTPEALQQVISLYGTDNVIGVECIFTWYWIADFCSERSIPFALGHALYMKAIHGGKAKNDRIDSEKIAAMLRGGMFPVAHVYPKEMRATRDLLRRREYFVRHQAELFTHIENTNAQYNFNAVLQTRKMKSSTYRNTLPEQFSDDGARKTIKADLFLADTFHTLIYSIEKEIKAQASVHDPHSLELLQTVPGIGDTLSLVILYEIQDINRFPGVGNFISYCRLVKCAHESAGKKTGGGHDKIGNVHLKWAFSEAAVFFLRNNERAQKMHQKLVSKFGKGKALSLIAQKLGRTVYYMLKHNTAFEPDKFFQDGIAEPLA

SEQ ID NO: 438022 - protein, 354 aa, unidentified
MKRDKYMGMDVHQATTVVTVLDADGKVILDSIVPTEAPAIVRLVQSFSGPLHVTLEETTQAAWLYQVIRSFVAEVIVCDPRHNKLLSEGSKADKADARKLADLLRTGMLRSVYHGHEGTRKLKELVRGYETLSSDTQRTMVRIKAIYRGRGIQTPGRGVYQAKQREQWLQLLSEQAGVRERVSWLYQQLDYLRPLRREAKQAMVAESRRHRAVSLLRTIPQLGAIRAALIVATVDNPHRFRTRQQFWSYGGLAVVTHMSAEYEMKAGGVVRRRKPLATRGLNRNCNRRLKEVFIGASTGGSQTEPYRSYLESLQQRGIRKEMARLTLARKIAAVALTIWKKGETFDPKKLNWTT

SEQ ID NO: 438023 - protein, 349 aa, unidentified
MSMVCGLDLHRQQITFDAMDTMSGEVWRGRVWQPDRDRVRRWLRDDVARRANGQPVAMAVEGCTGWRYVVEEVEAAGFEAHVAEPADTQAARGRKQRAKTDRSDARLLRELLQRGELPESWIPPPVVLEWRERVRLYKSLVDQRLVWMQRIHAELFQHGVAVPESAIRSAQTRAMLASHDVVLTEAARQRVRIGFTMIDATDAEALPLKEQLTRFGMRQPACRALVDNHYGIGGLLAVAIWSEYGDCQRFTRSDQAVRHTGLDVTVDASDLRRAGGHLSRQGPATLRWALFEAAHKASRSGSPDHGYYTTVKDRHDGKLAAISVARKFARRCYHLLRNMAPDVVYAVPD

SEQ ID NO: 438024 - protein, 406 aa, unidentified
MEVLHPRCGGLDVHKKTVVACVIVPGRKEVRTFGTVTAELLRLCDWLQAEGVTTVAMESTGVYWKPIFNVLETTGLELLVVNAQHIKAVPGRKTDVKDAEWIADLLRHGLVRASFIPERPQRELRELVRYRKTVVEQRSHLVQRIQKLLEGANIKLSDVASDIVGVSGTAMLRALANGESDLDRLVELAKTSLRTKRQELRLALEGSFGSHQRFLLGKQLDQLEFLDRQIADLNLEVEQRLRPFEALLARLDAIPGIGSRNAEQILVEVGTDMSRFPSAAHFASWAKLCPGNDESAGKRRSGRIGMGSRWLRSTMVEAAWSASRVRNSYFAAKYHRLVPRRGKRRAAVAVAHSMLIAIYHLIKDGTIYQDLGPNHFDELDRQRVTHRAVSRLQALGYDVTLKEVSA

SEQ ID NO: 438025 - protein, 362 aa, unidentified
MFRPHTLYIRIRIVRKVSEPAFAMKDQDVTDVIRRKQQTAMRYIGIDVSKATFVVAYSSDKGGEIRTFNNTTTGIKQFIGALPKDGSIHCVMEATGNYSALLLYMLNVAGITVSMENPLKVKNFAKALLSTVKTDKSDARLITLYGEKMNPRPFKVQGEAILRLRQKRTVIRQLTKQITAMSNLRGSLACLPVPDKGATHTVDETIKFLEKKRDRLQSELTDLVEVEFSRQLALLTTIKGIGITLATALIITTGGFTYFQNAKQVSRYLGICPTYEQSGTSVNIRGHINRNGDAYTRGLLYVAAWTASRFNTKCGETYTRLRQNGKPGKLAMIAVANKLVRQAFAVVTHDKEYVDGFVSNRP

SEQ ID NO: 438026 - protein, 351 aa, unidentified
MVHVGMDLHHRSSVVRALSDTTGELYPARTIHHDRIEELWQYLDSFGAEPIRVVFEAISNARWMYRLLGQRPNVEPVAVTPHKVKIIAETVSKTDKIDAGKLAWLSSVNMLPRAWLPDERVERLREMTRHRTDLLGIQTKCKNQITSGLVRLGMQRPYDNIFGSLGRRWLAEVPLPEVMRLQVEHWLTLLDATARRMLRMDRKIERIIKDDPVWNRAAVLLDTIPGVGKVTISTILSELGDWKRFRRRAEVASFAGLVPASKRSANTKRYGHISKRGSKELRRVLTEIAQGVARKVPRYGRLYDRVADQKCANVAKTAVARRLIEDAWTVLMKDEPFRLMPVQAESLTRAG

SEQ ID NO: 438027 - protein, 338 aa, unidentified
MTIVMGLDQHRAQITADWIDTDTGEISRARVSPAHRAGVRRFLDRFSEQKLEVALEATTGWRFVVEELQRVEADVRLAEPAETSARRGPKKRAKSDRADARHLRELAMTGRVPESWIPPAHILDLRARVRLRHTLVDQRGEWQQRMQATLFHHGVPQRSGLITAEGRSWLEGLDLPSSAREQIAVGLAMVDSLEVQLGPLDRELCAYARRQPGCRALMSHYGIGHLTSATILAELGDAGRFSSSREAVRYAGMDITVHQSDSRRAPGRLSRQGPPALRWALFEAAQCARRPGSPDHGYYREVAARLGGNRACLAVARKLLKRSFHTLRELGEEALQPA

SEQ ID NO: 438028 - protein, 320 aa, unidentified
MSDSLDIGVDVDSKEFVPAVADRKAGDRIANTRAGIAQWLNTLPQRCRIGMEATGRYYELLARMAGQAGHVVYVINPRLIKHYGRATGSRGKTDAMDAEAIARYVKKENDRLREYVPRTDEQQQMHDLLRKRQTLVKTRARLEQSFGVSKSAPGELSDLFCALAGTLSELESELQRLGRDGEHGTLYKRLLTILGIGPAVAAHLIYYMTRWPLANANAWIACTGLDPRPNESGGRTGRRRLSKQGAPVLRQMLYMAAMGLKRCRRGQPLYDELSKRGHPSTAVFNILARKLARIAWGVFKSGRDFDPAMLKVGQACFQQA

SEQ ID NO: 438029 - protein, 356 aa, unidentified
MNILAIDLGKFNSMCCFYNTDTNEYRFQVAATTRHYLTSVFKNHKIDLVVMEACGPSGWISDLCQEVGLKTLVCSTNDAAWLWKNVKRKTDKDDSLKLARMAMMGQLTPVHVPKHQVREHRALIKYRKTIVGRLNRTKNLIRARFADHGIEIDRGQKAWRTGRELIDSHRKPLVECSLEELWRGQLDLELTQLDSLAQQQADVERRLDLIAKDDERIQRVQTIPGVGRRTAEAIVTTLDDVDRFDNARQVSSYIGLVPRQYQSGETDRNGRITKRGSRLLRTLLLECAWISMRYNEWSRTTYDRIHGGQQTRKKKAAIALARKIAVVAWSMLKHKTDWDPQRAGIVVEESPSPRPL

SEQ ID NO: 438030 - protein, 345 aa, unidentified
MGPMYYIGLDVHKLKISYCVKDVMGKIHAEGWIAATRFDLDRWMKTLPQPWSAAMEATMFAGWIYDHLKPHAAMLKVAHPLMLRAIVAAKKKNDRIDASKICDCLRCDFLPESYMAPTAIRERRRTLRYRNLLVRQMGQMKNKVGMLLMEAGVSYNKQKLHKAGYFRELLASNPDINPGLRSLLCQCREMVVRLGKMETALVRSLQQDRLLAERVERLMSIPAVGPITALTWALEVGEVQRFSSIKKAISYCGLCGAEKSSGSTVQRTPLSKQRNKHLQTTLFEAANMAPRYSPTLALLYDREKQRGNANRATLTVAWKLVAYLLAVDHGQTHFLVLDRDSCTAA

SEQ ID NO: 438031 - protein, 355 aa, unidentified
MSSEKYIGLDVHQATISAAVMDSMGKLVMESILETKAATILEFFAGLRGTLSVTFEEGTSAAWLYDLLKPHVAKLVVCNPRKIALTKHGNKSDKIDARKLADRLRLNDLESVYHGETGVRMLRELARSYLTIVKDLSRVMNRLKALYRSWAIPCAGRDVYYTRHRSQWLEKIPEAGTRRRAEQLYLQLDMLQHLRQQARRELLAESRKHTITAKLRQIPSLGPIRSALAVALIQTPHRFRTKRQLWTYSGLGLETRDSGEYHYVQGQVRRRKKQVFIRGLNKDHNHDLKGLFKAAATRASVQPGPFQDFYQRSLAKGIKPTMVRLTLARKIAAITLTLWKKGENFDADKLKSQAA

SEQ ID NO: 438032 - protein, 370 aa, unidentified
MSVSEPTLYVAFEVGKKEWQLAMTSGFGVDPWVRTVVSGDLPAVAGALRQGRMRFALPAQARVVSCYEAGRDGFWIHRALTQLGLDNRVVDSASIEVNRRARRAKTDRLDALNLVRMLVRVCAGERKVWSEVRVPTVAVEAARHVSRERTALRQEQTRLSNQLRGWLATWGCRLPRYRKPGWWTAVRDWAGAPLPLEVQTRLARAEARWAVLERQLTELEAQQQAAVPAAAPASALRQLVQLKGVATTSASVLLDEGLVWRGFRNRRQIGGLLGFAPTPFDSGESEREQGISRAGNGHLQSISIQLAWNWVRWQPLSALTQWYRARFGTGKRARRRGIVAVARKLLIALWRYVTTGVVPAGATLKVAAIA

SEQ ID NO: 438033 - protein, 363 aa, unidentified
MEQFIGCDAHKKYSVFVAVNERGEASPAIRVGHDREQYRQFLERLPAGSQIALEAGGHYYWMVDEMEAAGHQPRLVHPLEAKKRMGKTGKKTDKVDANGLGILLRNGTLPEVWIPPSGLRDQRESLRLRMFLVQQRTRLKNRIQGALARYNIQIAGVSDMFGVEGRLRLGQRLGELPEHTRQSVELELVTLDFLEVQLADIEKRLEELMKVTAEADLLKTLPYVGRILSMVMTLEIGRVERFPSAAHLASYAGLVPRVHSSGGHTRLGQICGDVNQYLKWAFIEAGNLVVIHQKHLAGQHVVRLYQRVKRKKNHQKAVVAVARHLAEAAYWILKKQEVYRDPQPKPKAPAQAQAAHALSSTHG

SEQ ID NO: 438034 - protein, 359 aa, unidentified
MPMLAESVDAVIGVDTHTDTHTASLIDRTGREIAITTVEASPEGYTGLLDWATQQAPGPRLVWAVEGCRSHGIGLLRVLVAAGQEVVEAGRPQRAARRPGGKSDPADARQAAGAVLAAKRHAQPRRDGDREALRILLVAREYANTTRTAAVNLFKSLLLTAPDALRESLRRLSTPRQTATCAVLRVNRREPTEDRVRRQTLRTLAQRIRLLDKEIRANERQLRDLVEAVMPVLLDEPGIGPVSAANLLVAWSHPGRCRSEAAFASLAGVSPLEASSGRVTRHRLNRFGDRSLNRALHTIVNWRMMHGHEPTQNYLTRRRGQQRSDSEIRRCLKRYTARHLFRLMESAAGTASSAAFSEL

SEQ ID NO: 438035 - protein, 310 aa, unidentified
MDSIVVGIDVSKDRLDVFVRPGGTAFAVARNGAGLEQLVTRLRELSPSIVAIEATGGFETIAAAALAGAGLPVAVVNPAQIRAFAKALNQRAKTDPIDAAVIAHFAQATGLEPRPLPDEATRLLADLVARRRQIVEMIGAERQREKRVVIPHLRKSIVRLLKALEKELASLDADIDDAVRGSPAWREKEDLLVSVPGVGPVISRTLLAELPELGQLDRKEIAAMAGLAPFTRQSGQWRGKSFIGGGRTAVRTALFMGALVAKQRNPVLKVFFDRLIAAGKPKMVAIIAVARKLLTILNAIVRDNRPWQHA

SEQ ID NO: 438036 - protein, 399 aa, unidentified
MLLDHPSAGPTAIQTQLSAIFVSLELSRSKWIVTSLSPGKGEKMSRHSLQGGDLAGLLALFAELKRRARERTGSDYPIVTIQEAGLDGFWIHRALQQEGIQSHVVDAASIATSRRRRRAKTDKIDGEALLRALLAFTRGEPRVCAMVTAPSPEEEDRRRLCRERQTLLDERIVHTNRIKGLLFAQGISDYAPQRRDRRKRLEGLQTGDGRPLPPRLKAQISRELDRLELLLIQIKAVEAAQEAMLGAECKMAIEAEPREAEREGEQPRNVVAMLLAVKGIGTHAAAILWSEGLSRPFSNRRQVAAYAGLAATPWRSGAIVHEQGLSKAGNPRLRTLMVQIAWLWLRHQPQSELAKWFKARGERGRKGSIVALARKLLVALWKYVTHGVVIEGAVIKTAA

SEQ ID NO: 438037 - protein, 438 aa, unidentified
MSNKVIFNLDELFISVGIDVGADFSWMSIALPNQQFVGKPYKILHNSIDSLTTAVSKIKEAEELYSLESRIFLESTGIYHYPLFCYLRDKGFNCSVINPIITKNSTNINIRKVHNDRFDSKKAALVGLKPDLKVSLMPSDLALNCRNLCREYYDLMDNRSAYVNKLQGELRMAFPQYLGIFSKVTINTSLTLLETYTSPSAFLKADKQEIIDIIKSTARFGLTYAQNKYNAIIQAATDANQFGFIIDSNIKRIRLYISFIRKYDEEINSILESLHELVDANEDSDFVKQIHLIETFKGAGFLSAVSIMGEIGDFSAFSKPKQLFAYFGLDPAVKQSGKFEGTKVQMSKRGSAIARRVIHTLTLQSISISRNREAKNPVLREYYLKKCDSKPKLVAMGAVSHKVCNMIFAILRDNKPFKIIAPQEHIKQYNSAKCDIAA

SEQ ID NO: 438038 - protein, 344 aa, unidentified
MDYYAGIDVSLEYSSVCVVDASGKVVREAKVVSEPEALIGWFGSLGLELARIGLEAGPLSQWLYAAMKQAGLAVDLLETRHVSDAFKAMPVKSDRNDARKIAQLMRLGWFRPVHCKSTTAQEIRAMLTARKLVQSKLLDLENSLRGILRGFGLKVGKTTRTKFAGRIEELVKGHPNLQTIGQALLRARAVLLAEFNGFEKRVRAMSRLHDKARLLMSTPAVGPIVSLTFACAIDDPSRFTSSKQAGPHFGLTPKKYQSGETDYTGRISKHGDASVREALYEAAHLMLTKPIKGCSELKSWAMRIARRAGTNKAKVALARKLAVIMLRMLKDNVPFNPAAKAATA

SEQ ID NO: 438039 - protein, 449 aa, unidentified
MSKVSPLINGLPVIHERAAGIDIGSRFHVVAVPSTLSDEPVQTFQAFTADIQRMADWLKTIGVETVVMESTGVYWVPVFEVLESAGIGVMVANARETRSVPGRKSDINDAQWLQRLHACGLLRASFRPGRDIAALRAYLRHRERLLDYAAAHIQHMQKALTFMNLQLHHVVQDITGVTGMKIIRAIVAGERDPQVLAEFRDVRCKSSIEIIHGALVGNYQPEHVFALTQSLALYDFYQARVDECDVQIEQALAVLKADKPEPEQPIPKARHRTKQPNAVNFDVRTALYQLIGVDLTQIHGIGPFLALRLVAECGTDLSKWRTAKQFTSWLTLSPGCKISGGKVLSAHSRKSSNRLTAHLRLAAVTVGRTNTALGAFYRRLAARIGKAKAVTATARKIAVLFYNAMRFGMHYSDPGAEQYEQKYRERVIKQLHRRAAEFGFILQEAECVS

SEQ ID NO: 438040 - protein, 429 aa, unidentified
MELCYAVCCGLDVHKKSVVACLRAPGPDGRRAGQVRTFATTTRALTELADWLVASGCTHVAMESTGIYWRPVYQILEGRMTLLLVNAAHVSKVPGRKTDVKDCEWIAELLEHGLLRSSFVPPAPQRELRELTRSRRQLIETHSREANRVQKVLETANIKLGDVATDVLGASGRAMLKALIAGERDPMTLAGLAQGRLREKRAALEQVLVGCVTAHHAFLLRHLLTHLEFLEDEIGDFDRRIAEATQSMMPALDRLDTIPGVARRSAEQILAELGDDMRQFPTAGQAASWTGICPGNHQSAGKRRHARTPKGNRWLRSTLVECARGAVRKRDSYLAAQYRRLAKRRGDQKAIVAVGHSILIAAWHILRDGVDYRELGGQYSIEYSVSTLFSITSDASPTSVSASWWSKALRPDTLRSVARDRIGGTFGGF

SEQ ID NO: 438041 - protein, 333 aa, unidentified
MEKVSSSRQSQNVVKRRYTQRAITIGLDLGDKHCCYCALDGEGEVIKEARVSTTKKALAQAFGSIDACRIALEVGTHSPWISRLLQELGHEVIVANPRQVQLITASSRKDDRLDARTLARLARIDPELLRPVRHRSNKAQAALMIIRVRSALIEARTSLVNTARGLAKALGERLPVCDADQMGVAQAESLSADLRSALEPLLKEVETLTTKIKDSDEKIEQIARVDYPETKLLQQVSGVGPLIALTFVLTVEDKNRFEKSRDVGCYVGLRPRRGDSGESQPQLRITKEGDSYLRKMLVQGAHYILGHRGPDTDLKRWGLSLAERGGKRPKRKL

SEQ ID NO: 438042 - protein, 316 aa, unidentified
MESQIFVGVDVSKHHLDVAIRPGRRHFVVSNDDQGVSKLVRRLTTLKPRLIVLEASGGYEALLLTALGEAQLPVKLINPQMVRHFAGATGRLAKTDKIDAQVLAEFAETLRPEPQPQADEALQVLRATLQRRAQVVKMIGQEENRLEKTRIPSVRRDIEEHLAWLKDRRDELDRELKDQIRRSPCRQDQDRLLQSVPGIGRTISLAILARLPELGALPSNKLAALVGVAPFNRDSGRTQAKRTIRGGRSYLRRMLYIAAVVASRYNPVIRAFYQRLLAAGKPKKLAHVACARKLVLILNAMVKKQQPWNQFPAQAA

SEQ ID NO: 438043 - protein, 394 aa, unidentified
MSSQAFGWDIHRKFSKVSLMQKVADDQFQVIERAHLEHNDRDAMRRWLSRFAEGTPVGMEAAFGWPWIADLLEELKFDPRLGHPPALRVLSQHEAKSDRCDSDRMAKFLLQGTFPASYLAPPHVRQIRERSRYRMALASWRAGMKNRIHALLHRFGVLHGYSDLFGKQGRLFLEQLALPEASRAVLASSLEVLDKIVLEIAMVEKWMAKNLEEDEIVRLLQTIPGIGLILAHVIRAEIGEIGRFPTARHLRSYAGTAPMSDDSADRHGARHCSEACNHALRWALIEAVTGVLTTRGIRGRRLRQTHARLTHGGRVNKNKAKVALAGELAELVFIIWKKRTPYQADPPARPGSVRGVPSRPPRPEEKDMSANMRSDQSRFPIARRGTSGAGQADL

SEQ ID NO: 438044 - protein, 334 aa, unidentified
MKELKSCVGIDISKDSFEVCIKQLKDERSVIKATRSFQNDYPGFEKLLNWTLSKVSNPIFVMETTGVYHEDLTHFLYANEQKVSVVLANKMKHFAKSLNMKTKTDKADAQMIAQYELERPLEWWKPMMPQLKDLRDLCRERLSLKKDLVRSKCQVHGLKHAHSTLDVVLQLKEQQIEFLEKNIQIIENEIIRLTEEDKEFNQRVKNIETIKGLRLLTIVTVLCETNGFTQFNNIRQVVSYAGLDIAERQSGLFKGKTRISKKGNKRIRECLYMPALSACNYNEPIKALYERVVERNPTIKRKAVVAGMRKLLILIFVLWKKNEAYNAEYLWKAC

SEQ ID NO: 438045 - protein, 317 aa, unidentified
MNDSLSFVGIDVAKDKLDVFIDSTGEFFTVANTSDGTASIRQHLAGLNIKLVVIEHSGRYERRCALDLMDCGLPVALINPRQSRDFARAINWLAKNDRIDSRLLAEFGRRVEPRPSQRIPENRAELDELVGRRRQLVQMRGAESTRLLQAQFKSIHSSIEKVLRQLDTQIQDLERRISKLIENDDDWRGKGQLLQSVPGVGPVVASTLVAELPELGKVNRQEIAALVGLAPFDRESGKWKGKRSCFGGRAQVRSTLYMATITAKRCNPIIQRLAQRLETAGKAFKVVMVACMRKLLTILNTIANTGEAWNPKPFVKP

SEQ ID NO: 438046 - protein, 314 aa, unidentified
MKMIERCYGGIDVSKDRLDVEILPDQQRFSVDNNAAGWSELVERLHRLSATAIGIEPSGGYERGVIRSLLIAGLSVRRINPNKLRQFARARGVLAKNDRLDARLIAEYVTIMPTRAVQRDPVTERLAEIVTTRRQLCDEHVAVENQTAHIEDALLRRLNKRRLARLKTDILLLDRRMAEIVATNADLTRRYELLTSMRGVGPTLAFTLIALLPELGQMGRKQIAALVGLAPYDFDSGKLKGRRCIYGGRLPVRNVLYMAAMSACRYNPALKVFHDRLAAANKKPKVVIVAVMRKMITTLNAMLRDNAVWHPKSA

SEQ ID NO: 438047 - protein, 349 aa, unidentified
MRTFTPPAGARFYAGVDLHARALFLVILDGDGQVRFARNLPANPDAFLRAVAPFRDGLLVACECMHCWYWLADTCREQHIAFVLGHAYSMKAVHGYKTKCDRKDAEAIARLLRGGNFPPAYAYPKERRGLRDLLRARLRLVRQRAHLYGHVHTARRQASLPPVSNDVKYKCKRAGCTADIADPFVRRRVEIHLALLEPLDTTIRRLEKEIDDAAGLIFPTELAVLQSTPGVGRVLSLTILLEIDTIDRFDTRQQFCSYARLCGAVQTSDNKRTGEGNRKAGNAWLKWAFSEAAVLSAQKDERIGALLNRLAAKLGKAKAYSALAHKLGRAFYHMLHTKEVFDVNRFVRH

SEQ ID NO: 438048 - protein, 347 aa, unidentified
MRFYTQQHKFYCGIDLHTKNMFVCIIDAGGNVRVHQNIHTNQEAFLHTIAPFREDIVVAVECMFTWYWIADLCIQENISFVLGHALYMKAIHGGKAKNDKIDSLKIATLLRGGMLPQAYVYPARMRATRDLLRRRNHLMRKRAELFAHIQNTRSQYNLPDPLGCIAKPKNREGIVERFDDPSVQKSMAVDLEMIEAYDHILTQLERDIIACAKEHDLRSYALLQTIPGVGRILALVLLYEIESIERFPQVQDFVSYCRLIKSIKESNGKKYGSSGKKIGNAHLKWAFSEAAVLFLKGNEPGKKYLQRLAHKHGKAKALSILAHKLGRAAYFMLKNKEAFNQKKFLGL

SEQ ID NO: 438049 - protein, 343 aa, unidentified
MEHFAGIDVSLELSSVCVVDGVGKIVHEAKVASDPEALVGFFRGLETRVTRIGLEAGPLSQWLYAGLVATGFEVVLLETRHVKAALSAMVVKTDRKDARGIAQLLRMGWFRPVHAKSPAAQEVRALLVARKLLQTKLLDVEFSIRGILRGFGLKMGEVSKGRFVARVRELAAGHAMLERITEPMLRAREALRTEYARLHGEMLAIARPDPVCRRLMTVPGVGALVAITFKSAVDDPGRFARSRVLGAHFGLTPRKYQSGETDVTGAISRVGDAMVRMALYEAANVMLSRVTRFSSLKRWALDVAKRRGLKRAKVALARKLATVLHRMWVDGANFHWGKQAAAV

SEQ ID NO: 438050 - protein, 409 aa, unidentified
MLFVGDDWAEDHHDVELQDPAGRRLARARLPEGVVGIARLHELVAAQLGEDDGPEQVVVGIETDRGPWVQALLAAGYQVFPVNPRQVARYRERHGTSGAKSDAGDAHTLADMVRTDRHQLRAAAGDSDLAEAIKLLARAHQTLIWDRHRHRCGCGRRLVEFFPAALAAFPNLAAADALELLQAAPDPTSAARLSRARIAAALTRASRRGVPAKAAQIQQALRAEQLPQPETVVAAYAATVGAAVAVIGTLNAQIEALAGQVEAHFGEHRDAAIYRSQPGLGGVLGARVLGEFGDDPGRYRDVRARRNYAGTSPVTKQSGKKKVVVARFVRNDRLADPLHQQAFCALTASPGARAYYDQLRARGTGHHAALRQLSNRLVGILHGCLKTRTRYSEATAWSHRTSDAATAAA

SEQ ID NO: 438051 - protein, 393 aa, unidentified
MICVGIDVAKDKHDCFILSSEGEVLADVFTIPNNRDGFETLLQRIRSCAFPADKIKVGLEATGHYSYNILGFLLDCGLATYVINPLHTNLYRKSLSLRKTKTDRIDARTIAAMLMSDVDLKSYTDTAYHNEELKSLTRYRFDKVRQRAKLKQSVSRLVNILFPELETSVPTLHMASVYALLSEFPGAQQIADTHLTHLKTLLDDASKGRYDREKAVEIREAARRSIGSRMPAKSLELRHTIQLIRELDKEIAEVEDSIEEIMNSIQSPITTIPGMGLRMGAMILAEVGDFANFDSPDKILAYAGLSPSTYESGKLSLAGSYSHMEKRGSRYLRYAIFNATKYVCHWDSTFAAYLAKKRAEGKHYNVAISHAAKKLVRVIYSLQKSGQAYQTAA

SEQ ID NO: 438052 - protein, 370 aa, unidentified
MAQGSRLFVGLDVHKETIAVASVAEEREAEVVFLGTIGTRQCDIDKLIRKLQAKGKKLHLVYEAGPCGYWLYRYLTKKNLLCWVVAPSCIPKKASDRVKTDRRDAVQLARLLRSGDLTPVYVPAMEDEAIRDLVRAREDALKDLKTAKVRLKAFLLRQDIRYEGRATWGPAHLRWLANVVCPTPAQQIVFQEYVRAVSEHTERLQRLEAELPALVQSWRWAPVVEAIQALRGVQFIAAVTLIAELGDLTRFENPRQLMSYLGLIPSEHTTGERRRQGSITKTGNSHARRVLVEGAWAYRYPAKVSRHLQLRLEKVPKAIQDISWKAQVRLCKRYRRLVARGKNVNQVVVAIAREMAAFVWAIAREVTVAH

SEQ ID NO: 438053 - protein, 349 aa, unidentified
MAVTIVEEARAITGGVDTHADVHVAAALDPIGGLLGAGEFPATAAGYARLLGWLGGFGTVCLVGIEGTGSYGAGLARHVTAAGVRIVGVDRSDRQDRRRQGKSDPLDAVSAARAAQSGRARGASKGRDGSVEAIRALMVAKRSAAGERTRTNGQARALVLTGPDDLRARFAAHTPAALVAGLGSLRPRPGGDVAGHATRVALRELGRRAQFLDTQLERLGELIVPLVTAHAPGLLALYGVGPNTAALLLIAAGDHPGRLRSEAAWAHLCGAAPIPASSGKVTRHRHCPGGDRQANHALWRIVFTRLGSDPATRAYAERRTAEGKSKAEIIRCLKRYVAREVYRYLRPGG

SEQ ID NO: 438054 - protein, 386 aa, unidentified
MNNVYSTVACGGMDVHYKFSNVTFRDAAGRVVRRERLVHPERDQLCKRLNRWPKGLPIVLEASFGWGWLSDLLSEAGLEPYLSNCYKLEQMRKARGWVKTNKKDADMVSLLPFERTGWWRVWRAPPEVRNRREQMRFRGDLVALQTMVKNRIHAIFHRHGIFHEFSDLFGGQGRKFLVELCLHNCTNLPSEALLALRGQVKLLDHVRRQLADVGRILHKQLLRTPLIIRLKTIPGIGLILAHVLAAEIGSIERFRSHKALASYSLLAPCSNDTGQDDPGHCPLGRHLGIRGNRTLKWAFIEAAHGAVRSGGRWRVMFDRVTHGGKKDRNRGYIKVARELVKVVYAVWAKGIDYQPIRPARPGCHKKKKSRSGTGQLCHPMVHALTA

SEQ ID NO: 438055 - protein, 352 aa, unidentified
MTQTSTGDAERTIGLDLGDKWSEYVALDADGRRVGVGRVRSTAEGFAQLSAQHAGAFVVMETGTHSPWAARQFEEAGHPVVVANSSELALVTSNVRKSDRRDAEILARLGRADAELLHPVAQRQPETQQRLAKLRARRSMVRARAEMINSVRGTAKSLGTRTASCSTDSFHVRALAGTSPELRDAVKFEIASIAALTAQILLAEAELEAIAASMPAVAAMRQVPGVGLLIALTFALTIEDPARFARRRDAAAYFGLAPGRRQSGERDPKMGITKRGNTEARSLLVQGAHYILGAHGPDCALRRWGLELERTKGKRKAIVATARKLAVLMLALWATGEVYDPMRGARPAAAEA

SEQ ID NO: 438056 - protein, 387 aa, unidentified
MSQTVAAPIPAAVDHERTLVLAIEVSNKSWVIAAQVPGLTHTKAKRTIDPEAEALLAAISAYRARAAATGRSIERVIAVYEAGWSGFWLARWLMRHGVEVYVVQPSSVPVDRRIRRAKSDGIDSELLLRTLLAWLRGEPRVCSMVPVPDEADEDARRCVRERCELIAERVGLTNRIGAVLATLGVSDYNPLLRNRARRLAELRTALGEPLPANAHAKIKRLLARLELVLTQIAELERERDAVVETEASDGASKMIQQLTALRGIGVQSATVLVREAFVRRFANGKALGSYAGLASSPYSSGGIDREQGIGKAGNRRVRTVMVELAWLWTRYQPGAAQVCWFRERVASTGRRVRKIMVVALARKLLIALWRFVIDGVLPEGAVLKPAA

SEQ ID NO: 438057 - protein, 477 aa, unidentified
MDKAKYIGMDVHKETVSIAVLDSSGKTVMESVIETQALTIVQFVQGLRGELHITLEEGTWAAWLYDLLRPHVNEVVVCDPRKNALLKTGNKSDRIDARKLAELLRSNLLRPVYHGERGVRALKELSRSYLTISGDLARVMTRLKALYRSWAIPCAGKQVYAPRYRSEWLGKITEGGVRRRAEFYYQQLDALRSLRQQVRRELLAESGKHPASKLLCQIPSIGPIRAAQLIAILQTPHRFRTKRQLWAYGGLGIETHSSADHRYVDGQLQRSKRQVSLRGLNRNHNHELKNIFKGAAIIAATKPGPLQQFYAALVAKGMRPEMARLTLARKIAAITLTLWKKEERFDAEQLKRKQLERRTNSGDPPGSHASVVTHRFWDARVRGRVSIHSLGVPGSASAMVLTLSCSSSIVLILFFRLLASFDAISAGVPMARHRHLVSKEFHRLFSLTPFSLKTARCMLYVLSTWTAIRTYAYMSSH

SEQ ID NO: 438058 - protein, 391 aa, unidentified
MINIGIDVGKFKHCATVLDDSTGEVLIKPFFLTNDRKGFDILYSKTKQFIHRKHSVGMEDTGHYMINLTNYLLDKKFTVKYINPRATCLRRKELGISAKNDRKDALLIAEMLSEKRFWRSISVRSIENSKFRDITRLYHQLQEQQNQDMNRLQRALDIVFPEVNSLSWTRYSKAYMKFLSTYPSASSIALEDIRNLRKALKTEGKGRQSKVTAEEIRELAKCSVGEDNISIDLEVTSIIAIINTREEQIRILGKKIEEFSHKLNSPIISIPGISHISGMTILAEIGDINQFQNTGNLISFAGMDPLVYQSGKYDAAHMPISKHGSRYMRKALYQAVFTVCKYSPTFHAYYTKKRNQGKSHRCAQGHCARKLLRVIYKLLSTNSLYNQNHIH

SEQ ID NO: 438059 - protein, 351 aa, unidentified
MKKIAYLAIDVHARHCVLGHMDCKGKFVGNKTFSTSEKNIVEALKAVKAKEKYLALEESNLAYWAAQVAKPYVTEVICSDPKENALIYRSPNKRDKVDTQNLCRLLRLGELKRVYHPENDERAIFKAAVQHYIDLRDQQVVLKNKIKAMYRHWGIIDVGGGTVYSTNKRDEYLKKIKHLHIANQLRRLYFLMDQTESMQEKALSAMKQLGRKYPEIKEFKRITGIGDILAHIFDAFVQTPHRFANKRQLWRYCRLGVTDRSSDGKPLGYKRLDRSGVSELKSLSYHAWLSAMKSDNEVRRFYSTSYRQTLSRVHARLNTQRKIIAVMYGIWKRGQAYNPQLFLDPSESGVV

SEQ ID NO: 438060 - protein, 366 aa, unidentified
MSEVITYIGIDAHKRELHVAMLIGTAATPVTWTVENEPKAIERLHRKLEREAPGSVRVCYEAGPCGYALQRQLTKGRVNCVVIAPALMPRKPGDRVKTDKRDARKLAELFRAGLLTEVRPPTPAEEAVRDLCRARDDARDDVQRARHRLGKLLLRRGLHFVGRKNWTKAHRQWIRTIQWEHAAERAVVDDYLLAIDQVESRLVELDARIAETAQTDPYREPVAWLRCFRGIDTLTAMLILAELHDFRRFPNPRALMAYLGLVPSEDSSGDRHRRGRITKTGNTLVRRVLIETSWHYQHRPGVGLGLAARRKGQPARIIAIADKAQQRLCGRFRRLTAKDKPSAKVVVAVARELVGFIWAALQSEAA

SEQ ID NO: 438061 - protein, 312 aa, unidentified
MIEQCFGGIDVSQDRLDVLLLPQGTGFSVANNEAGWSTLIGRLRGLLLTAIGLEPSGGYERGVLRALLAAGLSVRRINPNRLRQFARARGALAKNDRIDARLIAEYVATMPTHVVRHDPAAARIAEIVTMRRQLCDEHVAIENQAAQLEDAMLRRLAKRRLARIETDIRLLEKRLTETIAAEADLARRYARLTSMPGVGPVLAFTLIALLPELGRMSRKQIAALVGLAPYDFDSGKLRGHRSIYGGRMPVRNVLYMAALSACRYNPALKTFHNRLAAAGKKPKVILVAVMRKMITTLNAMLRDGASWQPQAA

SEQ ID NO: 438062 - protein, 420 aa, unidentified
MERSSFRRKVFCGVHWAEDHHDVAIIDTDGTLMAKARISDDAAGLAHLLALLAEHGDNPDEQMPVAIETSRGLLVACLRATGRRVFAINPLAVARYRQRHSVARKKNDQADAAALANILRTDIQAHRPLPADSELAQAVAVLARAQQDAVWDRTQAHNKLRSQLREYFPAFLAAFADKREGIMRPEARVILATAPTPAQAARLTRARLAALLKNAGRVRGITAEAERLYAALHAKQMHQPPLVEQALGRQALALLRTLEATCINADELEQAATETFARHPDAPVITSFPGLGMLTGARALAEIGDDRTRFADAKALKAYAGAAPVTRSSGKSHHVMHRKVKNQRLAAVGYLWSFAALTASPGARAHYDRRRAGNERHVAAQRNLFNRLLGMLHHCLQNDTPYNETIAFPTATTTAPAPTT

SEQ ID NO: 438063 - protein, 427 aa, unidentified
MQSESERLAAYRQLRTEIRGSNKHLIVGIDIAKEKHYAFMGTANGTTLCKQLIFQNNKEGFDLLIARAELLRLTHQCEQVVFGVEPTANYHKPLAEHLIRQGLHLVQVSGNAVKQNRELLDNRWDKHDRKDAANVADLIAQGKCQFYDYPPASIRDLRELLSLKKRFKKEEHGLKTRIRNNLLALYFPEMDQYINTCQRDSLSVIGNCCDPVMIAGMEYDTFYNTVVCARRTQKQEEHLYQIWQSAKGSIGCNAGVAAVYEGTVLIKQLQDIRAAIQELDKVILTLCSGIEEYPYLLSIPGIGPDTASKILAYVSDPNRFDHAKQVLKLAGFDLSASRSGKPAANATPVISKKGQADLRFALCQAALVASHSNSLFSTWFARKLQGREREKGIFAIVRVKLAAKMLVIAWTLMKKKEMFAYDQLNNS

SEQ ID NO: 438064 - protein, 369 aa, unidentified
MSHCNTTHFVGLDVHKDTIVIAVAEAGRGSARAVGSVPFEGKALSKALDRLGPRCAVSCCYEAGPTGYGLARALIAAGWRCDVIAPSLVPKKSGRRIKTDRRDAMKLAQNHRSGDLVAVFIPDEQTEAIRDLERAREGAKRAELVARHQLSKFLLRHGRRYPGKTTWNDAHRAWIAGQAFAEPAQQHVLADALAAVESAALRCQQLTEKLRESAGSWRLSPLVQAFQALRGVEFVTAVTFAAEVGDFRRFARAGDFMGSVGLIPSEQTTGDHRRQGPITKTGNAHVRHLLVESAWHYRRQPRIGKALRGRSAGLSPQVCAIAWEAQKRLHGRLQRLIGRGKNPAEAATAAARELAGFVWAIAREVPIAA

SEQ ID NO: 438065 - protein, 387 aa, unidentified
MPRYLGLDLHRRYIHGCEWVPEAQQERHFRFPNTSDGWSQFVATLDSNCWVAMEVTGNAFQVHDRLSPHAGKVLLANPVELKRLGSGRHTDRVDAARLAKMLALGTLPTVWVPPQEVRDVRILLRYRERLKATRARFLNQIRAALRRHGYDLPRRANPKLHLTAQQLQALPGAEMALILSACRQADALAEEITAIDGEIARRLQGVPEVRLLLTLTGLGPIAAAAVWAYIGDPRRFKNAKQVARYAGLDASVHQSGDTSYHGRISKNGNGLLRTYLVEAALTLARFDNGALGEFWRRKEQEIGRKRATVALARKMLIVAWKIMLTGQPYRAAKAKTTRNKCWQLKSMSRQETQWSKVAAQILAVDAAVHYQEGKRSELRTERTQVPA

SEQ ID NO: 438066 - protein, 459 aa, unidentified
MTKHRQKKMKAGKVDALDQINHNAAGIDIGGGEVYVAVPPDRDEDNVRSFPTFTADLQCLADWLNACRIDTVAMESTGVYWIPLYEILEARGFQVCLVNARHLKNVSGRKTDVLDCQWIQQLHTYGLLSPSFRPSEQIVAIRSLVRHREMLVQYRSAHIQHMQKALTLMNLRLCNVLSDITGVTGLKIIRAIVAGERNPQVLAGFRKAGCKKSAEEIAKSLEGHYKREHLFALKQALELYDFYDLELHECDAELEALYQQFDPPDDPGTPPPTPRRSKPRKNQAHFDLASALYRMSGVDLTQIDGLDALTVQKVLSETGTDMSKWPTEKHFASWLRLCPNNQITGGKVKQTGVQPTTNRASTALRLAASSLTHSDSALGAFYRRMRTRHGAPSAITSTAHKLARIIYFMLKENKPYHDIGVDYYEQQYRTRVLRNLTRQASRFGFRLLPLDQLPVQKVS

SEQ ID NO: 438067 - protein, 340 aa, unidentified
MQPHFVGLDVHKQVIAYCVKTADGEIVREGTIPATRASLDEWVKTIPGPWHGGMEATMFSHWIYHHLAPYAEKLEMGHPARMKAISAGKKKSDKIDARTIGDLLRCNLFPPCFIISPELGALRQQLRFRRLLVEEQVMFKNKTAGLLMGAGVEYERRRLHGKRYFKELVRDSEWISGELRPLLEFNRQQMDSLKGMDRQLMGMLERHPLLMARIEALQAIDGVGPVTALTWALEIARPERFPSIKQAMSYCGLTSALRESAGQQKRGPLSKQRNRHLQSALMEAAKLAPQFNEKLKEVHRKASEKKVHQNRATLAVARKLVAYLLAADRAFFASQPSARA

SEQ ID NO: 438068 - protein, 416 aa, unidentified
MHFVAVPNEAAEQSVRQFGVYTRDLHGMADWLQECGVKIVAMESTGVYWIPLYELLERRGFEVMLVDARQVKNVSGRKSDVQDCQWIQQLLSYGLLKAAFRPQDQFCELREFNRLRTRLLADQGRSVQHMQKAMTLMNIQLSQAISDVAGVTGQKIVRAIVEGERDAQVLAAYRDSRIKASEEEIAASLQGTWRAEHLLALKQALGRFDFYAQQLQECETEIQRVMAKLEVHTKELGKGKKRSKAKNAPKFNVRERLLKMCGVDVTKVDGIDETTALNIVAEVGTDLSRFPSDKHFASWLGLCPGTRISGGKVLGAKTKHSVNRASQAFRQAAAALRSSKSALGAYYRRLCGRMDKGKAVTAAAHKLARLFYALMTKGQEYVDQGQQYYEERYRQRVIHHLQRRAQSLGMSLVPTA

SEQ ID NO: 438069 - protein, 447 aa, unidentified
MKELAEDHDDGSVARIAAIDIAKTSGMVCLRVPHHTVEGRRVQQVWNVASTTNAILELGDKLICQGVQRVVMESTGPYWRPFFYLLEVRGLECWLVNARDVKNVPGRPKTDKLDAVWLAKLAERGMVRASFVPPKPVRQLRDLTRTRTVFVQERTRHKHRVDKILQDARIKLSSVVSDLFGVSSRAMLDALVAGERSPRTLADLARGSLIEKKSALIESLTGQFDDHHGRLLGMLLETVDHLTAQVRELDRLIALALEQITAPLDNSGTNPPDAGATSPTTARTARDLVERLDAIPGVGPTAARIILAEIGADMSRFPTPEHLVSWAKLCPRTTQSGAKNTAGPTGRGNPWLKGALGEAASAAARTDTFLGARYRRIVKRRGHSKAVVAIARSILVIAWHLINDPDAAYQELGADWHQRHLNPARKTRDLVRQLQALGHTVSLAPAS

SEQ ID NO: 438070 - protein, 466 aa, unidentified
MALRLGIDIACRAAHQASLADETGNFVFTGRRFRTRADELEQLWAALPARTEPADVTVVMEPTRNAWVPLTAWFRRRGAHVVIVPPERSADLRAYFSKHAKSDRLDSRMLARLPMLHPEGLHEEQGLGPGEALRRMTKLRSNLVKRRSACLARLDALLEILGPGWSAVFRADLSNTTPLRFLAAGYACPHTVRRLGKARITRFIYRHSRGRWGAPQADALLAAAAETLALWNGELDYTELAEDIAIEARLALRLAEEIKGLEERIGILFEEADPAGISTSVPGVGKILGAQILGRLGDPSRFSSLAGVRSYSGLVPSLDASGLSGRSGEPTKRGDACLREALFMAADHARRVDPTLARRYQRLMTEGGKHHNSAICSIASTLLTRLVACLRSGELYVIRDVDGTVLDAAKAKAIVAERYTVPPAVREHRRSSSVHLRHQGTSRRSKESQSAPSPDSSLTHATAGRT

SEQ ID NO: 438071 - protein, 340 aa, unidentified
MRLIGCDLHASQQSIAMLDRDTGVVVEKTLRHEGETVRTFYASIPPPVVVGIEATGSMGWFLRLMEELTIECRVGHPAAIRKAETRRQKHDRRDAALLLQLLAEDRFPAIWMPSTECRDLRSLLLHRHQWVRMRTRVQNALHAIVLAHGVRRGHTLWNRDGQALLASLPLPPHTADRRSELQALYQHLEAHIGRLDDRVQHVANERARATLLMTHPGVGPVTALATEVFVGDPTRFLDGKALASYVGMIPREYSSGTRQRLGALSKQGNPFLRFLSCEAAAHAVRRDPDLQRFYRRKVVQKGFAKARVAAARKLGIRLWIMLRDQIDYAEFCRRGLARQS

SEQ ID NO: 438072 - protein, 334 aa, unidentified
MENIALIGIDLGKNSFHIHCQDHRGKAVYRKKFTRPKLIEFLATCPATTIAMEACGGSHFMARKLAELGHFPKLISPQFVRPFVKSNKNDFVDAEAICEAASRPSMRFVQPRTESQQAMRALHRVRESLVQDKVKTTNQMHAFLLEFGIRVPRGAAVISRLSTLLEDSSLPLYLSQLLLKLQQHYHYLVEQIKDLESQLKRKLDEDEVGQRLLSIPCVGTLTASTISTEIGDGKQYASSRDFAAATGLVPRQYSTGGRTTLLGISKRGNKKIRTLLVQCARVFIQKLEHQSGKLADWVRELLCRKSNFVVTCALANKLARIAWALTARQQTYEA

SEQ ID NO: 438073 - protein, 318 aa, unidentified
MLNSGMERITDIGTLLSRIPDKREERMVLRFHGIDRHKKFSTVSVLDRNGQEVRFLRSCAMEDYLVELGAEDAVILEASCGCFYWADRIEATGATCYVLDPRRFRIITDSWNKTDRQDARNMAKALWVFLVTGEFGIPTVYKPSATIRTLRRLFATYNLLNRQIRMLKNAIQAMLTDDGVVLTSTQLSGLFTGRESVADALSEYSILPTIVSAIEVQAALLQQVNESKAALAREIVVHSEPLAEQIELLVTIPGITPLTAAAFLADIGDVRRFKSLRQMNAYLGLVPRCHDSGGKSRPGHITRESRKLTRTILTQSIY

SEQ ID NO: 438074 - protein, 449 aa, unidentified
MREPQEVQDEAHEQVVERVAAIDVAKASGKVCTRVPHQSKPGGRVTKVWDVDATTGAITELAAYLVGLGIEKVTVESTSDYWRPWFYLLQAAGLGVQLANAREVKNVPGRPKTDRLDAVWLAKLTERGMLRPSFVPPAEIRQLRDYTRLRIDLTHERARHWQRLEKLLEDALIKVSSVASTLDTLSVRAMVEALIAGQRDPKVLAGLAKGRMRSKHVALVEALTGQFDDHHAELARMLLDQIDALGGQIGTLTTRIGELIAAIPAAQGVDADGTTGPDAGAGPGAAVLPAVARLDAVTGIGQGAAQVIIAELGLDMGIFPTPAHLVSWAKLCPRTIQSGATTRAGKTGKGNPYLKGVLGEAAAAAAKTDTFLGERYRRLVKRRGKLKALVAVARSILVIVWHLLADPTARYHDLGAGYYTDRIDKGKKARNHIRQLEALGFTVTLAPAA

SEQ ID NO: 438075 - protein, 434 aa, unidentified
MQEVTDEPRYRDRGCGIDIGKAGMVATIRVPSDGNPARRAAETRSFGTTRREVLALADWLRCWQVPAVVMEATGDYWKGPFYRLEAEGLECVLADARQVKNLPGRPKRDPSDSRWLAARFERGSVSPCFVATPEFRVIRLHTRYRRDLTEERTREKQRAEKLLESAAIKLSSVVTDLHGVTGRDIMDHLIAGERNPKVLAQLARARARRKIGELEAALEGAEFFAAEHAALLAAMLERIDGLSAQIGKLSEVIERLVAPYEEQLAQAESMPGWGRRAAQDAIAETGADMSRFPSGAHLASWAGRTPLDNQSGKRKGKARSRKGNRYLAGITGETATAAGKTQTREGARYRRLARRRGKAKAQVALGNTQLKVYHKLLSSPGARYADLGPDYYEHQASTRRQIAHHVGKLGALGFEVTLCRIPAPEDEAGSTPAA

SEQ ID NO: 438076 - protein, 334 aa, unidentified
MLYAGLDIHKAVFQVVVLDPDSGELCESRFEPSRERLGDWAMEWQGKLAAVAIEATTGWRWVARELEAHGFEVHLVDPGRASALRGRRRQPKTDRLDARWLALLLARELLSECEAWLPPAEIQRLRDRTRLRKALAGERTGWAQRLHALLAHEGWPCSRGRLLTREGSRWVAALELDAHVRGQVDVIVAVMAALEEQLELVESELRRFARADPRCRALQTIFGVGPILACHLLAEIGDVRRFQRPRQLVRASGLDPAVIESADSKRRGRLAKQGSRHLRWALVEAANHSHRHSSPDHDLYTSTVRRCGRGRARLTVARKIARRSYHVLLAAEAA

SEQ ID NO: 438077 - protein, 420 aa, unidentified
MKVVYQTCCGVDVHKSFLVATIIKTTSGVQPSYQKKRFSTFNNSILEFKKWLLDNSCRDVCMESTGKYWVPVFNLLEDELSVTIANPKWVKAVKGNKDDTKDSKWIGDLFRLGLVPGSYIPCKPIRILREFTRYRYKLTSCRSSEKNRFQNALTVCNVALDSVVSDIFGKSATSVIDYLLQQSDNSINHEEISSRLLRSLKKKSESVIESIEGYQMTESQKYRMRLVHAHMDYITSTISDIDSMIDSLVEPYENAVQLLCTIPGVDRNSAITIISEIGTDMTQFSNSKRLCCWAGLTPGNNESAGKKKSVRITRAGVYLKPALVQVAHAAVKSNKSPYYKAKYERIMKRRGKKRAIIAVARMILTAVYHMLSTGESWNPTDLYKIDMPEPLKNKQKEKAVKQAMKLLIAEGLIKESQLTS

SEQ ID NO: 438078 - protein, 319 aa, unidentified
MSNSFLGIDVAKLKLDVALLRDDKTRTRQFDNSTAGFQALQAWLTSLHLDNLQVCLEATGSYAEAIAVFLHQAGYRVSVVNPLRIKGEAQAQMKRNKTDRADARLIADFCQKHNPPPWQPPSPAVAELQAITRRLEVLEEMLQAEKNRLPVTPVKTQPSVQRMIANLEQEIEELNHSIDDHFDKHPELKEQSRLLQTIPGIGEKTAKFLLAEIDFSRYESARAVAAYAGVTPRKNQSGTSVKGTNLSKLGNGRIRKGIYFPAIVAKNHNELVKEFAKRLEERGKSQMQIVCASMRKLLHIAFGVLKNKTPYNPNLAFGG

SEQ ID NO: 438079 - protein, 348 aa, unidentified
MKNYQMGIDISKEKLNICLKRGTETVREEEIPNTAAAVRKCVKRINKENGVAVDEMLACAEFTGRYIYPLVCACDELGLFLWMEDPTRIKNSFGVTRGKDDRVDARRIAEYAYRFSDKAVAYEMPDRTLVSLKNLLADRDTLAADRKKYEMQLHDQKGYMDPSDYARKKRSWAAVVRTLDKQIALIDAEIQRLVESDEKIRHQKELLKSVDGVGDRVAVYMIVVTMAFTRFETPRQFNCYAGLAPFRYTSGKSIYSKSKVSQRANKQIKALLHLAAVSASTHMKESEYKEYYRRKTGEGKHPLCVLNVVRAKLVSRMFAVIKRDKAYQRHYNISTPNEKISQKTIANS

SEQ ID NO: 438080 - protein, 347 aa, unidentified
MLIIGCDFHPGFQQVAIFDNRTGEIQERQLQHRTEAEQFYGALAGQQVLVGMEACGHYPWFERLLAELGIELWFGDAARVRASVVRKQKTDRRDAEHLLDLLRQDRFPRIWVPSLEVRDVRQLLVHRHKQVQARTRTKNQLQAMALSCGVQKKYKLWTKAGRAELEKLPLLPYAAQRRKRLLEALDGLEAEIVELDRRVQDEAGQRPEAVRLMTHPGVGPVTALAMVLTLGPAERFESGKQVGSYFGLIPSEDSSGGKQRLGRISKQGSSFLRFLLVEAGQTAARYDPQLKRFYRRLAVRKNRGVAKVAVARKLATRLYLMLREEWTYAQLCQAVMQVSPSHSVAGE

SEQ ID NO: 438081 - protein, 345 aa, unidentified
MVSIVMGLDQHRAQISAEWIDTITGEVFRARVTPADRAGVRKFLAGFEGEALEVALEATTGWRFVVEELERIGAEVHLAEPAEASALKGKKKRAKTDWADARHLRELLLLGRLPESWIAPAHILDLRARVRTRHLLSHQRTEWQQRMQAVLYHHGFPQQRNLLTLERRRWLDGLKLPAAAREQLTIALGMIDVIDIQLVPFDQDLRAWARKQIGCRALIDQLYGVGELTSITILAELGDARRFANSRDAVRYGGLDVTVYQSDEHRSPGHLSRQGPPALRWALYEAAQRARFPSSPDRAYYEQLAARVGGNRACIALARKLLKRSYHILKALGDQALLEPVTTTS

SEQ ID NO: 438082 - protein, 383 aa, unidentified
MSQAQTIPVPDSIKNDRLYMALELSKKNWKIAFSNGFKIRMKDIEARDLKQFEEEVKKSRRHFGMGEDVPLYCCYEAGRDGFWIHRYLLQCGIHNVVVDSSSIEVNRRYRRAKTDQVDATKLVTMLIRYLNGESKLWSVLRVPEAEDEDARRLNREIERLKKERTAHTNRIKSLLALHGIVMSVGKNFPEEIAKVVLWDGEPVPPRVKQEMLREYERYELIRQQLEQLEAEKEALLKADSKSSGKVLTLQKLKGIGPVSSWVLVYEFLGWRVFNNGKEVGASAGLAPSPYASGESQREQGISKSGNRRIRALMIEIAWYWLRYQPGSKLSQWYRIKYGGGSKRVRRIGIVALARKLLIALWRYVEHGVRPEGAQLKRQELICG

SEQ ID NO: 438083 - protein, 313 aa, unidentified
MIIPLRYVGIDVSKKHLDIFDEADGVPRRIANAAQAITQQVARWRCDALVVFEATGTYDLALREALDQAGVRFARINPARARDFARASGQLAKTDPIDARMLAAFGRVMQPATEQVAHPARNALASLAKRRDQLVLMRAQEKNRRSETDDRAMADRIGRLIEVLDGEIAEIEADVRGLIKAEQEIADDARLMRSLPGVGPVACMQLIAKMPELGRVGAKQIAALAGLAPFNVDSGTFRGKRKIAGGRKRVRDALYMAALNAVRRADPFKAFYTRLRQAGKPAKLALIAVARKLLTVLNAMMRDRKPYLQTKPT

SEQ ID NO: 438084 - protein, 339 aa, unidentified
MFYSGIDQHKRDCFITTYGPDGETVNQKRVPNSPMLIERYFSQLSGPHKAVVESTGSWYWLADLLEDLSVDLSLAHATKLKAISEAKVKTNKIDSDVLAMLLYADIIPEAHMIRPEMRGPRDLMRTRLRLVEKCVSCKNSIERLLEKFNVHDVTELDELYRLQAACHEAQIDLLHDQIGTLEAALHPCLIPNEDIQRLLWIPGIGKVNAFTLYTEIDGIERFPSANQFFSYCRLVPGAANTGGRTRHRSGSKQGNRYLKLAFGHAAVRAMQYYPEIRAFYRTKRRKKPERIARTLVALEIARIVYHVLSRQEQFNGLFKGKPLSRTKQSRWPRLASPSA

SEQ ID NO: 438085 - protein, 361 aa, unidentified
MKDTTIAVDLAKSVFQVAVSHKPGRVDAERRLSRDRFLEYLAKQPPATVLLEACGSAHHWARQLQPFGHTVRLLPAHDVHRYVRRNKTDRTDAKALLEADRNEEIHAVPVKTIEQQSIAALHRMRSTWLATRTARINTVRGLLREFGMVIPVGAPHVVPHVRELLATSSHVPDLMRTSLSRACDEIETLEQHMGAVERQLTALARSRDDVKLLQTIPGVGLLTATALVALVGDVRRFHSSREFASFLGLTPKEDSSALRRRLGAISKQGDAYLRMLLIHGARSVLLRAHGAGDATAFQIWARTTQQRRGHNVAAVAVANKLARIVWAVWRHQRPFAADYRSTITTQTATISTHQEDCTELT

SEQ ID NO: 438086 - protein, 400 aa, unidentified
MKFVGWDWASTSHDVTVLDEQGRVVERWALRHTEQALAETLARLARHGQPAELPVIIERSAGLVVDRLLAAGHPVVPVHPTAFHAARPRWGAAGAKSDPGDSYKLADYLRTDGHRLRRLQPLDPGLRELQALVRLREDHVRARTAASNQLGALLDAYWPGPKAMFCKLASDIALAFLTDYPTPQAAARLGQARLAAFCRRHAYRGGKPPAELLARLRAAPIPSSGLAPAVLAQLIGAQVQLLRSLQATIGELETAITQRVAQHPRAKLLRGLPGVGTINLAQLLAEVGPILDRVSTAEQAAAECGAAPVTRASGKTSGVYFRWAANSRARTALTAFAHNARMQSPWAGRLYADARARGKRNPLATRIVARAWLRVIWACWHTNTPYDPCAHRAEQRLTAA

SEQ ID NO: 438087 - protein, 344 aa, unidentified
MRKTYFVGIDVASETFVASVLMAPDQQLLSAKEFGNTPEGVADLEAWLLAHAVSREEAVLCMEATGVYGETLAYRLTAQKWWLAVHPPLEVKRAFHPTGHKNDAVDSRQIAEYAARFRDRLRPFRPRKAILEQIKVLLNLREQYVRQKTAHKNALKTIQRKVVGTPLAEKLHQQTIGQLEKNIKTIEQEIKQLLKQDPALHMNASLLSSIQGVGLLLTAHTLVLMETLQSPLNPKTVAAYIGISPYENSSGTSLKKKPTSRHFGPAQMRKLLHLGARSLRTHHPEYRKYFERKVAEGKPKSLVLNNIANKLVKIMCAVIREQKPYIPNYRSVSPLISKNALTKS

SEQ ID NO: 438088 - protein, 346 aa, unidentified
MLYAGLDLSRKRLDFHLLDADGATVEVGAAPPDADGLRGLSERLARHGEPVRAAIESMNGARFVHDRLELAGWRVEIADAQKVKGLAPLACKTDRIDAWVLAELSRRELVPAIWLPDPLVRAERERARWRLHLVRHRSSLKQRVHAVLLTHGKPCPVSDLFGVRGRQLLARLALPEPWQGTLEASLRLIDELDREIGDCEAELRRLGADHRYVPLLLTVPGIGWVLAYTIAAELGDIDRFPSPRKLAGYTGLCPRVYQSGQRDLRGPLAKQGPRYLRWALVEAATHACTAPVYRDRYQQTKARIGKQRGAKVAQIDLARRLAEAIWHMLTRDQPFAPKGATDPLAA

SEQ ID NO: 438089 - protein, 355 aa, unidentified
MNSAKYVGMDVHAATISVAVRDAAGKLIMESVLETKASTILQFIHGLRGELHVTFEEGTWAAWLYDLLKPYVTNVVVCDSRRNALLQEGSKSDRIDGRKLSELLRANLLHPVYHGENGLRPLKELVRAYLTLSKDVARVMNRVKAIYRGWGIPCAGQSVYHPRHREEWLRKITQASVRRRAQLCYLQLDTLIVLRQQARQELLVEGKKHRAWKLLRSIPALGPIRAAVLMAIVQTPHRFRTKRPFWKYGGFGVVTHSSADHRYVEGQLQRSKKLVSVRGLDFSHNHDLKDLFKGAAIQASTREGPFREFYDALVAKGMRPEMARLTLARKIVTIAFTVWKKGVVFDAKYLKPQTA

SEQ ID NO: 438090 - protein, 355 aa, unidentified
MDSKKYIGMDVHKESISIAVMNGAGKIVMECVVETKASMILQFINGLRGDLQVTFEEGTSAAWLYDLLKPYVTKLVVCDPRKNASMREGNQSDKIDARRLAELLRLNHLNPVYHGEHGLRSLKELVRSYLTITKDLGRVMSRVKAIYRSWAIPCTGKQVYAPRHRAEWLGKIGEPGVRRRAEFYYQQLDALRTVRQEVRRELLAEGKKHKAWKRLCQIPSIGPIRSAVLLGILQTPHRFRTKRQLWTYSGFGIETQSSADHRSVDGQLERAKKQISIRGLNRNCNHDLKNLFKGAAIVASSKPGPFQEFYTALLTKGIRPEMARLTLARKIATIVLIVWKRGACFDAQHLKPQTA

SEQ ID NO: 438091 - protein, 330 aa, unidentified
MIKSVIGIDVSKTKIDVLWLKDMENGKVKTKVFNNTEAAHQELTQWIETHTKQPITASHVIMEATGVYHEALAYALYEAGASVSVVNPAKISHYGKSLGVRSKTDKKDSMVIVRYGATQAPPLWSPEPEAIRELRALINRLNAVEKDIQREKNRLEKTEISNVSASTILSIKRMLDSLNQEKKRLEDLIKQHMDQDLTLKHNKELLETIPGVGEVIARHMCLVLGSRIFKSASQCAAFLGLIPVQHESGSSIKGRSRLSKAGNATIRAKLYMAAVVSIRHHPDIKRQYQRLLKNGKSKLSAIGAAMRKLVHICFGVLKHQTPYQVQTLKN

SEQ ID NO: 438092 - protein, 401 aa, unidentified
MPFHGGLDWGGTSHALCIVDGTGGVVARIEASHDATGLADMLARLKRVAPSAELPIAIERPSGLIVDALVAAGHPVIPIHPNIVKACRPRYRAAGGKSDPGDAFMLADILRTDGHRFRPLMPVSDDIRALRALVRGRDDLVAQRTALANQLRSLLEGFWPGAAAIFAAIDSPIALAFVSRYPTPDSASRLGIKRLASFMAQHAYCGRRSAAELLDRLRAAPTGLASDAEADAKGELARAMAAILERLVAEIAKLSSRIEHDVAELPDGKIVMSFPRSGRICAAQILAELGDIRERFPTEDQLAAEAGVCPVTHASGKSRGGVFRWACNKNLRLAVTCFADNSRHASAWAADIYAKAKARGCRHPHAIRILARAWVRVLRKTWQERSTYDPARHTAAAKIAA

SEQ ID NO: 438093 - protein, 326 aa, unidentified
MLIIGCDFHPGFQQLAIFDNQTGEIEHQRLHTMEEARAFFAGLREQALLGLESCGFSQWFERLVEETGHELWVGDAAQIRASVVRQQKTAVRDAEHIGHLLVENRFPRLWVPTAGERDVRQLRMHRHQRVRMRTQVKNQLHAIALNQGLRKQRQLWTEAGREQLEKLVLPPYTARRRDEMLKTLDQLDEQIAALDQVVRAEAQKRPAAVRLMKHPGVGPQTAVAFVLTIGEVKRFATAKQVASYLGLIPREYSSGGKQRLGHISKQGSPFLRFLLVEAAQSAARWDPELKRAYVRLALRRSRAQAKVAIARRLATRLYWMLRNDQT

SEQ ID NO: 438094 - protein, 335 aa, unidentified
MEIRTIGIDLGKTVFHLVAVDARGKVVARKKCSRTQLLRFTSNLPPCLIGMEACAGSHFLGRALREQGHDVRLMPAQYVKPYVKTNKNDYIDAEACAEAVTRPGMRFVPIKTDDQLDLQSLHRVRERWMARRTAVINQIRGMLLERGITIARGRRRIEESLPGILEDADNKLSGALRALLGELRLEMQYVHRQIGESNKQIERIAGELEDGQHLMTVPGIGPMIATATIAAIANGSAFKKGRGFAASIGVVPGERSTGGKQKLTGTSRRGNKYLRKLFVQGAHAVLQRRTKQDPVLRAWVERLAARKRPQVVAVALANKMARMAWAVCKRRTEAA

SEQ ID NO: 438095 - protein, 350 aa, unidentified
MNVNHYIGFDVHKKSVSYCVKGADGLIFEEGKLRATHQALREWAQKRPEPWHGAMEATLFSGWIYDALKPFAAELQMGHPALMKAIGASKKKNDKLDARKIADLVRCNLLPACYVAPVEIRELRRMLRYRNLVVAQAVRMKNKMSGLLMEAGAEYNKQRLHGKQYFTELLDAVEEVPESVKDLLRLSRGALEMFETTQLQLLARLRKDRRLAQRVTLLRSIRGVGEVTALTWILEVGDPHRFSSIAQAVSYCGLTSALVSSADKQQRGPISKQRNAHLQTVLIEAAKLAPRWNPQLAALHARELERGNRNRATLALARKLVAYLLAVDKSGQPFQVLSPSAEETEVGKAA

SEQ ID NO: 438096 - protein, 357 aa, unidentified
MEQRTTVGIDLAKEVFAVCVMDAAGTVIERQRLRRAAFERWLQSLQGTCVVAMEACSSAHHWARLLAARGHTVRLITPAFVTPFRKSGKNDDHDAEAIAIAARQPTMRFVPVKTVEAQTILCWHRARQGWIEERSALITRLRGLLAEFGIVIARSADRLRKALPALTDDDTTLPPALRPLVLEAIEQLRALDARLERCDAEVAAHARSDPAAQRLRQVLGVGPLTSSAVVATVPNAQLFQNGRRFSAWLGITPRQHSSGGKTRLGRSTRRGDAYLRTLFVQGARSTLQSALRTEPAKASHLQRWIVALYQRKGYHKTLVAIANKHARIAWVLLARGENYDPNAWQRSARIERNAATA

SEQ ID NO: 438097 - protein, 443 aa, unidentified
MRRCIGLDVHREFAQVAIWEAGVVRQAGRIQTTPEALREFAASLCASDEVVLEATGNTYAIARLLERQVGRVVISNPQKTRAIAEAKVKTDKVDAAVLAQLLAAGFLPSVWLPDAATFALRRQIARRAHVVRQRTRLKNQVQSILHRNLVGRCPAADLFGHKGRAWLAAQDLPQDEHQAVTALLRQLDFHGQELRIVDAELGRVALERDEVRRLLTIPGVDATVALAIVAAVGDFGRFSSPQRLVSYLGLNPRVRQSGGHPAQHGRITKQGRAHARGMLVEAAWAAAKTPGPLRAFSQRVRARRGMQIAVVATARKLVTLCWHLVVKGEDYAFARPSLTDKKLRSLELRAGLPSRRGQKGTAAAYSRKEVRRRERALAEQAELAYRQLVGNWQPKPPPTQPTRKGVAAATGTRRSSPQGGKAARQGFQPQAPALRSGVDHAQP

SEQ ID NO: 438098 - protein, 385 aa, unidentified
MKRNDLSRALVAFDQDSTIVAVVELSLKTWLVSGLVPGLMRQPLKKQPADPDRLLALLQRWRDEAVKAGRAIGRIAVAFEAGRDGFWLARWLRARGIEAYVIHASSLAVSREHRRAKTDRLDTETLMRAFLGWLRGEVRHCSMAAIPTLAQEDAKRPSREHESLVAERTRITNRMTAILVWLGLPRVNIKLRKAAEQLAALRTPEGEPVPPNTLAELHRGLARLAVIRAQIKAIEEARLQRLKAAPAQGTHPMLLMLAKVLGLGIETADMLVHEVLARGLRDERAVARYGGLTGAPDESGSKRREQGLAKAGNGRVRRGMLQLAWRWLMFQKESALAQWYRARTADGRRDTRKIMIVALARKLLIALWRYVTTGELPQGVVLKAA

SEQ ID NO: 438099 - protein, 400 aa, unidentified
MRTVFGIDVSKTSSEVAILVNGEKVHGYTILNDAIGFNRLLRDLKTVHNPEIIFEATGVYSRRLQAFLEECGYAYTRLNPLEAKKQLDSLRVRKTDKIDAEKLAKSQLVHNRKPTYVQEEVYQHLRDLSRFYQNMTEDLVRTKNRLHKVLQVTFPELENLLSTPTGEQYWNLVMAFPCKEFVLSLSQSNLCEVIRQSTSKRISKKRIAYLTDKLIKLAKQSFCAVKKTSPMLEEVRYYAQELLRLSERRQVVLNDMVALAQPLPEYDILRSIPGIAETTATSIIGELGDIRRFQSTNQINAFIGIDLKHYESGNFLAKEHITKRGNPYARKILFKCIHNIASASHTNPCHIADFYEKRKRQSTIASTKPHAIASIHRLIRTMYYLITHNKLYDYSLTQNQ

SEQ ID NO: 438100 - protein, 307 aa, unidentified
MTQDIIGVDIAKDWIDIHRLSSGQSKRIAATGSALARFAAQAGGSLLVLEASGGYERPLMEALAEAGVAFARVNPRQAREFARATGRLAKTDRVDAAMLAEMGRALRLKPSPPRAPERVRLADLMARRDDLSDMRRREANRLKQARDAWIRTDIKAVLRVLERRLARVEAEINAQIETHEALARAAARLQSMPGIGPILAASLVARLPELGRLDRRAIASLAGLAPHACDSGVFRGKRRVWGGRAEVRRSLYLAGFIASRYDPRLRAFRTRLEAAGKPAKVAIVAVARKLLTILNAMFRDNIDYRAA

SEQ ID NO: 438101 - protein, 347 aa, unidentified
MRFYNNQHKYYCGIDLHTRKMYVCILDEKGEIREHRNMKTDRDAFLKAIAPFREDIVVAVECIFTWYWVADLCHNEGIPFVLGHALYMKAIHGGKAKNDKIDSQKIAVLLRGGMMPMAYVYPTKMRATRDLMRRRNHLMRKRSELFAHIQNTNSQYNLPDSFGCMSRPKNRDGIIEQFEQPSVQQNIAVDMEMIKTYDRILSELEKSIIKLANHHDPVSYALLQTIHGVGKIIALIILYEIENIRRFASVQDFASYSRLVKCAKESNGKKCGSGGSKIGNAHLKWAFSEAAVFFTKGNDLAKKYFDRLTAKHGKSKALSILAHKLGRAVYFMLKNKEAFDQKKLLNL

SEQ ID NO: 438102 - protein, 410 aa, unidentified
MNPLYVGIDVSSKSNVAYLMKPDGSKHSNFSIPNTRDGSRQLVKRILSAITSESLTDVVIGLEATSVYGDNLVCFLREDGSLAPYNKKIHVLNPKQVNKFKLSYNDLPKNDYVDSFVIADCLRFGRINKEVYLDDYRYAALKNLTRARFFAVQNLTREKQRFLNQLFKKYSTMAQEKVFSDTFSTTALAVYESFESAEALANMDLHQLTEFIIEKGKKRFPDPDSVAKAIQKAARSSYRLPKTVNDSVNQVLSISISSMRAMESQIKAFDKAIAEQMTLIPNTLTSVNGIGPVYSAGIIAEIGDINRFPNQASLAKYAGLVWSQHQSGDFEAQNTRLIHSGNRYLKYYLCEAALSLVRCDTEYRSFYHRKYNEVNQYQHKRALALTARKLVRLVFRLLKDNCLYRAPESK

SEQ ID NO: 438103 - protein, 382 aa, unidentified
MKCLYSNVACGGMDVHYKFSNVTFRDSAGNIVRRERLDHPERAQLRERINRWPKGTPVVLEASFGWGWLSDLMAEAGLEVHLSNCYKVEQMRKARGLVKTNKKDADLTSLLPLEATKWWEVWRAPRDVRDRREQMRFRSDLVALQTTIKNRIHAMFHRNGIFHEFSDLFNGKGRLFLADICIKGSDYLSSQALQAFRGHILLLAHVRKQLASLERILKRQLEKTLLVRRLKTIDGFGLILSHVMMAEIGQIGRFRNHKALASYSLLAPRANDTGEADPERTPLGRHLGTRGNKTLKWAFIEAAHGAVRHGGKWRQMFDRVTGGGKKDRNRGYIKVARELVKAVYVVWKKDVDYIDNPLPRPGQGSKKSRSGTGQLCRTMVHA

SEQ ID NO: 438104 - protein, 389 aa, unidentified
MLLDHPSDGPTAIRTHIGAIFVSLELSRSTWLVTSLSPGKGEKMSKHSVAAGDMAELLTLFAELRRKAEVRTGQSYPIITIQEAGLDGFWLHRVLQQNGIESHVVDPASIATPRRRRRAKTDRLDGEMLLRALLAYKRGEPRVCAMVVAPSPEEEDRRRICRERRTLIEERITHVNRIKGLLFAQGISDYGPLRRDRRARLEALRTGDGRELPSHLKAQISRELDRIELLLKQIKSVEAAQEALLAAARKPASEKAVPDPVTTLLALKGMGANFAAVLWSEAFYRSFSNRRQVAAYAGLAATPWQSGGIRHEQGVSKAGNPRLRTTMIQFAWLWIRHQPQSTLTRWFKERSQQGRKRAIVALARKLLVALWKYVTQGVVIEGAVMKPAA

SEQ ID NO: 438105 - protein, 354 aa, unidentified
MSSKSTKIEELMSIGVDIGKDVFHLVGFSPEGELVLRKKIRRHQLEQIFETFPRCIVGMEACLSAHFVSRSLRKMGFEPRIIPAIYVKPFNKGQKNDYNDAEAIAEAALRPNLKTVSEKTQDQLDLQALHRVRARLVSRRTATINQIRAFLIEQGITVRRGAASLRNSLPAILNNRSDELSLRMRKLIVCLQQDWIWLDERVKMTTSEIKAVSETEASCQRLMTVPGIGPLISTAMVAAVGNGEAYDRGRDFAAWLGLVPRQHSTGGRTILGRITKRGSRYLRMLFVQAAKVIMMRPKNWPKFSFGAWLEAASLRMQHNKLGVALANKLARIAWSVLRSGRDFDDKENEIATAV

SEQ ID NO: 438106 - protein, 401 aa, unidentified
MQQDQQHDSVDVFVGVDVGKGQHHAVALDRNGKRLYNKAMPNDEAKLRALISELRAHGRLLFVVDQPATIGALPVAIARDEGVLVAYLPGLAMRRIADLHAGEAKTDARDAAIIAEAARSMPHTLRSLRLADEPLAELTMLCGFDDDLAAQITQTSNRIRGLLTQIHPALERVLGPRLDHPAVLDLLERYPSPATLAAASEKTLANRLTKLAPRMGKNLAAEIVQALNEQAVIVPGTQAATIVMPRLAQQLAALRKQRDEVASEVERLVLAHPLWPVLTSMPGVGVRTAARLLTEVAHKAFASAAHLAAYAGLAPVTRRSGSSIRGEHPSRRGNKVLKRALFLSAFAALRDPISRAYYTRKVEQGKRHNQALIALARRRCDVLFAMLRDGTIYQPKAAANA

SEQ ID NO: 438107 - protein, 421 aa, unidentified
MKFKSQDKQNQLIENITVHHIVVGVDIAQETHVARAVNFRGVALGNPLVFSNDEDGFKSLDRWIRDLLASFKLSQVIVGMEPTGHYWFSLAGWLKNKEIEAVLVNPHLVKKNKENRDNTRSKSDKKDALVIADMVKNGYYSPVRFHSSEYEELRVLMANRETVVKRLVSAVNQIHRWVDIVFPELRQVFKILTCKGALLTLRLFPLPADLCKLTPDDVIKGWKKSMKRHSGVRRAHLLIDLAKQTVGSKQASHAYKLHLEQLLEEHELATKQLQRIEEEAKDVVKRIPYSGKILAITGISSIALAGVLGESGDLRGYAHGNALLRHAGLNLTEASSGKWKGQMTLSKRGRPRLRHFLYLITMCMVMSNQEFKALHYHNVQVKKIKKMKSIMKLCGKLARLLVGMTRGDEAYNPNKIFAVAA

SEQ ID NO: 438108 - protein, 428 aa, unidentified
MSQKVEQVIIGVDPHKLSVTIEVVGQREQMLGSGRFTTDRAGYAAMRSYARKWPDRVWAVEGSNGAGRPLAQRLLEDGEYVVDVPAKPAARVRLFDTGHNRKTDAHDAHAVAAVAVRTTTLRVLQHDGELEALRMLTDRREALTRRRVQTVDRLQALLAELLPGQAKRDLTTGQAKTMLASVRPRDIAGKTRRRIASEELAELVSVEAKIKKATAELKSIVLARGSRLMDLHGVGPVVAARVLADVGDVTRFADRNRFASWTGTAPLDASSGEQNRHRLSRAGNRRMNHMIHIAAISQIRLDTDGRAYYRRKRAEGKKPLEAIRCLKRRISDAIYRQLLEDAQRAAVEDVGTGPGGHCRASQNPARSTFPCSSTLRISHFPDPRTRRYAGPVGNRREPVRRRRGMLVWAGTRCVWKPDVPSQRKPLRA

SEQ ID NO: 438109 - protein, 383 aa, unidentified
MSASAQGAVDVHLAAIFVSLELSRSTWLVTSLSPGGGEKMSKHSVHSGDVTGLLDHFSRLQRRAQDRTGRAFPIIVIQEAGLDGFWIHRVLEKESIESHVVDAASILTSRRRRRAKTDRIDGEALLRTLLAYKRGEARVCAMVRAPSPEEEDRRRLCRERKTLVAERVEHTNRIKGLLFSQGVSDYEPLHRDRRQRLDELTTGDGRSLPAHLKAQIDRELDRLELLLTHLKAVESERDALLAPMGDANPALVAALSGLRGIGPEFASMLWLECFFRNFSNRRQVAAYAGLAPTPWQSGSVQHEQGLPKSGNPRLRTTMIQLAWLWLRYQPTSELSLWFRKRVNDNGGRGKKTTIVALARKLLVALWKFVNNGVVIEGAVMRTA

SEQ ID NO: 438110 - protein, 412 aa, unidentified
MLFVGDDWAEDHHDVEIVAEDGRRLAARRLPEGLAGMSQLHALIAGYLPGEWADLPPGEAARRVKIGIDTERGPWVQALVAAGYEVFPVNPMSVARYRERHSTSGAKSDAADAHLLAEMVRLDRAHHRPVAGDSPQAEAIKLAARAHQSLIWDRSRHVLRLRAALREFFPAALQVFADLDAPDALELLGRAPDPDRAAALSRAKIAAALARANRRGAAAKAQQIQGILRAPQLRQPPAVQDAYATIVSGQIRLITALNAQIAELGEVVAAHFGRHRDADIYASQPGLGVILSARVLAEFGDDPHRFADAKARKNYAGTSPITRASGTRKIVLARYARNRRLADALHQWAFCSMRGSPGARAYYQALRARGIGHQAALRQLGNRLVGILHGCLKTQTPYDETTAWAHHTPAAA

SEQ ID NO: 438111 - protein, 393 aa, unidentified
MICVGIDVAKDKHDCFILSSEGEVLADVFTIPNNAEGFDTLLQTIRRCARPEDKIKVGLEATGHYSYNILGFLLNEGLDTYVINPLHTNLYRKSLSLRKTKTDRVDARTIAAMLMSDVDLKSYTDTAYHNEELKSLTRYRFDKVRERAKLKQSVSRLVTILFPELEKLVSTLHTASVYALLSEFPGAKQVAGAHLTHLKAVLHDASKGRYGRDMATTFRDAARCSVGSVMPAKSLELRHTIRLIHELDAEIEDIEAAIQSMMDDIQSPITTIPGMGVRMGAMILAEIGDFSRFDSPDKILAYAGMSPSTYQSGQFSLSGAYSHMEKRGSRYLRYALYNATKYVCLWEPTFAAYLTKKRAEGKHYNVALSHATKKLVRLIYALEKSKRPYSTAA

SEQ ID NO: 438112 - protein, 341 aa, unidentified
MGQAHTIGLDIAKRVFQAHGADASGRVVFRKRLVRAKVLAFFAAQPPCTVAMEACAGAHHGARELGKLGHTVRLIPPAYVKPYVKRHKNDRADAEAICEAAQRPSMRFVPVKTEEQQANGVVFRARDLLVRQRTQCINALRGHLSEYGYVFPQGITHAEAVIAHVEDPDSAVPESARAVLKVLIGTFQALEAQIQALDAEITQRAKADPVARRLMTIPGIGPIAATAITALVPAPEGFRAGRDFAAWLGLTPLQKSTGGKQKLGAVSKMGERTIRRLLILGASAVVRWAGQRGTPAGSWLARMLARKPKMLVTVALANKTARIVWALLVKGGVYRAPAPAA

SEQ ID NO: 438113 - protein, 354 aa, unidentified
MALELLAIDLGKRAFHIYGIDTDGVILSRKVSRAKLAEVVGDLEPTAIAMEACASAHHWARCWLAASRQVRLINPRFVKPFVKGSKNDAVDAEAIFEAAMRPTMRFVPVKSTDQRDLQSLHRARDRLICQRTALINHTRGLLAEYGVVLPQGPRRFMAQAPTAIAGADLSDLARAIFGELMDQLDDLDRRIQKLDAMIVTLCRTNETCRRLTKLPGVGPIIVTAIVGSVNDGRQFRSGREMAAWIGLVPRQYTTGGKPRLGGIGRRANHYLRRQLIHGARAIVSRSDKHDDRQSTWLKALVARRGFNRTIVALANKTARIAWVLLSRKQELCSSLRCSTLLLCTQGPDRMRGEY

SEQ ID NO: 438114 - protein, 368 aa, unidentified
MKQQTSATTETIIKGRNIIDFTGETIYVGIDVHEKDFQVAKVLDGICLGNHRMPANSKALVDHLNSRYPGATFKCVYESCAWGFTLQRELSAAGIECIVVHAADVSSSDKEKKRKTDNVDALKLARNLAAHQLTAIHVPDEDLQKERNLIRFRKKLVGDLNRSKNRLKSLLKYQGINIPEQLGKKNNWSYNFMNWIEDEAKKDILLQDTLLLMLEEIKLLRQLLLKTEKALRKLRQNKYDEQSKLLMTAPGVGRTTAMLFLLEIGDIKRFGPFDKLNDFVGFCPDTDSSGDTERDTGITSRRHKQLRSDLIEAAWTAIRIDPALMDAYQKLTKRMKGHHAIVRIARKLLRRMRAMLLTGQPYQIGIIA

SEQ ID NO: 438115 - protein, 344 aa, unidentified
MSAEYDGQQIVGIDLHRRRSVIVRMDEAGNRLDTVRIDNDPMALAAQIGKAGEAPQVVLEATYGWYWAADVLQDAGAEVHLAHPLGVKGFAYRRVKNDVRDAADLADLLRMNRLPESWIAPPQVRELRETVRHRAKLVAWRSGLKASVHGVLAKQGLHPQVTDLFGVAGRQWLSAAPLDGAYRLRVDALLRLIDAIDFEITAVAGPLRAALADHAGFRALQKVPGVGPTLGAIFVAEIGDVTRFASPAHLSSWAGLTPKHRESDTVVRRGPITKQGSTLVRWAAVEAAQGARNADWLTETRTRIAERRGRNIATVAVARKLLTYVYYGLRDGRIRALEQTPTAA

SEQ ID NO: 438116 - protein, 359 aa, unidentified
MLQTMTYVGLDVHARSVHAAAIDVGSGELCRARFGGGSEEVIGWLQALPQPLRACYEAGPTGFGLYRAAEAAGVWVEVIAPSKTPRASGDRIKSDRKDAELLARLLLAGQLKSVAVPPAAVEAARHLARAREQVRGDLMRCRHRVSKLLLLHGRVYEGSAWTKRHRGWLERQRFDQAATELAYLDTLAAVDGLVARKAALDERLSRLAREGEWWPTVARLRCFRGIDTLTAFVLALEIGDFARFQRPAQLASWLGLVPSLDQSGESRRQGAITKTGSGYARRLLVEAAWHYLRQPGAGVALAERRAGQPDHVLQIVLRAQRRLHRLHQRLRERGKPGNVTTVAVARELACFLWAAAVAD

SEQ ID NO: 438117 - protein, 345 aa, unidentified
MQAVTIGIDLAKHVFQVHGVSAGDKVVFSKPLRRAQMLPFFARLKPCLIGMEACASAHYWARELKKIGHEVRLMPAKDVKAYVKRNKNDAIDAAACCEAVRRPVVRTVPVKTPEQQARLMQHRVRDLLIRQRTQAINALRSHLAELGIVAAQGYDGLKTLLSIVADESDARLPEDGRASLSALVNQIAACQAEISAIEKRLLAQHRKNEDSKRLETIPGIGIIGASAIVATVPDASVFKTGRDFAAWIGIVSREDSTGGKQRLGPISKQGDRYLRRILILGALSVVKRARCCPENYPWLTKLLARKPAKVAAVALANKMARIAWAVLTKKDTYHVPQITAALIPA

SEQ ID NO: 438118 - protein, 340 aa, unidentified
MRQLYVASDLHGNNNLMGIIDSEGKRIFKKKLPNDPLLINDILKPFKEEIVGIVVESTYNWYWLVDALMEEGYKVHLANPAAIQQYSGLKHADDKHDAFWLAEMLRLGILPEGYIYPKEERPVRDLLRKRGHLVRLRTSLILSLENIISRNFGSKLPVNHVKGLRKDRVTPLFKGNEDLALAGRVSKETIDFLTHQIRQIEGVVEKRIQLKEAYRYLLTLHGVGKILGLTIMLETGPIGRFETVGDYTSYCRKVPSQWISNGKRKGSGNRKNGNKYLSWAYAEASDFARRLHPESRAYYNRKMQQSNPAVAHSALSHKLARAAYYIMRDQVAFRPEKLFG

SEQ ID NO: 438119 - protein, 347 aa, unidentified
MRFYTKPHKFYCGIDLHARTMYVCILNRDGEILVHRDLKAAPEPFLKAIAPYRENLVVCVECIFTWYWLADLCAREGIPFVLGHALYMKAIHGGKAKNDRIDARKIAVLLRGGMIPQAYVYPAEMRATRDLLRRRMHLMRHRAGLLAHIQNTNSQYNLPQIGKKLAYKANREGVAERFPDPAVQKSIEVDLTLIGSYDRLLTALELDIVNTAKAHDAQTFYRLRSIPGVGKILALVLLYEIHDIHRFPRVQEFVSYCRLVKCAKESAGKRYGTSGAKIGNAYLKWAFSEAAVLCLRNNPAGQKYLARLAKKHGKGKALTVLAHKLARAVYDMCKRDTAFDLDKFLNA

SEQ ID NO: 438120 - protein, 489 aa, unidentified
MKAKAVSVSRDRRGLPAVMRPALPHVVELASQTTQKRKTDTMKDYILRTHAAVEPQMTPTSQRIDQKPDLAASVAERQLQPHPQVDPKAPTSLADVSSRGSQPCALSAGPVLFIGMDVHNDSIAVSLAPSDSIEVRRYGIIGGSHDDVLKLAKKLQAAHPDRALHFCYEAGPRGYPLCRFLRAMGYSCILVAPSKIPRKPGERVKTDRRDADQLARLYRAGELSAIYVPDPHDEAVRDLIRARYQISRQQHRARQQLKMFLLRHNLRYPGKTAWSPAHLRYLARVKLPFAEQQFVFQEMLDVITEAGKRLERYEAQLPGVLAGWRWEPVVRALMSLRGVALLNAATLVAELGDLNRFPTANQLMSFLGLVPSEETTGNDRRQGGITKMGNGIARRAIIEAAWHYRLPARISPTLQVRQEGLPKTVTQAAWEAQTRLHRRFKHLTGVRHKKSQVAAAALGRELAGFVWAIARMVKPNALTDEKRTALPGA

SEQ ID NO: 438121 - protein, 343 aa, unidentified
MFAMIGIDPHKATHTAVAIDNDENVIGEFTLRASRSQAQRLCDWASGFAKREWAVESANGLGYLIGQQLVAAGETVFDVPPVLASRIRLMGSGRSQKNDPNDARSIAIAALRSDRLAIVTPDDHVRVLRLLVKRHRDMARLRNKHASRLHALLGELEAGGIATKISVTNASRLLDGVAAGGEATQYRVLIAREFVDDIARLDVTLRASKKRIADAVSASGTSLTSIVGIGPIGAATIIGYTNDVARFPTRGHYATYNATAPIEVSSAGHTRHRLNLRGNRILNHAIHIAAVTQLRHDTRGRTYYNKKIVEGKTNKEALRALKRRISDAVYQQLVADAQRHQTG

SEQ ID NO: 438122 - protein, 424 aa, unidentified
MKVTYQTCCGVDVHKSFLVATIVKTTGGIEPSYQKERFSTFNNSILEFKQWLLDNDCHDVCMESTGKYWVPVFNLLEDDINVVIANPKWVKAVKGNKDDTKDSKWIGDLFRLGLVKGSYIPCKKVRILREYTRYRYKLVSCRSSEKNRYQNALTVCNVALDSVVSDIFGKSSTSIIDYLLEQSGSSINHEEIASKLLRSLKSKEDAVIESVEGYQMTDAQKYRMRLVRAHMDYITAEINDVDKMIENMISSNTDFENAVQFLCTIPGVKRDSAITIISEIGTDMSQFSSSRRLCCWAGLTPGSNESAGKKKSVRFTRAGVYLKPALVQCAHAAVKSDKSPYYKKKYESLVKRRGKKRAIIAIARMILTAIYQMLSTGEQWNPSDLYKIDMPVALVEKQKAKAIKQAKKLLQREGLLPPDEPLAS

SEQ ID NO: 438123 - protein, 306 aa, unidentified
MENIALIGIDLGKNSFHIHCQDRRGKAVYRKKFTRSKLIEFLATCPATTIAMEACGGSHFMARKLEELGHFPKLISPQFVRPFVKSNKNDFVDAEAICEAASRPSMRFVQPRTESQQAMRALHRVRESLVQDKVKTTNQMHAFLLEFGLSVPRGSAVISRLSTILEDNNLPLYLSQLLLKLQQHYHYLVEQIKELESQLKRKLDEDEVGQRLLSIPCVGTLTASTISTEIGDGKQYASSRDFAAATGLVPRQYSTGGADNIVGHQQARQQEDTNLAGSVRQSIYTKTGTPVRQVGRLGPGVTVPEK

SEQ ID NO: 438124 - protein, 410 aa, unidentified
MRRISNRVAGLDVHRDSVTACVEIFDGVEVSVIKERFSTTAKGVRGLSEWLAEADVELVVMESTGVYWKPVFYGLEGRFDDMWLVNAHHVKNVPGRKTDMSDAEWLADVAAHGMVRASMVPEPEIRALRELTRYRKTQIVARGVEMQRLEKILQDAGIKLTSVASKVWSKSSRAMIEMLISGQADPEVLAELAKGRMRPKIPALVEALEGRWGHQHSVVAKAIIGHIDFLDTTIDELSDEIVEATCPFDDLVRLWSTIPGVSTRTAEMMVAEIGADMGRFPSAKHLAAWAGLAPASHESAGKRRPAGTRQGSRHLQGALVEAARAAARTKRTFLSERYKRIARRRGPNKAAVAIAHSMLVAAYHMAITGEIYRDLGSGYYDNRKDPKAKVNRHVKELQAAGYTVNLTPAA

SEQ ID NO: 438125 - protein, 403 aa, unidentified
MRFAGVDVASQTHVVAVMTAASEILVKPTSFGEDAAGYEKLFTLLGPPTDILVAMEATGHYARNLFAALCARGYPVALLNPIRTRRFAEEDLRRAKNDSIDALGIARFAAQKRPALTPPIDDATDQLREITHLFARFTQDFGDRVRQIHRLVDLGFPEFTRHVRNLSTHRATAILGAYPSAQAFSESCLRKLAAMRYDGSHAIGRPLACALVLAAKTSVGRHHGPAYHSEMRYLCQDLDRLRLQLRELHEEIDRRVAEHPVGTLLTTIDGLGTIAVARILAAVGDPARLRSGAALAAYVGAVPGTNKSGLQWASRASLSPLGNARLRRTLFMTTLGAVRRNPWLAAYYERLRARGKLPKVALIAAMRKLLMAVYSVAKHRQPFVPRLASNNVTPPDLDASQRS

SEQ ID NO: 438126 - protein, 336 aa, unidentified
MDYCGMDVGKKSSNFCIVDAKRRILREGKVRNRVPELARTFGALPPMRIVLEASGKTFWLAERLREFGHEPIVVDPGRTKAIGSARIKHDKLDARVLAELCAADLLAVVEPPTEEQRHSRMSVVARDGIVRSRVRLVNMVRGMLDSEGFEVRKCSLDTFVKKATEYWEELPEEMASALEPLITAIHMLTEQIAHCDSRLAEAVSKDDDAKLLMTTPGVGPVVVACFMMAVRDPGRFRSGRQVGAYLGLVPSLYQSRQTFRRGRITKRGNSAARWALCCAANVLLGPKMRGDCALREWGLRLVERLGRKKAVTAVARKLAVVMWAMWKKRNCLAYAT

SEQ ID NO: 438127 - protein, 355 aa, unidentified
MNSEKYIGLDVHQATISVAVMDSLGKVVMESILETKASTLLEFFAGLRGSLFVTFEEGTWAAWLYDLLKPHVTEVLVCNPRKIPLLKQGNKSDKIDARKLAERLRLHDLKPVYHGETGIRMLRELARSYLTVVKDLSRVMNRLKALYRSWAIPCAGRDVYYRRHRSAWLDKIPEAGTRHRAEQLYQQLDLLQHLRQQARRELLSESRKHVITAKLRKIPSLGPIRSALAVALIQTPHRFRSKRQLWTYSGLGLETRDSGEYHFIKGQPRRRKKQATIRGLNKDYNHDLKGLFKGAATRASVKPGPFQEFYQRALAKGIKPTMVRLTLARKIAAITLTLWKKGEDFDINKLNSQAA

SEQ ID NO: 438128 - protein, 340 aa, unidentified
MGRKGVERGGKDKSMQSDHILGIDVSKDKLVCSLVRTGDKERVWLDNFSNNHDGINRLLARVPAGSPIILEPTSWYGNALVAKASASGRTVFLAPGRQAKAFRCSIQTRAKTDPKDSFGLALFGLSRRLWEYRLKSKSVDELDQHLSYRKQLSRMIASLGLQARSMPYASDEIRPTITELKGRLTGLDKKIASLVKADPQFHMVGKLMAVPGFGPVTSAAVGSRLVHKQFTNAKQFVAYTGMDIGLIESGQRKGTTGITKDGDAELRRLLYVAAQASLRVKNSPFQTIYVRELAKGRHKIQAICTIARKMAKLAWSMVYYQTAYDPERIYKDRKGKQAQN

SEQ ID NO: 438129 - protein, 343 aa, unidentified
MEHFAGIDVSLEQSSVCVMDATGKIVREAKVASEPEALVRFFGGLGFPVVRIGLEAGPLSQWLHAGLSEAGLMTVLLETRHVKAALSAMVVKTDRKDARGIAQLLRMGWFRPVHCKSADAQEVRALLVGRKLLQAKLHDVELSIRGILRGFGLKVGKVSKGQFAARVQELIAGQVMLETVIGAMLTARASLQSEFMRLHRKMLAIVREDAVCRRLMTVPGVGAVVALTFTSAIDDPARFSSSKAVGPHFGLTPKKYQSGETDVIGAISKTGDALVRGALYEAAQVMLTRTTSFSTLKRWALEVAKRRGMMRAKVALARKLACVLHRMWVDGTDFRFGKETATA

SEQ ID NO: 438130 - protein, 417 aa, unidentified
MQVVHARCCGLDVHKKSVVACLLLTEPDGSVRRQVRTFGTMTADLLALDDWLTGHGVTQIAMESTGVYWRPIFNILEDEERTVTLVNAQHLKAVPGHKTDVKDSEWLADLLRHGLVKASFIPPAPIRELRELTRARKTLVQQRADAVNRIHKLLEGANIKLASVASNILGKSGRAMLDALLAGETDLDALAALAQGQLRKKRAALRQALDGRLAPHQHLLLAQLLTQIDFLSEQIAQLAAAITDHLTPMQEAVDLLKTIPGVSATAAAAIIAEIGVDMGRFPSAKHLASWAGLCPGNKQSGGKRLKEQTTSGNVWLKGVLSECAWAAARTKETYLAAQFKRLARRRGVYKAIVAVAHSLLVIIYHLLQRGEAYRELGGDYFAQIDSQRAEGYHIKRLTALGYQVTLTPLSDAEPIPA

SEQ ID NO: 438131 - protein, 347 aa, unidentified
MKYYAGLDVSLKETAICIVDGRRRIVKEGKVESEPGTIAAWLRNVDCNLELVGLEAGSLAPALYDGLSDEDLPVVCLDARHLKNATSAMPVKTDRIDARNIAWALQAGWFRAVHVKTQKTHKLRALLRSRAMLVKTRRTLDNHLRGILKAFGIKVGRVAVGRFDVRVRELVAGDPVLEETVNAVLLTRHEVTVRLAELHQLVMEFTKADPVCRRLMSVPGVGPVTALAYRTAVEEPKRFRKSSLLGAHFGLTPRKYASGQTDRNGGITRCGDRMVRSLLCEAATVLLTRVQKWNWLKRWGMQIAQRRGIRRAQIAVARRLAVILHRLWIDGTEFHGSRANAGNHATA

SEQ ID NO: 438132 - protein, 415 aa, unidentified
MEGMEVLHEHVAGIDVHRKSLSVCVRHVGADRRIRQEVRTFGTMTRDLLEVRDWLQAERVTHVAMEATGVLWKPVYNLLEDRVEVLLVNARHVKQVEGRKTDVKDCQWLAQLLACGLLRASFIPPKPQRELRDLTRMRAQLVAGRTQVVNRLHKVLEDANIQLGAVASDILGKSGREMIEALIQGERNVETMAQMARRRMRAKLPQLRLALDGRVNEHHQFLLEILLDQYDGIDHQIERLTARIENVCASFAPAIEKIVEIPGYDQTSAQNVVAEIGTDMSRFGDDEHLCSWATICPGNHQSAGKQTHGRTVKGNRWLKAALCQSAWAAACTKNSYFGAQFHRLAGRRGKKRAVIAVAHAQLKVIYHLLSSEQSYQDLGADYFLKRNADRAARYHRKVLESLGYTVIPPEADKAA

SEQ ID NO: 438133 - protein, 411 aa, unidentified
MSEPDKISDHGYVVFCGLDVGKAVHHACALDPSGKRLHDKALPNDEAALVEVFEKLRVHGRVLVIVDQPASIGALPIAVARSLGIDLAYLPGLAMRRIADLHPGEGKTDARDAYVIADAARTMPHTLRRVGTDDDTLAELTVLAGYDDDLAAQSTRLTNRLRDALLHIHPALERLVGPRLERGGVLDLIVAAPTPQALRDLGVDGITAIMRARSPRLAKTIPVKILAALDAQTVVVAGTPAFGRVIGGVAAQLRDVRAERDTLAAELEARLEAHPLAEVLTSMPGNGFRTALKILTIVGDGAAFPTAGHLAAYAGLAPVTRRSGSSIKGETRSQRGNHALKSALFLSAFASLADPTSRAYYDRKRAQGKRHNAALICLARRRVDVIYAMLRDRKPYQQPMPTEPDTSPAAA

SEQ ID NO: 438134 - protein, 311 aa, unidentified
MASFLGIDVSSLSLDALVRPQGIKISVRNDPAGFEELVKSLRGLSIKRVLLEATGGYERDVMRFLQDANYKVIRVNPKRARWFADSLGIKAKTDAIDAAVLAHFAEVIPDKPTLKTSPERALLRELLQQRDRLVQQRDDDRRRLKQAQSAMVAIFLKTNLQHFASQIKLVEQAIKRQATVLNDERIAKLDEVKGIGMVTATKLVALLPELGHVESREIASLVGVAPFNHDSGKSVGKRFISGGRFEVRRALYMACLVAVKHNPTLKARYEALRGRGKLAKVALVACMRIFIVRLNAMLRSGTPWRDDLPQP

SEQ ID NO: 438135 - protein, 335 aa, unidentified
MTKVMGPVFVGIDVSARTLVVALERDHQPGRQRREFPNTAAGHQVLVQWLSKSATAVQVCLEATGLYSLDLALALDRAEGIEVRVANPRAIADFAKALLQRSKTDQLDAEVMLEFVRRMPFVPWQPPKPHRLNLRALMRRITGLKLASQQEKNRLHSVSQSAAITPLVRKDIQSHLVQLERHIEKLEQQAEAIVQADPELAQQFRHLVSVRGIARVSALHILAELVVLAPDMTARQWVAHAGLDPRHHDSGPSIHKPARISRAGNRYLTAALFMPALVATQHDPNIRAFYHKLVDRGKTKMQAIVAVMRKLLHALHGMLHTDSDFVGEKFYVIPS

SEQ ID NO: 438136 - protein, 440 aa, unidentified
MRIMYERCCGLDIHKSSIAACALITEKGKPQEETRRFGTMTGDLRELAGWLQQKGIRHVAMESTGVYWKPVWNILEPAGFELLLANAQEVKVVPGRKTDQKDSQWIADLHKHGLLRKSFVPPRAIRDLRDLTRTRAILTQEHTSVCNRIQKVLEDANIKLGSVASDVFGVSGRAILRALMKEEKDPEVLAELSKGTLRKKIPQLRRALEGQITAHHRSLLTGHWNRMEFLERQIADLETQIAQRMKPMPEEMTLTIQNAAEEPPLPLSPREEAIQLWMEIPGVGWTAACSMVAELGVNMDQFPSAAHVASWAGLCPGNNESAGKRLSGKTRKGNVWLRRTMCEVAWAASHTKDSYFAAQFRRIASRRGNKRALVALAHSILVTAYHILKHKRHYMELGGDFFDVINRDKVRNRLVQRLTKLGFEVKLKPKDAVENTSATN

SEQ ID NO: 438137 - protein, 323 aa, unidentified
MNKDIKYFGIDISHLVFDVTDSDGNYYQFKNTISGFKKFVKLLTKHSHCVMEATGYYHYQLAYYLLESCFKVSVENPLSVKRFIQMRLSKVKTDKSDSKLICEYAKQVELKLWKGNSKHQTESLQITRLLAVYTKQSTMLKNKIHSESVLGNPSKAVVSSLKRSLKQVQKEINLLECKLLILVKEEHQDVLTRLKSIPGIGNKTAIMLVVLTDGFERFTSGSELCSYAGLTPVIRKSGSSVNGRSRISKIGNQKLRNLLFMCSFNACKYNKACREIYERIVAKGKSKKLALIAVCNKLLKQAFAIAKSGLIYDDSHRSTLVKN

SEQ ID NO: 438138 - protein, 423 aa, unidentified
MMKLKYSICCGLDVHKNVIVATIVTTNKDGISEYLQKSFSTINSDIQRFHNWLIENNCYHVCMESTGKYWIPIFNYLENDIDVCLTHPKYVKAIKGKKTDKKDSKWIADLYKFDLVRCSFIPPKDFRQLRELSRYRFKLVCMKSSEKNRIQNCMTISNVGIASVLSDPFGKTATEIISYLLEHTADSMDEKAVRKLIKKGAKSKSDEIIEAIKGYTIETDQAKKLELARGHLEYLDDMITQTEVELYVRIKPYYEFVEFVSTMPGMTELSSTIVLAETGVDMDIFDDAKHLCSWCGLSPANNESAGKKKSVRIAKAGDYLKPMMVQCALAAIKSKKQPYFAIKYGRIKKRRGHKKAIIAIARMMMVCIYHMVSEKKPFPPTDYEELMDPQNHVESVVLNENNVFAYLESLGYDSSKLVKRNDN

SEQ ID NO: 438139 - protein, 365 aa, unidentified
MKKSSTAAAASKKNFNQKLTIGLDLGDRSSWYCVLDEAGEIMSEQKLSTTPKAMKDVFTAMPRSRVALETGTHSPWVSRLLEELGHEVIVAHARNVRLIGESRRKDDRLDARTLARLARIDPQLLSPVKHRSAQAQAELTVIRARASLVRARTALVNAARGLTKSYGERILGCNPRNLGMEKVQTLSPELQAALGPLLQALESLSERITEYNQQIEAIAQRSYPQTALLKQVKGVGTLIALTYVLTLEDPYRFRKSRDAGCYIGLQPGRRNSGQSQPQMHISKEGDSYLRTLLVQGAHHILGPFGPDSDLRRWGLKLAERGGKNGKKRAIVATARKLAVLLHRLWVTGEVYEPLRNNQRTMSAAA

SEQ ID NO: 438140 - protein, 370 aa, unidentified
MLDTTTFVGLDVHARSIKAVSLDVMTGEVRAATFGYDAGAVAGWVRSVDPKAKCVYESGVTGFDLQKRLSGLGVDCVVGAVSKMIKPSADRRRKNDRNDAEFLARMLSVGNVVEVWVPDDECEAARDLTRALEDARDDLSRSKQRLSKFLLRHGLVFDERTPTGRRKGNWTRAHWSWIESIRFAERADNDVLAYYVDAVRRAAEEKARLEGLVEAEARKPRWRKRVDSLRCLKGVDTATAADLVFEAGEFSRFRNARSFAAWVGLTPSEHSSGESDRRGAITKAGNKHLRKTLVEAAWHYLTCSGRPKGLAKVQAPDRVARRHAAKGVRRLVERREALLARGVHGNKANVATARELACWVWAVGLMAEEA

SEQ ID NO: 438141 - protein, 411 aa, unidentified
MRLFLGDDWAEDHHDVEVMDERGRVLARARLPEGVAGMARLHELIGEQLGEGADDAEVVIGTGTDRGPWVGALVAAGYTVYGVNPLQASRYRERHGVSGAKSDRGDAHMLTDMVRTDSRQLRAVAGDSPDAEAVKVVARTRKTLIWERTRQVQRLRHQLREYFPAALEAFDDLDAPDALELLGKAPDPAKAAKLTRAQISAALKRARRRDIPGKATVILAALRSAQLGQPPAVTNAYAVTVRSLVAVITVLNEQVKTLQGQVEADFGRHPDAEIYLSQPGLGPILGARVLGEFGDDPDRYASGKARKNYAGTSPITRASGKRKIVAARFIRNNRLTDALMAQAFAALGVSPGARALYDAERASGTEHNPALRKLASRLVGILHGCLKTRTLYDEATAWPYREKTPQSDIAA

SEQ ID NO: 438142 - protein, 348 aa, unidentified
MNILKQVLGIDVAQKELVVCLGRLNNDLSIDLYANKVFKNTENGFVSLIKWLNKQIIESVKVKFVMEATGVYHQKFAYYLVENGFDVSIVLPNKISNYMRTLENRTITDKTCAEAIAQFGLERKLDTWKRPKLIYKKLQQLTRERDQIVDERVMVKNQLHAENAEAEPNVNSLKRIKARINFLSKQEKEIKDEIEKCIEKEDAIKAELANITSIPGVGRLTATIILAETNGFELIRNKKQLVSYAGLDVREKQSGTSVKGKPRISKKGNKYIRKAMHFPSLVAIKHEQNYKDIYARLVSKNGIKMKGIVAVQRKLLELIFILFKNKTTYQNNYEIEKRAQLQKVENAL

SEQ ID NO: 438143 - protein, 391 aa, unidentified
MTILVGIDVAKDKHDCFFMNSEGEVLAKPFTIFNNKEGFDFLYEKIQSVSSSDNIKVGLEATGHYSYNIIGFLLNKDLATFILNPLHTNLYRKSLSLRKTKTDKIDSKTIAMMLLSDVSLKSYSDISYHNEDLKSLTRYRFSKVEERAKLKTSLSRLAQILFPELEKLVPTLHMTSIYQLLEEFPSASAIASAHLTRLTKLLSKASKGHYNRETAIKIREAAKNSIGSNMPAKSLELKHTIKLIRALTIDIGEIEAEISKMMDKIASPITTIPGIGRNIGAMIISEIGDFSRFSSPDKILAYAGFSPSIYQSGKLDNCYAHMEKRGSRYLRYALFHAAKLVCHWDKTFADYLAKKRAEGKHYYVAISHAVKKLVRVIFHIEKTKQAFLKAS

SEQ ID NO: 438144 - protein, 342 aa, unidentified
MTEVSIIGLDLAKNVFQAHGAGADGAVVFRRKISRAQLLKFLGERAPCVVAMEACARSHHWGRAIGDLGHEIRLIPPAYVKPFVKRQKNDLADAEAIAEAASRPTMRFVAVKSEEQQAAAMAYRTRDLLVRQRTQTINALRAHLAEQGIVAPAGPAHVGRLAAVVDGDDGALPATVRDLARLLLAQVADLSEKVAGLDVDLRRRAGTDDTARRLTTIPGVGPITAAAITTFAPPMETFSKGRDFAAWVGLTPRQHSSGGKERLGRTSKMGQRDIRRLLIVGAVAVVRWAARKGAPEGSWLARMLARKPKMLVAVALANRMARTAWALMRKSEDYRDPAMPTA

SEQ ID NO: 438145 - protein, 411 aa, unidentified
MEAAVITAVGIDVSKSKSTVAVRRPGGEIVLRPFEIHHTNSDLKKLASTLKKLGGDIRIVMEHTSTYWRPIALTLKEAGFFVSVVNAMLIHDFSDNTIRKLKTDRADALKIANYALTFWDTLPPFNNEEETRLLLKMQSRANERITATATALRNGLIALADQTFPGVNIAFDPNTKNANGHEKWVDFFLRYWHKDCVCQYSMEAFTESYRGWCKRKNYKFRTDTAHKIYLLAQEGVATLPKCESTKMLITQACKSLNAVCEAKQSTQLEMQRLTVMLPEYEVVMQMEGAGPITGPALMAEIGDVRRFKNKKALVAFAGIDAPPFQSGAFESKSRHVSKRGSPHLRRTIFIVSNIILTRSNPENAVYCFMDKKRSEGKHYYVYTVAGSAKFLRVYYARVTEFLRSQPSPDAC

SEQ ID NO: 438146 - protein, 343 aa, unidentified
MLYVGLDVHQRFSAVCILDKNGKVVNRMAIRGHRAKVVEALGKLSEPFAVCYEASCGYGWLHDQLRRVASRVVVAHPGQLRLIFRSKKKNDRVDAEKLAKLLFLDEVPTVHVPSVDVRSWRNLIEFRNRLVGKRTRVKNALRALLRGHGVEAPTAKRLWTAKGCSWLSELVFPTSHACLQRDLLLDDVTTCDAQIARVEKELNVIAEEHPGVYLLRTIPGVGPRTAEAVVAYIDDGKRFSRNKKIGSYFGLVPCQDQSAGLNRLGHITRQGPATVRRLLAEAAWQGIRRSPQIRAYFERIQRGDRNRKKIALVATAHYLARVMLSMLCTGECWRWDQEQEKAA

SEQ ID NO: 438147 - protein, 456 aa, unidentified
MARKRKSSKKKIGAPVLHCLNLNAAGVDVGATEIYIAVPVDRDPQPVRHFSTFTEDLHAVATWLKACKIETVAMESTGVYWIPLFQVLEARGFTVVLVNARHVKNVPGRKSDVSDCQWLQYLHTVGLLRGSFRPEQAVCTVRSILRHRDSLVQMASSHVQHMQKALDQMNLQLHHVINDITGLTGLTIIKAILAGERNPHTLAALRDRRVKATEDTIAKSLVGDYRREHLFTLSQSLTAFRHYQELIGACDYEIEQYLEAFESKVDPREGSLPESKNEQEPSDDASRFDLGSHLHRIFGVDLTRIPGINILTTQTLLAEIGPDLSRFGSAPSFTSWLGLCPDNRVSGGKVLSVKTRKVKNRAATALRMAAQSLHRSQSYLGHFYRRMRAKLGAPKAITATAHKLARIIYHMVTMGQAYDETVCARNEIQNRLRLEARLRKQAREMGFQLVLAKTSG

SEQ ID NO: 438148 - protein, 412 aa, unidentified
MDVIVQRPAALDVHKEQVTACVRFPAPDDSREQDVHEFKTTVGGLLVLHDWLKAHGVTQVAMEATGVYWKPVWAVLEDSFDCLLVNARHVKQVPGRKTDVKDAEWLCQLLEAGLLRRSFVPPKPIRALRNFTRYRKAQIKERQREANRLHKALEDTGIKLDCVATDILGKSGRAMLDALCQGTTDPEVLAELAKGRLRAKIPALREALEGRFDAQHALLIGAILAHLDFLDEQIERLSEAIEEQLRPFQPAVDLLRTLGGIETRTAQNIIAEIGTDMSVFPSAGHCASWAGQCSGNDQSAGKRRSGRSRKGSKWLNDALKDAAMGAIRTNDSYLQAQYRRLKPRIGHGRALGAVKHSIICAIWHMLSTGELYRDLGGDYFRKRDPERQTKRLIAQLERLGHKVTLEALAEAA

SEQ ID NO: 438149 - protein, 390 aa, unidentified
MSQPNDSNKSVIPLEQDGTMIAVIEMGQASWLVAGIVPGLERQPLKKIGSDEQALFQLLRRWRNEAVQAGRTIKRLVVAYEAGRDGFWLARWLRAREIEAYVIHPNSVAVSREHRRAKTDRLDTELLKRAFLGWLRGEAGHCSMAAIPTIEEEDARRPNRERENLVGERTRIVNRIKATLARFGIRSFKFTLRHADERLNDLRTAEAGSLPANTHAELRRDIARLRVVGDQIKEIEQQRLQRIKQAAPSEKGPHAMTRLLARVIGIGVETADMLVHEILSRQLRDRKAVARYAGLTGSPDESGKRRREKGLSRAGNARVRRGMIQLAWRFLMFQKGSALAQWYRARTADVRGGTRKTMIVALARKLLIALWRMVTTGEISEGISLRPAVA

SEQ ID NO: 438150 - protein, 314 aa, unidentified
MNSVTLGIDLGKRWFHVVGCDAAGKVVLREKLGRNQLLQLMAQHPPCLVGIETCCGSQYLARKFQGFGHDVKLLPAQYVKPFVKSQKNDFNDAQAIAEAVRLPTMRFVPLKSEEQMDVQALHRARERMLQQRLALTNQIRGLLLDRGIEIAQGFYALRTVLPALLEKEDSGLTPMMRDLGRMLLDMWNRTETTIEQMNDRLKCLSRESDLCRRLQTIPGVGVLLSTAIVSAVGNASTFRRARDLAAWVGLVPQQHTTGGKPRLLGITKRGNSYLRRLFVQGARALWVWKDKHPNDPIQHWLIQLAERRHAHIAV

SEQ ID NO: 438151 - protein, 356 aa, unidentified
MQPQGTKKIDFKGKELFIGLDVHKKSWSVTILVEGMEHKTFTQLPDPKALFNYLQRMFPGGTYHSAYEAGFCGYGIHRELNALGIKNIVINAADIPTSQKDQLQKRDPIDSRKIARALEKGMLRAIHIFDRDMEELRSLNRTRFYLMRDLRRSKNRIKSFLQYYSIIIPLEMDNNQWPLKFVAWLKQIQMQTLSGQDAFSNLIRSYEYHREQILTLSRQIRQRVTEYDKELYTLLKTISGIGPLTSSALITELGDINRFPHIDHLSSFVGLIPRVKQSGETSYSGGITFRCNSYLRTLLIESSWQAIRQDPALMQYYHEHLINNKGQKVIIKVARKLLNRIRYVMKNRQPYVTGVA

SEQ ID NO: 438152 - protein, 415 aa, unidentified
MAVERMFLMEVIIERACGMDIHKDSITACIMTPEGKVIQTFSTKTVFLLQLIDWIKEHGCTHVAMESTGVFWKPIVNLLEAENIEFLVVNAQHIKSVPGRKTDVKDAEWIAKLLRHGLLKASFIPDRTQRELRELVRYRRSMIEERARQHNRIQKVLEGANIKLGSVVSDVMGVSSLDMLRAIAEGENDPEKLAGFARRSMKKKKAELELALRGYIQPHQRLMIKTILTHIDFLTAQIELLNQEVTCRLSTHQKDIERLDSIPGIATRMAEQILAEIGTNVEKQFPSAAHLCSWAGLVPGHNESAGKRKSSAMKKGNKYLKSALIEAAHSVRGSRTYLGALYRRTAARKGKKRAGISVAHAILRIAYYLLTRKEMYIDLGEDYFDKQKEQSIIRYSVRRLESLGYDVTITETDAS

SEQ ID NO: 438153 - protein, 341 aa, unidentified
MDDYIGLDVSLKETAISVRRDGERVWRGKCPSDPRLLAEVIRKRAPKAKRVVFETGPLSVWFYHALSAEGLPAICIDARHAKAALDMSPNKTDANDADGLAQLAEVGFYREVRVKGYDSMLTRTLVAARTRLVQITVDLSNQIRGLMKTFGLVVPASKGGRFEANVRRLLADHDGLEAIILPVLEAWRGVRIRAADLGRQLLAAARRSRSCQLLMTIPGVGAVTATAFTAAIEDPANFKTSRCVGAWLGLTTRRYQSGEVDYDGHISRRGDAHLRGLLYEAATVILTRTQAESSLRVWGLKLREKIGFKRAAVAVARKLAVVMHAMLKSDAAFDRAAGAMA

SEQ ID NO: 438154 - protein, 316 aa, unidentified
MSKRSMVCAGIDTGKRKLDVALHGRDDRLEVKNNPDGHRSLAAWLRERGVRRVGIEASGGYEMDVVAALRCAGFVVVVFQPAQVRAYAMFHLQLAKNDKLDAVLIAACTAAAARIHAPPDPRLSPLAARLTVIEQIVADISRHKTRLETCRDPHGREFWQQEIARLEATEKAELEALEKMIRQHRDLSQRLDLIESVDGIGIKTAIIILVRIPEIGRLGRAQVAALVGLAPYDDDSGARRGDRHIRGGRKRVRSGLYAAALPASFRHNAQLRVMYERLKAAGKDHKVALVACARKLVIFANTVVARGTPWQSQYTP

SEQ ID NO: 438155 - protein, 371 aa, unidentified
MKQYSTFVGMDVHKNSIEIAIAQRGRNGEVRNYGKIDGTLEALDKVVRKLVSKGGPLHFVYEAGPCGYEIYRHLTAKGHDCAVVAPSRIPKKSGDRIKNDRRDACMLARLDRAGELTPVYVPFAEDEAIRDLTRAREDAKIDEKKSKQRLLSFLLRSGLRYTGKKTWSQAHIRWLSDIKMPHPSQQIVLQEYIDTITECSLRVHRLTEQIRQLLPQWRMFSVVKALQALRGVALIVAATTIAEIGDLKRFKNPTELMSYLGLVPSEHSSGEKTRRGSITKSGNGHVRRVLVEAAWAYRLPARVSRVLLKRQEGLSKEVCEISWKAQVRLCSRYRRLWAKGKPKQVIVTAIARELCAFMWAIANEIQVSAAT

SEQ ID NO: 438156 - protein, 321 aa, unidentified
MHSNNTVVYAGVDVAKATLQLHLQGQQSEFNNTPKGLHQLCAQLQKVPGVHVVCEATGGYERALVKVLHQGQIPVSVTNPARVRAAAQAQGQRAKTDQIDARGLTDYGQRYQPQPTPPTSATQEQLVALTQWLKQLIHGRALAKTQAEHHQDPFVRRQHAKLMTHLQSQIEAVEKQIQALLEQDAALQQRVNRLDEIAGVGPRTAWMVLAHMPELGRLNRHEVAALAGLAPWTRESGTMKGMRCIGGGRPEVRLALYMAALSAARCNPVLRSLYKRLRAKGKVAKVALTAVMRRLLTYMNHCIKALPSEPATASAKELKLA

SEQ ID NO: 438157 - protein, 395 aa, unidentified
MSFKILKNNCCGLDVHKTWIYACIGITDSFKRTEYKQARFSSFTKGLQELCLWLAKYNCIDVCMESTGKYWIPVFNVLEKNNIFVTLSHPKYTKPQKGNKTDRKDAKWICDLYMCGMVKPSFIPPADIRQLRDLVRYRFKLTCMITGEKNRAHNCLTVSNLKLDDVFSDIFGKSSRSITEQILQHPGEVFDVAPFVDSRCKTPIEEIQAAVDGAISHEQAVKLRQCLKHIDELEMHKAEIEREIFRLSQKYESVLDLIRTIPGFDKNPLTAIQVLSEIGADMSVFPTAKNLVSWAGCCPRNDQSSRKIKSTRISRAGSYFKPVLVQIANALIKSKKHPEFTTRYRRIKARRGHKKAIIAICRMILTAIWHILTDLKPYTPEGFLIAHHPQALFTS

SEQ ID NO: 438158 - protein, 337 aa, unidentified
MKITTIGLDIAKRFFHVVCCNEQGRLVKKKMLKRAQVLSFFQQHTTCLVALEACATSHFWAREIRKCGHQIKLIPPQHVKAFLVGNKNDYNDALAISVASKQHHIKSVCIKSVEQQDNQAQHKARELAVRQRTALCNQIRGLTAEYGIILNQGINTIRKSIPLILEDENTGLSGAFKAVLKQLETQLSNLDSCIETYSTLIVETAKNNDICQRIQTIPGFGPMVSSAYFNEVGNGSNYKRGRDVSASLGIVPRQHSSGGKGTLLGISKRGNSYLRCLLIQGAKAVVSRAKTKNDKLSQWINRLVQTRGHNRACVAYANKMARMAWAISASGESYSPV

SEQ ID NO: 438159 - protein, 408 aa, unidentified
MQVVHPICCGIDVHQAHLTACLRRVAADGQVTNEVREFATTYDALLTLSTWLTEQQCPVVAMESTGVYWRPVYHVLVGTMEVLVGNAQEMRRRPGHKTDKADARWIAELLAHGLIRPSFIPPPPIGALRDLTRTRVALIQTRAQAKNRVLKVLEDTNIKLTSVVTDVFGRSGRRMLAALIAGERDPQRLAALALGVLRRKLPQLELALTGQFTAHHAWLIQGALDLIDLLNQQIMELDQHISELIAPLGPQMEQLTSIPGVEVTAARAILAEIGTEMSHFESAARLASWAGVCPGNDESAGKRRSGRTRKGNRYLRRVLVQCAWAARKTPTFLGRTFRRLETRLGGKKAAMAVAHKILVIVYHLLREGTFYDEERYDRLQTRQEERQQQRAVKALEHLGYRVTLEKVA

SEQ ID NO: 438160 - protein, 437 aa, unidentified
MNESNPAAAPPSSVDYAAFVGLDWGDQTHALSLSVAGHSAIERSTLEQTPEALAKWANALRERFPNRKIAVALEQSRGALLAGLCQYEHIVPFPVNPKSLARFREALHPSRSKDDLVDADLLLELLLKHRDHLRPWQPDTVETRQLALLNEQRRHFVDLRTCFSNELLAHLKAIFPQAPKLVGEDLTTPMATNFLKKWPTLQAAQTVKASALRQFYYGHNCRSEERITQRLEWVKNGVPLTTDHALLAAHSLAIQTLAGQLATLRAFLDQYDEQIATLFAAHPDAPIFDSLPGAGPVLAPRLLTSLGTDRSRFPEAVTVSCYSGVAPVTERSGKTQHWVHIRWSCPKFLRQSWHEFANSSVKFSAWAAVCYQHYRQKMDHHEAIRKLAFKWQRIVWRMWQTRQPYDEARYLAALQKRGHPLFTTLPAQAAQSAKSGE

SEQ ID NO: 438161 - protein, 362 aa, unidentified
MTKDNRFRFANSSKMTIGIDLGDRYSYFYTLDSAGENTESGRVQTTKSALEKRFRNGEAARVVIEAGTHSPWVSRLLAECGHEVLVANPRKLALITKNDRKDDPVDAELLARLGRVEPQLLSPIAHRGAEAQADLAVIRARDAVVAARTQLVNHVRGAVKSLGSRLGSCSTRSFVRKGGSQLPEPLRPALEPLLEVLAAMTRQIEDYDRQIEEACREKYPETELLRQVKGVGAVTSLAYVLTLEDPHRFGRSRSVGGFLGLHPGRDKSGAQDPELRITKAGDQLLRRLLVGSAQYILGPFGPDCDLRRWGLKLASRGRKNAKKRAVVAVARKLAVLLHRLWAGSEVYEPLRLAQPTALSAQA

SEQ ID NO: 438162 - protein, 409 aa, unidentified
MTGVACGIDWAEDHHDVAIVDETGAVVVAERITHDAAGLTRLLELLAAHDRAPRALPVAIETSGGLLVAGLRAAGRMVFAINPLAVSRYRDRYRSSGGKSDAFDAMVLANVLRTDRSAHRPLPQDTAQVQALRVLTRAQQDAIWERTELCNRIRALLKSFFPAALAAFERGGKHQLHSAACRVLLQRAPTPAAAARLTTTQLAAALRRAGRSRGIQAEADLLRGLLRQAHLTQLPEVEQAMGLQLRGLLRQLEAVCQTLAELEAAIEGAFLAHPDASVVTSFPGVGVQLGARMLAEIGDDRTRFVDAKALKSFAGAAPVTRASGKSRFVHARRAKNNRLASAGYVWALAAVRHDPLWEQRYRDRRTAGDRHVAALRNLFNSMLGKLHHCLTTAQHYQTDQAFTGRLHAA

SEQ ID NO: 438163 - protein, 369 aa, unidentified
MNDITYVGLDVHKATVCVAIAESGRGGEVREVGVFENRPDVLRKMVARLGKHRRRLNFCYEAGPCGYGLHRLLTGLGHDCVVVAPSLIPMKAGDRVKTDRRDALMLAKLHRAGELTAIWIPDAAHEAMRDLVRARATAVRALSKARQHLQGFLLRHDRIYHGARAWTLAYRRWLTTVRFDHPAQQIVLQDYIHAVEDAESRRDRLTRQIEELMPSWSMAPVAAALQAMRGVALVVAVTVVAEVGDFRRFTNARQLMAYLGLVPSEHSSGSTVRRAGITKAGNALARRVLIEGAWTYRMSARVSRKLHDRLEPLSAAIRDIAWKAQVRLCARYRRLAAIGKPKVVVTTAIAREMVGFIWAIARVAQPELI

SEQ ID NO: 438164 - protein, 422 aa, unidentified
MLTGTQDKEEIIERVAALDIGKAEVVCCVRVPHEGRPGRRLQEVQTYSTMTRSLLGMADHLRSLGVTRVVMEATSDYWKPAFYVLEAAGFETWLVNAHDVKHLPGRPKTDKLDAVWLCKVAERQMIRPSFVPPPEIRRLRDVTRYRIDLVGARTAEKNRAEKLLEDAGIKLSVVASDIFGVSGRAMMAALIAGERSPVVLAQLARTRMRARIPALQEAFTGHFTSHHAFLLAKMLARVDGIDADIAELDARIEEMIVPFGQAAERLDEIPGIGRIAAAIIIAEIGTDMTRFPTAGHLASWAKLAPGVKESAGKKKGSGSTGHGNPYLARVLGEAVTGAARTDTFLGERYRRIARRRGAKKAIVAVGRSILVIVWHLLSDPDARYTDLGSDFYATRINPERRKRTHVHQLEALGYKVTLEPAA

SEQ ID NO: 438165 - protein, 391 aa, unidentified
MRRRLWDTIKSMHSYVHKRRPTLKKKINTTQRSELARAPRRQRSPIVGVDVSNKNSHYCVLGPEGEIAAEGTLRTTPAGFSAQFPRAIRCRIVLEVGTHSPWINRLLHSLGHEVIVANAGRVRMIYDNDNKNDRVDARTLARLARVDAGLLHPIRHRSAEAQADLAVLHARDSLVSLRTKLVNTVRSMVKSFGSRLLSSSPEYFPRKVRTHIPASLQPALFPLLDQMEMLTSQIHAYDKQVEQLTRTRYPKTQVIQQIRGVGALTSLAFVLTIDDPHRFQKSRDVGSYLGLRPRRDDSGQSRPQLSITKAGNQFLRRLLVNCAQYTLGHFGMDSDLRRWGQALMARGGKNAKKRAVVAVARKLAVLMHSLWVNGEVYEPLRRPVHAQEAAA

SEQ ID NO: 438166 - protein, 423 aa, unidentified
MMEDERNWFVGVDWASETHHVRVSDARGRKLGARAFTHSGEGLAAMAAWILELTGAAPEAVFVAIEVPHGPVVESLMERGFRVHAINPKQLDRFRDRFSPAGAKDDSRDAEVLGDALRTDPRCFRALQPLDPVVVELREGSRMAEDLKQERNRLGNRVRELLWRFYPQMLALTDDVAAPWFLDLWRLIPTPEKAARVREATVDRLLKRHRIRRLSAADVLERLRTPAIPLAPGTVSAATAHLEAVAKRLDLVNRQMLAVDERLDSLTESLAGAQEGGEGQGPEPRDVTILRSLPGVGRIVLATLVAEAFEALQRRDYQALRCLSGVAPVTKRSGKSRIVLMRQAAHVRLRNAVYHWARVAVQHDPRSQAKYAALRARGHGHGRALRSVADRLIGVACAMLEAKTIFDPNLASERALNLGNSTC

SEQ ID NO: 438167 - protein, 356 aa, unidentified
MTTLHYIGFDVHKKTISFCVKTAAGEIVEEGVVLAQRPALQQWAVARPQAWRGALEATLFSGWIYDTLKPYGERLEMAHPAKMKAISAGKKKSDTIDARTIADLVRCNLLPACYVAAPRIRELRRLLRYRSLVVSEAVRMKNKMAGLLMETGALYVKEKLHGKKYFASLLEELEEVPESVINLLRTSRGALEMFESTQKRLVRELLADPELAERVERLMTIPAVGEITALTWALEVGDPHRFRSGSEAMSYCGLTAALKSSAGKQQHGPISKQRNHWLQSALIEAAKLAPRWNPQLAALQARELERGHRNRATLAVARKLVTYLLAVDKSGQSFQLRARLPEDRAEQEMAQKIKSA

SEQ ID NO: 438168 - protein, 401 aa, unidentified
MEAIVQRSAGLDVHKKVIVVTILLEQPDGSVKEETRDYGTTYKACEGLANWLLSHDIQLSVMESTGIYWKNIYAALEKAGLRVSVVNARHVKQVPGRKTDVKDSQWLARLARYGLVRSSFIPPKDLRELRIIARYRTKLVGTLAGEKNRLHKTLDDAGVRLGNVVSDINGVTACGIIDGLVEGKSMSELLDCTRGALNKKKTELQAELEGELSARHLFLLKKIQAHIVYLQKELQELDDYIFEAMQPYQRQWEILQTIPGIDVVGAALLIIEIGVDMQQFGSREQFCSWAGMCPGNNESAGKKKSGKTPKGPKQLRYVLCEAANAASKTDCQFQHKYKSLMIRRGHKKAIVAVGHKMLRVIFSRLKTGEVYRDPVIAYEELVVKKNAPRWIKMLTKYDYAI

SEQ ID NO: 438169 - protein, 363 aa, unidentified
MQLYVGLDVHSKSSVFVIQDESGKVLGEGKAPSTPAGLRGLRDRYHLPPGTAAALESGTNAFFVADELSALELSPRVIDAAEVRARITRPLQKSDRRDAFELCDGLRRGIYRSEVWVPPPTVRRVRQLLSRRRHFVNLKTAQVNAVKRLLRETGRAPLSRRLQVASGWEKLIQALADQEALQSLVRCHQAVWLAAAEQVKHLETQLTEATAPWQPELDRLMTVPGVGRIVATTFLAVVFDARRFATAKRVASYTGLVPSTFQSGDRDRHGHITGRGSSELRSMLCEAAQHAQRISSPLNPYYARIKARRGYRMAIVAVAHRLCRMLYAMLRDGTAFDLAQAGVEEGQFQKVSVRHYRLRSALT

SEQ ID NO: 438170 - protein, 413 aa, unidentified
MEILYRICCGLDVHKKTVAACLRFLSPTGTRAEEIRTFGTTTRELLRLADWLATAGCTHVAMESTGVYWRPVYQILEGSFELLLVNAQHIKTVPGRKTDVKDCQWIARLLEHGLLRASFVPPAPFRELRELTRYRRQLIEERAREANRIQKVLETANIKLGDVATDVLGASGRAMLKALIAGERDTEKLAALARGLLRKKEAQLREALVGRVTDHHAFMLQGLLSHIEFLDRQIALFDARIEAQTRPFSAALERLDTITGVARRSAEQILAELGDDMSRFPTAAHAASWTGICPGNNESAGKRKSGKTRKGNRWLRATLVECARGAVRARDSYLAAQYHRIARRRGDKKGIVAVGHSILVVAWHLLRNGGSYRDLGHDYFDRLDRDRLVRYHTRRLTDLGVVLPPPSSASATV

SEQ ID NO: 438171 - protein, 439 aa, unidentified
MNTTTITNNPVERFSPEAQPVAWIGLDWGDKEHAFLLRDGLGHEQRDKLQHSAENLHGWLCQIGERYGGRPVALAIEASRGAVIHALLQYPWLIIYPINPVTSARYRTAFRPSGAKDDLPDADVLFDLVRVHADKLRVLEAQDPATVQLSGLVEARRRIVDRRTAVLNELTALLKNYYPQALQLFSDLNSDLAVDFLRRWPDLISLKAARPGTIKRFYYQHQVRSTQLLQKRLAFIAKAVALTTDEVRVSVARLQLNHLLDQLEVFQTHVAIFDDQIKTTFATHSNAALFRELPGAGPQLAPRLCAAFGTITSLYPDPASLQKFAGLAPVREKSGHQIWTHWRWHAPTFLRQTFVEWAGQTVRYSAWAKVYYERMLKKGKKHTVILRALAFKWIRVLWKCWQDRKPYNEAHYLKQLIHRKSPNALSVDLKTSAVVNPIL

SEQ ID NO: 438172 - protein, 356 aa, unidentified
MKDYTREVVYVGIDVHKKNYSVTAICNGAIAKRDTIAAYPEQLVNYIKKYFKGAKVNTVYEAGFSGFYLHRYLLSQGINNIVVHPASIKVSARDKVKTDKRDSLKMAKGLSNGELKGINVPSEKRELFRMITRTRDQLVDNKKRIGNQLKSLLFTQGLIDPNDDMKVCKTWIKKIQKLKMPEELEYSVNLFVQLWLNLDARLNEILKKLHEQAKTDPADVIYRSVPGIGSLSARILANELEDMKHFANEKGLFSYTGLTPSEYSSGEHKRLGNISRQGKSLLRMILVQIAWRSIKQDQHLLEVFERISKKAGKKRAIVAIARKIIGCIRSCFVTGTIWSANAPARNGSLTIKAEAC

SEQ ID NO: 438173 - protein, 414 aa, unidentified
MNNDISEYSVLVGLDWANRKHDVCLQLPTKSHRSFSVIGSSPEAVDEWIQGLHQRYGGQIAIALELDKGPIVYALQKYDYVTLFPVHPLMLAKYREVFSPSGAKDDPTDAELALEMKIQYPEKIKPLTVLSPEIRKLRHLVEQRRVLVNDRRRLTNRLVNALKQYYPQPLEWFSHRDTTMFCEFICRWSSLQQLKRAHQKSVRSFFRSVGGRAVPKIDDHLEAIRTAIPLTSDIGVIDSHQLLAVTLARQIQQLILAIKVFDREIESLFDTMEDAILFKSLPGAGPCLGPRLLVAFGEDRDRFDHAGQVQSYVGVAPVTERSGQKAWVHWRWQCAKFLRQSFIEWAEKTVKYSYWAGLYYNQQRSKGNSHQAAVRSLAFKWIRILFRCWKTKTPYDESKYLKALRDRNSPLLST

SEQ ID NO: 438174 - protein, 348 aa, unidentified
MAHFVGLDVSVKETSVCVVDDTGKVILEQKVATEPADIIALLSSLGVTYGRIGIEAGPLSQWLVNALTAAELPVICVETRHMKALLTAQQINKTDRNDARGIAQMMRVGLFKPVHVKTLVAQEQRMLLTSRKLLQRTLLDVECELRGTLRNFGLKVGTVGGSRYEARVRELVAGFPRLAAIAEPLLNVRRVMRQQFAVLHKMLLDTVRDDPVCRRLMTAPGVGAVVALTYRATVDQPQRFVHSRAVGAHVGLTPKRYQSGETDYDGGVSKCGDALLRTMLYEAAHSLLIHSGKWSWLKAWGMRVAQRRGIRRAIVAVARRLAVVLHRMWVDGSEFRWSKGSAAVPTVA

SEQ ID NO: 438175 - protein, 343 aa, unidentified
MQLRSICAIDLHHSHCTVEAQTPAGNKVVLHRDVPTERQALVEAVKAAPGPKVVILEEGPMADWVLRVLEPYGQVVVCDPRRNRLLADGDKTDDIDPGKLIELYRNQSLRAVHHPAKQSMVDLRASLWLYHDQVELVSAAKNKLKAAFRSLGLQYGEGDPYSLKEREGWLGKLPARSLVRARIQELYGNLDELKARRDRMHERVCRLADRHVLIRRFMQIPGYGPIRALTFWLIVDTPYRFRSPQKLWQYAGLGLRRQQSGDPNRERKLPPMQYNRRLKAVARGAMEMAIALDDGNPFEQIYRRLLKQGLREGLARVSVARKILVVPWGMWKSNREYDPALVS

SEQ ID NO: 438176 - protein, 345 aa, unidentified
MQSMYYIGLDVHKKTISYCVKDGSGIVHAEGAIPATRWDLDRWMKMLPQPWTAAMEATIFTGWIYDHLKPHAAALKVAHPLMLRAIAAAKKKNDRIDANKIADCLRCNFLPECYMASTEIRERRRTLRYRNLLVHQAVQLKNKISGLLMEAGVSYNKQKLHKVGYFKELLASNPDINEGLRPLLRLCRETLVRLQKTESALVRSLQRDSLLAERVQRLMTIPAVGPITALTWVLEVGDVKRFSSIKRAISYCGLCGAEKSSADTVKRTPISKQRNKHLQSVLVEAAKMAPRLSPELALIYDREKQKGNANRASLAVARKLVAYLVAIDRSQRDFLVVEKENCAAA

SEQ ID NO: 438177 - protein, 355 aa, unidentified
MDSTKYIGLDVHKETISIAVLNSSGKLVMETIIETKASMLVQFVQGLRGNLHVTFEEGTWAAWLYDLLKPQVTKIVVCDPRRNALLKEGNKSDRIDARKLAELLYLNKLKPVYHGEHGVRALKELSRSYLTISGDLARVMTRLKAMYRSWAIPCAGKQVYAPRYRSEWLGKITEAGVRRRAEFYYQQLDALRALRQQVRRELLAESGKHKASKLLCQIPSIGPIRAALLIAILQTPHRFRTKRQLWAYGGLGIETHSSADHRYVEGQLRPSKRPVSLRGLNRNHNHELKNIFKGAALIAATKAGPFQEFYAALVAKGIRPEMARLTLARKIAAITLLVWKKGVCFDAQHLKPQTA

SEQ ID NO: 438178 - protein, 361 aa, unidentified
MSLSSWLVAGVVPGIERHPLKKLETDEDALLKLLLRWRDEAVKAGHKIERIAIAFEAGRDGFWLARWLRARGIEAYVIHPASVAVSREHRRAKTDRLDTELLKRVFLGWLRGEPDHCSMSAIPTLEQEDAKRPNRERENLVGQRTRIVNRMKACLIRFGIRNFKPTLRKAPEGLEALRTPEGAPLPPNTRAEMRRDMARLRFVQDQIKEIEATRLQQLEQAPAEGPHAMIRLLARVTGVGIETADMLVNEILARNLRDQKAVARYAGLTGSPDESGKRSREKGLSRAGNARVRRGMIQLAWRFLIFQKESALAQWYRVATKDARGAIRKTMIVALARKLLIALWRMVTIGEMPDGVAMRAT

SEQ ID NO: 438179 - protein, 371 aa, unidentified
MKQQTKSSNITVGLDLGDRRHRFCALDERGEVVEEGSICNERDSLRKLAGRYHGALGVMEAGAHSPWISRFLEALGWRVVVSNPRKVRAIYQHERKSDQRDALMLARIGRMDLALLYPVRHGTAEAQQDLLRIKLRDSLVRARVAVINSVRFTLKSLGYTVRNPSSARFHKVVMEEVPESVREMITPSVQALAELTARIKMLELEINTLAQMKYPQSAQLQQIPGVGPITALYFVLKIEDPNRFAHVRDVGAYAGLCPRRDQSGESDPQLRISKRGDAYLRRLLVSAAHYILGPFGPQSALRAYGLMLAADGTAQAKKRARVAVARKLAVLLLSLWKSQQPYQPFPGARLNGQQEDRRSGTIALHRMEATD

SEQ ID NO: 438180 - protein, 487 aa, unidentified
MKTQHNKTNKTNKTNKTNKMTTHCARQSVNKKDAERTHRTFDPAMFEMLNPNAAGIDVATEEMWVCVPANRAEQHVRKFGAFTDDLYAIADWLTACGITRVAMESTGVYWIPLYQVLEERGFEVCLTNARHLKNVSGRPKTDRLDCQWIQRLHSYGFLKASFRPTDAVCQIRSIQRHREALIREASRHVQHMQKAFHQMNVLLPKVVKDITGVTGMAIIQKILDGERNPVKLAQLRNPHCKSSEDKIAKALKGDYRREHVFVLRQAYKSYHVVHDQLRECDREIERLLRDLDKQVDATQTPPPPRTKPRQPGRKNAHVFTGDARTILYECFGTDITEITGIDTSNGLVLFTEVGADLSAWDTEKHFTSWLGFSPNPHASGGKMKSSQTRTVSNPASWAFRMAAKSAARSKTYLGAFYRRMKARLGAPKAMTATARKIAIIFYRMVNEKTPYHDLGEDYYVKQNRERAVKRLKQHAKRLGFEVVAQQA

SEQ ID NO: 438181 - protein, 389 aa, unidentified
MKIFVGIDIAKLNHFAAAISSDGEILIEPFKFTNDADGFQLLVSKLESFDKNSIIIGLESTAHYGDNLVRYLVAEFYQVCVLNPIKTCQMRKNNVRKTKTDKVDTFVIAKTLMMQDDLRFITFFDLDMMDLKALGRFRQKTIKQRTRLKIQLTTYVDQVFPEIQYFFKSGLHQNAVYALLKEAPSPKEIASMHMTHLANLLKVNSHGHFTKEQAKELRILAQKSVGANDSAISIQITQTIQQIELLDSQLEKIEAEMTDIMKFNDSVIMTIPGIGYINGGMILGEIGDIHRFSNPNKLLAFAGLDPSVYQSGNFQAKTTRMSKRGSRVLRYALVNAAWNVVRNNATFKAYYDAKRAEGRSHYNALGHCSGKLVRVIWKMLTDNVEFNLK

SEQ ID NO: 438182 - protein, 354 aa, unidentified
MSQTLNSAMAVIGIDIGKNSFHVVGHDARGAIVLRQKWSRGQVEARLANVPPCLIGMEACVGAHHLSRKLASLGHDARLMPAKYVRPYSKGQKNDFNDAEAIAEAVQRPTMKFVATKTAEQLDLQALHRVRERLVSQRTGIINQIRAFMLERGIAVRQGIGFLRTELPTILATRTDALSPRMLRVIEELAGDWRHLDQRIEGLSGEIETLARQDQACSRLMTVPGIGPIISSALVAAIGTGEVFSKGRDFSAWLGLVPKQISTGDRTILGKISRRGNRYLRVLFVQAAWVMLVRIKNWERYGLKSWIEAAKRRLHHNVLAIALANKLARIAWAVLAKGRAFELTRTDDAGVRPA

SEQ ID NO: 438183 - protein, 428 aa, unidentified
MDEVNRNRLEEFRQLRQEIRHSEEHLVVGIDIAKDRHHGFFGTATGKTLLRRLVFSNDHEGFRKLLDQAETLRVRHGLKKGVYGMEPTANYHKPLGEYLISLGRTVVLVSGVTVKRNRESLDGRWDKHDVKDSANVADLISQGKCLYYEYPSAELRGLRGLLSLKRRLKKQEHGYRVRIRNHLIAQYFPEMDRDYERLGAAGLSVVRWCFPTSQITELDVEPFIERVTSRRIRMETRRRLEGVWEKAGASIGCEGVPGVDHEAKVMVEGLRQIREVIKETEDKIEELCNRFPEYPYLLTIPGYGPDVSAKVLGAIGDPDRFQNGKQVLKLAGLDLSADRSGKDSDKAIPKISKRGKADLRYALYQAALIASTKNPDFMRYYASKLEGRQKEKGIQTKMWVKLSAKMLLIAWTLMKKKEAFDPAYLTAE

SEQ ID NO: 438184 - protein, 411 aa, unidentified
METIFERVGALDVHKAQVTACVRVPGADGRRELHVAEFSTTVSGLLALADWLKAFAVTHVAMEATGVYWQPVWHILEEDFELMLVNARHVKNVPGRKTDVSDAQWLCQLMEAGLLRSSFVPPKPQRRLRALTRYRKTQIAERQREANRLHKALEDTGIKLDCVATDILGKSGRAMLDALVSGTTDPDVLADLAKGKLRAKIPALREALQGRFEAHHALLIGAILSHLDFLDEQINGLSEAIEELLGPTGLAGRQLASTITGVAERTGEVLVAEIGTDMSIFPTAGHLASWAGRCPGNDQSAGKRRSGRTRKGSKWLGIALEEAALAAIRSKGTYLAGQYQRLKPRLGHGRALGAVKHSILIAYWHMFKTGETYRDLGGDYFARRDPQRATKRLVAKLEALGHAVTLQPNAA

SEQ ID NO: 438185 - protein, 417 aa, unidentified
MDTIFPKVAGLDVHLKKIKAAVRCRQETGKLFKEVRSYGTMTRNLRDLADYLQSLGVTHVALEATGVLWKPVWNILEGRFTLLLVNPRHLKKVPGRKTDVTDAEWSAELLQYGLLRASFVPPRPVRELRDLTRHRAQLAAEHTRVANRVHKLLEDANIKLGAVASDVLGKSGRDMLRAMLGGEQDPARLAELAVGQLRKKVPELRLALEGNFTEHHRFMLRRLLSHVNYLEEQTQKFDRPIAQKLDQLLPVVKQHRVDAIPGVNRTTLGNVIAEIGADMEVFPDEHHLSSWTGICPGNEESAGKRLRSRTRKGNRWLRRALAEAAWAASHSKGSYLAAQYRRLAARRGKKRALLAVGHSILVIIYQLLKHDVEYHDLGAEFFDRLEPERLRRYLVRRLQRLGYDVTLKPTEPDERAA

SEQ ID NO: 438186 - protein, 397 aa, unidentified
MYIVGIDIAKRKHEAAVIDGEGAVIIKPFSFTNNCSGYNRLLAMLTKAKLPLDEVSFAMEATGHYWLALFTRLQKEGFRVQVINPVQTNSIRSFYIRQAKTDPRDALLIAEVIRFGHFSESTLHPENIYELRELCRGRHAIVSMQADVKRKVVALLDQVFPEYETAFTNMFGDTSMAILQTCPTPKELSEMPLEELCHLIEVSSRKRFRMAKAQELQALARGSFGFAMAGDVFSTMIRLYAKHLVFLKQQVQEMDRKIAEIMDTLDTPITTITGIGPTLGAYILSEIGDINRFSSAAKLAAYAGIDPTMRQSGEYNGVRNRMSKRGSPYLRHAIWLAASSAVLHDPALKFYFQKKRDEGKPYMASVGHACRKMVSIIYAVMRDNKAYTPCIPNEISA

SEQ ID NO: 438187 - protein, 355 aa, unidentified
MNSEKYIGLDVHQATISVAVLDSTGKLVMESILETKAATILEFFAGLRGTLSVTFEEGTWAAWLYDLLKPHVAKLVVCNPRKNALLKDGNKSDRIDAHKLAELLYLNKLSSVYHGETSVRMLRELARSYLTIVKDLTRVMCRLKAVYRSWAIPCAGRDVYYTRHRAEWLGKIKEAGVRRRAERLYQQLDMLQYLRQQARRELLAESRKHAITVKLRQIPSLGPIRSALAVALIQTPHRFRTKRQLWAYSGLALETRTSAEYCYVKGGLRRSKKQISIRGLNKDHNHDLKGLFKGAATRASVLPGPFQDFYQRSLAKGIKPTMARLTLARKIAAITLTLWKKGENFDADKLKSQAA

SEQ ID NO: 438188 - protein, 341 aa, unidentified
MEVSTIGIDIGKSCFHFVGFDRRGAIVIRRRCSRTQLIRTLSNLPRCLIGMEACCGAHHLARILITQGHDVRLIPPQYVRPFVKSQKNDMLDAEAIGEALQRPTMRFAPIKTVSQLDVQALHRVRTRLIARRTGVINQLRGLLLERGVTFPVGRRALGERLPAVLENPAADLSPRFCGLVHHLREEWRQLDRTIHEADLEIQAVATDDELCQRLTQVPGIGPLTATALVAAVGNGTAFTQGRDLAAWIGLVPRQHSAGGRTTLRGISKHGNAYLRCLLIHGARAVRRHHRLRPHRLGRWIANLEARAHPNVVVVALANKLARTAWAVLQRDARYDGRLLSV

SEQ ID NO: 438189 - protein, 356 aa, unidentified
MSGTMPTDIIVGVDTHKHTHAAVAVTGLGACVAERTIKVGLAGYRELEAWARSLGNVRAFGIEGTGSYGAGLARFLREGGHVVHEVGRPDRRLRRRHGKTDHLDAEGAARAVLGGQAAALPKAGTSRAEMIRHLKVARDTAVKARTQAMLTLKAIIVGAPAALREHLEAITGKMALVRHLAALRPGPLTSTTASAEASLRAIARRWLDLDAEIKSHDSGLEELVERCAPAMVAAHGIKTGTAAEMLVLVGDNPERIRSEAAFAKLCGACPIPASSGKTSRHRLNRGGHRQANAALHRVVVVRMRAHQPTIDYVRRRTAEGKSKPEIIRCLKRFVAREIFGHLCRAPRPAGPEQMAA

SEQ ID NO: 438190 - protein, 320 aa, unidentified
MSQNTTAIMNQTIAPVYAGLDIAKATLQLQLQNRSYDLSNTPSGHAQLVKRLATIPGVHVICEATGGYERSVVAALQAASLPVSVINPARVRQFARASGELAKTDPIDATMLMAFGQAFAPEATPPRDASEIKIAALVSRRAQLLELRVAETQRADSCAEPSLKKLFTKWLSQIEKQITKVEALIEELIAGQTTLANQVHRLDEITGVGRITAITVLASMPELGQLNRRRAAALAGLSPYNRDSGQWAGKRHIAGGRTEVRRALYMAALSASRRNSILKTFYDRLIAAGKPAKVALTAVMRKLIILMNHLLKNPNFSLAH

SEQ ID NO: 438191 - protein, 361 aa, unidentified
MKKLAQHLIAEVPRKRGQVELTIGIDLGDVWSHYCTLNQHGEVIDRGRFRTTPNAIEKWFVDVPHARVAMEAGVHSIWISEQLQELGHEVIVANVRELRAISHSDRKSDQVDAEKLARYARLDPNILRPIAHRTVEQQQALTLIRARALMVRLRTAGINAVRGLTKACGHRMPASATPCFAQRSMAAMPPGLGQALGPVLQQIAEMTSKIKQYDRQIQQLSQTEYPETQALLKVHGVGHLTALTFVLTLGNKERFERSRDVGCYLGLRPMRSQSGEHDPQLGITHAGNAYLRSLLIECSNHILRPHGKDSALRQWGLHLAGRGGKQARSKAVVAVARKLAVLLHRLWITQEPYMPFYATAA

SEQ ID NO: 438192 - protein, 409 aa, unidentified
MTDSGKRYIGLDVHKHYLIALGVDGDLNVVLPARRVELFRLEAWMKKNLTKQDEVVLEMTTNTWQLYDELVQYAGKVMVVHPPHVALITRSQVMNDKIAASILARLLAKGLLVGIWIPPQEIREARGLVAQRQKMVRLATQAKNRLHAVIQRHHLVPPAGNPFGAKNKAWWMSLSLGKLEKLNLQSDLETLQFAEKQVKDMTEIMEEMAAEQEEIGRLLHLAGFGVVIAVTVWAAIGDIRRFVDPQHLVGYAGLGTRVHDSGMTSRSGKITKAGRRDLRTVLIEAANAAANSHPHWKAELARLEPRLGRNKAVVAIARKLLIAVWFVWQGKTDKYAEPEAVAQKMLKFAYAVGKANRPTEQTAAQFARIRMDTLGLGRELTSISWGSKKPIPLPPSSLKTEGSDVPNTK

SEQ ID NO: 438193 - protein, 366 aa, unidentified
MTTYYIGADVHSNSTELAIERNNKIVQRYKLPTSIAALSNVLDSLKGPKHLAIEEGPMAGWLYRNLSKKVDKLVVCDPRRNKLIDSDGDKDDKIDAAKLACLLRGNFLRPVYHSDDVGRAELKHWVSLYHDRVRDAVRNINKIRACCRMHGISISRLAVRQAKARDKWLSETSIRTLASQLNMLWLGYDSTSQQVKIARRRLSILGGRYKIIKFWGELSGVGLIRATTLFAYLDTPWRFKKKNKLWKYAGVGLQRTTSGTDSSGRPKPARLQLPWAVNRTLKNAILGAAASAIKQKNNLFRQYYERMLEDGIMPSNARHAVARKMLTAMWAMWKTNGASHAAHSRFDENMCLKPDTQTALTLSRLS

SEQ ID NO: 438194 - protein, 355 aa, unidentified
MNSEKYIGLDVHQATIVVAVLDSTGKLVMESILETEAATILQFFAGLRGTVSVTFEEGTWSVWLYDLLNPHVDKLVVCNPRKNALLKDGNKSDRIDARKLAELLRGNQLKPVYHGETGVRMLRELSRSYLTIVKDLSRVMNRLKAVYRSWAIPCVGRDVYYTRNRAQWLDKIREAGVRRRAERLYEQLDMLQHLRQQARRELLAEGRKHAVTAQLRQIPYLGPIRSVLAVALMQTPHRFRTKRQLWAYSGLALETRISAEYRLVEGQVRRSKKLLSIRGLNKDHNHDLKGLFKGAATMASVRPGPFQDFYQAALAKGIKPTMARLTLARKIAAITLTLWKKGENFDAEKLKSQAA

SEQ ID NO: 438195 - protein, 347 aa, unidentified
MSITMIGLDTAKSVFQIHAVDETGKTLIRRKLSRTELIPFFEKQEACIVVMEACGAAHHWARLLTGLGHHVKLIAPEAVRPFVKKGKKNDAADAAALCEAASRPDIKFVPIKTAEQQAILALHSARSLLVKQQTMLVNAMRGLATEFGLTVPKGISRLDELTALVDADEAFPETARQMFAELRKQYDSVLGGIERVETKIVAHARGNEIARRLATIPGIGPITASLIAATVTDITMFKSARHFAAWLGLVPRQYSTGGKTRLGRITKTGNREIRRLLVLGATSMVYRAEQWNSVVGAWTRGVLERRPVRLVTVALANKMARIAWALMTRKEVYQAKGRILATAEVAA

SEQ ID NO: 438196 - protein, 361 aa, unidentified
MAMQKRLTKKDRFFNNINLTADDDVYVGIDVHKKNCHIAIWLNEAIALTFVTPSDNMAIAHILSKLNPGLKRIVYEAGPTGFSLARALKAASLPVSVIAPSKTLRPAAQQSKSDRLDCRKIAEFAAKDLLVAVAVPSKQQEADRQVVRLRNQLGNKQIRIKQQIKSFLLQHNITEPAGLIRWTKKSIVELQSLELCSEMRFTLDVMLDNLSYLQSQIKRVEFRLKETFAKDRHSREMEVLQSHPGVGPMTARQFRSEVFDHCRFDKSTQLTRYLGLCPRVSQSGQKRIEGRLMKAGQIKLRSNLIEAAWVWVRVEPAAKKTFRRLLSNTGEPNKAIAAMARRLAVHLWKMLCDDQLYRKAA

SEQ ID NO: 438197 - protein, 336 aa, unidentified
MSQQYVGIDLHRRRSVIVRTDAAGEVLGEARIENDPLGLAAEIAKAGPSPEVALEATYGWYWAADLLVECGARVHLAHPLAIKAFENRRVKNDRIDATLLAELLRMGRLPEAWIAPVPVRELRELVRYRHKLVDIRSGLKCQVHSVLAKEGVRVPMSDLFGLAGRGLLDALELGDAFLVRVESLRDLIITLDTEVAMLDRRIHQRVATNPAYRAVQQIPGVGPVIAAVFVAELGDVTRFRHAAQVASWAGLTPRHRESDTKVHRGAITKQGSRLVRWAAIEAARAPRARGWLKRDYHRLAERRGKNIAAVAIARKIVTLAFYALRDGEVRCLARAA

SEQ ID NO: 438198 - protein, 334 aa, unidentified
MKEITTIGLDLAKNVFQVHAIDATGVIVIRRQVRRSQLLLFFSRLSPCLIGMEACAGAHYWARELVKLGHEVRLIPPSYVKPFVKRGKTDAADAEAICTAVMQPTMRFVSVKTEAQQAVLMQHRTRDFLVRQLTQLANAIRAHLGEFGIVVPRGIHNMNRLVAEAEAADLPAAARMPLDLLVGQFTDTKSRIDAITADLRRAAQEDETARRLQGMPGIGPITASVLAATLPDVSGFRSARDLSAWLGLTPKPHSSGGKERLGAISKMGNRYIRRLLYLGAMGVISTRKRTDPGEDWLGSMLAKKPLKVVAIALASRMARQIWAMLRTGEAWHAA

SEQ ID NO: 438199 - protein, 384 aa, unidentified
MKKMSFNVACAGMDVHYKFSNVTFRDGGGRIVSRQRLDHPDRQHLAARLSCWPQGLPVVMEASFGWGWLSDVVEDAGLEVHLSNCYKVEQMRKARGWVKTNKKDADLVSLLMFEPSDWWKVWRAPPQVRNRREQMRFRGDLVALQTEVKNRIHALFHRHGIFHEFSDLFGGKGRRFLAELCIGGSEYLSPEALQALRGQVRLLDHLRRQLAEVARVLRKQLAKTPLIRRLDHIDGFGLILSHVLTAEIGQIERFRNHKALASYSLLAPRSNDTGQEDPTQSPKGRHLGLRGNRTLKWAFLEAARGAVRSGGRWRAMFDRVTCGGTKDRNRGYIKVARELVKVVYVVWAKGVDYQPTPPARPGCKSNKNKSRSGTGQLLHPMVHA

SEQ ID NO: 438200 - protein, 336 aa, unidentified
MKKKWFIGIDVSKKTLDVVVYDPAKKKADNDSHLLISNDEEGYKSLLKWFKDKKISLPFIVICMEYTGIYCFDLCVFLEKKKIDYRLENPLNIKRSMGLVRGKNDKVDASRIAYFCYLHREELTYSHLSSNIMYHLQALQAERKRYVRQAAEYKSFLNEKKDEDKSYKRAEDMLKYLETDIEDINKEMRNIIEEDDALFVNYKLLTSIVGIARVNAINTLVSTNNFQKFQTARQYACYLGIAPFEYTSGTSIKGKTRVSKLGNRQLKSDLSLAACCAVRYDTEINHYFNRKEKEGKVYGVILNAVKFKLVERMFAVVKRGTPYVQTMEYQKIRNQQ

SEQ ID NO: 438201 - protein, 323 aa, unidentified
MRIIDMDTIVLGIDISKKKFDVALLIDTKFWNKSYPNNKPGFEALVLWLQSREVSPHICMESTGIYGHALANFLFEKGYLVSMVNPARIKGFGKSELSRNKIDEADAKLIARFCSAMKPTFWQPEPEWQIELKQWVHHLDSLKELERMALNRQEVAIKSVQEAISKHLKALKIQIEEAKEKIKELIDNDTDLRKKKILLESIPGIGATTTAHILSHVGDINRFKTAKKLAAFVGLNPSQRQSGTSIKGRTKLSKIGSSSFRKSLFMPALVGIRYNPTLKTFYEGLVARGAVMRRLLHIVYGVLKNEKEFSTKPNCKFLPINAI

SEQ ID NO: 438202 - protein, 335 aa, unidentified
MKQLPIVRAGLDVGAAELVVAILRDGQLESPSTLPNTPAGHRQLLKLLTRRGATARVCLEATGVYSLRLALALQRAERVEVMVVNPRAIKDFQRARLTRAKTDRVDALGILEFLQRMEFVPWTPPADAVLALQQLGRRLIQLRDELTREQARLHAIAFTPDRDGLIAADLGANLRHLQKRIKALQQAAAELAAREPDLAAQVERLCSVPGIGQVSALRLLGELLVLPKDLKAKQWVAHAGLDPRPRQSGATDAPRHISRTGNRHLRCALFMPALVAIQRSPQIKAAYESLLARGKKKKVAIIAIMRRLLHAIWGMLHHQQDFNPQLFHAGPLPHS

SEQ ID NO: 438203 - protein, 334 aa, unidentified
MYYEYVIGMDISKHSFDMAVLSAKNSEAIFHNAFSNDGKGFDEMMRFITSTMPDFDSSKALFCMEATGLYCNALLQFFERQQTNVWVENATQIKRSLGIKRAKTDKVDAISIAKYAIKNTELVRIWRPSGEVLEKIKHLATLRDRMVQTQKRLITPLEELKDAGQQKMAVYLEKSIKKSINAIDSDLKKIEANIIECLKEDASLHHLFTIITSVVGIGFVTAINLIIHTNGFNIMCDSRKLACYCGVAPFPYQSGISIKGKTKVSHMANKKLKTNLHLAALTAIKFDPELKAYYDRKVLNGKSKMSVINAVRFKLLARIVSVVKNDKEYVKKTA

SEQ ID NO: 438204 - protein, 408 aa, unidentified
MDKLFVGIDVGSRDNAAYIMLPNGDKHSSFPVQNNVGGAKTVVKNVVSALTEHGLQSVAIGIEATSVYGENLMYFLREDGTLARFERKLFILNPKQVKKFKDSYSDLPKNDPVDAFVIADSLRFGRIGNPIYNLEDYRFAALQKLTRARFYAVQNLTREKQRFMNHLFMKCSGLAQEKVFSDNYGATALAVFEAFESPDDIVNADIEALAAFISEKGRNHFSNPEEVAKAVQAAARSSYRLPKTVNDTVNQVLSITISSIRAMQAQVKALEKEIARQFANIPNTLTSVHGIGPVFSAGIIAEVGDINRFDNQARLAKYAGLAWRENKSGMFEGQITRQIKSGNRFLKYYLCEAAFSLVRCDTEYKRFYDLKYKEVNKYQHHRALALTARKLVRLVFRLLKDNRLYIPA

SEQ ID NO: 438205 - protein, 391 aa, unidentified
MYLVGIDVSKFKYDCFIMTETGEVINNSFSFDNNDSGFILLLNTLKSLDKSQKIKIGLEATGHYGNNLKLFLTENNYSFMEFNPYLVKKFAESFTLRRTKTDKLDAMTIASVLGSPNLTYEPYQISSYHISSLKSLTRYREAFIKERSLHLVQLTNIMDQIFPEFKPFFNGKFGTTAIYILKKYKTPERISTLTDEDILKIKNVSRKISAAKLVKLRELAKNTVGHSSISNQILLKSILNLYTNVDDEVTEIEKQIDSIMSEYKNHIVSIPGISKYSAAQIIGEVGDFKRFSSASKLLAFAGMEPSTIQSGTMDFKGKMVKHGSGHLRYVLMNIAMTIIIHNPTFYSYYSKKHHQEGKNHRVALSHVVRKLVRIIYHLEVTNQDFNSILLK

SEQ ID NO: 438206 - protein, 428 aa, unidentified
MPQGSGLQGATLAHVTTSTIDPTLTEAAATEVFAGIDWGGSFHQICLIDEDGKVLRQQRVPHDAAGFDELDRLLTCHRARLRVAIERAEGLLVEHLHLLGVEIFCVSPKISARARERYRMAAAKSDAFDAFVLADTLRHEHRHWRALTPPSPVLAELRAISRDRDRIVIAQQATENRLRAVLEAYHPAPLHLFSTLDRDITLDFITDYPTPEQAGRVGTARMDGFCRRHGYSGRTQPEVLVERLRPHLLSAGEGTAAGKAFSANLFTEQLRMLNTHLRAYDKRLDELLERHPDTPIFTSFPGVGPVVAATLISEMGEDRHRFPAPGALLAEAGLSPVTRASGRTRQVRFRYASNRRMRHMIDWWMFTAIREDDWTRQAYDHARARGQGKYRALRGLGSRWTRILWRCWTDHTRYDPAIHHRNPEPTTA

SEQ ID NO: 438207 - protein, 405 aa, unidentified
MDRTFLCTRVTVAEVLAKPRRRAAEEAGPMRKIAKFVGLDVHKDTICMAVAVGGPLELIADAVTLPHDVPKLIKRLLALAPADKLRVAYEAGPTGFGLCRDLLAKGIHCIVVAPNRVPLRRGPRIKTDKRDASNLAYQLRMGALSPITLPDRELEALRDLVRAREDALMHRRRTRQQLKGFFLRHSVSFEGKTCWTAKYMDWAKHVSFGAEGQKLARDSYCERIERIDLELERLTENVETIASQLTGLHLKLYRSLQALRGVKSIVAATLVCELGDLCRFKSPSKLMGYVGMVPSIYASGYRSKSGSITKAGNPHVRRVLIEAAWSGRLKPARSKLLEKRQAGLSDAVIDIAARAQKRLHGRYYSMCLRMKPQNVIIVALARELLGFVWAIGIQTANEHAEQALA

SEQ ID NO: 438208 - protein, 340 aa, unidentified
MKLYGAIDLHSTNSVLVVIDEEDKIVYQKRLPNDLALILKELCVYQSRLEGIVVESTYNWYWLVDGLMAEGYKVHLANTAAIQQYEGLKYSNDDSDARWLAHVLRLVILPQGYIYPREERPVRDLLRKRSQLVRQRTMNLLSIQNLMTRNTGSSMTANQIKGLDKAQVDGLLPDADLSLAMKANWSVMCSADEQVELLEQRVTERVKLRAQFSFLKTVPGIGQILALTIMLETGDIGRFATVGHYASYCRCVGSQKISNGKRKGSGNTKNGNKYLAWAFVEAANFAIRFNSKIKSFYQRKKAKTKAVVAIKAVAHKLCRACYHIMKDRVAFDVTKAFGQK

SEQ ID NO: 438209 - protein, 343 aa, unidentified
MSKRIYVALDVHLKFIVAVWQVMGMGGRKKLTIEGTPEGLRKLVQAVGPGEVWAVYEASGSGLEVHDRLTEHGWKVWLLAPTHLPQSTDSRKNKSDERDAHRMLDVLVAHGELGTKLPWAWIPTRKTREDRELVRRRLKLAEKLGQIKNETTGLLRVEAIRKPESLKTAWSDKHIAWLRGVAGTISAPVGKVLRGLLDELGFYQDQIRQMDEELQKLSEEPEYRDSTARMMELEGVGRLTAMTFLLELGDVNRFTNRRGLARYTGLTPNRYASSDVDHKGHISRMGPYRLRKVLNQAAWAHVRTGGHWASWYAETAKRRGAKIAIVGLMRKLAIDLWHLAKAA

SEQ ID NO: 438210 - protein, 438 aa, unidentified
MSNKVIFNLDELFISVGIDVGADFSWMSIALPNQQFVGKPYKILHNSIDSLTTAVSKIKEAEELYSLESRIFLESTGIYHYPLFCYLRDKGFNCSVINPIITKNSTNINIRKVHNDRFDSKKAALVGLKPDLKVSLMPSDLALNCRNLCREYYDLIDNRSAYVNKLQGELRMAFPQYLGIFSKVTINTSLTLLETYTSPSAFLKADKQEIIDIIKSTARFGLTYAQNKYNAIIQAATDANQFGYIIDSNIKRIRLYISFIRKYDEEINSILESLHELVDANEDSDFVKQIHLIETFKGAGFLSAVSIMGEIGDFSAFSKPKQLFAYFGLDPAVKQSGKFEGTKVQMSKRGSAIARRVIHTLTLQSISISRNREAKNPVLREYYLKKCDSKPKLVAMGAVSHKVCNMIFAILRDNKPFKIIAPQEHIKQYNAAKCDIAA

SEQ ID NO: 438211 - protein, 386 aa, unidentified
MRLTGNPTPSTAALDYDSTMIGALELSSKKWVFAVQLPGVKKHSRHVVEPNGPALAELIERLKSRSAGAGRPITRVIITHEAGRDGFWLARFLARRGVEVHVMQSSSLPVDRRARRAKTDVIDVEMLLRTLMAWLRGEPRVCSMVPVPSEADEEARRRHREREDLIGARRSLLNKIDGILATLGIEGYRALRRDRRAQLADLRQPDGAPLPLAALARIERLLDRLELVMTQIKGVEKARDAVVAKPAAENDNERMIRDLAGVRGVGIESATLLVREAFCRDFANRRSLGAYAGLVGTPFASGGMQREQGISKDGNRRLRALVVELAWFWLRFQPDSALAKWFRERVSQARGRVCKIMIVALARKLLIALWRFAKDGVIPEGVTMKA

SEQ ID NO: 438212 - protein, 460 aa, unidentified
MNRNRSKSRVDRTMPMVHPNAAAIDIGATMHMAAVRADRAPEPVRSFGTFTADLHRLVDWFTECGVETVVMESTSVYWIPIFELLDARGFAVFLVNARDAKHVPGRKTDVSDAQWLQRLHSFGLLRASFRPKGQIAELRAYVRQRERLLEYAASHIQHMQKALTEMNLQLHHVVADITGATGLRIIRAILAGERDPEALAGLRHYSCHSSAETIAKALTGSYRTEHLFALEQALSLYDAYHEKASACDVRIESVLKELIIHRGHDHGSAPPVSRRRNRTDQANALAFDVRAALFGLLGKDVTTIDGLGPYLSLKLIAECGDDLTSWPSAKHFTSWLGLAPSNKVSGGKMLSSRTRRSGGRAAALLRLAAVTVGRTDTALGAFYRRLSSRIGKAKAVTATARKIAVLFYNAVRHGMDYVDPGASSYETRYRTRVINNLHRRAKTFGFVLQPLEPKAGAAVS

SEQ ID NO: 438213 - protein, 368 aa, unidentified
MARYYVGLDVHSKQSTFVIEDEAGKVIAQGEVPTTPAGFARLQATHSLAPGTQVALETGTVAFYAARELARVGLRPVVIDAHEVRVKAHRPRQKSDRRDAFELCEGLRRGLYRAIVHVPPAPIGALRETLSRRRHFVAVRVAEVNAAKRLLRAAGLGHLTKSLGTDTAWAKLLAALATEVALRPYVVQHHALWRCAQEQIAALEETLAAQPTPIATVAARLQTVPGVGPIVALTTVAVFSDPHRFPNAKHAASYAGLVPSTDQSGDRDTHGHITKRGSAALRTMLCEAAHHAQRPTHPLHPYFARLCAQRGYKMAVVAVAHRLCRILFALLRDGAEFDIAKLAIEEGPFRRTTVQRYRLTRATASRRA

SEQ ID NO: 438214 - protein, 461 aa, unidentified
MNRKKQAGKSAKGSAQKRVDWKALEIVHPDAAGIDVGGSEHWVAISPDRDPEPVRRFGCFTVDLREMARWLIDKGVRSVAMQSTGVYWMPVLEVLEQHGLEVFLVNAQHTKNVPGRKSDVQECQWLLKLHAFGLLNNSFQPSDEIRVARTLWRQRGDLVAEAGSAVQRMQKALTEMNVQLSNVLSDLSGVSGMSIMQAILDGERDPHALAALAMPGVKATPEDIAKSLEGNWREELLFVLRQHLELYRIYQEKIADCDLQLRKHLESLGAKVEESQPLGPRPKGKKIARNAPGFDLRSELYRITGIDWAQINGIDVLTAQTVIAEVGAELSAFASEKHFASWLGLCPTNEQSGGRILNRRTRKVVNRATVAFRNSARTLLRSQSYLGAQYRRLRTRLGAPKAITAMARKLACLFYRLIKHGHQYVDKGTAYYEARYREQQIQLLTKRAQKLGLQVVIPQTA

SEQ ID NO: 438215 - protein, 420 aa, unidentified
MKVVYQTCCGVDVHKSFLVATIIKTTSGVEPSYQKKRFSTFNNSILQFKNWLIENQCRDICMESTGKYWVPVFNLLEDDINVTIANPKWVKAVKGNKDDTKDSKWIGDLFRLGLVPGSYIPCKPIRILREFTRYRYKLISCRTSEKNRYQNALTVCNVALDSVVSDIFGKSATSVIDYLIEQSNNSINHEEIASRLLRSLKKKSDSVIESIEGYQMTDSQKYRMRLVRAHLDYITSSINDIDTMLDSLIAPYENAVQLLCTIPGVDRNSAITVISEIGTDMTPFSNSKRLCCWAGLTPGNNESAGKKKSVKITRAGVYLKPALVQVAHAAVKSNKSPYYKQKYERIMKRRGKKRAIIAIARMILTAIYQMLSTGEAWNPTDLYKIDMPEPMKEKQKEKAIKQAKKLLIREGILSESQLVS

SEQ ID NO: 438216 - protein, 316 aa, unidentified
MGTPVFVGIDISKKHLDIFLTPPDTSFTVSNTEAGMVKLLTRLRQVTPQIILLEATGGYEFRVVAALREAELPACCINPRQVRDFARSLGILAKTDRIDARVLAHFAEKLRPEPRPLPEAQQQELKHLMARRRQLLEMILMEQNRLQISPFPRVQQSIQAALQALKEQLRQLDRDIDDFFRRYSVWLDQDQLLRSVPGIGPQTSLSIMAWLPELGRLNRREIAALVGVVAPFNRDSGAWRGKRSIRGGRPQVRRSLYMATLAALRFNAVIRTFYQRLLLNGKAKKLALTACMRKLLTILNAIMKNHQPWLPQDQTA

SEQ ID NO: 438217 - protein, 411 aa, unidentified
MHYKQKHIYIGVDLHKKTHTAVVINCWNEKLGEITFENKPAAFDELITYVKQFKNRGMIPVYGLEDVGGYGRSLAVYLLENKQQVKEVNSALSYAERQSYPTTQKSDSWDAECVARILLNKLDILPAANPQDVYWTIGQLVTRRNGLVKGLISLKNQLHTQLSYHYPSYKKFFSDIDGKCALAFWEKYPAPHVLNGVSVEEFAEFLRKSSNNACSTRKAEEILALVHADGDTTRSYQEQRDFLIKSHMRDIQFNKKEIEYVEGELQGMMKRLDYQLETMPGIDLVTASSLVAEIGDISRFASADKLARFAGIAPVNFSSGGKGTNQKSRQGNRILHGLFYNLAVQQVQVSKGSKKPRNPLFYEYFNRKKEEGKTPTQALVCVMRRLVNIIYGMMKHKTAFRLPEQVEKQAS

SEQ ID NO: 438218 - protein, 416 aa, unidentified
MKPWKDLTHYAGLDWAKDHHCVVIVNSEGRIVADFEFEHSVEGWKSFAEKTSAWPNLAVAIETSQGAVVDQLLQRDYTVYPVHPVAAKSYRERKAPSGTKTDHLDAWGLADGLRGDGHSWRALQPLDPMTQQLRLLCRDEVVLIEQRTALVNQLQQALLEYYPAVLEAFDDWTSPSTWEFVLAFPTPQALVTAGKRRWEKFLHSHRLWRSDTAEKRLKLFAQADQFQASDPIVRAKSQLAVSLAKLLCTLEKQLALYRSQIEALFRDHPDHDLFGSLPGAKKVLAPRLLAAIGCDPDRYGSQEVLQAIAGTAPVSYQSGRLKKVHVRWACDKFLRHTIHLWADCFRRASAWGQAYYQQKRSEGMTHACALRCLGQRLLKIVFRMITDKKPYDAELHARNQQKHGSWVLKLTNKTAA

SEQ ID NO: 438219 - protein, 369 aa, unidentified
MAETTEAFVGIDVAKLRNAVAVADAGRDGEVRFYGEVDASPESMRRLAAKLAGKHERLHFCYEAGPTGYGLHRLLTGLGHSCVVVAPSLVPRKPGDRVKTNRRDALSLARLLRAGELTPIRVPDTAHEAVRNLVRARAAAVKDVGLKKRQVGAFLLRHSRLFPREKNWGARYRSWLETQSFEHPADQIVLQEGIESVRLAEERLARLDRAIGEFLPTWSLAPLVEALQALRGVDLVTAVTFVVEVGDIRRFESPRQLMGYLGLVPGERSTGETVRRGSITEMGNARVRHLLVESAWTYRHPPRVGKAKLPKLERVSPKVREIAWKAQSRLTARYRALTARGKKTTVTCTAIARELAAFMWAVAREARPA

SEQ ID NO: 438220 - protein, 424 aa, unidentified
MDVIYDRVAGLDVHKETVVATVRVMVGRKAERECRTFETTTAGLSALLAWLTETRCSHVAMEATGVYWKPVWNILSDGAFELIVANAAHIKNVPGRKTDVNDATWIADLLACGLIRGSFVPSETFQELRALQRTRKQLTREQTRHVQRLQKTLEEANIKLDSVISDIMGLSGRRMIEAIIAGVHSPRKLADLADRRIKASPKELYDALHGRVTDHHRFRLRLHLGQYDALAEAIAALDKEIDAAIGRIDGEREFAGQIPFRAASREVCQIPGINLLAANMILAETGLDMGRFRTAGHLVAWAGLCPGQNESAGKRKSSKLRKGAPWLKTTLVQCAVSASNKKDSYFRAQFQRLKSRRGAPKAFCAVAASLLTTIYHMLKDGTQFRDLGKDHFDKRPTKAKVNRLLAQLAKLGYQADVRLLANAP

SEQ ID NO: 438221 - protein, 325 aa, unidentified
MQIACSFFGADVGKAEIVVADYRHTKPVTKTLKNTLSGLTPWLESLPEGSVLAMESTGGYERLLADLAYERGLRVYVVNPKVLFHYAKSLGQRGKTDQLDAVMIARFIASEHHRLHPYQPTPHHIQCLRQMLHLRKMTVNIRTQLRLSSERHQQACAQAQVQKVLDALTELADSLEDQMIVQIEAEPELEQDFKLLTSITGVGKLTGTALATTFARIPFASSDAVVAYAGLDPRPKESGTYKGLRVLSKQGDAILRSLAYNAASAASRSEVFKPLYQALRAKGWATTQALNIIARKLLRIAFGVWKSRKPFDPTRFNVNQACAKP

SEQ ID NO: 438222 - protein, 322 aa, unidentified
MSVSNQRCAGIDVSKGTLDIAISNIASQFTVPNGTDGFTQVLRELKRNETRLILMEATGGLESCVACYLQSEGFDVVVINPRQARDFARAMGYLAKTDRIDARVLLQMSEVINQHPERERYIRPLPDAHRQILAAMVVRRRQLTSMLTAERNRLHPSHPLSHASIRSIISALKGELARIEGEMAIHIKEHFSELSELLNAVKGVGSATVAVLLAEVPELGSLSRREISALIGVAPVNRDSGTMRGRRTVFGGRTSVRTALYMSALVGTRHNPVIKEFYTRLVAAGKPKKVALTACIRKLLTILNAMLKKNEAWDPMYHQHAS

SEQ ID NO: 438223 - protein, 400 aa, unidentified
MSIAVGVDIGAYKHAVAVCRSGEREADRRTLQISANRAGFQQLAGWMGTLAEPVSLVVMESSGHYWFNLASHLHRAGIPVAVVNPLESKYFGKRRLQRSKSDKADARTLAALGMHDQPRVQTPLAQSELREAARFTMRLVREQAEVGQRIHRLIDLGFPELREAWDDPTCVSALAVLRKAPTASAVSRLRLDTLASLKRPGDRGRAIGRTKAEQLQRLAKESVAAPELERQVAFEMRLLIQQHDFLDRQIAEAEAQLASLLDDDTARRLLTIPGVGPATAATLLAEIGDIWRFTDVDQLLAYAGVHPKEQSSGQKGQGPETSWTMAKTGNAYLRAAAYRMAVVGIKHNPIIRHHYARKRAAGKSSMNAIGHCMSKALSLVWGVWRSGQDFDPRRGEPRPA

SEQ ID NO: 438224 - protein, 366 aa, unidentified
MALELSKATWKVGFEYQGKRRIKNVVGGEVGALRQALDEATHKLGVPAGTVVRCCYEAGRDGFWLHRLLEGWGVQNVVVDPASIEVSRQARRAKTDRVDLLSLLSKLRQYHAGERAVWKVVKVPSEQAEAARLLHRELERLKKERTGHVLRIKGLLFAQGVRVEQVGGKHWAAVLMALRGHDGDALPADLLAQVRRESERLAMVQAQIKAIEQEQERRVREAAEVGGVMSMVQALRQLKGIGPVAAWVFVMEFFGWRQFKSGKEVGALAGLTGTPYASGQMQREQGISKAGNRRVRALAVEIAWLWLRYQPDSALSRWYAERFAGTGKRHKRVGIVAVARKLLVALWRYLHTGEIPAGAQLKPAQC

SEQ ID NO: 438225 - protein, 338 aa, unidentified
MRTYSGIDLHSSNNYVGVIDDKDQRLYRKRLPNRLDAILSALEPFKDSLEGVVVESTFNWYWLVDGLKEHGYKVHLANPSAIKQYEGLKHTDDKWDSFWLAHMRRLNILPEGYIYPKEERPVRDLLRRRLLFVKHRTAHILSLQSMISRNIGANMTCYAIKRLDEAAAETLFNSPYLLLAAKSNIAVIHFLKERIKLIEKAVKSHIKLRDEFKYLLTVPGIGDILALTIMLEVGDIARFPKVGDYSSYCRCVKAERLSNGKKKDKNNRKNGNRYLSWAYVEAANFAIRSYPYAQAFYQRKMAKTNGTVAIKALGNKLARASYYIMRDQVPYDPKRLFT

SEQ ID NO: 438226 - protein, 408 aa, unidentified
MQVLYPRCAGLDVHKDTIVACVRCVSPPLHQEVRSFGTTTTQLLELADWLGEHDCTHVAMEATGVYWKPVWHVLEAEFELVLANAAHIRNVPGRKTDVNDAMWIADLLAHGLIRSSFVPPQAIQQLRDLTRTRKQLVREVSQHSLRIQKVLEDANLKLGSVLSDVLGKSGRAMLDAIVAGQSDPALLAALAQGTARNKSAELREALRGRITEHHRTMLRLHLQVIDALQRTLGELDAAVGKALAPIRQRARLLATMPGVSDLTASVVVAEIGVDMSRFPSAGHLISWAGLCPRSDESAGKRRSTRVRKSGTWIKTALVTAAWAAVRVKTSYLRAQFLRIKARRGAKKAILAVAASMLTAAYHMLRDGTEYNDLGPDHFDRQDRSKTIHRLIKRLQDLGCDVPVLAHAG

SEQ ID NO: 438227 - protein, 412 aa, unidentified
MYYVGIDIAKITNVTSIINDKDVFIKKSFKFNNDEKGFKEFTNLLSSIDKNIDNFIIAMEATGLLFENLYLYLKGKGYNVILLNPYQTSKFREMDTMKKVKNDNIDAVMIASLIKSGRYSKAYVSEEVYASLRALHRHRASLEEELKKHKRQVSSLLAVVFPEFEQVVKNPFSVSGLALLEKYPTAKHYTYTSPQRILKVFRNIKGNNFNIQKAEKLLELAKSSIYSGNAYDERAFVIQSHIRAIKFLQKEIESIDNEMLKLFNASPSFTKEEEQEVTDIIDNLRSIPGVSDKTLFTIMGECGNLDRFKNINAFIGYLGLYPTLEQSGNKTSYGKLAKRGSKLAKKALYQAAVAAIRHNDEMKKLYCDKVSQGKAKKEALVIVARKLAAIILAIYKNNTPYDSKRVFNQNTA

SEQ ID NO: 438228 - protein, 340 aa, unidentified
MEKPINLQAPSFILGIDVSKDSLDVCLVRVSDKLQLCHKLNNNPSGFRRMKAWLKQHGCEAGADTLCCLEHTGLYTRQVVHYLLARDVQVWMESALQIKRSIGMVRGKDDKVDAQRIARYALLHQREARCLNLSGVTLERLKDLQANRGRLLKALQSIKVTIKELIAVDPVSGKTLEQVNKKAIKGIEESMEQVEEKMQEFIAKDGELKKKYDLLTGIKGVGKVLAISLLVYTQGFTKMDDGRKLACYCGVAPFEYRSGTSVMGRTGVSKFANKELKHILHMAAINSVRFNEEFRLYFERKVGEGKSKMSVINAVRNKLLHQIVAVVKRRTPYELKLKNI

SEQ ID NO: 438229 - protein, 395 aa, unidentified
MAKRTHVAAIRKPDGTKEKPFPFGNDRSGFERLRARSERTRERLGLNGVVFALEATGHYGHALRQYLGLQGYAVLGINPAHTKKAKELEDNSPEKSDQKDARLISDLAAEGRGRLVRPVKGVFAELRRLGKLRERYVVERVRLSNRYSCLVDLVFPELVQEVRKLTIRSIRRLLAEYPTAREIAGLELEELEDRLGRWSRRRLRPDKIARIHRLARESIGIVEGLETARMEMRQLLESLELVEQRLQEVEAAQHAALEKVPYAELLLTVPQLGSVTVATILGETGDLRNYKNAEMVIKMAGYNLYTISSGMFRGKTRITKRGRPMLRRYLFLAACRLSKKGAPLREFHERLTARKAKPQVLVGSCRKLLRLLVAMVRDGKPYEPGRLAVPLGEAA

SEQ ID NO: 438230 - protein, 347 aa, unidentified
MVTFGGDSHKRTQTLVVVDQNGRQLGECTVAATPSGHLQALGWARQWPERQWALENCRHLSRGLERDLLSSGEAVIQVSPKLMGSARRSGREPGKSDPIDALAVARAALREPHLPVAQLEGKSREVKLLVDHREDLVGERTRIQNRLLWHLHELEPGYEVVAGGLLRAVVLADIRSRLESHSGVVAEIARELVGRLAELTQSVKRLQRRIEALMLELAPSLLSLPGCAGLSAAKLLAETADISRFRSSSAFAMHNGTAPIPVWSGNHERHRLNRGGNRQLNVALHRIAVTQMRVGGSASAYIARRLSMGNTKTEAIRALRRQISDEVYRRLRQDYLARSTASIAVAA

SEQ ID NO: 438231 - protein, 314 aa, unidentified
MAAAKVYAGVDVAKDGLELWLRPSGEHRSYANDRRGIAALRGRLAELGCERIVLEASGGYETLVASSLWDAGLPVLVVNPRWVRDYGRSIGQLAKTDRLDARLLAQYAEHAELELRELPDAQTRALKELCARREELLEMMGAERNRLEHASKALRRRIERHVDYLRKQLAQIEHDIDQAIKNSPLWSDQRALLRSVPGVGPVLCSALLARLPELGRLNRGEVAKLVGVAPLNHDSGQLRGIRMIAGGRAALRRALYMSAFAAIRHNPPLRTYYEQLRARGKPFKVALVAAMRKLIIILNAMLKTNSPWRPPCPA

SEQ ID NO: 438232 - protein, 341 aa, unidentified
MELFVGLDVSVRTTSVCVMDTGGKLIRESKVETELEAIGALLHAIGGPYKRVGLEAGPLSQWLYSGLSAAGYPVICVETRHMKAALSAQINKTDRNDARGIAQMMRVGLYKPVHVKTVRSQEIRMLLTARKFVQTKILDAENNLRGLLRNFGLKVGAVTRLQFERRIVELLEQSPHLHLVIDPLLEVRRVLREQFQRLHKAMERLAESDATCKLLMTAPGVGPMVALSFRAGVDEPARFSRSRSVPAHFGLTPSRYQSGEIDQDRGISKCGDAGIRWVLVEAAGILLRISKRSSPLKAWGLSVARRRGMAKATVAVARRLAIILHRMWVDNTPYRWEANAA

SEQ ID NO: 438233 - protein, 426 aa, unidentified
MADMNHPIAALHWVAIDVARYWNAVLVETASGQRQRFRMTNSAADMQRLTDFLLSLGGRCRVALEPTGDYHRPIAHRLLRAGFEVVSISSVAQSRFREAMFNSWDKNDPKDAAVILEMLKQGRTQRYVDPMLAGHHDIQELSKTYYQISRARTKVQHAIINHHVPLYFPEMHKYWTSTRNEWWVKFMIEFPTPAHVRQHTCQEFINLASPVVGRRVHRVAKLTEIWECCADSGALPHDPQSVAVQTFLFTLRHYQHLNDMRRQLEEQTQKLLASDADYINLMSLPGVGPITALTILAEAGNLRRFGHHRQFLKYCGFDLAKSQSGVQRGREQLSKRGNARLRLAFWLAAVVAIRARENSFREKYDRYVSSNPKDPDLKRKALTAVAAKMARVAYGIIKKNQPYRRFFEQSLPSGSIPLNRAVGAPM

SEQ ID NO: 438234 - protein, 320 aa, unidentified
MSTVAGIDVSAKKLDVACLTGEDKPVFAQFEQSPPGHRELVAYLKKRGVAVVVMEATGIYYLDAAMALSRADVPVSVINPRSAHHFAEAMAGLLAEYARRMDLTLWRPPREDWLALRDISRRINQLTGMCTAEKNRLHALKAQCHTRRTLIEEVEAHIEMMEASIQRLTASALALIEHDADLTRYRSCLITAKGIADASAVTLIGELCLLPRDLRSAQVSRHAGMDVRLTESGSSVDKPGRLSKAGNTYLRAALHMPALNLVRYDERARAHYEALLGRGKEKMQALCAVQRKMLTGLWACMKTGEPFDSSKLFAIEPNNA

SEQ ID NO: 438235 - protein, 310 aa, unidentified
MSEERFVGIDVAKAYLDVCVLPEGESWRAANDEAGIAALTERLVALAPQSVLLEATGGLQQDVVAALVDAGLAVQVLNPRQVRDFARATGRLAKTDKIDAAVLALFGQAVRPAPRMLPDRESQALKALVKRRREIQEMLTAEKIRRHTATSRVLLSIDAHIEWLKRLLKDVDDDLDKTIRSSPVWREKDDLLRSVPGIGKVVSLVLVSGLPELGRAARRQLSALVGVAPFNRDSGLMRGRRTIWGGRADVRVALYQAALVATQHNTLIKAFYQRLLQAGKPKKVALVACMRKLLGILNAMLRSGQRWQPA

SEQ ID NO: 438236 - protein, 413 aa, unidentified
MEKLVERCAGLDVHRDTVVATVRTPRSSGAGRVACTRTFATTTAGLTALGQWLAEERVDLVGMESTGVYWKPVFFLLEEHVPHVWLLNAEHLRNVPGRKTDVADSAWIAQLVEHGLVAPSFVPPAPIRELRDLTRHRRVLVEERTRTIQRLDKTLQDAGIKLTSVASSLLSKSGRAILEALLAGITDPTVLAELARGRLRSKIPALREALAGEFRVAHHGILVGQMLAHVDFLDESITGLDARIEQTVQQFEVVLQRLQTIPGVARKTAVCLLAEIGADMSVFPTSAHLASWAGICPGNNASGGKPKSGRTRHGTVWLKTALTEAAQAAARTKGTYLAAHHASIRGRRGSFKAIGATRHDLLIAYWHIVHDAVDYRELGADWAMRRHSREHQTRRLVRQLEALGMQVQLTDAA

SEQ ID NO: 438237 - protein, 451 aa, unidentified
MNNKPEIVLDDEHELVIERVAAIDVAKASGKVCMRMPHPSRPDRRMSKVRDVDATTRAVTELANDLLGEGIERVTVESTSDYWRIWFYLLEAAGLRVQLVNARDVKNVPGRPKTDKLDAVWLAKLTEKGLLRPSFVPPAPIRQLRDYTRFRVDLTRERARYWQRMEKLLEDALIKVSAVVSRMDSMSVRDMLEALIAGERDPRRLAGLARGKMRPKYKALVEALSGRFDEHHAELARMLLDQIDALGAQISTLTTRIDELLAALIDTPGPAADGSVRDRDGEVELMVTGLDAAERLAEITGIGPVSAQVIIAEIGLDMARFPTAAHLVSWAKLSPRTIQSGAIQRSGKAGKGNPYLKGALGEAAAVAARTDTFLGERYRRIVKRRGKLKALVAVARSILVIVWNLLSDPTARFHDLGPDYYTRRIDTERRARNHLAQLAALGYRVTVEPAA

SEQ ID NO: 438238 - protein, 382 aa, unidentified
MPDVISSAPAAVRMRAALDVHKRTIVCAAQPDDPRAELRLEEIPNTERAVRGLVRRLGGPEGLVVCYEAGPCGYDLFRLLSAMGVACDIVAPALTPVAPGARVKTDRRDAKRLLVLHRAGALKFVAVPTPAQEGLRDLVRCRDDLVCARRAARHRVAKQLLRHGHVFREGKKSWTKTHQAWVRRQRLGDPLAQSALEHMLAHLDSLDAQIAALDHQLDDIAEREPWSDPVRWLCCFRGITTITALGLLAELGDLRRFATARELMSFLGLTPSEYSSGEQRHRGHITKAGPRHARRLLIEAAWHYQHPPRVSQRIAAVHPHVPPDVAARAFSAQVRLHHRHRHLTSHGKRSTVANVAVARELAGFLWAAMTRQPLPAQEVTAA

SEQ ID NO: 438239 - protein, 395 aa, unidentified
MFIVGIDIAKRSHEAIIIAEDGQVVRKAFSFRNNCTGYNLLLEQVRRLTLVKSQIVFAMESTAHYWLALYARLLKDGYAVMVLNPIQSHSLRELYIRKAKTDARDSLIIADLVRFGRCKASNVPQDKILALRELCRSRAYLVDMAADLKRKLIALLDRIFPEYESLFESVFSKASIAVLSKYSTPQKAKNAHLGKLTDILMESSNGHFGEWKAHQLKEAACSSFGIDDSGGVYSTLLGMFLEQILSLTAQADSLEKQISVFFQEFNNPLTSIPGVGTVLAATILSEIGDITRFSSADKLLAYAGLDPSVKQSGEFKSNQNRMSKRGSPYLRRAIWLASTVAVHRDPMFQTYYEKKISEGLHYMNVIGHVSRKMTAVIFAVLRDRQPYQPILQSAG

SEQ ID NO: 438240 - protein, 425 aa, unidentified
MKVTYQTCCGVDVHKSFLVATIVKTTGGIEPSYQKKRFSTFNNSILEFKQWLLDNDCHDVCMESTGKYWIPVFNLLEDEINVVIANPKWVKAVKGNKDDAKDSKWIGDLFRLGLVKGSYIPCKKVRILREYTRYRYKLVSCRSSEKNRYQNALTVCNVALDSVVSDIFGKSSTSIIDYLLEQSGTSINHEEIASKLLRSLKSKEYAVIESIEGYQMTDAQKYRMRLIRAHMDYITAEINDVDKMIENMISSNPDFENAVQFLCTIPGVKRDSAVTIISEIGTDMSQFGGGAKRLCCWAGLPPGSNESAGKKKSVRITRAGVYLKPALVQCAHAAVKSDKSPYYKKKYESLVKRRGKKRAIIAIARMILTAIYQMLSTGEQWNPSDFYKIDMPAPLFEKQKAKAIKQAKKLLQREGLLPPDEPLAS

SEQ ID NO: 438241 - protein, 338 aa, unidentified
MTIVMGLDQHRAQVTADWLDTETGELKRGRIAPADRTGVARFLSRFGGQELDVALEATTGWRFVVEELHRIGARVHLAEPAETAARRGKKKHAKNDRADARHLRELLMVGRLPESWIAPEHILDLRARVRLRHTLGEQRSEWQQRIQAVLYHHGCPQRRSLMVGDGREWLASQPLTATAREQVAVALGMIDALQAQIAPLESHLRAYARRQSGCRALMAHYGIGELTAVTILAELGDCRRFSSSRHAVRYAGMDITVHESDQRRAPGHLSRQGPPALRWALYEAAQVARRPSSPERCYYEQAAERLGGNRACLSVARRLLKRSYHTLRELGEEALQPA

SEQ ID NO: 438242 - protein, 386 aa, unidentified
MYYVGVDIAKNSHVASIMDNHGVVHLEALKFENNHVGFSRFLDSISKFPKEELIIGLESTAHYGEVFTQFIFNLGFKVAIVNPLQTSAIRKAGIRKTKNDKIDSLVISRSLILNGWNPLEKRDITTLTLRGLAKARRNLISQRTRSKIQLTAYVDQLFPELASFFKGNLHIKTVYKLLLKHTTAKEVSSLHLTKLSSLLVKSSKGHFTKETARSLKELAKNSVGIDNPMLALQARMAIEQIIFFTAQIEQIEKESEILVNSLDSVLLSIPGISINSLAAIIGVIGNFQRFSSPRKLNAYAGLDAVVYESGQFKARSTRMSKRGNSLLRQHLVLAAHNIVKNNETFKAYYDSKRDQGKTHYNALGHCATKLLRIMYKLECDQVTFNL

SEQ ID NO: 438243 - protein, 320 aa, unidentified
MSDSSVMIGIDVASEHLDVVAIGAAIPLARYGNDPEGHSALAEALVAIEAALVVMEATGGYEAALACALQAAGLKVAVINPRQARDFARSMGRLAKTDRVDAQTLAELAATLARRPDAERFLRPLPDAVQQDLAALVTRRRQLLTMLLSERQRLRLAVAVVRPSVEAVIEMIRKQLDDIEAQMTDHVHRHYAELDTLLQSAGGIGPVASASLIADLPELGRLNRRQIAALVGVAPYAKDSGQHRGRRRIAGGRFELRRALYMATLTATRHNPAIRAFYERLLAAGKLKKVALIACMRKLLAILNAMAKTRTTFDPDHTHA

SEQ ID NO: 438244 - protein, 351 aa, unidentified
MTNDITTILTVGIDLGDRRSEVCVLGSDGEVKRRFGVATTREGLEKKLGGLVRARVVIEVGTHSPWVSRWLEAKGHEVIVANARAVRSIAESDRKTDRNDAEQLARLGRADPKLLRPIRHRGEAAQRHRMLLTVRDHLVRTRSSFVVQARGLAKALGERLPKCKAETFAKKMRREVGTDVFPAMDVIVTTVEQLDAQIAALDAQLDELARRAYPETELLRQVSGVGPITALAFVLTLEDPRRFAKSRAVGPFLGLTVRKRQSGSRDPALRITKAGDPFLRRLLLQGAHYILARGPDCDLRRFGLRVMARRGRAKAAIAVTRKLAVRLHHLWRNGEVYQPLYDAERKALAAA

SEQ ID NO: 438245 - protein, 343 aa, unidentified
MEQHAGLDVSLEETSICIVTAEGGIVRETKVPTDPGAIIAVLTAAGIACKRVGLEAGPLSQWLYSELATAGLPVVCIETRHAKAVLSTQTNKTDRNDARGIAHMMRVGPYRPVHVKTLRSQQWRTLLTSRKFLVTKLRDVENDLRGTLRNFGLRIGPVSAGKFANRVRELVDGQAMLAAIVEPMLVVRTTVMEQLDVLHRMVLDLVRDDPVCRRLMTAPGVGPVVALTFRATVDVPARFGKSRAVGAHFGLTPRRYQSGQTDWTGRISRCGDAMMRTALYEAAQVLMTRVTKGCSLKSWGLRIARHRGKEKAIVAVARRLSVILHRMWVDASDFRWGSEPKTA

SEQ ID NO: 438246 - protein, 343 aa, unidentified
MAIVGAFDVHRAQLTYDYVSTETGEVRVGRIRPADREHLRAWLGRFEGEKEVAFAVEACTGWRYVADELSRAGCEVHLAEPADLSRDRGPKKRAKTDAADARHLRELLQQDRVPESWIPPTEVLEARAMVRLYKDLMEERVGWAQRIRATLFHQGVPSLEKVLNASGRALLPGVELSPAGHRAVEVGLRQIDRLSAEIKVLGQELRDRAQVQPGCQALVKAHYGVGPILSFAIWAEMGDPRRFSSSSDAVRYAGIDITVYSSDGRRSKGHLSRQGPSLLRWALYEAALQASRLTSPDHPYYEAVKARHQGDAQIAILSVARKLARRCYHTLRELGAEAWSAAA

SEQ ID NO: 438247 - protein, 407 aa, unidentified
MEVLHPRCAGIDVHKDVVVAAVRCVSEPKHQEVKSFGTTTTQLQALSEWLESHGCTHVVMEATGVYWKPVWHLLEGHFELVLVNAQHVKNVPGRKTDVADATWLADLLAHGLVRSSFIPPAPIQELRDMTRTRKQLVRELSQHTLRVQKVLEDANIKLGSVLSSVVGKSGRAMLKAIIEGETNPEILADLAQGTARKNRAELIESLRGRVTAHHRYMLKLHLGLIDTLQAAIDEVNATVGKALAPIQARARMLTTMPGVSDIAAGVIVAEIGVDMSRFPSPGHLVSWAGLCPRNDESAGKRRSTRVRKGGTWLKTTLVTAAWSAVRKKDSYLRAQFLRIKSRRGAKKAILAVAASMLTAAYFMLRDEVPYQDLGAKHFDRHDTGKTIGRLVRRLQDLGCEVDIKRAA

SEQ ID NO: 438248 - protein, 355 aa, unidentified
MSQEKYIGMDVHQASISVAVMDAQGRLIMECLLETKAATIVEFIQGLQGTLSLTFEEGTSAAWLHDLLKPHVSRLVVCDPRKAALLKDGNKSDRIDARKLAELLRTNQLKPVYHGEHGVRTLKELGRSYLTLTKDVTRVMNRIKALYRSWAIPCSGTTVYAPRHRAEWLAKIVEPGVRVRATRLYQQLDGLQPVRQAARHDLLSESHQHPAVKLLRQIPSIGPIRAALLVALLQTPHRFRTKRQLWAYSGFAIETHDSGEYRCVRGKLQRNRERITVRGLNDNHNKDVKNLFKSAAISASTRPGPLHDFYAARIAKGMRPTMARLTLARKIATITLTIWKKGVGFDPQQLHRQAA

SEQ ID NO: 438249 - protein, 412 aa, unidentified
MELLHRRCCGLDVHKETVVACLRLVIDGKVITEVRTFQTTTADLLRLSEWLATNECTHVAMEATGVYWKPVWHILDDGEFKLVLANAAHVKNVPGRKTDVNDAMWLAELLAHGLIRASFVPDSQTQEMRNLLRTRKQLVREQSSHVLRVQKTLEDANIKLDSLLSDLMGKSGRAMIEALIAGETNPAKLASLADRRVKASPEEFREALRGRVTKHHRFLLRLHLNQIDALDAAMATVDAQVEENLGPFRTAVELIMSIPGVKNLGAHVIVSEIGIDMSRFPSAAHLLSWACICPGNDESAGKRRSNRMRKGAPWLKATLLQCAWAAVRKKDSYLQAQFYCIKARRGPKKAIMAVAASILTAIYHMLKDGTMYQDLGCNHFDRRSTDQQKKRLVKRLADLGYAVEIKPLAAMA

SEQ ID NO: 438250 - protein, 337 aa, unidentified
MKYCGIDLHSNNSVVIVSDEEDRIVFSKRLPNDLGQIRAALEPHREDLAGVVIESTYNWYWLVDGLMDTGYQVHLAHPSAIKKYEGLKHSGDFADATYLAHLLRLGLLAEGYVYPREERGARDLARKRLQLVRYRTAQILAIEGILMRQTGARLKGEAVKRLTAEQVDAFAFAPDVSLAVEANRAVSQTLSQQIEALEKRLQQRVILRPEYRLLKTVPGIGEVLATTIMLETGTISRFARVGNFSSYCRCVESLKESNGKRKGEGNTRNGNKYLAWAFVEAANFALRCCPQARSFYDRKKSRSNRILALKALAHKLARACYHMLQDHKPFDVHLCFG

SEQ ID NO: 438251 - protein, 342 aa, unidentified
MRIIRIGLDTSTYVFQVHGVDENETPALRRQLRRSEVAKFFAKLPPTRIGLEACGASHHWARRLRGLGHEVLLMPPQYIKPYVKRGKNDAIDAEAICEAMSRPTMRFVTVKSAENQAALMMLGVRDLLVKQRTMLINAIRGHAAEFGVTAAKGSKQVVELLQRLADDAEVPALAREMIGVMAAQLDAVEAKLKAIEARLMAWHRQNQTSQCLATIPGIGPIGGVSFALRVSDPKAFRSARHFAAWVGITPRENSTGGKQRLGKISREGDEGLRRLLVLGATAVIQQADKGRQGKKGRARPWLSKLLARKPKKVAAVALANKMARIIWAMMVSGETYRQPQEA

SEQ ID NO: 438252 - protein, 395 aa, unidentified
MMTTALQSVDRLHWSAESSDVGLVANEMVRRLILPPLREDRGGSFSDRRIIYMQIASIGIDLGKTTFHLVALGPAGQVLVRRKFSQKQLLTYTANLVSSLVGLEACSGAHFLGRALRAQGHDVRLIPAQFVKPFVKSNKNDFLDAEAIAEAVARQNMRFVPIKTDDQLDLQAIHRVRDRLIACRTAVINQLRAFLLERGMTFAKSPAKLKLAMPEILENADSNLTPRMRNLVADLWTEWKSLDQQIRASDLEVERIASSDPACHRLRSIPGIGPLIATAIVAAIGNGAAFRKGREFAAFVGLVPRQYSTGGKARLIGISKRGNSYLRKLLIHGARAAVVRMKRERAPFGGWLNGLEQRAPRNVVVTATANKLARIAWAVLSSGDPYRPLTIAPAA

SEQ ID NO: 438253 - protein, 339 aa, unidentified
MKKRYLGVDLHRNCFTVYTRTEEGGGESREWSIHSLTAFAKTVKAIDEVAVEATGNVRMFSAALKARGCRVVVVNPHQFQVISRSVKKTDEHDAKVLAEFLAKGLLPEVRMKDEVHARVASLAQTRDKLVKLRTVLKNKINNLLAARGILIPKESLASEKGLAEVFAAPVSELERMELEILVGEIRHLNASIKKLEELLRDQGPKLPGWANLISIKGIGETGASILLSTIGNIQDFADEGKLAAYFGIVPRVSNSNETERSGRITKRGCKMGRTALVQCALIAARYSPYLQAFYRRIAATRGTGKAIIALARKFLGIIYKTLKNNWIFEDFPQFVLANR

SEQ ID NO: 438254 - protein, 411 aa, unidentified
MPKIVYPICCGIDVHKSFVVACIATTDKNLVTTYSKPKRFSTFTGDLRRLADWLTQNKCRDVCMESTGKYWIPVWNVLEPTCNLVLAHPKYLKAIKGKKTDKRDAKWIADVFKFDMLNGSFIPPAEIRQLRDLVRYHVKLTSYTTGEKNRAQNCLTVSNIKLDDVFSDVFGKAASAITERLLESNEPFDVTPYLTKNIKASTEEIKAAVDGVMCAQQAEKLRIIRSHMVSLTLCKANLESEILSLAEKFLPQINLISTVPGIQSFSAVAIIGEISVDMSVFETSRHLCSWAGLAPQNDNSAGKKKTTRVSRAGVYLKPLLVQCANNAVRTKSNPEIANRYNAIKKRRGHKKAIIAIARMLLTAIYNILKKNEPYNAEFYRQSDKPPVQREVTVEQAIFILQRQGYLVTAST

SEQ ID NO: 438255 - protein, 366 aa, unidentified
MTKFIISGLDVHEKSIKIMWSVQNSRPALLDFPNSSGGRHALIGHLQRAARQTGDATIVTAYEACSLGFGLYDEFMAAGITCHVLAPSMIRKSRKDVKRKTDEADAKLIFETLRGHLLAGNSLPCVWVPPTALRADRELVRARLEIGNKLTELKTQISMLLKSHGICRPAKVGNPWTLSHREWLADLTRQEDRLALQTRLVLDSLLRQLHHLEEERKHLDKAVEILALSAGYRTVVEKLENTLQGVGLLTAMVFLTELGDLTRFKNRRQLASYLGLTPTSSESGEVTDRKGHISRCGPSRVRWALNQAAWSHIRHTPEPKAVFERIGKGKKKLNRVAQTACVRRLAISMWHIALDAARSETRQQVA

SEQ ID NO: 438256 - protein, 340 aa, unidentified
MNATMIGLDIAKTVFQVYGEDAHGQPVLSKRLGRGAVEPFFAKLPPATIGIEACGSSHHWARRLQALGHAVRLIPAAYVRPFVKRNKTDARDAVAICEAMQRPDMRFVPIKSIEQQAARGIETARELLVRQRTQLMNAMRGLSAEFGIVVAQGSTGFAALCARIAAGDPAIPAALLPSLRLMRQQWQALNDAVDAQQAQLVARAKADPVMRLLMGVPGIGPLTAHAIVAAIGDGRQFGSARDFAAWAGLTPREQQSANKRRLGHISRQGDPGVRRLLTLGASAVLRQVRAEPRRGTVWLRGILTRRPVKVAVVAQAAKTARIAWAMLRSGEAYRGAAPAI

SEQ ID NO: 438257 - protein, 340 aa, unidentified
MQAVTIGIDLAKHVFQVHGVSAGDKVVFSKPLRRAQMLPFFAKLTPCLIGMEACTSAHYWARELTKLGHVVRLMPAKDVKAYVKRNKNDAADAEAICEAVTRPTMRFVPIKSAEAQSVLMLHRARHLLVRQRTAQASALRAHLAEYGVVAARGISRLRDLLPVLETRAGLIPELARQTLLLIAQLIEALTIQIRQIDTELLHWHRTNPVSQRLESIPGVGVITATALAATVLNAKAFRSGRQFAAWLGLVPRQNSSGGKDRLGGISKMGDRYLRHLLVVGATAVVRYTRRKTTAVSLWANRLLQRKPARLVTVAVANKMARIIWAVMARNEIYRRTPITV

SEQ ID NO: 438258 - protein, 393 aa, unidentified
MQPVVGVDVAKGFSVIQPFLRRNEPYGRMENLQHGENGFARLGELLEQLKRVSGEDPVVVLEATGHYHRGLVGYLKVNGWIHYIVNPLRAKRAKGTQLRKVKTDAADAWHLAELYYKGDVVPHREWQESYTELQHLTRQHEFVTGMYVQAKLNSRALMEQVFPDYIGIFHNLFSKTSLKVLKRCLMNQTTDLGEFIRECTGKSHSKVWIEEKVTKLSEILHNWARQVKSPSQTIALNSMVSLLLEFDEQLTQLEKQMNELAEELPEIQLIKSIPGIGDKLAAQIAAELGDASQFEDAKQAVAFAGLDPGIYSSGKFTATSNRITKRGSKRLRRALYLAVQCGIRRGANRRITDYYKKKRIEGKPYKVVVIACANKLLHHVYAILRKSEPYHEN

SEQ ID NO: 438259 - protein, 363 aa, unidentified
MNATAALPVVGVDLAKSVFQLAVADGTWRVVEQQRLTRLQFERWFINRAVGLVVMEACGSAHHWARWLNGLGIEVRLLPAAYVRAYVKRNKTDAADACALLEAARCAEIVPVRIKSVEQQALQAMHRPRSLWMATRTSRINALRGFCREFGIGIAQGSRLGVEQIGRVLADPHSAVPLLLRRSMSLLVEEIRLLEVRIAQLERELTALARQSPACTTLLSIPGVGLLTATAMVAATSGKVGHFHDARHFASWFGLTPKEHSSGGTRHLGRISKRGDRYLRMLLTHGARSVLRAASTAVRAGKTVDGLRQWALAVQGRSNHNKATCALANKLARICYATLRDGEPYGVTRLNKKVARTAFALPA

SEQ ID NO: 438260 - protein, 428 aa, unidentified
MKYNQNSKILQITEKTLIVGVDIAKETHHARAFDFRGIEYGKRIEFSNDIDGMERFLKWAADIMNKSNKEHLMVGMEPTGHYWLCFAQFLKDKNHKVVLVNPFHVKRSKEFDDNSPTKNDRKDPKTIAMLVKDGRYVEPNIQEGIYSELRTAVDIREMLTKDLNKIKNRVARWLDIYFPEFNKVFADWEGKAALITLKEFPTPAKILCIGTKEILAAWKKEVNRAVGIKRALKLIEAARESVGKKDGIETAEMEIKIILEQYEMLVKQLKKIESKIEELFMQVPGANEMLGIKGVGVITAATFIAEVGDITRYEHPKQIQKLAGYNLVENSSGQHKGQTTISKRGRRRLRSALYKMMMPILANNKEFQELHKYYTTRKENPLKKKQSMIVLCCKLIRVFFVILKKGVKYNGNKMLRDIKRPEKIRNAA

SEQ ID NO: 438261 - protein, 343 aa, unidentified
MQTVTTIGLDIAKSVFQVHGIDAAGQVVIRRQLKRRYVLAFFQKLPPCLIGIEACASSHHWSRELQALGHTVRLMPPAYVKPYVKRQKNDATDAEAICEAVTRANMRFVVTKTPEQQSGLVLHRARHLFIRQQTAVINAIRAHLAEFGIIAPVGRHGVEELLNVVADPNDKRVPEIARACLMAFGAQLRRLKEQILEFDRMIRAWHRSSETSRRLDDCPGVGPVLATALVATVADPKSFRSGRNFSAWIGLVPKQHSSGGKNRLGSISKQGDRYLRGLFVAGALAVIRYAKIHGTKHRPWLTALLARRPTKVAAIALANKIARMVWAMMARGERYKEPAALAA

SEQ ID NO: 438262 - protein, 453 aa, unidentified
MSRRRAAINLKTVKSRAALTITHPNAAGIDIGSAAHFVAVPPDRDDSPVREFPSFTVDLNALADWLTACKVDTVAMESTGVYWIPLFELLESRGFTVLLVNARHVKNVSGRKSDVLDCQWIQQLMTYGLLSGAFRPADAVCVLRSLWRQRATLLRDQARHVQHMQKALTQMNVQLANVISDIAGETGQKILRAIVAGQRDGHILGAMKNARIRASIDEIAKSLEGNWRAEHLFALKQALAAFDFVGTQLSECDGEIEQQLQRLQTHDGEPAKGKQRGRSRNAPKFDLRTQLFKMCGVDLTRIDGIDVTTALAVISETGTDMSRFATVGHFTSWLGLCPGTKITGGKVMSGKTKRCANHAAQALRLAAAALRPSQSALGAYYRRMCARMDKPKAVAAAAHKLARLIYTMLTKGEEYVDQGQDYYEERYRQRVLRQLALRAEKLGMKMVAIEQPA

SEQ ID NO: 438263 - protein, 344 aa, unidentified
MADGLVAGIDTHKDVHVAAVLDRLGRRLEVRQFPATDAGNTQLAGWLAGLGQVTDAGVEGTGSYGYRLARLLADRGVQVWEVNCPDRSRRRRKGKSDPVDAENAARAVLAGEATAVPKDRRGFVGELRLLVLTRRSAVKARTQASNQIKAFLIEADDELRDRLHGLRKARFGRACAALEPADGLRRALAALGRRWLALDAEARELETQITALISAYAPGLLARHGVGAVTAAQLLVTAGGNPDRLRGDAALAAICGASPVEASSGKTSRHRLNRGGDRAANNALWVIAHVRTISDPRTRAFVAKRTATGNSRKEIMRMLQRYIARELYPLIIDALRAAATEGLT

SEQ ID NO: 438264 - protein, 387 aa, unidentified
MTARTVSNLPAAMHVETARCLFAIELSKQSWVIGFITPLSAKISRRILSGGDWKGLLELIEEVRARVSRETGRAVDVISCYEAGYDGFWLHRLLEAHGIRNYVIDPASLQVDRRMRRVKTDRIDTERLLRSLMAYLRSEPKVWSVVRVPSIAEEDARRLHRERDRLVSERVQHVNRIKGLCALHGIYDYQPLRPQAMARLEQLRTAQGLSLPPRLKSEIKRELQRLELVVEMIATLEAERDAIVEDEASTHVNAKKIQNLHKLKAIGPEFAAVLVGEVFHREFNNRRQLASYVGYAPSPFQSGNVAHDQGISKAGNRKGRTTGIELAWLWLRYQPDSDLSVWFRARVGALKGRVRRIAIVALARKLLVALWRYLETGLVPRGAVLKG

SEQ ID NO: 438265 - protein, 386 aa, unidentified
MPDVSSCAPAEVRLWVALDAHKLSIVVATLPPLGGRPEVSRIENTPKAIRRLIDRLGGPAGLAVAYEAGPTGWAIKRLLDGLGVACDVIAPSLVPVRPGDRVKTDRRDAKKLVRLFRAGELTFVMPPTPEQEGLRDLVRCREDLRDARTRARHRVIKALLRYGHVFTDGKHWTIKHRTWLAQQQLADPVAQLALETMRAHLEMIETQMRTVDAQLERLAHDDRWKPGVRVLTSFRGIATLTALSLLAEIGDFGRFGSARELMSYLGLTPSEYSSGESQHRGHITKAGPVHTRRLLIEAAWHYRHPPRLTERQREAETAAHAAGDELAPLVAARAWQAQVRLNHRHRVLSRDRGKRATVTNVAVARELVGFLWAAMTDQPLRQELAA

SEQ ID NO: 438266 - protein, 372 aa, unidentified
MLIVGCDFHPSWQQIAVFDSETGEVNEYKLSNGDGEAEQFYRQLPAPARVGLEACGNSQWFVNLLQELGHAVWIGDAAQIRASYVRKQKTDKRDALHILQLLLEDRFPRLWTPTPEIRNQRQLLVHRHKLVRLRAQVKNQLQHLAMNQGVQKKARLWSQAGQKLLRELPLAGWAASRRANLLELMKLMDRQIAELDRALQQAAEENPQARLLMTQPGVGPVTALAFVLTIGDVSRFPRGKQVASYLGLIPREHSSGGRQRLGAISKQGNRFLRQTLVEAAHSVVRLDEGFRKQYQHRCHRKPKGVAKMAAARKLAIRLYWMLRSNIGYPEIVHIESRSLVPLVDHGQTETLNGRSRIQTTGAKDGPAGLGKP

SEQ ID NO: 438267 - protein, 344 aa, unidentified
MTTQQLIKTDLEVKPIQFAGIDVGAEELILLIRRNGKPLEPQKFTNTPTDRARLVKKLVKLPGLIVCLEATGVYHFDLAIALHDAGVLLMVINPKASHNFAKVLMKNSKTDVVDANTLAEYAARMDFVAWTRPSNEKLALRSFARRIHALTGQKAAAKNHLHALAATQETPKAVLEDAKLAIAQLEKRIDCLTAEALVLINSSPELKRVLTLLTGIKGIAESSAIALMGELLLLPPGLSHREWVKFAGLDPKAFDSGKSVHKKARLSKAGNRHIRSALYMPALSAKTHDPHVSAYFQHLVDNGKKPLQAVCAVMRKLLHAIHGMLKHNEPFDNARFYAIPAAAG

SEQ ID NO: 438268 - protein, 349 aa, unidentified
MRFYSHQHQFYCGIDLHARSMFLCIMDQSGEVLLHRNYQACPDALLKAIAPYREDIAVAVECIFTWYWIADLCSREGIAFVLGHALYMKAIHGGKTKNDKIDSHKIAALLRSGMLPMAYVYPQGMRSTRDLLRRRLYLARQHAELQTHIQNTNTQYNLPYFEKRIDRRSNRTGIGMRFTDPVVRTSVEVDAALMDTIHEQILTIERQINVQVPEHDPVAVHLLRSIPGVGKTLALVILYEIHDINRFPAVGNFISYARLVKCTHESGGKRKTGPNNKIGNVHLKWAFSEAACLFLRRNERGKLYHQRLVSRYGKAKALSILAQKLGRTVYTMLKRRTPFDAKRFFETVG

SEQ ID NO: 438269 - protein, 348 aa, unidentified
MRYYTQQHRFYAGGDLHARTLYLHVLDADGRTVFDQNLPARPDAFLAAVAPFRDGLVVGVECMFAWYWLADLCAAEKIPFVLGHALYMKAIHGGKTKTDRIDAGKIAGLLRGGLFPQAYVYPKDRRETRDLLRRRTFLVRQRAQFLAHVQNTNSQYNLPPLAKKLTYAGNRDVALAERFGHESTRRAIATDLAMIDHLDEQVGELELYLTRSAKVDDPFTFHLLRSVPGIGKILALVLLYEVHDIRRFPAAGPFLSYARLVRCAHVSAGKVKGFGGRKIGNAHLKWAFSEAACLMLRGHEPAKKWLARKQKKCGKAKALAILAARIGRTVYHLWRKQEPFDAKRFLTS

SEQ ID NO: 438270 - protein, 389 aa, unidentified
MKIFVGIDIAKLNHFAAAISSDGEILLEPFKFTNDADGFQLLVSKLESFDKNSIIIGLESTAHYGDNLVRYLVAEFYQVCVLNPIKTCQMRKNNVRKTKTDKVDTFVIAKTLMMQDDLRFITFFDLDMMDLKALGRFRQKTIKQRTRLKIQLTTYVDQVFPEMQYFFKSGLHQHAVYALLKEAPSPKEIASMHMTHLANLLKVNSHGHFTKELAKELRVLAQKSVGANDSAISIQITQTIQQIELLDSQLEKIEAEMTDIMKFNDSVIMTIPGIGYINGGMILGEIGDIHRFSNPNKLLAFAGLDPTVYQSGNFQAKTTRMSKRGSRVLRYALVNAAWNVVRNNATFKAYYDAKRAEGRSHYNALGHCAGKLVRVIWKMLTDEVEFNLE

SEQ ID NO: 438271 - protein, 342 aa, unidentified
MEHYAGIDVSLECSSVCVVDGNGKIVREGKVASEPDALINWLRSLGYELNRIGLEAGPLSQWLFAAMKVAGLAVELLETRHVRKAFEAMPVKSDRNDARGIAQLMRLGWFRPVHCKSMSAQETRSLLTARKLVQSKLHDVENSLRGILRGFGLKVGKTTGQKFAGRIEELVAGHPHLQMIAKALLAVRAVLRTEFAAFEKQTRRMVRSDRQARLLTSVPAVGPIVALTYASAIDDPARFKSSKQAGAHFGLTPKKHQSGETDYTGRISKIGDASVRTALYEAANVMLTKPLKGCSQLKSWAMRIKRRAGMNKAKVALARRLAVIMHRMLADGTPFNAAAAAA

SEQ ID NO: 438272 - protein, 341 aa, unidentified
MTSIIYIGMDVHTTNYTLCCYTVDSDDAFAVVNVKPDYHEILKYMERVRSTRGGNCDFICGYEAGCLGYSLYHQLAKHGVACIILAPSTMPQQKGKSIKTDKRDAKNIAKCLAFNLYSPVYVPTAEDDAIKEYIRMRDDVKADLKRTKQQIISFCTRHGFHYEGKSRWTQAYFKWLDSLVFENALYKETLQEYLALYYTLDEKIAVYDARIEELAHQKRYEENVRKLCCFKGVSTHTALSLLVEVGDFHRFRTAQHFSAYLGLVPGESSSGEKVIHTNITKAGNSHLRTLLVESANSYSRGVVGKKSKVMKDKQGGNSPEIIAYADKANERLHRKFYKIAI

SEQ ID NO: 438273 - protein, 362 aa, unidentified
MQIIGCDLHARQQTLAMLDTGTGEVVNRTLRHEGNSVREFYSALPGPVRVGIEATGSMKWFLQLMEELGIDCQVGHPATIRAAEPRRQKHDQRDAELLLKLLVEKRFPSIWQPSKELLDLRGLLLHRHQWVRLRTRIQNALQAIALANGLRRGSSLWSESGQRDIASLPLATHTAHRRSELQAMYARFEAEIEKLNEQVLEQAGQRPTAELLMSHPGVGPITALATDVFLGDPKRFNDGKALASYIGIIPRENSSGGRQRLGGLSKQGNPLLRFLWCEAAAHAVRRDPELRRFYRRKLVQKGLGKARVAAARKLGIRLWIMLRDQIDYNEFCRRGQMQQKSGDACAGMPGARYGAKSHRLID

SEQ ID NO: 438274 - protein, 393 aa, unidentified
MILVGIDVASTKHDIVITNHLGELFNKHFTIENSRLGYKKLLSEISLAKEFFKDSNVRIGLESTGHYSRNILHFLILEGYDVMFINPLLTNMDRKASSVRKTKTDSIDAKAICMFLIRNQNDFKPYTLSSYHIDELKILVRQRKSLQKQLNRTSNQLRAYIDQAFPEYHKVFKKLLSNTSLTLLSSYASLTEFKRIRVNTLSELIRKFSKGRHGLAKAELLKSLAKDSIGIDSESLSLSIKQSVQTIRSLEMQVNQINDLLEHHITESKTTLLSIPGIGIQTGAIILAEIGDVNRFKTDDALLAFAGLDPSVYQSGNYEGNFKISKRGSSILRWAIFQAAKIAVIHDPVFNAYYVKKKSEGKHYLTIIGHVTKKLLKVIRSILKNNSVYTVSH

SEQ ID NO: 438275 - protein, 390 aa, unidentified
MMRFAGIDIGAERHMVAVVDEQGEVLCRSSPFGEDASGYARLFELLGPSADCLVALEATGHYWRNLFVALIAKDYAVAVLNPLRTARFAEEELRRTKTDAIDALGIARFAQQKRPRAAQLPDSVTEELRELERLRERVAKDFADRLRQLHRAVDLGFPEFTRYVRTLESRLAATILSRYPTAASFRGVSVKKLARIVYDGSHKIGEELARNLIEAAEKSVGAHHSEPYRLRIKYLCEDLDVLRRRLKDLARDVERKLDDHEVGKLLMTIEGLGPLTAACLIAELGDPARFDSPGAIASYVGVIPRIRQSGKKRFTKGPAIPLGNARLRKSLFMVVLQMVRRNPWLRQYYERLRAAGKPGKVAIIAAMRKLLTAVWSVATHRRPFVPIMPA

SEQ ID NO: 438276 - protein, 377 aa, unidentified
MSKISFVGLDVHAETIAVAIAEPGGAVRSVGIIPNRLESIRKLLGKLGPVQHLKVCYEAGPTGYVLYWQLTALGVACEVVAPTLVPVKAGDRVKTDRRDAEKLARCYRSGELTAVWVPDAAHEALRDLVRAREAAKKDQLRARHRLGKFLLRHGRRPTQAGKAWTKKYLEWIKTHVRFDQPALEATLAHYLQEVDHAASQILQLEKAIDEAIAQADPEIRSVIEALQALRGVAQMTAATIVCELGSLSRFPSPRQLMGYSGLVSREHSSGSRIQRGAITKTGNAHLRRVLVEAAWAYQHRPNVTGFLLRRQKSLALSEEVKQMAWKAQYRLHKRYLAFARRGKNKNQIVTALGRELLGFVWAIAVHTEAQRKLATAA

SEQ ID NO: 438277 - protein, 456 aa, unidentified
MPQHRKKSRKIKSPKGLPEHLRHININAAGIDVGSDRHVVAVPEGRDAVSVREFGTFTADLQVIGDWLEKCGVTTVAMESTGVYWIPLFEVLEQRGFEVKLVDARHVKNVSGRKSDVLDCQWIQQLHTYGLLAGAYRPPDEICTLRGYMRQREILVQAASMHVQHMQKALQQMNVLLHNVVSDITGLTGMTILKAIIAGERDPKRLAENRHENCRNSKETIAKSLEGNFRKEHLFALKQALELYEIYQCKIAECEKAIVAQLAKQPDVTDDERPDGGKRVPTRDCIRGDMDVREKMFKLTGVDLFSIPGLGADKLLTLTSEVGIDMKPWKTVKHFTSWLSLCPGTKISGGKVLSKRTKRNANRAAQAFRMAAASLTKSQNALGAFYRRVRSRSTAIQAITATAHKIARIYYAMLTTRKPYVEAGLHAYEELYKQRRIAALRKQARSLGFELSECAV

SEQ ID NO: 438278 - protein, 358 aa, unidentified
MNNHMIQGYVVRGKEIFVGLEDSKKTWKLAVRCDRMLIRQASMEARYPVLLSYLRNNFPECTINLIYEAGFKGFTLHDRLTEDGITCVVIPPHLVTEPKVNRVKTDRRDAGRLALILENGDMPSLCHVPDRERREDRQVSRTLIAVVRDIIRTRNRIHKLLDFHGIGVPFEMKAKWGEKEFGILRELPMSAPLRASLDVLLDLLEHLWRHRETLLAYLKGLCDKERYRKAFAIAESLPGIGWKTAIRFVLEFGEDFSRFTSGKKIAAFAGLTSREHSTGETERRGRITGLGQGFIRSTLIENSWAAIRKDQALLAKFTRVWRNSGSKKKAIVAVARTLVIRLRACMVSGTPYATGIVR

SEQ ID NO: 438279 - protein, 455 aa, unidentified
MTKKGKKSTPSPENMPILHPHAAGIDVGAEEHWVGVPADRDAQPVQKLSAFTCDLHRLADWLTACRITTVVMESTGVYWIPLFPILEARGFEVALVNARHVKNVPGRPKTDRFDCRWLQKLHTYGLLAPSFRPPEDICQLRSLLRHRDNLLRMTVKHIQHMQKSLDQMHLHLPHVMSDVTGVTGMRILRAIVAGERDPQTFAQYRDYRMQSNEETIAKALEGDDRAEQVFTLTPSLALYDFTQQHIAACDQDIERVLATFDSLVDPEEHPLPPPTTAHRRPQRNEPAFDLRTHLYRITGVDLTQVPGLQAPTIHIVLAEVGLNRHKWPTDKHFASWLGLCPDHQISGGKVRSTGSRRVQNRASRALRMAAQSLRTSPSSLGAFPRRMRSKLGPAKATTATAHKLAKIIYHMLKDKTPYRERGAEHYLHKDQERKIRQLRKQAKHLGFDLVLQTSP

SEQ ID NO: 438280 - protein, 346 aa, unidentified
MIEVVIGVDAHKRTHTLVAANANGRKLGEKTIPTTSAGNQAAIRWARQRFGGGLVWGIEDCRPLTARLEHDLLATDAKVVRVPPHLMSRSRASSRTPGKSDPIDALAVARAVLREPDLPVAFHDPVSLELRLLVDRREDLVLYRTATINRLLARVHELDPTHTQSSNWHWKKARETMRDWLIPHAGLTAELARDEIADIIAASESIDALACRIGGLVRGVAPSLLALKGCGELTAAKIVAETAGVHRFKSEAAFARLAGVAPIPHWSGDANVRLRPARRGNRQLNSALHRIAVTQIRWDGPGKVYFERRLHDGDTRSQALRSLKRRLARVVFNRLRADQPRPALPL

SEQ ID NO: 438281 - protein, 402 aa, unidentified
MNAVGIDVSKGKSMVAIMRPFGEIVSTPFEIKHTASDINSLVELINSVEGESRIVMEHTGRYYEVLAHQLSKANLFVSAINPKLIKDFDNDSLRKVKSDKADAVKIARYTIDKWQNLKQYNVMDELRNQLKTMNRQFGFYMKHKTAMKNNLIGILDQTYPGVNTYFDSPARSDGSQKWVDFASTYWHVDCVRKMSKNAFIDHYKNWCKRKKYNFSKSKAEEIYEKAKELVPVLPKDNITKLIIKQAVDQLNSVSTTIESLRTLMNETASKLPEYPVVMAMKGVGTSLGPQLMAEIGDVSRFTHKGAITAFAGVDPGVNESGSYEQKSVPTSKRGSSVLRKTLFQVMDVLIKTHPQDDPVYQFIDKKRAQGKPYYVYMTAGANKFLRIYYGRVKEYLSSLPES

SEQ ID NO: 438282 - protein, 478 aa, unidentified
MDDRRLVGIDLGITSAHTVRVLSGDGTIVCRRKAVPTLASLVEVEQAALVGAMPGVCLEVVVEPTGPSWLPIAVFFGARGHTVYRVSSAKAHDLRRVLSRHAKSNGIDADTLARLPLVDPAGLHPLQLPDAPRAALDRRVRACDRLTQAAACHKRRIKDLVRQLMPMTPLAGELGQADLAVLERYADPRTLLAAGRARLTRVIVKASHGQQGAARAEQWLGAARAALELYADHPAVAFQDLAAEVTTELRLLAATQAELDRHATEREFCYRWVDPAGLARSLPGLAEIGGPALVATMGPATRFATAAKFRSFTGLAPKASETGQTDRKGQPISKAGNRLLRTTLYRAADNARRVDPQLARIYYLQMVERGKDHLGAVCVVAARLAERAWVTLDRGMPYVICDTDGTPVTAEQAKAIIAERFTVPEEVRRRRRSKKGKAPQQVLQGHVTGAQGATRRPSPSPSSLGRRPTPVKQALPRT

SEQ ID NO: 438283 - protein, 476 aa, unidentified
MSKHIHQSAGSSKPGPTVATSKRNSQGKDAGPSIFQPNAAGIDIGAREIYIAVPADRDDHPIRKCDTFTADLHQMTEWLVSCGITTVAMESTGVYWIPVYDVLEQHGIQPCLVNPRSMKNVPGKRTDFHECQWIQHLHAMGLLHAAFRPDREVCAVRSLMRHRNDLVEMASQHVQHMQKALTQMNVQFQHVINDITGVTGLAILDAIVAGQRDPARLAKLRDPRIKASEETIRKSLEGNWRAEHILALKQRLSLYRSYRDQINDCDKEIEKLVAAFAPQADPEQQPLPEDRKQKQRRRKKKSGSPDFDMRTEAYKLFGVDLTQIPGLMMLVFMLFSEVGRDMSRWPTAAHFVSWLGLCPDNDISGGKVLWRGARRTKNRAGALFRLAAHALHRDQTPMGDYLRRMKAKLGPAAATTATAHKIAIIFYTMVKQQVEYDASLWAQRDAMREKRLEARLHQQAAKRGYKLVPLQESPAA

SEQ ID NO: 438284 - protein, 315 aa, unidentified
MSQTNEVIIGVDVAKDKLDIYVHPVANHFVISNDEKAIKTFFSKLNQEYKIKMVVLESTGGYEKRCVKVVSNMNVAIHIAHPNQVYHFAKSHKLFAKTDKIDAKTLALFGEEDHVLPSTVKSISEQENQELMRRKHQLTDALTVEKVRLAHDLSKSVKDSIKRFIKQIEREIELINTKIQEKVVQNEELVEKIKLLESFKGVGNATATMLTLCLPELGELNRAEIARLLGVAPINHDSGNKKGYRAIQGGRFHVRKMLYMVVLSALKYNHMIKPFYDRLIASGKKSKVAIVACMRKIIIILNAMLRDKKEFSILS

SEQ ID NO: 438285 - protein, 353 aa, unidentified
MMIIGCDFHPSFQQIAYAEQETGEYEERRLSHREEAAAFYRSLAGRAVRIGVEATGNDRWFHKLMSELGHELLVGDASAIHASAPREQRTDKRNARHILRLLMENRFPAIWQPSVGNEEQRQLLLHRCRLVRMRTRIKDQLDSMAKNEGLTGSLTWSAKRRQQIQDLPLTGWYAQRRADPLGMLDALETRIKPLDEAVQAAAEQNAEAQLLMTHPGVGPVVSLAYVLILGDWRRFPRGKQVGSYLGLIPAEASSGKHQQRMGQVTKQGNTLLRWLLVEAATKAQSKDPSWHRQYVRLSMNKHHGVAKVAIAHKLAVCLYWMLRSGQNYAQILERGSHAGQSVLAGGCGFRPIN

SEQ ID NO: 438286 - protein, 480 aa, unidentified
MPGSKKTRGRSSGRLSTINPDAAGIDVGSTFHVVAVPGDRDDNPVRTFRTFSGDLHRLADWLEETGIKTVAMESTGVYWIPVFEILEARGFEVLLVNARDVKNVPGRKTDVNDAQWLQQLHQHGLRRGSFRPHDGVVRLRAYLRHRERMLDYASAHIQHMQKALMQMNVQLHHVVSDITGVTGMRIIRAIVSGTQAPERLAEFRDVRCAASEETLREALTGNYRPEHVFALRQALELYDFHQAKIAECDTEIEAVLHTLNEARATPEQPLPTVRHAKGRNEPDFDARPALYTLLGGDLTQIHGFGPYTVLRLVAECGDDMRKWPTAKHFTSWLCLAPRNKISGGRLLSSKTRRSSNRAAALLRIAAVNVGKTQTALGAFYRRLAARTGKAKAVTATARKLAILFYKALRFGMTYVDSGASYYEERYRQRVIQNLHRRARDLGLPRCALPPDARRARRRVLHPGRVEGPNRDHTVRRRIAW

SEQ ID NO: 438287 - protein, 361 aa, unidentified
MRIIGCDLHARQQSVAMLDTETGEVVNRTLRHEGDEVREFYSQLPRPVLAGIEAIGPMQWFLQLLDELGIECRVGDAAKIRAAEPRKQKHDRRDAELILKLLVENRFPAIWRPSQELLDLRALLLHRHHWVRLRTQIQNALQAIALANGLRRGPGLWSYDGQAKIAFLPLPPHASYRRSMLQALYRQMEDEIAQLTGQVATQAEQRAGARLLLTHPGVGPVTALATDVFLGDPQRFADGKALASYVGLIPREYSSGAHQRLGALTKQGSPFLRFLWNEAAAHAVRRDPELQRFYRRKLVQKGLGKSRVAAARKLGIRLWIMLRDQIDYQEFCLRGQKQQSGAAGAGMLEVGNGANCHRPVG

SEQ ID NO: 438288 - protein, 452 aa, unidentified
MAKLQKNEDIGKLKVQHSRCGGIDVGATLMQVCISVEDREHGSNRSFGTDTQSLRDIVNWLLGHGITHVAMEATGVYWIPLFNMLVKNGIEAVLLNAADVKNYTARKTDVNDAAWLMTLMSYDLVKPSFQIDELSRALRNCTRHRMSLVSTCSDCIRRMQKTMELMNIKLTEVISDIAGPTGIRILEAILAGNTSPRDLAALASDRCKSSKEDIAGALEGTWEDELIFILGQHYRQYLLYREQTMQLDSVIEGKLKLLVERILKMNGGEVRTVIRSKKGTPHRKNRISFDIEALSVQIWGVNLMRIEGVSGITMLSLMGELGCNFVSSFKDAAHFCSWCNLSPCHKITGGKIISSKMKKRVNPVGLTLRNCAQTLANSKSPLGDYYRRMRSKGGGKYAVCATAHKIAAIIYTMVRNQQEYDPSKVSVNDRQWLEKRIKHHEKLLKKLKSMAS

SEQ ID NO: 438289 - protein, 312 aa, unidentified
MMTNDSIGIDISKDFFDVHRLSDGGTACFPNAPDGFRALSKWLGEDIPTRVVFEATGPYHRHFERSLSRQLPLVKVNPLQARRFAQACGTRVKTDAVDARMLARFGSALTLEPDKPIDEKQYELRELFSARGSLVKDRIRLKNRLQTQTLALVKRQTKARIEQLTRQLKAIQQDINSRLQECPQRARANAILRSIPGIGEVAALTILIELPEVGTLRQKKAASLTGLAPMTQQSGKWRGKARIQGGRKPLRDALYMPALVAVKHNPDMRAKYQDMITKGKPPKVALTTIMRKLIELANSLIKADREWTQNNA

SEQ ID NO: 438290 - protein, 411 aa, unidentified
MQPVYPVAAIDVHKRMLAVVVGYPDGVRVRLQQAKFGTLPDELQRLVEWLSERQVQHIAMESTAQYWKPVWQVLEPHFRLDLAQARSTTGPRGRKSDFADATRILKRLLAEDLTLSYVPGPEQRDWRLLTRTKTQLRRQKVRLQNQVEGLLEETGIKLSSLLSDLLGASGRRILHALAAGQSDPVALAALGDPHLTASQQQLQQALRGQLRASHRILLRMYLDQLQLLEQQMQELEAEVAANMAVHSATVARLVELPGVAVEAAHQILAEIGPEAQAFPTSAQLCSWVGTCPGRQESAGESHSDRSPKGNRSMRRLMNQVAWAAVKAKGSYFQDLFRRLVPRLGIKKAIWAIANRMLRLIWKILHQAVRYQERGLLAGNPRAIAKRRQRLLRDLHRLGYAVQLSPLPQPPT

SEQ ID NO: 438291 - protein, 356 aa, unidentified
MANRRVASIDRFVKDFEGQPFSIGIDVHKRSYHVAMRRADGKAATWVCPADPQGFVEQIRRLPIHASAVAYEAGPTGFGLARTLRSEGIETLMAAPSRIPRAVTTGAKTDRLDCLKLADYAAKGMIRPIAVPTAQQEAQRSLERRRHDIVDSLRRCKQRIKGFLLFLGLPEPKETERWRRDVTEPLLALPLDPHARLTMESHLRELTFYKNELSQVEEQLRQMARQHDHVLRYLQSVPGVGEVVATTFMLELYDPERFHRSEEVASYLGLAPMVRHSGEKAPSGRLRPAGQTRLRSLLIEAAWMWRQYDPYARNLYNRFLGRMGIAQKAIAAVARKLAVILWRLYVERRNYRPATV

SEQ ID NO: 438292 - protein, 346 aa, unidentified
MNQIIRIGMDTSKHIFQLHGVDAAEQAVLRKRLRRKEVLAFFAKLPPTVIGMEACGAAHYWGRELRKLGHEVKLMAPQHVKAYVKRNKNDGRDAEGTCEAMGRPTMQFVPVKTEEQQAALMLAGVRQQLIARRTQLSNAIRGYAAEFGVTAAKGLDKIEPLLARIAQDESLPALARELFAIEGREYTQVQAELKAIEAKLMAWHRANAASRRLAQIPGVGPIGATALVMKTPDPRAFSSGRHFAAWLGLTPKDHSTAGKTRLGKITRAGDEVLRSLLVAGATAVIQQVRRGRGHPSPWLVALLKRKPPKLAAVALANKIARIAWKLMTTGESYDGARMPGASALAA

SEQ ID NO: 438293 - protein, 411 aa, unidentified
MERVYDKCCGIDVHKKLIVACFIKGNKQEIRDFGATTRELLEMADWLKEGGCEMVAMESTASYWKPLYNILETCELNAMVVNARHMKAVPGRKTDVKDAEWIADLLQHGLLTASYIPDKDQRELRELVRYRKSLVGERNRELNRLQKMLEGANIKISGTITDINGKSARNILEHILTGKRIDSAEYDILYEKKVIAHNLKATKEQIIDDLNGVMSELQRKMMRILLDHLDELNAHIKELDDDIDSFMKPDEKKAASVIQGIPGIGNTSAQAIISVIGTDMERFPTDAHISSWAGLCPGNNESARKRKSGRTTKGNALLRDTLVVCAHAAVKNKKSYFAAQFARISAHRGKKRAYVAVAHSMLVAIYHILKDGVVFKDLGAEYYNQFNRERKINAYLKKLKALGWEAPVVAA

SEQ ID NO: 438294 - protein, 347 aa, unidentified
MRFYTKEHLFYCGIDLHARSMYVCVLDQKGQTLVHENMRAEPESFLRAIAPYREDVVVCVECMFTWYWLADLCSQENITFVLGHALYMKAIHGGKTKNDRIDSRKIAGLLRSGMIPQAYVYPAEMRATRDLLRRRNYIMRKRADLLAHIQNTNSQYNLPEFGKKISHKINRQGVVERFEAKDVQRSIEIDLELIDHYTRLLTNLESYITRTARYHNPQALYLLKTVHGVGKILALVILYEIHDINRFPRVQDFVSYSRLVKCARESAGKRHGTSGKKIGNMHLKWAFSEAAVLFLHSNPDGMAYKKRLEKKHGKSKALSILAHKLGRAVYYMLKRERAFDMNKFLAA

SEQ ID NO: 438295 - protein, 370 aa, unidentified
MLNVTTFVGLDVHARSIKAVALDAMTGEVRCAAFGYDAAAVADWVKAIDPKAKCVYESGVTGFDLQKRLAALGVDCVVGAVSKMIKPSADRRRKNDRNDAEFLARMLSVGNVVEVWVPDDECEAARDLTRALDDAREDLKRCKQRLSKFLMRHGHAFSETTPTGRRKGNWTAAHWAWIRSIEFPEKADDEVLAYYIDAVRQAMENKKRLEKLVEAEASKPRWKKRVDSLRCLKGVDAMTAADIAFEAGEFSRFKSARSFAAWLGLTPSEHSSGESARQGGITKAGNKHLRRVLVEAAWHYISASPHPKDLAKGQAPDPAARRHAAKGIRRLVKRREEMLGRGVHKNKANVATARELACWCWAVGRMVENG

SEQ ID NO: 438296 - protein, 410 aa, unidentified
MVTVGIDWSDRSHSFCILDDAGKRLDAFEIPHGQAGFETAHNRISKRSPSPDDARIAIETKDSLIVDFFLELGYSLYFLNPRQTDRFRDRHRMSSAKSDGFDAYVLADAVRTDSHLFNTLSPLDEQSLTLRVLTRTREGIVRRKVAISNELTAALKRYFPVALELFSSLDTPEAIGFLLQYPTYAQAITVSESRIHSILKKQGLSDRIAGKHAQIIHSKLEEPQPTPAQSATRAYPIAVKSLLRQLHDVLRELEAIEQDIRDNYTNHPNKELLESLPGIASTLGPILAAELGSDISRFVDVKMLKAFAGSSPVTQRSGKYCAVKYRRACNRRVRQALHLASQSAIVCCRWAREIYDKMRSQGKSYGRALRAVANQLIEILYAVLTRRAPYSEDYHLKMKLIHSKTTTVLT

SEQ ID NO: 438297 - protein, 360 aa, unidentified
MRIIGCDLHARQQTLAMFDTETGEMENRTLMHEGKEVREFYSELPRPVLVGIEAIGPMQWFLNLLEELGIECQVGDATKIRAAEPRKQKHDRRDAELILKLLVEKRFPSIWMPSRELLDLRALLLHRHQWVRLRTQVQNALQAIALANGLRRGPSLWSYDGLAKIAFLPLPPHTSLRRSALQALYRHMDEEIEKLTVQVAEQAEQRSGAQLLMTHPGVGPVTALATDVFLGDPQRFDAGKSLASYVGLIPQERSSGRRRRLGKISKQGNPLLRFLWNEAGAHAARRDPELKRFYRRKLVQKGMGKARVAVARKLGIRLWIMLRDHIDYEEFCRRGQKLSGAACAGMPEVGNGANRHRPVE

SEQ ID NO: 438298 - protein, 418 aa, unidentified
MQTELSQYTAVIGIDWADKKHDVCVQDMATGKRRASQVRHRAEDLDEWARSLHQRFDGPIAIAVELSKGPIINVLQKYDFFVIYPIDPSKLANHRKTFTTSGAKDDPTDAEFALDLLSKHTEHFKPLQPQGVGMRTLMTLVEHRRQLMNDRVRITNRLRNALKQYYPQPLEWFDHIDTVLFCDFIRRWPSLPQARRARRATIERFFREHNMNRKPLLERRIKAIKSAMPLTTDDAVIVPHRLRALALVAQLEVTLECIKQYDAEIASLAPQHPDYELFSPLPGAGPVHTPRLMVAFGEQRERFNNAAEVQKYGGLAPVTKRSGESTWIHWRWQCPTFLRQTFVEWAAQTINKSYWAGLYYRQQRAKGCSHQAAVRALAFKWIRILYRCWKTRTPYDETRYLKALQERGSPLLKMAEAA

SEQ ID NO: 438299 - protein, 427 aa, unidentified
MKKNINQSKRSKMDSTETKKKAIKVKKTTKSGSSRVGRGSKGSSKAAIKPKLRWGVQNLLQKLESAKSAPKQPAPDENVEYHIGIDLGDKKSHYCILDKNANIVADGSLATTTIEFELYFREIPRSRIALEVGTHSPWISSLLETIGHEVYVANTRKMGGGKKKRRQKNDKLDAESLARQVRSDPRALFPIRHRGEKARHALVLLRARHAVICARTKLICSARGLVKPFGERLPRCSADSFHNIDRSAVPEMLRDTLEPLFRQIGIMTAQIKKYDAEVKRMCRQAYPETEMLRQVKGVGEVTSLAYMLTIDDPNRFAKSRDVGSYLGLVPRQYDSGDTRPQLRITKTGDRMMRQYLVQSAQYIMGRYGEDSDLKRHGLKLAARGGKNAKKRAVVAVARKLAVLLHHLWITAEVYDPLRNSTRQEKAA

SEQ ID NO: 438300 - protein, 401 aa, unidentified
MQVTFGIDVSKSTSTVCELIGESKNELTITNNRPGFIQLLHELTAFSKHPQIIFEATGVYSRRLQAFLEDYGYEYVVLNPLKAKKEMDMGLRHNKTDKTDAYHLALIQRLYRHPINQLQSQTYKQLNSLSRFYDQLTADLVMAKNRLHQALQSTFPEIENLFSAAKGKNYWQIVNHYPHCDLVRKDDKKQIITWLTNLKGIAFRHAQRTADKLIKLAHQAYPVVSCSSIEVEQVQYYAHRLLNLSEQRKQLIARMVKLAKTLPNHDLENLESIPGFAQTTAVRVLAELGDLRRFSNPNKINAFIGIDPGRYQSGEMDSNLSITKHGNAVARKLLYRAIGQIDLAAKTNPCHIADYYESKKLSSQTKGFKKIAIASIHKLIRTIYALIINDQLYDYNVATHN

SEQ ID NO: 438301 - protein, 313 aa, unidentified
MDNFYFIGVDVSKKKLDFCVLFEGKVLREEQVSNHQQAVARLIGELKNDLEMDNEQFLICAEHTGQYTFPLVCACKSVECKLWLENPSQIKYSSGMQRGKNDKVDAKRIAIYASRFGDKVKYYDRPTEEIERLKQLERERALYVTDLAKYKGQMYDQKDFMPAALYRKKTKRMKGLIQELQAAIDAITAEMEKIIGSTEVLARQMELLMSIDGVGKVVALNVIIETEAFSRFDNPRKFCCHAGVAPFSYTSGSSQHSKNKVSHRANKNIKKLLHMAAVSVTHRKEGELKAYYMRKVEEGKNKICSSPFTCTIS

SEQ ID NO: 438302 - protein, 392 aa, unidentified
MRIFVGMDVAKVLHWACAMDEAGRICLDRMVENTPEGIASFMADLRALGGEPVIGLDVVGSFAHFLEACLLAEGFRLVHAPGIAVNRAGQGFAGGERKSDPRDARTIADLVRTRDLRRILPDTETVVALRLKVGRRRDLTEEQTRRLNRLRGLLGSVHPGLERALDVTCKGPLALLTRYVTPAEIRQAGKRRIMAHLAKTPHLHGPEALAERALAAACAQTLAVSGEGAMAELVRELAAEALDTRAKIARLDRDLATLLTLHPDGALIRSLPGMGAVLAAEFIACVGDIRRFASADALASAAGLAPVIRQSGKKTGWRRTFGGDKALKRVFYQGAFCAVCTKDPLSKAFYDRKRREGKHHTQALIALARRRVTVLWTMLQNRETFDPLKKAA

SEQ ID NO: 438303 - protein, 431 aa, unidentified
MSNKVAAIDVGSEKMHVAIIHQQPRVFECFTDSLHRLKDYLKTEGVSSVAMEATGVYWLPVYTILEAAGLEVVVVNGAHVKNVPGRKTDLQDCQWLAQLHAQGLLRGGFVPPAAIRKLRQYVRLRQDHVRSGSQHILHMQKSLDLMNIKIHDVLSETVGVSCLRMIRAMVAGQRNPMALLELCDKDVVRRKTDLLLRALRGTWDEEHLFSLQQALEAWDFYQQQIAACDGAIEKVLKELAAQKSEPPPGAKPTMKRRRHNAPELPELETLLHRLTGADLSALPCLSAYSQMLIVSEVGTDLSRWATPQHFVSWLGLAPGSRHSGKRRRNQKRFRGAAGKIFCVIARSLGRSKYLALSGFYRRLRSTRGGQVANIACARKIATLFYNALKHGIQYVEKGLVDYEKKYRQQAIQRMKKAATRFGLTLVEPQLA

SEQ ID NO: 438304 - protein, 366 aa, unidentified
MSNLLYCGLDVDDNAFHAFLISSDGEFYEFSCRPNLKHLLEKLEKFKDRNVKICYEATYLGFSLCRDLRKEKFNCVVIAPNLIPEMSGAKIKTDKKDAKKLAIYLMKEMLTEIHVPELEDEAERDLTRTRTFIQEQLKQLKNHIQATLRRMGLDYKKETGKLNYWTDDYLRWLREVTSRDIELPLKENLLLLQTLFYQQKEMLNRYDLELAKLCELPKYKKRVEALKCYRGIADLSAIVIVTEIGDINRFSHPRKLMSYLGFDVCEYSSGGKERKYGITKAGNSQIRRILVEACQSSDRPPKVHYGLTTRRAKVDHQSIQIADRCMNRLHKKAYQMNMKNKNRNKIKVACAREMTGFIWESLKRVA

SEQ ID NO: 438305 - protein, 342 aa, unidentified
MTAIGVDTHKATLAACAIDDLGREIVEETFSNDPAGHAAFIAWASSVAPEVTIGIEGSSSFGAPLARAVQSAGLCVREVPPHLSRFERRRTRRPGKSDPGDALAIARVTAREPNLPPIRLPDRTSEIRLLLEAREDLIGETTRARNRLHAHLRVLLPGYGGKVANLVAARHRTMVRGLLRGNATVQGELARSLLDRLLRYERECDALTRRIEALVEGHPLLALPGAGPITVARLVAEAGDMRRFRTPDAFAALAGVAPIPASSGQVQRMRLNRGGNRQLNRAMHVIAVTQSRFHPPAKAYVTRRIEADGKTWREAIRALKRQLVRPVFRLLVEGSEVRLEVA

SEQ ID NO: 438306 - protein, 342 aa, unidentified
MQIAVLGIDLGKNSCSVVGLDAGGRVVLRRRLQRDGVVKLAAGLPRCVMAMEACCGAHHLGRRLRDQGHQVRLMSPEYVRPYVKAQKNDERDAEAIAEAATRPTMRFVELKSETQLDTQSLHRARDRLVGERTALINQLRAFLLERGVIVPQGRRKLELQLETLLTGKEASLSPRTRLLIEDQRAEWRELDRRIQAFDDEFALLARTDEAARLLLTIPGIGPLNATALVAAIGKAETFGRGRDLAAWLGLVPRQMTTGGKPKLLGISKRGNRYLRKMLIHGARAALPTLSKSEVPLGGWLRGLLARAHVNTVVVALAAKLSRIICAVLRTGQKFEIRAATVS

SEQ ID NO: 438307 - protein, 337 aa, unidentified
MEHFAGLDVSMKETHVCVVDRDGDVALETMATTLPEAIAEALAKAPSCQRVVLETGRMAPTLYHGLEALGVPVICIESRQAHLALKSLATHKTDRNDARGLAQLARTGFFKPVHVKSLPAHAVRALILARKKLVGQRVTLENQIRGLAVVFGVRLPRGLSPAFAKQVTSSSQGVAGLACAMTGLLAARNAVLEAITAIDRDMKRLARSSEACRRLMTIPGVGQLTALAFVAAIDDPDRFQRSRDVGAYLGLVPRRYQSGEVDYTGSISKCGDRRVRTLLYEAANVLLTRYRGKLALKEWALDIGRRSTMRKARIALARRLAIIMHAMLRHGTEFKAT

SEQ ID NO: 438308 - protein, 427 aa, unidentified
MAAREKVGEPEFVAFVGIDWADQKHVWCLQPANSRKREGGELEHKPEVVEAWVSELRQRFGHGAIAVAVEQVKGALVYMLGKYECLHLYPVPSTMSASMRQALYPSGAKDDPRDADLLLDLLLQNRDKLRRLTPDNEATRRVQNLVEERRKLVEEKTAQLNRLTGYLKVYFPQMLEWFAKLDTKLACEFLERWPSLEELQAAAPAEVRKFFRQHRGRHPELTEWRLQGIGQAMSAIRDGAVIEAKRMVVQVIARVLRTLLEGIAALDAKITEAAEAHPDFFIFQSFPGAGAALAPRLLAALGSQRDRYASAEEVQKYSGIAPVTERSGKKKWVHFRWACPKFLRQSFHEWAGHSIAQSVWARAYYQQQRQRGKDHHAAVRSLAFKWIRIMFRCWQDGAAYDENRYLATLAKRGSLLIPVPAAAATSL

SEQ ID NO: 438309 - protein, 383 aa, unidentified
MGDHSEAFVAFDTSKLRNAVAIADGGRGDEVRFLGEIDNTPAATAKLVRKLASKYERLTFCYEAGPTGYGLQRQVKSLGHECIVAAPSLIPKKAGDRVKTNRRDAMSLAKLLRSGDLTAVWVPDCQHEAMRDLTRARETAMLDLRAKRQQISAFLLRRGVHYPEDKRTWSKSHLNWLASQKFEIAEHRIVFEELMEAMRQAQGRLDRLEAAIRTAVPDWSLGKLVIALMAMRGLDIISASTIVAEVGDLSRFRTPRELMAYVGIVPSEDSTGDKVKRGPITKTGNRRVRRMLVECAWSYQFPPRLSKDKQVKVDAVPQAVREIAWKAQCRLNQRYRALLRRGKLKNIAITAVAREFVGFIWAVAQAVGAAPVANNRTAPAAAR

SEQ ID NO: 438310 - protein, 407 aa, unidentified
MWFAGIDWADTHHDAVVIDAAGQRVGSIRVSHNAAGLAKLVVFLRGIGDGDSVTDPDRLACIVETSHGLLITALLEAGLPVYPVNPTTVDRHRKPAGAKTDAIDAYLLARTGRSDLADLRRLTPDSPLIAELKALTRDQDTLIQSQTRLVNQLTACLKAYYPVALELFGKLQQPTTLAFLRAFPTPEQAQAATAKQITRTLRAAGYASADTKAAEIRQTLREPQLHAAPPLVRAKARLMLALVAQLRPVIDDIAAYDTEIDRLFRQHPASTAFMSLPRAGERLAPRLLAEWGDDRGRYADASSVQALAGTAPVAVQSGNYARVRKRSACTKPLRNVLYQFAWQSTLVEEWAAEYYQRKRQAGKSHPMAVRALANQWVRIIYALWTTRTAYDREVFHAAQQAHAPHAA

SEQ ID NO: 438311 - protein, 419 aa, unidentified
MKKIKPKRPYAVNKKVLIATVDGGKEKHYGYFRCPDGTDGKSLPFENNGSGFQEFLERITSTARAHGLEEIIVGFESTGPYMEPLAQFLKSRRGVRLVQVNPMHTKRLKELSGNSPLKTDRKDPKVIADIIELGHALTVVIPEGPAAELRRLTQGRERTITSRTRLLNQMQCLLASFFPEFLQVMHDITTASAQHLLKHHPTPQDIVNLGETALASLLRKVSRGKIREDRARALFEASRASVGITAGRDSMLLEIRLILETIVSYDCFIEDSEAEMVRQLEQIPYSRVILSLKGIGPVTAAGLIGEVGDFTKFGTISEVMKLAGLDLYEVSSGKHRGKLRISKRGRPLMRKLLYLAALSAVRKDGVMHAWYQRALSRGMKKTKALVAVSRKLLVLIFALVRDHSVYVENYAKPTFQEAA

SEQ ID NO: 438312 - protein, 415 aa, unidentified
MEGLQPLHRRVAGIDVHRMLHMVTVVIEQPNGSIEQTSREFGGFRRDCRALAAWLSELRVELVVMESTGIYWKSVHAHLEHAGIAAWVVNAHFIKHVPGRKTDMSDSQWLAVLARFGLVRASFIPPKDLRELRLVSRYRRKLTHMHSAELNRLHKVLDDAGIKLGGVVSDINGVSATAMVKGLIEGQPIDSLLGLARGALKLKRDDLQAALDGELSARHLFVLKHIHAHTLSLQRELADIDAYLLGAMQPYALAHGLLQTIPGIDQIAAALILIEIGDDMERFGCAERLASWAALCPGNNESAGKRKSGRTRHGNGVIRYILCECANAARMTKSSLAAKYRSLMGRKSHKKAIVAVAHKMIRLIYVLLTRQQAYLDQHIDYAAMSARKNAPRWIKQLKLIGKWPAPKSAPATATT

SEQ ID NO: 438313 - protein, 436 aa, unidentified
MSHAGTKTRVQKAAGWFEGRIVVGIDPALDKHGVVALAGGSCHCLGRHMIANTIAGMQVLVKLLKRWKRQCADHLTIAIEEASAYGEAVECFLGQAGFEVMVVSALKVARFKEVMGVDANDLIDAEAVARFVMVQPDLASRPMRNAIQTDAKGSDYHRLRQLSRRYERWSKEHTAVCNELHAVLRMAWLADYQRFFSNIDGAAARAVWQEYPTPAEAAGADRDDLARLIRTASHGRIKKHDCDQKARDIHSTAKIMVLALGKKNPDRWTAWAQDIRMLAGHLTHLVTGMKHIARQIAELLESVNSPLMSFKGIGPVIAAAIHGETLSVERFATADRFARYNGTAPREDSTGRTPKQVKNRRCNRRLRQAFMQLALNAPRYHPASRLYQDNLASAGITGGAARVRLARRLSDIIFAMMRDSREYKLEYHMAHRRSAA

SEQ ID NO: 438314 - protein, 341 aa, unidentified
MNEVSAIGLDLAKYVFQAHGADATGKVVFRKQLRRNKLLAFFAEQPACLVAMEACSGAHYWAREIGKLGHEVRLIPPAYVKPFVKRQKNDMADAEAICEAAQRPTMRFVPVKSEEQQARAVVFRARDLLIRQRTQAINALRGHLAEYGVIMAKGTAHVGELVERAMDPKTNVPEAARFVLDILIKTMETLEMQIKKLDSEITRRARKEKDARRLMTIPGVGPMTATALLALAPAAGSFRCGRDFAAWLGLTPLQRSTGGKQKLGATSKMGERTLRRLLIIGATAVVQQARRRGTSPSSWLGRMIARKPPMLVATALANKMARVVWALMANGGVYKAPAVAA

SEQ ID NO: 438315 - protein, 406 aa, unidentified
MFYVGIDVAKEKHYVCVLNEEKELACKPFWIYSDCLGLNELVKRLYDLSLTCDDFILAVESTGAFSENIYEYLTDLDFKVMLLNSYQTAKYRDFLTMKKVKNDSIDAYVIAELIATGKYKESHISSDSYHTLKVLNRLKKSLDDKIKTIKREISTVMAIVNPEINNILPNIFTKTAIAIIKEYPTAKHLQETTPKKLCKVFRNIKGNNFNEDKAKALIQLSKDSIYLGRAKDARSLMITTNINILELIIQEKTALEHEIKILIDENQDDDFNSRIENLKTIPGVADKTISAILGECGDLTRFDSAKSIIGYIGLYPTQYQSGNSFTTGRLAQRGVPIAKHALYMAAVASVLHNEELRKIFRDKVSSGKSKKESLIIIAKKIITMIYSIFKYNKPYNPNRVLVPYGK

SEQ ID NO: 438316 - protein, 410 aa, unidentified
MRIIGMDIHRVAAGAVALLDGKLMKLGRLPMLRDSLEAFARTALAKDDHVVVEATGNAAAVVEVLAPHVGRVVIANPKQVRLIAHAKIKTDAIDAAVLAKLYATGFLPEVWVPDEPTLALRRQVARRTQFVRQRVRLKNLIHSILHAHLVPPCPHGNLTGISGRKWIAAQRLPGDERAAIHRHLAQIDLIEGSLKEVEADIARATMPDPVIRRLMTLPGIDMTVASGVAAAIGDIRRFADPTKLVGYLGLNPSTRQSGEGPAYHGRITKQGRGQARDMLVEAAWAAARSPGPLRAFFQRIAAKRGKPIAAVATARKLAMIIWHMLTKNEDYIWVRPALLARKFRNIELKAGLPAEHAKRGAAYDYNVPEKRAAERAPVEAAEMAYTNLTSKWRTRPGARKAGKEKAPAPS

SEQ ID NO: 438317 - protein, 321 aa, unidentified
MSTPDDRPREGPSIGIDVSKDRLDVAVGSTGAVRGFDNDAAGHVALARHLRTVAPARVVLEATGGYERAAVAALAAAGLPVIVVNPRRAREFARAAGVVAKTDRLDACVLALYAERLKPAPRPLPSPQQQVLEDPVARRAQLVGMLTQEKNRLRQAAAPRIQKSIEAIIKALRKQIDDAEDDIAREIEDSPVWKDAAERMDSVPGVGFKTVCVLLGALPELGTLSRQCIAALAGLAPVNRDSGKMRGKRTIGGGRADVRTALYLAALSAVRHNPAIKKFYDRLVEAGKPKKVAPTAAAHKLLTILNAILRETTTWRNPMTT

SEQ ID NO: 438318 - protein, 342 aa, unidentified
MDHVGMDLGRRQSHASWLTADGEVVYRRILSTKEQLTKHFGGRTGRLLIEATAMSEWVARHVESLGGWEVVVADPNFAPMYAERTRRVKTDRRDAEALMWACKNGTYRRAHRLSDEARQLRATVKVRKNLVRMRGKMLVQAKALLVPHGISLDARPEQFARRWAAQEMPAPIRHELAPLAEVAGLLDDPIHELDARLEKLGEVDPDVKRLMTVPGIGPVTAATWVAMLDGPARFQTGEQVVAFLGLVPREWSSSDVRLQGRITKAGPGDLRDLLIECAWHVLILPTKGAESLRAWAQNVAQRRGKKKAVVALARKLARILFVIWRDGVPYSPELVRGRALTS

SEQ ID NO: 438319 - protein, 433 aa, unidentified
MLKINYMSTLFVGIDVSSKSNRVYAMDFEENRYISSSFGNNQPGADELAGMIAQCMKKHSSLTSIIIALEATSVYSVHIASFLSTSEVLMPYKPYVFCVNPKATSNYRKSYIGMEKTDPTDAFLIADFARVGRTKKLEPWRGGQYIALKRLTRHRMHLAECITREKTYMVSNLYLKFSELQLLEGDDRPFGDIYGATSAAVLTEFMSPQEIIDSSEERLLAFLARKSRNRISDISRTSELLRKAARDSYRLDKCMYEPLNISLASSFNCIHAYQKEIKLIEQAIEKCINGMNPNGRIILQSIPGIGPVWASGILSEIGDITAFHSSDALAKYAGLYWPKGDSGDFTSEDNKLSKAGSPYLRYYLGEAANSVRKYIPEYADFYARKFAEATKHQHKRALALTSRKLVRLVFGLLVKNQLYTGEKLDAELNIESN

SEQ ID NO: 438320 - protein, 366 aa, unidentified
MSTRQQPMPAEGGVVLGVDTHLDAHVAVVLDGLGRRLDAMSVPADTGGFGALLEWAEGFGPVACAGVEGTSSYGARLTRYLSRAGVRVLEVERPKRRHLGRNGKSDPIDAEAAARAVLAGEAAGAPKSGDGRVEMIRAIRAARRSAVKARTQAANQLRSLRVTATDGLEDRLRGLSTKRLVAATARFRLGSDPEDVEGATKFAMRSVARRYRALSEEIAELDAQLGRLVAEVAPGMLGLLGVGTDHAATLLIAAGDNPERLGSEASFASLCGASPIEAFSGKVVRHRLNRGGNRDANRALHLICVVRMRYDRRTKCYVARRTAEGKSKREIIRCLKRYVAREVYRVLLAGHAPPPIGPPSPASASV

SEQ ID NO: 438321 - protein, 414 aa, unidentified
MALKIVYPICCGIDVHKTFVVACIASTIKGVTTYKRHRFSTYTKGLKELSQWLCENNCKDVCMESTGKYWIPVFNVLEASCNITLAHPKYVKAIRGKKTDKKDAKWIADLFKHDLVAGSFMPPLEIRQLRDLMRYRFKLTNFMSSEKNRLQNSLTVSNIQLGNVVSDTFGKSSMNIIEKLLKNPLDTSFDIEPLIHGSMKSKLPELELAIDGFITPEQAEKLKVMKQHYEDLQSRKADLEKIILSLAESYTEEINLILTVPSFKNIFSAIAVVSEIGVNMDVFPTAKHLCSWAGLTPTNNESAGKKKSVRISRAGCYIKPLLVQCATAVVKSEKHPEIRNRYLKLKKRRGHKRAIIAIARMLLTAIYNILKKKEPYNPELYKKSDVLPVNREITVEQAILLAKSQGFRVTAVTT

SEQ ID NO: 438322 - protein, 389 aa, unidentified
MGSSLHLNTPAACGEHGTMFVAFELGKAQWKLGIVLPGKARLSRYVIDGGDTEAAWQLIAKARARAEKQLGGPVRVMSCYEAGYDGFWLHRWLLARGVDNQVIDPASLQVNRRKRRAKTDRLDLEQLIGALIRLLWGDRLACKVVHVPSPAQEDDRRAWRERERLVKERTAHTNRIKGLLHGQGVRDALPRAKAFGGWLGSQRTGDGLALPAHLVDELKREHGRLMLVEAQIGEIEAQAEAARKAAAPSPLAARINQLIELKSLGPVSSQTLVGEVFFRDFKNRRQVGSYFGLTGTPFDSGDKTREQGISKAGNPRARTAAVELAWLWRRHQPASTLSRWFEERVGHQKGRVRRIAIVALARKLMVALWRFLEHGVVPEGANLRAAPHG

SEQ ID NO: 438323 - protein, 350 aa, unidentified
MKIIGCDYHPRYQQIAMMDTETGELVERRLEHENGEARAFYASLAKPVRVGMEATGYGQWFERMLAEQGHELWIGHASEIRAGVVRKQKTDARDAGHLLRLLAENRFPRIWIPSPSERDTRQLLRHRYKLVCFRVSVKNQLHGLAMSQGVCRKKNLFTAKGREELEKLSLGPWASRRRQELLAMLDQLNPVIDELDRAVQQEAESRADAVRLMTHPGVGPVTALAYVLTLGPVARFERSKQVVSYLGLNPMEHSSGDKQHTYSISKQGNTMMRWLLVEAAQTAVRFDPELQRVYRRLKFNKGASVAKVAIARKLAVKLYWLLRATASCAQMAPMQGSSRGTLVPQVGSIF

SEQ ID NO: 438324 - protein, 484 aa, unidentified
MKKPSNKARRPAPPIVARGKGPIRPATSLPVVHPHAAGIDVGASELYVCVPEDAVSPGESPVRRFGVFTGELDKLVEWLQSCGVKTVAMESTGVYWIPPYQKLEAGGLEVVLANARHLRQVPGRKTDVKDCQWLQRLHSYGMLQGSFRPAEEYCRLRSLMRHRENLVDGCVQQVQYMQKALNLMNVRLHQVVSDLNGETGLRILDAILAGERDPKKLTSLRDERIKRSTPPEMEAALQGDWREEQLFILQQARETYRFVETQLARCDAQIEKVLQQIVVVAERRPSLETPPNPTAAPTPRKKKERRPRKTGHGLKRDLRAELQRICGIDLTQVIGLNVLSVFIIISEIGVNMSRWRSAKAFCSWLGLNPGNKISGGRVLSSRTPHVVNRVSLLLRTLATAVGRSETWLGIFHRRMKARLGPAGANTATARKMACMIYHLLKYQEQYIDVDTLIYAEKIQRIRLNKLRKTAHELGFELLPIKEAA

SEQ ID NO: 438325 - protein, 343 aa, unidentified
MDHFAGLDVSVKETSICIVDDTGRIVREVKVASEPEALLQVLRNPIYRFKRIGLEAGPLSQWLFSALAEAGLPVICVETRHMRAVLQAQINKTDRNDARGMAQMMRAGLYRPVHVKTLRSQKLRMLLTHRKLLQSKAIAIDNDLRGTLRNFGLKVGIVGTVKFEARIKELVENLPDLAILVEPLLMVRRVLREQFGILHRRLLAIVRDDEVCRRLMTVPGVGPVVALTYRATVDVPARFRNSKAVGAMFGLTPSRYQSGEINRTGAISRCGDEMMRVMLYEAAQIMLVRTAKWSWLKAWAMKIARHRGMKKAIVALARRLAVIMHRIWVDGTEFQWTREVAAA

SEQ ID NO: 438326 - protein, 344 aa, unidentified
MNKYNIIAIDLAKNVFQVCKVSPQGKVLYNREISRAKLKQLLTKEKLSLVSMEACSSAHYWARYAKEAGHQVKVINARSVKGFQTRQKTDRNDALAIATASSLDHIHSIRIQSVDKQAMQSMERARNLALTNQIAQSNQIRGLLLEFGIILPQGLAVLRKEIPYVLEDAENGLPDKFRAALLRLWEHLLIQIDHVDDLTKQLEKAIKANPLCQKLMKLEGVGPIGALGLALRLGKGENFSNGRNASASIGLTPKQHSSGGKERIGHISKRSADKRLRSTLFQGALSVITQVVNRPPRTNKDQWLLALIERCGKKIAAIALANKTVRTAYAILKNDLVYQPEKLA

SEQ ID NO: 438327 - protein, 345 aa, unidentified
MYRTRVGVDLAKKVIQVCIYRNKKVQSNIEMTPEEFLSWLINNKPVTIIFEACSTSNHWKQKAIEAGHDARLISAKLVSVVRQSQKTDKNDALAIVQATFMPDVTFIGGKTVEQQQLQSIKRLRELAVKHRDASQKQIIALLFELNIKISNRRGGIISAIEDVLEDATNGLSDECRRAIFLAKEHLSALFKDVKHYDDCMERSVSAHPECKKLTKLEGVGAMNAINLYIALGCAEIGYFSKGKDASACIGLTPIQHSSGGMVKLGSIGKFSKNSRIRSQLVCGATAAVQHAMKRKAKTKKDAWIQGLVERRGKKCAAVALANKTVRTAYAMLSQGTEYKAELLAA

SEQ ID NO: 438328 - protein, 421 aa, unidentified
MPNIEIGVDSMVKENFIYVGIDLHKETHTAVMIDCYNQKLGEITFPNRPADFPKLVTKVKKCNTDAKEVVYGLENAYGYGRPLAVWLIDKGYFVKDVNTAISHRQAKHRGAMYRKSDSDDAGAIALATLNMLDKLPDACPNDAYWSLGQLVHRRDNIMKQRTRLVNQLHEQLCIAYTSYKQFFNDISRPTALYFWEHYPSRKYLKGKSVEDLRAELVPVSHNKCSTKTCEKILDAVASDKVKNNAYQDARDMVTLSIVSDLQHYDIQLAEVDKMLEQMYKMLGCTLTTIPGVNVITAVKILAEIGDIKRFSNANKLAQFAGIAPLHLSSSGKGKDLATKQGNRRLQATIYFLAIQMVQISSKGTPRNPVVRAYYEKRKAEGKTSQQALICISRRLISVIYGMLKNGTEYRMPVVENAGEKL

SEQ ID NO: 438329 - protein, 366 aa, unidentified
MKKIITVATAGIGKMQAQGLTVGVDLGDRSSCYCVLNEQGEIVQEEKVATTPKAMRERFAEVPRCRMALETGTHSPWVSRLLSELGHEVIVAHAQRVELIAKSRRKNDRMDARTLARLARIDPQLLSPIQHRSAEAQAHLTVIRARAGLVRARTALINTVRGVTKSTGERLRGCNPRKVGERAQELSPELQHALGPVLSEIDSLSDRIREYDERIRSIAESSYPKVELLKQVHGVGTLVALTFMLTLEDPHRFSKSRDAGCYAGLQPGKRDSGDSEPQLHISKEGNKYLRAMLVQSAQHILGPFGADSDLRRWGLRLSERGGKNAKKRAIVAVARKLAVLLHHLWVSGEVYEPLRNNSRMAAAAAA

SEQ ID NO: 438330 - protein, 338 aa, unidentified
MKTYAGIDLHSSNNYIGVINASDKRLYSKRHDNRIEDVLKVLGKFKASLQGVVIESTYNWYWLVDGLMDQGYKVHLANPNAIQSYNGLKHTDDKWDSFWLAHLLRLGILPEGYIYPKHQRPLRDLLRRRLMFVSQRTSQILSLQSMITRNRGLNFSGAQIKRFRDDFVDKLFSHRHLVFTAKKNIAAIRFLDQIVSEIEIEVASQIKLKKEFISLLTTPGIGNILGLTIMLEVGNIGRFPTAGNYSSYSRCVESKKTSNGKKKGENNKKNGNRYLAWAYVEAANHAIRCCPKAQKFFQRKMAKNERALATKALANKLTKATYYIMRDQVAFDEDKLFG

SEQ ID NO: 438331 - protein, 427 aa, unidentified
MSNSATGTEEYAALIGMDWAAEKHDVWLWDAATGESRHRVVEHTPEALTEWLGELQAQYPGRRVAVCLEQSRGALIYALMGHAFLALYPINPATLARYREAFSPSRAKDDPSDAKLLAEILRLHRDKLLVWKPDDEQTRTLTFLNEERRKAVDLRTKLVLRLQAALKLYFPQAVEWVGSGLNTPLACDWLSKWPTLEAIQKAKPQTIRAFYYAHNCRRPDQVEGYLKAIAAAKPLTQDTAVITAYQLTVQMLVKQLRALHGSIVEYDRQIAQLFAKHPDAFLFKGLPGAGDVLAPRLLSAFGTDRDRYPAPKDMQTYAGVAPVIERSGKQCWTHWRWNCPKFLRQTFHEFAKNSIPYSAWAKAYYELQKKRGKGHHAAVRSLAFKWIRVLHRCWKDRKPYDEALYLETLKQRGSELANLIAQRHQEA

SEQ ID NO: 438332 - protein, 341 aa, unidentified
MKVSTLGIDLAKNVFQLHGVDHEGHTIMRKKLTRAKFVQFVIQLEPCLFGMEACSSSHHFARLFTRYGHEVKLIPPQYVKPYVKTNKTDAADAEAICEAVTRPNMRFVQIKTEEQQAVLALHTERGILIRERIACSNSLRATLAEFGITIGAGQSHLTRELPAILEDGENGLSPFVRTSIYRQAKHIRELEEQVKQVEEALASWYRTQEACQRIAKIPGIGMLTATYVVAAVGNARQFSTAKQFASWLGLTPKEHSSGGKQQLGGISKRGDGYFRYLLVHGARALTAWVNRNGAIEENAWLRGLLERKHYNVAVVAMAAKTARIMWSMLTHNTEYQPRQLA

SEQ ID NO: 438333 - protein, 412 aa, unidentified
MDVYCGIDWAEDHHDIALVDRDGQLLARRRIGDDAAGLAMLLALLAEHGDTPDDPVPVAIETPRGLLVACLRATGRQIYPINPMSVARYRDRHSVAGRKSDHGDSVVLAGVLRTDLHAHRPLPAGTELAQAIAVLARAQQDAVWDRTTAHNKLRSHLREYYPGFLAAFVPVSGGIMRPEARTILAAAPTPADAATLTLAQLRGLLKKAGRSRGIDTEAARLRDAFRVPQMRQLPLVEAAMGRQALALLGQLDAACAAAADLEHAATESFNLHPDAGIITSFPGLGALTGARVLAEIGDDRSRFQDAKGLKAYAGAAPITRASGKTRSVTHRRIKNNRLNAAGYNWAFSALTASPGARAHYDRRRDDGDRHAAAQRNLFGRLLGCLWHCLITGQDYDETIAFPATAKKISQAA

SEQ ID NO: 438334 - protein, 343 aa, unidentified
MDYFAGLDVSVKETSVCIVDDAGKIVREAKVASEPEALLQVLTNTIYRFKRVGLEAGPLSQWLYSILAEAGLPVICVETRHMRAVLKARINKTDRNDARGIAQMMRVGLYRPVHVKTLRSQKLRMLLTHRKLLQSKAIAIENDLRATLRNFGLKVGMVGTVKFEARIKELVEDLPDLAILVEPLLVVRRVVREQLGILHRRLLAIVRDDDVCRRLMTIPGVGPVVALTYRVTVDVPARFRNSKAVGAVFGLTPAKDQSGERDRSGAISRCGDEMMRVMLYEAAQSMLVRAVKWSWLRAWAMKIARHRGMKKAIVALARRLAVIMHRIWVDGTEFRWTREVTAA

SEQ ID NO: 438335 - protein, 378 aa, unidentified
MRNATVTTTSVVSEKATLPTNPGAGPTRLTVGIDLGDRHSHLCVLDSDGAILEQSRLQTTPAAFRQRFAAMPPARIAIEAGTHSPWVNALLTELGHEVLVANPRKLRAIYDNDNKSDHVDAEQLARFARLDPKLLSPIAHRGMATRADLAILRSRSALVDSRTQLVNHVRGSIKPFGVRLPASSTPTFARKAAWLIPRELRRALVPILRTIADLTTRIVEFERRIEQIATERYPETIKLRKVNGVGAITSLTFVLTLEDPKRFTKSRAVGAFLGLRPGRNQSGKRDPELHITKAGDRDLRRLLVQSAQYILGPFGSDCDLRRFGLALAARGNKSAKKRALIAVARKLAVLLHRLWLSPIDYDPLRQAEGRNLPRRRRA

SEQ ID NO: 438336 - protein, 327 aa, unidentified
MQTKTLGIDISKDKLDVALYQEEYNQLGLFSNDETGFAKLHKWLKKKQGQGCPVCIEATGRYGEGVAYYLHELGYPVSVVNPARIKAYGKSQLKRNKTDQEDAKVIAHFCATQKPDLWRPPSPEARALQALVRRVDSLKTMRTQENNRLHAGLAESFVLDDIHAHIVYLDERIDVVSQQIQTLIEQHPQLQRQRDLLVSIPGISDITAAKFLAEVPDVTQFDSAAQLAAYAGLTPRKNDSGTSIHRRGRLSKTGNSRFRTAFYMPAVTAITWNPIVKALADRLAKKGKEKMVIIGAAMRKLVHLAYGVLKTGKPFDPNYLQNRQFGT

SEQ ID NO: 438337 - protein, 431 aa, unidentified
MKKPASSVIKPTPLLYAAYIGIDWADQKHDICLYDPTTEQFEFSIISSQPEAIATWAEGLRKRFNGGAIAICTEQKRGPLIYALCKYEFLVLYPINAQTVAKYRQAFAPSRAKSDRSDAQLLVELLLKHNDKLQAWQPGSAILRSLQQLVENRRMLVAEKVRLTNRITAALKGYYPQVLDWFEDKDTQVFCEFLTRYPSLNAAQVASKQELEQFFKSHHVVQAKTIGRRLEQIQQGVALTEDVGIVEPLQLLVTALIAQLRVLLPSITTFDTKIEELFNSHSDAELFAALPGAGPHLAPRLLVAFGEERTRFQTAQDLLRYSGIAPVKESSGQKSWVHWRWSCPKFLRQTFVEWALQTRKHSFWAEAFYQMQRKKGKTHHGAIRALAFKWIRIVFRCWQDRVPYDEVKYLMALQRKGSPLVQNLALTGETK

SEQ ID NO: 438338 - protein, 429 aa, unidentified
MTKKLMAGIDLHSNNLFCGVVNAEGKKVFERKLPCDLPQVLKALAPFKNRLDTIAVESTYNWYWLVDGLQDAGYHTVLANPAGMEQYNGLKHSDDKSDAFFLAELLRLKILPTGYICERQLRSVRDLLRRRLMLVHKRTALILSLQSLHARTLGSRLSLGEAKVISVEEVEKNFAHPADRLISGLDVKLIGELSKSIKQIEKMVLATTRELPCYQVLQSLPGVGKILGLTITLETADVKRFATAGDYASYCRCVDTRRISNGKKKGENNGKCGNKYLAWAYVEAANFAQRYDLQCRQFYDRKSAKANKIVATKALACKLAKAAWHMMSEQTAYDPARMFPPAQRQPDSSDSAGVDLSPESRSRRKACQDGEQSPSQPAVFGPKTALRLLPSRALSSASARANIARAKVGKKSNLGTVTGNSGKGLAKKP

SEQ ID NO: 438339 - protein, 482 aa, unidentified
MKPKPQEKTKKATDHPRQQHWREMNRQQRREMMRNIQSEDISLEVVHPDAAGIDIGNESHYVAVPPSRNNQPVRRFGCTTAELKAMADWLEQCGIRTVAMQSTGVYWIAVYDVLEQAGLEVYLVNARETKNLPGRKTDVQESQWLMKLHTYGLLRNSFRPSQEIRMMRTYWRQRNDLVQSAGRHIQRMQKALTQMNIQLANVLSDVSGVTGQAIIKAILGGERDPHKLAAFRNPRVKASEEQIARSLEGNWQEDLLFVLKQEQDGYEFCEKQMAECDRQLNHYLKQRADRSHGAPLPEETRKGRRKKKSGNKPQFDLRTGLFRMSGTDLTRVDGIDVITATTILSEAGWDMSKWVTEDHFVSWLRLCPDNRISGNKVIGKGRLPTNNRVTIALKMAASTLRLSDTYLGAQFRRFRTRLGAPVAIKAMAAKLARLVYRMLCYGMKYVDKGAALYQAQHRHLQIKQLNRKAASLGYQLIPVPAA

SEQ ID NO: 438340 - protein, 319 aa, unidentified
MNTVSSEQVIGIDVSRDWLDIYCLPDGKRLRLPNISEGHAQVASLARRRGALVCFEATGGQEWRLWASLDAARIVARQLPPAQLKAFAASRGTRAKTDRIDAELIARFMMFRPEAGRSHPAGKLRALRALTSKRAQLVEMRKRLLAQIKAHEKLATAGMFTDMDMELKALLDTRISELEERIEQAIAANGTLVETARILRSIPGVGPVASTMLIAEMPELGAISGEQAAALTGLAPIAHDSGALRGKRTIAGGRRALRHVLFQAALVAANHNPTLKAFAQRLRDAGKPHKVIITAVARKLVNIANALCKARKPWGLQGA

SEQ ID NO: 438341 - protein, 345 aa, unidentified
MKNSNVIGIDLAKHVIQVCKIDKHGELISNKAISPSKLKELLAKTVPSIVAMEGCGACHYWSRLAQRHGHDVRVISPKKVKGFLQGHKTDANDALAIAIASIQLGMKFSQIKTEEQQSLQTLETSRKFLGKELVALNNHIRAYLYEYGITSRRGRKSLRETMAIVLDDLDTRLPTCLKNTLGLLWERYKLTVEQLTEAEKYKAHLVNQLEPCQRLMDLEGIGKVCASMLYANIGDGREFKNGRQASVYIGLTPKQHSSGGKTYFTGIDKQGGNKELRAALYQGALSVIYKLPSEPRTVKEAWLIELVKRAGVKRTCIALANKTVRTAWALLSTGKSYEPALLSRS

SEQ ID NO: 438342 - protein, 354 aa, unidentified
MRIVCALDVHRRQITYAIVDVRSGELSRGRITPATRESVREWLARFDSLHDVQFALEGTTGWRFVAEEVARAGHRAHLADPAETAVKRGRKRRAKTDRADCDLLLRLLSARELPESWIPPAQILELRTRVRLRKTLVDERTAWQQRLQAQLFHQGVPAGVRPRTRAGREALASVELSPAGRELVALALRMIDVIDHELAPLDRVLSLYARRQPGCRELITRLYGVGPVTATAIVAELGDARRFGCSDDAVRHCGLDVTVHQSDRKRAPGHLSHEGPELLRWALFEAAQQACRPASPDYDYYRQVARRIDHNRACLSVARKLCRRAFHILRELGAEALAPIEPAPPGEEVTPAAA

SEQ ID NO: 438343 - protein, 325 aa, unidentified
MEAILKSCAGLDVHRDTIVVCITKGKLDKKPESTVTTYDADTESLIALMKYLEANECSHVAMESTGVYWKPVWNILEAGNFELILANAAHIKNLPGRKTDVKDSEWIAKLLRSGLVPKSFVPDEGIRDLRDLTRYRKKTVQMMASEKNRIHKILQDANIKIATNISDVFGDTGRMILEKLVNGEKITNKDLLEFTSGRGKGGLRKKIPEILRSLNGRIRKHHVEMLRYSYRHIEYLEKQLREIEEELKTYSMPYKKEIDLLDTIPGVDQKAATTIIAEIGIDMEVFPTAKHLSSWAGLSPGNNESAGKKKKQNSKRKYQFDINVM

SEQ ID NO: 438344 - protein, 371 aa, unidentified
MNETITSYVGLDIHKDSIAIAIAEAGRAAPRFIGTINPLPSELCKALRRQRCRPESTLLVYEAGPCGYGWVRYLRKQHWRCEVIAPSRITRSPAEQHMKTDRRDALMLARQVRAGDLTNIVIPDERDEAMRDLSRAREDAVATRLRVRLQMKAMLLRLGRGDVRYKSWSQAHERHLSTIRFEHPAQEIAFNEYRQAAKEACERVERLTEALRELCGGWRMRPLVEALMCLKGVNFVTAVTFVAEIGDLTRFAHPRALMSYLGLVPSEYSSGASRRQGAITRCGNKHARRMLVEAAWNNRFKAQVSRCLQVRQEGQPKVIRQISWKAQLRLSKRWRSLAVGRKLNQNKICVAIARELAGFVWDVARHTSLEP

SEQ ID NO: 438345 - protein, 424 aa, unidentified
MRRCAPTSHFSVGCDPLGRKSPPYEILNRGVFSVFIVGIDISKRNHEATIIDQKGSIIGKSFRFANSFTGFNHLLETVKRTTGNDVVFGMEATGHYWLALYTHLRKKGFAVHVINAIQSDALRAMYIRQQKNDSRDSFIIADVIRFGRFCETTVSPSDLYALRELCRHRFYTVDSVSDIKRKVIALLDQIFPEYENLFTDTFGKTSLELLSEYTTPEEILNVDTDKLVETINIASHGRFGLKKAIEIQDAARNSFGILLATDTIALLIRQYIEQIRFVEKQIDVLDAEIARMLSTFETQLTTITGVGPTLAAVILSEIGDVKRFNSAAKLAAFAGVDPTMKQSGDFSGSRNRMSKRGSPYLRRALWLAATVASFKDPSISAFYQRKRAEGKPHMTVLGHVVRKMVNIIFAVLRDNSSYSPATIN

SEQ ID NO: 438346 - protein, 348 aa, unidentified
MKIVGCDLHAKQQSIAMVDTETGEFTEKTLVHEGNKVREFYASLEGLVVVGIEATGAMQWFLQLLEELGIECRVGHPAKIRAKETRKQKHDRRDARLELELLIEDRFPTIWMPSSEQRDLRTLLRDRHQWVKMRTRVQNTLQAIALNHALRQGRALWSPTGQKALQALALSRYTSQRRDELVYLYVQLQKRIKELDRQVEEEAKGRPQALRLLTHPGVGPITALATDVFLGDAHRFANGNKVASYIGMIPCEHSSGKRQRLGKLSKEGNALLRYLWTEAVMHAAAKDPELKRFYRRKLIQKGMGKARIAAARKLGIRLWIMMRDQIDYEEFCRRGKLRQERGNPCGNA

SEQ ID NO: 438347 - protein, 346 aa, unidentified
MLYAGLDLSRKRLDVHLLEESGATKEVTAVAPDADALRTLVASTARHGEPVRAAIESMNGARFVHDTLELNGWDVEIADAQKVKGLAPLACKTDRIDAWVLAELARRDLVPAIWLPSPGVRAERERARFRLHLVRHRTALKNRIHATLIAFGHPCPVSDLFGTSGRELLNRLEIPEPWAGTMEASLALIEELEVEIDLCEKDLRRLGADHRYVPLLTTAPGIAWILGYTIASEIGDISRFPSPKKLTGYTGLCPRVHQSGGKDHRGPLARNGPTYLRWALIEAATHAAHHPAYNDHYERTKRRLGKQRGSKVARVEIARKLAEAIWHMLTRNEAFAPAGPPSVLVA

SEQ ID NO: 438348 - protein, 312 aa, unidentified
MEAQNIEFKQIVSRGCGIDVHKSVLVATIDGEGLKRETREFSAFTSSITEMKEWLLENKITHVAMESTGVYWKPIFNILEDSPLKVWVVNARHIKYVPGHKTDKKDSKWICKLLLAGLLKPSFIPPKEQRELRDLTRYRKKLTQQISAEKNRIVRILESCNIKLSSVLSDTSGAVGTKLINILCKGEKVTMQEIDQVYHKKLQCTKEELLEACNGCITPHNVYLIQLVQDNIEAIQKSIEKLNLRIKAMLLSYQDVCELLKGIPGLDTKTIEDLIAEIGLDMSVFPTEKHISSWAGISPGNYESAGKKKAEE

SEQ ID NO: 438349 - protein, 346 aa, unidentified
MEQFVGLDVSQDMTHVCVIGGDGKIVWQGKCRSTPEAIAEVIRSKAPNAVRIGLESGPLCTWHWHALKKMGLPVVCLDARHAKATMSGQVNKTDKNDAYGLAQIVKIGWYREVRVKSLESHTIRSMLGARAQLVGMRVEVTNQIRGILKTFGIVLTRRTGAPFERLVKEACNDDASMLNRTVHSLLSVYTGLKSQIHCLDRELLAYARKSAVSRHLMSIPGVGVLTALAFVTAVDDPTKFAKSRSVGAYLGLTPRCYQSGEIDQNRGISKCGDSLVRTYLFEAAGTLLTRVEKWSALKAWGLRLAKRSGLKKAKIAVARKLAVIMHRMWVGGEPFRWSTAEPAPTA

SEQ ID NO: 438350 - protein, 368 aa, unidentified
MRRMERDRSICLRSEETVPEPGRHVPHHPSPNSCQGHQARMFTRSGYTQEAARQTPLVVVGIDVSKARLDVGVRPSDERTSVPYDAHGITTLIAQLTPVQPTRIVLEATGGLERPLVRALVDAALPVIVVNPRQVRDCAKATGPWAKTDVLDAQVLARFGEVIRPPLRVIPDAQTQELAALLARRRQVLAMQGAEQNRLDRAPARGRKRIEVHLRWLRAELARLDADLDEMIQQRPVWREREDLLQSVPGIGPVMSRTVLAELPELGLLNRKQIAALVGVAPFNRDSGRRRGHRAIWGGRAPVRRALYMAALVATRWNPVIRVFYQRVRTAGKAPKVALVAAMRKLLTMLNAMVHAGTPWQPVVAQDT

SEQ ID NO: 438351 - protein, 419 aa, unidentified
MDVLIERCAGIDIGKDEVVACVRTPGPGGRGRRKLTRTFASFTAALEEMAGWFAAEGVTDIAMEATGSYWKPVWYVLEQCPFRLELVNAQHVKILPGRKSDVLDAEWLAELLEHGLLRGSFVPPPVVRELRDLTRYRKRLIQTHTAEGQRIEKTLEDAGIKLDSVASDLLGVSGRAMLRALVAGERDPDVLAELARGQLRRKRPELRQALRGRFRDHHATLIRLCLDHLAHLEGAITELDDRIDALFATATSEDGVPFARARDHLDTITGVGRRAAECILAEVGTDMSRFPTAAHLASWAGVCPGNNITGGKRGSGRTTHGDVWLLDILTQCAWAAAHSRDTYLSAQFWRLARRIGKKKAAIAVGHSILVICWHLLTDDRDYDDLGGDYFTRRNPDRQRDRLIAQLTNLGYRVTLDKIA

SEQ ID NO: 438352 - protein, 341 aa, unidentified
MYPIKAVGIDLAKLIFSIHGVDANDKCKLRKTVKRNKLLAEVAKLPPCIIGMEACSGAHYWAREFTKLGHEVRIMASKFVIPYRQNEKNDANDAEAICEAATRPKTRFVSIKSEEQQAVLCLHRIRQGAIKDRTARINRLRGLLAEFGITMPVGRYPAQKAIGSILEDGENNLPFLARELLNDLWQSIKALNEEILKYDRKLYALANQMKDAKRLMSIPGIGEITATAVVATVNDAKHFESSRSFAAWIGLVPRQYTTGGVVRLGRISKRGEKHIRTSLIHGARAVIANCKNKTDRTSLWVKDLVERRGFKRATVALAAKNARLIWALLHSEKDYQVDYVK

SEQ ID NO: 438353 - protein, 281 aa, unidentified
MTEAYDGRQVVGIDLHRRRSVIVRMTGDGRKLETVRITSSAAALRREIAKAGKHPRVVVEATYGWYWAADVLEAAGAEVHLAHPLGVQAYSCRRVKNDQRDAADLAGLLRMGRLPEAWIAPPEIRELRELTRYRHKLVQARTSVKDQVHAVLAKLGIPVTHAGIFGVHGQAWLDGLRLPQPYAGKVTSLRQLAGELTAEITLLEQVLGGLLAGHEGYAAIRQLPGIGPVLAAVIVAEIGDITRFRKPGQLACWAGLTPRHRESDAKVSRGHISKQGLAVAL

SEQ ID NO: 438354 - protein, 343 aa, unidentified
MEYYVGLDVSLKQTSICVVDQAGLVVREGVVDSDPGAISVYVRAKAPDAVRIGLETGPTSTWLWTELKRLGLPVICIDARHAKPVLKMQINKSDRNDAIGIARIMQTGWFKEVHVKDIDSHSVRALLTSRALLVKIKRDLENHVRGLLKNLGLVIGRAKFNVFAVRAEELIEGRPELIAAIRPLLEARSAVEQQVSELDRKVMKLVRRDAQVRRFMTVPGVGPITALAFKATIDDPARFSRSRSVGAYVGLTSRRHASGEVDWTGRISKCGDAMLRSYLFEAAGVLLTRVPKWSAVKAWGIRLAKRNGLRKAKVAVARKLAVILHRMWIDGTEFTWSKMEIAA

SEQ ID NO: 438355 - protein, 414 aa, unidentified
MALKIVYQICCGIDVHKTFVVACIASTNNKGVTSYKRHRFSTFTKGLKELSQWLCENNCSEVCMESTGKYWIPVFNILEDSCNITLAHPKYVKAIRGKKTDNKDAQWIADLFKHDLVAGSFMPPLAIRQLRDLMRYRAKLTNFMSSEKNRLQNSLTVSNIQLGHVVSDTFGKSSMKIIDKILENPLDTAFDLESLVHASLIKKLPELELAVDGFITPEQADKLKVIKRHYEDLTERKSDLERIILSLSAPYSEEINLILTVPSFKNNFSAITVVSEIGVKMDVFPTAKHLCSWAGLTPTNNESAGKKKSVRISRAGCYIKPLLVQCSTAVVKSEKHPEIRNRYLKLKKRRGHKRAIIAIARMLLTAIYMILKKNVPYNADLYKKSDVLPVDREITVEQAILIAKNQGYRIRSTA

SEQ ID NO: 438356 - protein, 343 aa, unidentified
MKHDAGLDVSVEETSVCILDETGKICREVKVTSHPEDLLRILQDPTWHLDRIGLEAGQLSQGLFDGLADAGLPVVCIETRHAKAFLKAQINKSDRHDARGIAQMMRVHLFRPVHVKTLTSQKRRVLLTARKLLQEKAIAIENDIRGLLLNFGLKVGVVGAVKFEERIHALVEGMPDLAEILERLLDARRRLREHFAALHRKLLDLARGDAVCRRLMTIPGVGPVVSLAFVATIDTPARFRKSKAVGPVLGLTPIRSQSGNTDRVGRISLCGDAMMRTLLFEAAQTMLRQTTRWSGLKAWAMRVAQRRGGRKAVIALARRLAVIMHRMWCDGTEFRWTREAQVA

SEQ ID NO: 438357 - protein, 351 aa, unidentified
MWIIGVDYHPSVQQIAFVNTDTGECGERRLSHSDGEAEKFYRELKAAGCSVRVGMEATGHSRWFERLLAELGFELWIGDPAQIKARRVRKQKTDRQDAALLLQLLLEDRFPRVWVPSAENRDLRQLLWHRHRLVQMRTRIMNQLQAVAMNEAVRRKQALWSKSGRAQLESLPLAPWAARRRHDLLELLDRLNPTIEELSAAVEQEAKQRPEVLRLMRHPGVGPVTALAFALIIGSAERFACGKQIASYVGLIPCEDSSADRRRLGHITKQGNSLLRFLLVEAAQAAVRCDPDWRRRYTHLAMRRERRIAKVAMARKLAVSLYWMWRTQRDYQQTMKFGSHAGESDYVHGVQ

SEQ ID NO: 438358 - protein, 420 aa, unidentified
MKVVYQTCCGVDVHKSFLVATIIKTTSGVEPSYQKKRFSTFNNSILQFKEWLVKNQCRDVCMESTGKYWIPVFNLLEDEINVTIANPKWVKAVKGNKDDTKDSKWIGDLFRLGLVPGSYIPCKPIRILREFTRYRYKLTSCRTSEKNRYQNALTVCNVALDSVVSDIFGKSATSVIDYLIEQPDNSINHEEIASRLLRSLKKKSDSVIESIEGYQMTDSQKYRMRLIRAHLDYITSTINDIDTMLDSLIAPYENAVQLLCTIPGVDRNSAITVISEIGTDMTPFSNSKRLCCWAGLTPGNNESAGKKKSVRITRAGVYLKPALVQVAHAAVKSDKSPYYKQKYERIMKRRGKKRAIIAIARMILTAIYQMLSTGETWNPTDLFKIDMPEPMKEKQKEKAIKQAMKLLIREGKISESQLAS

SEQ ID NO: 438359 - protein, 347 aa, unidentified
MNSPYGGVQWVGMDLHRRRSVLVRLASDGQRLGKMVRFNNDPARLKREIAKAGPAPKVVLEATLGWYWAADALSEAGAEVHLAHPLGVKAFAYRRVKNDERDAADLADLLRLGRLPESWLAPRETRELRELVRGRHKLVNLRTNCRNQAHGVVAKLGVTVPMSDLFGARGNVFLDELPLPAGYAARLRALREVMGALDRQLALLDQEISTRLADDVGYRAIQKIGGIGPVLAAVFVTEIGDVTRFPAPKYLCSWAGLTPRHRESDLKVTRGRLTKQGSKLVRWAAVEAIQHAPENTPMRAHRDRIEARRGSQARNLAKAAAARKLLTLVYYGLRDGEVRCLARADEA

SEQ ID NO: 438360 - protein, 422 aa, unidentified
MVLRGVPMALKIVYKICCGIDVHKTFVVACFASTNEKGVTTYESHRFSTYTCGLKNLLQWLLSRNCKDICMESTGKYWIPVYNILENDCSIVLAHPQYVKAIRGKKTDKKDAKWIADLFKHDLVAGSFMPPADIRQLRDLMRYRFKLTCFKSSEKNRLQNCLTVSNIQLGTVVSDTFGKSAQAILDKLLENPADTSFDLDPLIHKSLKKKLPELRDAIDGYITPEQAGKLKVIKSHYEDLESRKAELEELILALAAPYQQELAILQTAPGISSIFTAIGIISEIGTNMEAFPSAKHLCSWAGLTPTNNESAGKKKSVRVSKAGCYIKPLLVQCANAVVTSKKHPEIRNRYLRLKKRRGHKKAIIAIARMLLTALYHMLKNGENYNSELYKKSDSLPVDREITVEQASIIARNQGYKIKSATA

SEQ ID NO: 438361 - protein, 355 aa, unidentified
MIIIGVDFHPEFQQMASVDTDTGEFQEKRLAHPEEAEKFYRALAASGQKVRVGMEASGHARWFERLLGELQFELWIGDAAEIHSKRARKQKTDRQDAELILKLMLKDDFPRIWVPSWENRDLRQLLWHRHRMVQTRTRIMNQLQAVALNEGLRCKKRLWRAGGRQQLESFRLAPWASRRRHDLLELLDQLNPTIAELSQAIEREAENHPEARRLMTHPGVGALTALAFVLIIGNAERFRCGKQVASYLGLVPLEKSSGNRRRLGHITKQGSSMLRFLLVEAAQVTVRSLPEWRSHYFGLVMRRGRKTAKVAMARRLAIRLYWMWREGRDYEQRRGSVRTQDSPEQAMVCTRTPRN

SEQ ID NO: 438362 - protein, 383 aa, unidentified
MSAHLVGVTHYSCDSERLSAAERANKLLDLRGTRMIVAEAFGYVVGIDTHARTHTYCILNARTGAIVVGATFPNTSPAHRRVIAWIQRHCPNTKVLAAVEGTSSYGAGVTAALVDAGIDVTEVRPTGRHRARAGKSDVIDAEAAARSVLGCEQQRLPIPRESGEREDLRILLAARRILDQQRTANRNALTALLRTIDLGIDARKPLTNDQVRVIAAWRGNQKPSSTTAHAVARREARRLAKAVLEQTVQLDDNHRQLRGLAGQAAPGLQELPGIGPVTAAIIICAYSHRGRIRSEAAFAALGGVAPLPASSGNTSRHRLSRAGDRQLNRAFEVIVRTRMTCDPATRHYVARRTAEGMSKRETRRCLKRYVCRSVFRHLQAATT

SEQ ID NO: 438363 - protein, 460 aa, unidentified
MNQYFLGIDASKGYSDFVMLNAKKQPVIDNFQLDDTFEGHSRLYEFLHRFNQDYPQATIYAAVESTGGYENNWYQSLLTFQGSLPIKTAHLNPLGVSHNSKADLKRNVTDKISAQNVAEYMIAHPEKVSYQHQDALASLRKQWGFITMLTKQSTQLLNQLESLVYNANPEILIYCKDGTPQWVLKLLTRYPTALRLSKAKVKSLARIPYVKAERAKQLVATAKKSVASASDKVTEQLIVATVKQIVHQKKIIKTQTQILANECQIPEVALLKTFIGISDYSAIGLMLQIQSVARFLTSKKISSFFGIHPEYKKSGDGSYKFRMSKKGRKEGRRILFIVAMSAIQSNPLIRDVYQQAVERGMEKMAAMGLCMHKILRIVYGMLKHNKAFDPQIDLKNRQKKPPQQSKIRQDKNRRYQDFDSKAPISRRQKMKRKERKQSQNVDNVEYGIIEASVPVNQLPN

SEQ ID NO: 438364 - protein, 412 aa, unidentified
MKDLLEISCGLDVHKEKIVACILTGPLGKPTRSEIREFSTLIPDMIALRNWIVSKNCHHVAMESTGIYWMPIYEILEDAFYGDITLLVVNARHMKNVPGKKTDMRDSEWISTLLRAGLLNGSFIPEKRIREFRDLNRYRKSVIRDITSQKNRIEKFLQSSGFRLSSFISDIFGASGRNIILHLIEHGQIDKTALDSCLKTKTRNRIDEILMSVNGTLSEHQKAFLRILMTHYDSLKKHLAEIETSLEEDMAPFTLQVEQLNSIYGISTTASCAIIAEIGIDMKPFKTAEHICSWAGLCPGNNESAGKRKSTSVTKGNPYIKSMLCEIAWVIAGKRNTYLSAWYWRIKQKKGAKKAIVALARKLLVIIYTMLKQGTLFDESCFETRRKHCEQKQLSRYIRELEKHGYHVEAQN

SEQ ID NO: 438365 - protein, 367 aa, unidentified
MSSVSHRGFTHLGLDVSKDSIAVAVLDPDRDRAPVHKIFHDEESVRKLIGRFEDRSQVWACYEAGPTGYELCRLLDRLGVRCDVIAPSLIPKKHDRVKTDKRDASKLAGLHRAGQLTPIAVPSPAQEAVRDLVRLRGDMVEDQTQARNRLTHFLLRHSIVWRGGSNWTCKHQRWLAGLRFDDRALAATFAHYRATVALRDSSLEAVEAELTPYFDRDPFGTQVPRLAAYRGITAMGGLCLAAEIFDWRRFPQARSFMCFTGLVPSESSSGNTEHRGNITHAGNRHVRAQLVEAAWAYRHRPNVGKTIAARHEGLPPEVVARSWNAQVRLTKRFAQLAARKNVKSVVAAAIARELAGFVWAEMTATTA

SEQ ID NO: 438366 - protein, 383 aa, unidentified
MQVIYPRCAGLDVHQKTVVVTIMMTEQDGTVQRKQQSFSTMTADLLALDDWLRQHQVEVIALESTGIYWRPVYSILEEGRTVILVNARHMKAVPGRKTDLKDSEWIADLLRHGLLRASFIPPRPIRELREVARYRKTLIQERADEVNRLQKVLEMANLKLASVATDVLGKSGRAMLEAILGEQQDPTILAELARGRLRAKLPQLRQALEGRVEPYHRLLIERMLAHIDFLEESILLVQQDIQGRLKPYKEAEELLESIPVLQEAAIATIISEIGVDMDRFPSDKHLASWAGVCPGNYESAGKRLSGKTTPGNPYLKAVLCELAWVIAHKLLVIIYHVLKTKKPYTELGEEYFDQLEKTQIERRSVRRLEQLGYQVTLTPKQVA

SEQ ID NO: 438367 - protein, 354 aa, unidentified
MKRTTKYVALDVHQATTSASVREESGRVIARSVLPTDGAAITEFVRGMRGAVHVALEEGTQAQWLHDLLAPLVDRVVVCDRRGAPRQGNKADQVDADQLSEHLRRGGLRAVYHGSVDRTTLKELTRTYRNLVEDATRVMLRLKALFRARGIPASGKRVYHPRARAQWLAQLQDPGARLRAEALYAELDVLRTLRPRAKAAMVTEARRDPAWPVLRTIPFFGSVRVALLLATMQTPWRFRTKRNLWAYAGLAVVTRSSADYALVAGQAVRRRRPPLTRGLNRNHNRVLKDVFKGAATAATARPGPLQDFYHSVIARGTREELARLTLTRKLAALTLRLWKKGERYDPTKLTTPAR

SEQ ID NO: 438368 - protein, 421 aa, unidentified
MSKGRYRTVEFKHVDWNEIGNRIEGEHSVLAVDVAKEDFVATLLNADGTALERFKWHHPQDTAEVIERLERLAQGRRLEAVMEPSGTYGDALAWQLRQGGVALYLVSPKRVHDAAEVYDGVPSLHDAKAAELIGRLHLQGISQPWQEPAEARRGVAAVLTRLRVCKARQQGAGNRLEAHLSRHWPESLAILGLDTATVPALISTYGDPASVAADPHGAEALMHRSGRPMLSKEKIQALLASARHSVGVPCLAEERELLRWLAADLLEARKQVRQIEREIEHHVDHTPALTGMAALIGKVSAAVLLATVGAPQDYPDAGSYTKATGLNLKERSSGKHHGQLKITKRGPSLARFYLYFAALRLIARDPLVKRWYERKTNRPGALKNKTVIALMRKLVKALWYLARGSSFDAEKLFNPKAIAST

SEQ ID NO: 438369 - protein, 465 aa, unidentified
MKELFVGADVSKGYCDFIIMDENLKVAEEHFQLDDTYKGHQIFTNIIEKLFNTYRDLTLYVGIESTGSYENNWFSMIWNLGKELNIKLIRLNPKHVYHQKKAGFNKITTDKTSAISIAEYLKLHKGKLRFNEDHKYTDLRRLWTYLKLIKRQLTQCTNQLEKYLYTANPQILPHCKTHKPTWFYSVLKKYPTANKLSKAKVTTLIKIPYITEKLAIELIGNARCSVASFTSEIGERLILRVVDEIIILRKTIKETEADIIKLCDIPEVEILKTFKGIGNIWACGLLLEIERIQRFKSAKALSSYFGVHPVFKESGDGFSCVKMSKEGRCEGRRILFNVVKTAIYYNEWIKDLYEDYQAKGKSKLSAIGILMHKTLRIIYGMLKNKTGYSPRIDIENRIKFYQPKKKKSSMTVRKSRRFQKQDDEAPISRRQYKKRREQEVSPNDMSHRLRDHTPAPGNYVKSLGK

SEQ ID NO: 438370 - protein, 364 aa, unidentified
MKQNNTVVLESKAAVKLTVGLDLGDRFSYYCVLGDGGEKHSEGKVATQAEALEEWLRELGPACVAMEAGTHSPWISRLVERCGSEVIVADTRRVPAIWQNRRKSDRVDAEMLARLARVDRQLLQPIHHRGEQAQQDLSAIRARDALVRARTMLINTARGLVKGMGRRVPSCSAECFSRRLAEALPLGIQKILRPCTRAIEELNHNIRAYDRQLSAVARKRYRETRFLRQVQGVGPLTSLAYVLTLEDPRRFARSRTVGAYLGLTPRRDQSGDSEPQLPISKAGNEYLRRLLVGSAQHLLGPFGKPCELREWGLRLAERGGKNGKKRAVVAVARKLAVLLHRLWVTRAKYEPWRRSSPPAMAIAA

SEQ ID NO: 438371 - protein, 354 aa, unidentified
MLIIGCDYHPSFQQIAFVDTETGEVKEQRLVHREEAEQFYRDLAAQGRQVRVGMEASGHARWFERLLAELQFELWMGDATEIQRKRGRKQKTDRQDAQHILSLLLKNDFPPIWVPSWENRDLRQLLWHRHRMVQARTRIMNQLQAVALNEGLLCRKKLWRERGRQQLEAFQLAPWASRRRHDLLELLDRLNPTITELSQAIEREVEKCPAAQQLMTHPGVGPLTSLAFVLIIGDASRFQCGKQVASYLGLVPLEDSSGNRRRLGHITKQGSSMLRFLLVEAAQVTVRSLPEWRRKYAHLMMRRGRKTAKVARARRLAIRLYWMMRQGWDYQQWNKFGSHAGQPGNRDGVRSNIE

SEQ ID NO: 438372 - protein, 314 aa, unidentified
MYHYIGIDVSKKVFNVFDGKKDLIFDNKENLSPLKKYLKKRYPDLSSLVILFEATGIYSYHIKAFCADHLIKACIINPQASHNFSKSLGERSKTDRTDARTIWAYHKLIDDKAISIPRVDPILMTLSSYLASYRLTLKQRLSLSNHLEGIKDKTLYRLLKKELKRLCKLEQELLIQIDNYIKQYPQLKEDYQRLLSISGVGKKTAISLLVLFHTYSDTNRNQITALIGLDPIQRQSGTSVHGRSRISKHGNQMMRKSLYMPTLCCIKHNPKIKAFYERLVSKHKPKKVAVIAAMRKLLLIAHAIYQNKSVYVPG

SEQ ID NO: 438373 - protein, 426 aa, unidentified
MKEKFDYLSTLFVGIDIASRIHVLSALDFNQDFFIKMKPVQNTQDGATLLESMIVDVLKENHQFKYVVIAMESTGFYGVHLANYLSASDLLAPFSVRVYCLNPKEVKNYKKSFNDIGKNDGIDSFVIADFARVGRISIKPWRGPQYLALQRLTRHRMHITECIAREKTYMLNNIFLKFSEYALLRDGEHPFSNKYSATAEAILTEFTTNEDIVNSSVEDLVAFINAKSRGRIADPEETAKMVQAAARNSYRLDKCLYEPLTISIASSFNCISSFEKELKAIDKAILQTVQGINPDEYTVLNSIPGIGKVYSAGILAEIGSVKAFQNANALAKYCGIIWNDNDSGDFEAEDKRMSKAGNSYLRYYIIEATGSVIRHCPEYERFYQKKYAETRNHQHKRALALTSRKFIRLLYGLLDKSQLYSPEKSR

SEQ ID NO: 438374 - protein, 462 aa, unidentified
MARRIWSDQPGLDVVHRDAAGIDIGSREHYVAVGPDRDAEPVRVFGCFTTDLRRMAEWLQRCGIKSVVMQSTGVYWIPVYDVLEQYGLEVWLVNAQDTKNLPGRKSDVQESQWLLKLHTYGLLRRSFRPTPEIRGLRTCWRERGEYVEQAGSCIQRMQKALTEMNVQLATVLSDLSGDTGMSIVRSIVAGERDGKRLAEFRDPRVKASKQTIAKSLEGTWLPEQLAVLQRQLGDWDHIQRQIAACDVDLQAMLQQIPTAKVQHQPALAPATAPVGKRKRKRKKNGKWSKNEPKFNLAAELQRVTGVDLSRIDGIKAMTIMTVISEAGLDMSKWATEDHFVSWIGLSPRNDVSGGKVLKRKTRKVKSRLATALRTSATTLRQSDSYLGAQFRRLRSRLGPPKAITAMAARQARLVYRMLKYGQEYVDKGAVIYEQKYREQQIRFLEKRAAQNGFALVPLHQNA

SEQ ID NO: 438375 - protein, 355 aa, unidentified
MTSAKYIGMDVHKESISIAVRNAAGKIVMECVIETKASMILQFIDGLRGDLQVTFEEGTSAAWLYDLLKPHVTKLVVCDPRKNASLREGNQSDKIDARRLADLLRLNHLYSVYHGEHGLRSLKELVRSYLTITKDLGRVMSRVKAIYRSWAIPCSGKQVYAPRHRVEWLGKITEPGVRRRAEFYYQQLDALRAVRQQVRRELLAEGKKHPAWKRLCQIPAIGPIRAAVLLGILQTPQRFRTKRQLWAYSGFGIETQSSADHRSVNGQLQRVKKQSSLRGLNRNCNHDLKNLFKGAAVVASSKPGPLQEFYTTLLSKGIRPEMARLTLARKIATIVLMVWKRGVCFEAQHLKPQTA

SEQ ID NO: 438376 - protein, 392 aa, unidentified
MFYVGIDIAKRKHEAVVTDDKGDIVVKAFSFTNDLTGYNYLLGKIKLVTISREQIVIGMESTSHYWLTLYTRLIKDGYNVHIFNPIQSDALRGMYIRQSKTDARDSFIIAEVIRFGKYSESNVPQEKLFALRELTRNRYFMVDSVSDLKRKTTALIDQVFPEYEKLFSNNFGVSSMALLLKYPTPEKLKNVSLQSLAKLLSKASNGYFGLGKAKEVKETSKSTFGVIDNCGIYATLISTYIKQILFIQDQVKEIDSQIAEIMSELDSKITTINGIGQALGAVIISEIGDISRFQNSDKLAAYAGVDPTVKQSGDYCAVRNHMSKRGSPYLRRAIWQASVIAVGCDPMFKAYYDKKAAEGKRYMNIIGHCTRKMISVIFAVLRDDKEYIPMAA

SEQ ID NO: 438377 - protein, 370 aa, unidentified
MKTRKASAKFSTAATDRPALGAKTVREHGSSRRLNLGIPDSCVDVKSASCKVGSTAMAEATFVGIDVSKKGLDVATTAGDAWSCANQEGDFGALIERLKNAPVQLIVLEASGGYEGPVVGSLSAAGLPVLVVNPRQVRDFAKACGRLAKTDRIDAQVLAQFAQRIQPELRPLKDEQTTQLTALLQRRQQILSMLMAERQRLQIAPANVRTDIREHINFLVRRLKDVNGSLDELIRHSPMWREREELFKVVKGVGPQTLRTLCALLPELGRLNRKQIAALAGLAPYNCDSGTLRGTRRCWGGRAAVRSALYMAALSAARFNPVINAFYRRLTKVGKAKKVALTACMRKLLTILNAMIRDGSTWNESLHLTA

SEQ ID NO: 438378 - protein, 352 aa, unidentified
MVIVAEKYSHVIGVDTHARTHTLTHVDTRTGVITGPETFPTSPAGLKRALGWITRTTATGSVLVAMEGVRSYGATFTQILTSAGVEVTEVPPPGKALRARKGKSDQIDSLAAAQSVLPLQAASLLKPRSAAGIRASLATLLAARRRLDGYRTVQRNALTALVRTTDLGVDARRALTDRQITLITSWRTRPSDDLATSIARSEAVYLAKSIRGLKTELQDNAAHLGALVQDLAPGLLDEPGYGPITSATILVSYSHAGRFISEAQFASLAGVAPIPASSGNTVRHRLNRFGDRHLNNAFDTIARTRMRHHEPTRAYVETQYEAKKNYREIKRKLKRYLARSTYRKLEKYDIPA

SEQ ID NO: 438379 - protein, 336 aa, unidentified
MTIIRVGLDTSKHVFQMHGVDENEQPVLRRQIRRGAVEKFFAKLPSTRIGIEACGASHHWARLLRGLGHEVLLMPPQYIKAYVKRGKNDKIDAEAICEAMSRPTMRFVPVKTAEQQAALTMLGVRDLLVKQRTMLINAIRGHAAEFGVTAAKGPKQITELLARLASDEDVPGLAREMIGVLASQLNGLDIKLKALEARLMTWHRQDQTSQCLATIPGIGPIGGVSFALKVPDAKAFRSGRRFAAWVGITPREDSTAGRQKLGRISRAGDEDLRRLLVIGATAVIRAAKPGRTAPWLMGLLARKPKKVAAVALANKMARIVWAMMVSGETYRRPAQA

SEQ ID NO: 438380 - protein, 355 aa, unidentified
MESTKFVGMDVHKDAITIAVMNSAGKVIMESIIETKAVTILQFIQGLRGDLHVTFEEGTWATWSYDLLKPHVTKVVVCNPRKSALLKDGSKGDKIDARKLAELLRGGYLKPVYHGDHGLRTLKELSRSYLTISKDLTRVMNRIKALYRGWAIPCGGTQVYSPCHRSVWLSKIPEAGVRRRAEHFYEQLDALQGLRKQVRRDLLAESRKHDATKLLRQIPSVGPIRAAELVALIQTPHRFRTKRQLWNYSGLGLETHDSAQYRYVDGQLQRCKKPQQLRGLNQDHNHDLKKIFKGAATMASISAGPFHGFYEALLAKGTKPTMARLTLARKIAAITLIVWKKGANFDAKHLKQQAA

SEQ ID NO: 438381 - protein, 477 aa, unidentified
MSRRKRPPVQARPATGPSRPPRAAPPALTVLNPNAAGIDVHSDMHMVCVPADRVGPSPESAPGGLPAQVRRFGANSCDLHAIADWLKDCGVTTVAMESTGVYWIPLFELLEARGFEVWLVEPGQLSRCGARPKTDVLDAQWIQRLHSYGLLQPSFRPPDSVMALRGYHRQRQMQVRYAASHTHHMQQALEQMNVKLTEVVSDVTGLTGQRIIAAILAGERDPRRLAALRDPKCKNDRETISRALEGTWRPEHLFALQQAFDLYQFHHRQIAQCDERIEAELARLPNHSGDKPFAAKPRRCGRKPNDLNFDACGPLFRALGIDLTEVEGIDVGTALVILAEIGVDVSRFPTEKHFASWLGVCPRQHESNRTRKKRGPRKGKNRVAIALRMAAQALGRTESPLGVFYRRIKSRIGGKGAITATAHKLACLVYRMLRYGTAYAKQSMEEYEQKVRQQVERSLRRKAAALGYELVPHTTSG

SEQ ID NO: 438382 - protein, 418 aa, unidentified
MKSSKTKKVTKINDKTLIATLDIGKTVHYGYFRAPNGNDVKPFAFYNSKKSYHEFWNKLCQFKDTEGLEEIVIGFESTGPYAEPLCHFLRKKPVKLVQVNPVHTKRVKELTGNSPNKTDKKDPRVIADVICLGHALTMIVPEGPAAELRRLSQARERAITDRTAMINQLQHLIFVIFPEFLKVFKLSTKTARYFIKHYPTPEKIYVLGLEPVGQIVKQVSRGKLGQDRAKQLHEAAGNSVGITEGKASIVFEIEHLVTRVEAEDQFIDRLEKQMRTYLQQVPYSQYMLSIRGLGEVTVAGLIGEVADFNKFDTISEVMKLAGLDLYEISSGKHKGQRRISKRGRPLIRKLLFFAAINAVKSKGIMHKKYQQMLDRGMLKMKALVAISRKLLAIIFAIVRDQTKYVENYSNSNHYKLAA

SEQ ID NO: 438383 - protein, 416 aa, unidentified
MDTMYERCCGLDIHKKTIEACFRSGKKKTHMSFGTTSAELRKLTMWLVENDCQSVAMESTGSYWKPIFNILELSGTDMKIIVVNARHMKNVPGRKTDVNDAEWIAELLQYGLLRPSFIPDREQRELRELSRYRKSLVGERACEINRLQKMLEGGNIKLTSVVSEVTGYSSRRLLDRLLRSDEPMTEDVISGLVHTSLAGKSKELETALDGLLSELQKELLIKVLDHIDDMSRRIADLDDFCRKQMKKYEDALDKLDEIPGIARRTAETILIETGLDMSRFPTAKHFARWAGLAPGNNESAGKRSSGRTTKGNPTLKSTLIQSAKVAARKKNSFFKARYQKIAAKRGANRASVAVAHSMLIAIYHILKSGERFKDLGEDYYNQFNKEKKKKYYLKKLTKLGVNLKEATLSISIQAAT

SEQ ID NO: 438384 - protein, 350 aa, unidentified
MLIIGCDFHTRYQQIAMLDDATGESTERRLEHENGEAHTFYRGLPKPVRVGLEATGPMHWFERLLAELGHELWIGDSAKIRASELRKQKTDERDARLILELLLTNRFPRIWVPTAAERDLRQLLWHRHKLVRLRTMLGNQLHFLAMSQGLCRKKKLFTKKGRHELMGLALGPWASRRREELLQLLDQVGPSIAELDRAVLEQANRREDAVRLMTHPGIGPVNALAFVLTIGPVARFRRSKQVVSYLGLNPSEHSSGGKRRLGAISKQGNTLVRWLLIEAAHHTVRGDPKLRQDYQRLRFRRGNAVAKVAIARKLAVRMFWMLRSGADYAQLVRMQGSPGATLMETPPSLG

SEQ ID NO: 438385 - protein, 365 aa, unidentified
MTNLLKQVAGIDVAQDELVVSLGRMDDQTQIELYAFKTFQNNIKGFKGLIDWVSKASIQGVPFRFLMEATGVYHEPLAYYLTNQGLEVSVVLPNKISNYFRTLDVKTITDKTSSQAIARFGLERKLEVWKKPLKVFRDLKQLTRERDQLVAERTQLKNQLHAERAEAFPNESSIGRANERIQLLNKQEKEIKVEIAQIVKQDQSVAKKVEAITTIPGIGRLTAVIVLAETNGFELIRNKKQLVSYSGLDVQEKQSGTSVKGKSKISKKGNRHLRKAIHLPALAAIRSEERFKAIFVRLVSRHGIKMKAAVAVQRKLLELIYIIWKSDTAYDKDYLKTLDSSKAPNELGQPLKNETALNRLACSCL

SEQ ID NO: 438386 - protein, 351 aa, unidentified
MRTVAEEYDRVVGVDTHAATHTMTLLTATGGVVEHRTFPTTAAGLGRALSWIRNRTQDRTCLVVVEGSGSYGAQLTERFTEGGVVVAEAPTLPAARPGGKDDVLDSARIARAVLGLRLDQLCWPRAGGTRTAIRVLVSARDQMGTERTKTINTLTALIRSVDLGVDARKALTSAQITTIAGWRARDENLAVAACRREAIRLASPILTLGRDLAANMAELRQFTAAEVPELLVLSGVGPVVAGTILLARSHPGRVRSEAAFAALAGTSPVPASSGNTIRYRLNRGGDRQLNRVLTTIVLVRMRFDQATRAYVARRRTEGRTTKQIMRILKRYITRQVFRILTTAHPTPAPAA

SEQ ID NO: 438387 - protein, 316 aa, unidentified
MSAPVHIGIDVAKAMLDVCLLPSGQRLSLANDDAGITQLVGLLKQQPVQLVLLEATGRYERRVASELLEADLAVAVVNPRQVRDFARALGKLAKTDKIDALVLAQFAQLGHARTCEKQPENRTLLDDLVTRRRQVTAMLATEKTRLQVPQARHTQVMIAKVIRLLEQQREDLDRDIARLIESDDDWRNKRDLLSSVPGVGGTTASQLVADLPELGKLNRQQIAALVGVAPVNRDSGLMRGKRSIFGGRATVRCVLYMAAFNAMRFNPVIRRFAERLRAAGKPFKVVVVAAMRKLLTILNIMLKENRPWNAGKLQTA

SEQ ID NO: 438388 - protein, 409 aa, unidentified
MPYRIAGIDVHKKMLAVVVSNVEVESEFQFERRMFGGNPEQLRSLAAWLLEQEVEEVVMESTAQYWKPVWETLERYWKPIREKREDARRRSGTLHLAQALSNRGRRGRKKDFLDAERLVKRLVARELTLSFVPDAEQRLWRTVTRRKYQLTRDRARLQNQVESLLEEAHIKLSSLVSDLLGASARRMLKALADGETNPAALAALADKQLRATPLKMALEQLQFLEQQIGELDQETASLLRQHQDALERLAEVPGLGVDSATQILAEVGPTAATFPSGKHLSSWVGACPGDEESAGVNYSHRSPQGNRHMRRLLNQAANAAVKVKGSIFEIVYRRSVPRLGHNQAIGAIAHRQCRLIWLILHQGVRYEEHGPAVTKQSRQARTARMIRQLRKLGYQVELPNSQPANSAGR

SEQ ID NO: 438389 - protein, 378 aa, unidentified
MYRILKIGMDVHTTNYTLCAVEPLLGEEENVLAQIQIEPDYKLVIQFINRLKERLGVTGKECDILCGYEAGCLGYSLYHQLMNAGVKCVILAPTTMMSEKGKRIKTDKRDARLIAKCLCYGGYHAVHVPTADDNAIKEYIRMRDDHKIALKQKKQQLNALCIRYGHIYEGNKWTRVHLQWMRKLNLPELIRETLDEYLATYDELTAKIERYDKRILELADQPQYQEKVKKLECFLGIRTHTALSLIVETGDFARFRKGNVYAAYLGLAPGEHSSSDDCNRLGITKAGNSHLRHLLIEASGGICKGVIGQKSKTLRARQIGNDADVIAYADKANIRLRRKYYKLIHRGKKRNVAVAAVARELACFVWGMMTDDIHGGAA

SEQ ID NO: 438390 - protein, 339 aa, unidentified
MDITTIGFDLAKTVFQVHGADGEGRPVLRRKLRRGKVLAFFAGLPSCLVGMEACASAHYWARELQALGHKVRLIPPQYVRPFVKTNKNDAADAEAICEAVTRPTMRFAPAKSAEQQSVLMGHRARELLVRQRTMVINALRGHCAEFGLIVAQGASRVEELVAIIEDPGDVRLPPLAREALGRLVEQLRSAQARIKALEATLLAWHRSNQASRRLATIPGVGVITATALVATIGDGAQFRSGRQLSAWLGLVPRQHSSGGKDRLGRISKRGDGYIRRLLVHGARTVLRWRRAKPGTRPGWSDRLLARRPTNVVLVAMANKTARVAWALLRYERIYRPTPA

SEQ ID NO: 438391 - protein, 322 aa, unidentified
MITLGIDVSKAKIDCCIFPSGLTGKRKTKRFDNAQSGFVKLVKWLTELDVNLSDTRAVMEATSVYHENLAHFLYDMELTICIANPARVRAFAKGLSMLNKTDKADSEALVYYANTVKLATWQPEKENVRILKALINRYAVLEEDLQREKNRLEKAQSTQTFPQVLLSINIRIQQLEQEIIRLDEMISSHVNGDSELKNDLALLTTIPAVGRKTGLLMLGLLRSHHFEKASQVAAYVGLVPIHFQSGSSVNKRSRLSKAGDSKIRSSLFMPSIVALQYNPHIKALYQRLREKGKPKMLIVGAAMRKLVHLCYGVLKHQTAYQI

SEQ ID NO: 438392 - protein, 343 aa, unidentified
MDASYEGRQIVGLDVHRRRSVLVRMTETGDRLESVRITNDPQRLAEVMVRAGEGPEVVLEATYGWYWAADTLAELGANVHLAHPLGVKAFSYRRVKNDERDAEDLADLLRMGRLPEAWIAPPATRELRELVRHRAKLVGLRTSVKCQVHAVVAAAGVPVSMSDLFGVEGNELLRTLNLASSSRARIDSARRMIGMLDWEVELFTNLVAGRLRADPGYRAIQAIPGVGPTLAAVFVAEIGDISRFQNPAQLASWAGLTPRHHESDTTVHRGRITKQGSRLVRWAAVEAAQHAAKTEHLGQLKARIAARRGRNIATVAAARKLIGLVFYGLRDHDIRCLHRASAA

SEQ ID NO: 438393 - protein, 389 aa, unidentified
MPKYIRIGVDIAKNSFQVHALESEDCSATKRKLSRSGIVKFLAEVEPCAIGMEACGSAHYWARRFRAMGHEVKLTPPIYVKPYVKRGKNDAADAAAICEAMSRPNMRFVAVKSEDQQATLMAHKTRELLIKQRTMSVNALRGHLAEFGVIAAKGISHVEELVERAAAADLPAMVQATLGVLLAQLRSLDAATDELERAIVANHRRDPVSRLAASVPGVGALAASAILASAPDSQAFKSGRDFAAWLGATPKQNSTGGKEKFGSITKQGNRYIRRLLVLGAISVLRAAPKRKGALCDWLAALRARKPAKVVAVALANKLARIVWAIITTGGPSAPPSTPRPDFNLGQRTRKENAGSRVWRARRRRDERHGETIEDHRTLRNGSGAQSSPP

SEQ ID NO: 438394 - protein, 386 aa, unidentified
MQKLNDLSRSLTALEPDGTLIAVIEMSLSSWLVAGIVPGVERQPLKKLAVDESALLKLLHRWREEAEKAGRRIERIAVAFEAGRDGFWLARWLKARGIEAYVVHASSVAVSREHRRAKTDRLDTELLKRSFLGWLRGERDHCKMVEIPTMKDEDAKRPNREHDSLIGERSRIVNRMKAALVRLGIRGFNPKLKRATTRLDGLRTPEGEPIPPNALAELRRDMERRRLVNNQIRQIEEERLKRIEQAPCDGPHVMVRLLARVMGVGIETADMLVHEVLSRNMRDQRAVARYAGLTGSPDESGRKRREKGLARSGNTRVRRGMIQLAWRFLLHQKNSALTKWFRSRTENARGTRKPMIVALARKLLIALWRLVREGIVPDGVVFRAAQ

SEQ ID NO: 438395 - protein, 404 aa, unidentified
MYNAVGIDVSKGKSTIAVLQPGGTVIRKPFDVSHTSQNLNELADYLSSLDGTTKIVMECTGRYHEPMVKALSEAGLFVSIVNPHLIKNFGNNSLRKVKSDPADARKIARYTLDNWTELRQYSGMDNTRTQLKTLNSQFSFFMKQKVAAKANLIALLDNTYPGVNKLFDSPTREDGSEKWVDYAYSFWHADCVRKIGLKAFTERYKSFCKKHHYIFQQDKPEKLFNASKELVAVFPKEKTYKLLIQQSIQQLNLASEHVERLRREMNELASTLPEYSIVMGIYGVGKTYGPQLIAEIGDVSRFTHREALTAFAGVDPGVDESGQHKSKSNRASKVGSARLRKTLFQIMTTLLKNAPEADPVYRFPDKKRSQGKPYYVYMTAGANKFLRIYYGKVKECLRNLEQTE

SEQ ID NO: 438396 - protein, 366 aa, unidentified
MTVTSMPQLTLPTQPVPDPAEEVVLGVDTHKDVHVAAVITTLGASLAHQEFPTTAAGYRQLLVWARSFGVLHRAGVECTGFYGTALTRYLRGAGIEVVEINQPDRATRRKRGKTDAVDADAAARAVLSGRATTVPKTADGLAADMRILRLAKESAVKARTQALNQLKAILLAIDPDLRELLTGLSNPALVGTCAALDAGDRGEAVFTMRLLARRVQHLSDEVKELTRRTTRAVRSCRPQMLDLVGVGPDSAAVLLIAAGDNPDRITDEASFAALCGVSPVEQSSGKTQRRRLNRGGNRQANAALYRIVMTRIRWDERTQKYLQRRTAEGMSKREIIRCLKRYVARELYRHIHPCGTSRKSALSLIL

SEQ ID NO: 438397 - protein, 349 aa, unidentified
MSVAADADFVAGVDTHLDTHTAAISDGRGHLVAGRQVPASEAGYQELLAWARAQAAGRTLVWAVEGAGHYGLNLARHLAAAGEQVAEISHTPHVGKRRAGKTDAIDALRAARELLAAPRPAQPRADGDREALRLLMTDRDHAVRSCRSARALLAATLVTMPGQLRDQLRALAPGRRARACAALAAPEGADRLATIQHQTLARIGQRIEDLAGQARQIEAQIAQIVEDLAPGLVAAEPGLGYLSAAQILLSWSHRGRIRSEAAFAKLAGVAPIPASSGRTVRHRLSRGGDRQLNRALHTVIITRARSHQPTRDYLARRQTSGKTQREAIRCLKRYLARHLFRELNRLDTT

SEQ ID NO: 438398 - protein, 342 aa, unidentified
MSEYVGFDVSEEETSFCVKDVSGKILARGKVATDPVALFEVLRAHCVCPERIVLETGTLSGWLSRELGKLGIAVEVIDARQAHAVMKLQHNKTDANDAALLAEIARTGFCRPVCVKSEAAQADRILLKARAHLVGQRRATQNTIRGLLGSLGIRFAKGSGKLAGLVCEALEGRDELRATIDPLLRAAAALEREIARLDKAVSGRAKDDPAVRLLMTVPGIGPVTALAFAATIGDAERFAKSRTVGAYIGLTSRRWQSGEMDYSGRISKYGDAMLRALLYEAANSLLTVVRKAHLLKDWARRIRKRTSHKKACVALARKLAVILHRMMITGEPFRWPQKEAAA

SEQ ID NO: 438399 - protein, 389 aa, unidentified
MSQTVAAPIPAAVDHERTLVLAIEVSNKSWVIAAQVPGLPHTKAKRTIDPEAEALLAAIAAYRARAAATGRSIERVIAVYEAGWSGFWLARWLMRHGVEVYVVQPSSVPVDRRIRRAKSDGIDSELLLRTLLAWLRGEPRVCSMVPVPDEADEDARRCVRERSELISERIGLTNRIGAILATLGVSDYNPLLRNRGRRLAELRTALGEPLPANAHAKLKRLLARLELVLTQIAELERERDAVVETEASDGASKMIQQLTALRGIGVQSATVLVREAFVRRFANGKALGSYAGLASSPYSSGGIDREQGIGKAGNRRVRTVMVELAWLWTRYQPGAAQVCWFRERVASTGRRVRKIMVVALARKLLIALWRFVIDGVLPEGAVLKPVNAT

SEQ ID NO: 438400 - protein, 362 aa, unidentified
MTRLRPFRILDISDLLRVLALDVFYECSNKFTMKNEFIGIDVSKGTLDVHLYCANRHQSFKNNGVGRQSLIDWVIEKTNLKLVELRFCLEHTGIYSQPLCELLEQMDLTYYLISGLELKRSMGIKRGKNDKVDAKRIAQYAFLRRDDLIAYKMPGQTVITLKKLLGQRSKLVRQRAGYKASIKEEKQMYPSTQKSFVIESSGAIIVFLTLQIKLIEKEIVSLIKSDQEILKTYENIQTIKGVGPILATTMIAHTNNFKSFQNWRKFACYAGIAPFEHSSGTSYRGRTRISVLGNRDLKTILSSAAATAILHDSQLKMYYNKRLKEGKNKMSTLNIIRNKIVSRIFAVTKRQTPYVETFKFAA

SEQ ID NO: 438401 - protein, 403 aa, unidentified
MISVGVDVSKGKSTVCILKPYGEVLMSPSDYEHTQRDLKKLVDQMDSFEDEIHVTMEATGNYHFPIATYLKKRDYDVRIVNPLEMKRYRCQGIRNPKTDSIDAIMIAQYGIDFWFRSFQEYVASDERMELKTLGMQYFKTMKTRQDRYLVLESVIDRTLPGIGGVLNGYDKSTGKDKKSDFVYDFYHAEKITVYSENRFCDRYESWSKKKGYRYSEKEARQLYSIAKDSIPTLPSSENTKLMVQDAVKILREVDAALHDILIRMNEIAKCLPEYTTVMDMKGVGVSIGPRLIAEIGDPRRFHSAKALIAFAGIDAPPYQSGKFTGTERHMSKRGSRVMRKIGFELMDTINKHQKLYAGDPVCEYFLAKRAEGKKYRVAMFAAYNKFLRIYHSRVSAVLNENVK

SEQ ID NO: 438402 - protein, 326 aa, unidentified
MQNILGIDVSKDTLDLVLINEEGKFHKVISNDPAGLKAMDKWLVSRHVDRVHACLEATGQYGDEVSEYLYGQGHDVSVVNPTRIKRYGESKLHRNKTDKADADLIAEFCLKEKPALWEPLSPDLKHLRALVRRLNDLQTNYRQESNRLLSGEKDAWVINDLSVHVEYLKARIVATEEEIQNFINQTPDLKVKQDLLVSIPGIGKKSSAMLLAELGEISGFENAPQLAAYAGLNPKGFSSGSSVHKKTRISKQGRSELRSCLYMPAVVAMTHNSVVRALKDRLRERQLPTMAIVAASMRKLLHIAYGVLKNQKPFDPEYDRQFNFSA

SEQ ID NO: 438403 - protein, 345 aa, unidentified
MGPMYYIGLDVHKQKISYCVKDVGGKIYAEGWIPATRFDLDRWMKTLPQPWSAALEATMFSGWIYDHLKPHAAELKVAHPLMLRAIAAAKKKNDRIDANKICDCLRCDFLPECYMAPTAIRERRRTLRYRNLLVRQMVQMKIKISTLLMEAGISYNKQRLHKAGYFRELLASNPDIDESLRSLLRQCREMVMRLGKMETALIHSLQQDRLLVERVERLMSIPAIGPITALTWALEIAEVQRFSSIKKAVSYCGLCGDEQRSANSVQRTPISKQRNKHLQTTLIEAAKMAPRYSPTLALLYDREKQKGNANRATLAVARKLVAYLMAVDRGQTHFLVIDQETRTAA

SEQ ID NO: 438404 - protein, 322 aa, unidentified
MKKSLFIGIDFSKKSFDVSVIRQSNLQAVDYHQFENNKEGCAALLKWVKSLTKEPSANWLFCGEHTGLYCICLSEFLIKKGLFVWLENPLQIKMSSGIKREKNDKVDSREIALYACRYRDKARAYRLPDKALKSLELLLSFRERLVSSKKTLLVSSAEIRRVLKRDSTAKFIYERSQKEIERLNKDIKEVEKRMLEQITSDESLQENYELVSSIKGVALINTVAILVATQNFTRFENSRQFACYAGMAPFGKQSGTSINTKPRVSGLANKKIKTLLTQAAKCAMIYDPNIKRYYERKQTEGKDKWLITNNVRNKIIHRIFAM

SEQ ID NO: 438405 - protein, 340 aa, unidentified
MNAIRFGIDLAKNVIQVHGVDAHDEVVVRRQLRRSQVLAFFKKQSPALIGMEACGSAHYWGRELCKLGHDVRLMPASYVKAYVKRNKNDARDAEACCEAVSRPTMRFVPVKTVDQQCARSEHRIRDLLVRQRTQLANAVRGLLYEMGIIGSKGSAGMALLAKRIEEADPSIPVALLGALLGLVRQWRAVSGEISQLDDRIKAQIDQDETARRLMTIPGVGPLTAHAVIAAIGDGRQFSSARDFAAWVGLTRRNHDTGGKHKRVGKISRAGAGSLRRLLVLGSSSVVTKVRRSQVHGSAWINGLLARRPVKVCVVAQAAKTARIIWAVLTSGQEYRAPSRA

SEQ ID NO: 438406 - protein, 373 aa, unidentified
MKRILKISMDVHSTNYTLCAMEPTIGAEDRIYGEIQVAPDYKEVLRFIDSLKMKLGLDNEYSIECGYEAGCLGYSLYHQLTEAGVKCVILAPTTMLTQQGKRVKTDRRDAHLIAQCLCYGGYHPVYIPTGEDDAVKEYLRMRDDHKLALKKLKQQINAFVLRHGHQYTGTKWTIKHVAWLHKLELAPMYRETLDEYMASYEEQEAKIERYDKRIEEIAAEARYQENAKKLSCFLGIRTHTALSLIVETGDFKRFAKGSTYAAFLGLAPGEHSSSTSVNRLGISKAGNTHLRCLLIEAAKGICKGAIGHKSKELRSRQNGQSAEIISYADKANTRLRSKYYRMIRHGKKKNVAVAAVARELACFVWGMMTGNIA

SEQ ID NO: 438407 - protein, 353 aa, unidentified
MSQQNARVAVVGIDIGKNSFHIVGQDGRGEIVLRQKWSRSQVEARFANMSPCLIGMEACVGAHHLSRRLRALGHDTRLMPAKYVRPYSKGQKNDFRDAEAIAEAVQRPTMKFVATKTADQLDLQALHRVRERLVSQRTGIINQIRAFLLERSIAVRQGIRFLRAELPRILAMPPDVLSPRMVRIVEDLACDWRRLDERVEGLSNEIETIARQDAGCERLMSVPGIGPIISSAMVAAIGAGDVFTKGRDFSAWLGLVPKQISTGDRTILGKVSRRGNRYLRVLFVQAAWVVLIKPKIWERHGLKPWLEAARKRLHHNVLAIALANKLARIAWSVLARGRAFEVRKINQAAPQPT

SEQ ID NO: 438408 - protein, 340 aa, unidentified
MTAYAALDVSMEKTSICVMDADGKMLLEAVTISDPEAIARCLDPYKSELQRVGFEAGPLSEWLFWGLQEEGIEAVLMETRQVRAALSAMVMKTDRNDARGMAQLLRSGWFRPVHVKTIPAREQRTLLAARSTLMRRQKDIENSVRGLLKGFGLRLGRLLRGRWDDAVRDIVSGNTMLASIMEPLLVVRRALREQLAILDKQARDIARADAVCRRLMTAPGVGAIVALTFRATVDEPARFRSSKAIGPCFGLTPRKYQSGEIDRNGGISRAGDPAVRVALFEAAHVLMTRVAKWSTVKAWAMNIAKRRGAKRAKVALARKLGIILHRMWIDETDFRYGQPA

SEQ ID NO: 438409 - protein, 342 aa, unidentified
MLLIGCDYHPSVQQIAMLNTETGDYSEHRLKHSDGEAERFYRDLKLHTPKIRVGLEATGHRRWFERLLMDLDCELWVGDAARIATMRVRKQKTDRQDAQLLLKLMMEDRFPRVWISSLEDRDLQQLLWHRHRTVQMRTRILNQLQSIAMNEGIQRRGGLRSVQGRKRLEQIPLGPWGARRRNDLLVHLDQMNQRVNELTAAVQQEAEKRPEAQLLMTHPGVGPVTALAFVLIVGYPERFQCGKQIGSYVGLIPAECSSGVHQRLGHISKQGNILLRFLLVEAAQAAARFDPEWHKKFAHLAMRREREIAKVAMARKLAVSLYWMWRRQRSSQMASKVGSYAG

SEQ ID NO: 438410 - protein, 413 aa, unidentified
MDVIIDRVCGVDIGKAILAATIRVPGEGRKKRDEQTRKFATFTAALDDLAAWLTEAQVTVVAMEATSDYWRPVWWVLEQAGFEMLLVNARDVHQLPGRKTDVADSAWLAQLLECGLLRSSFVPPPEIRELRDLTRYRKRLVQDRTRETQRVEKVLEDTGIKLSVVASSLLTKSARAMIDALIAGERDPAVLAELAQGRMRSKIPELTLALRGRFNDHHALLLRVHLDHIDQIGGHIATIDAQMEVKTAPFDRQIDHLVTMPGMGEVAARVVIAEIGVNMEMFPTAGHLASWAGLCPGNNESAGKHRSGHTTHGNPWLAEILVQGAWAATRKNDSWLRARYYRLARRIGRKRAIVAIAHSMLIAIWWMLTEDCDYQDLGADFYDRFNNTEAETRRLVRRLEHLGHHVELDTTAA

SEQ ID NO: 438411 - protein, 419 aa, unidentified
MEVIVERPAALDVHKAQVTACVRVPGEDGVRVEQVQEFKTTVRGLLVLRDWLKSHRVTQVTMEATGVYWKPVWHVLEDDFELLLVNARHVKQVPGRKTDVKDAQWLCRLAEAGLLQSSFVPPKPIRELRQLTRYRKTQIAERQREANRLHKALEDTGIKLDCVASDILGVSGRAMLDALVKGTTDPDILAELARGRMRAKLPELREALEGRFEALHGLLIGSILQHLDFLDTQILTLSEAIEALLGPLAPGAVMLLCTIPGIGERTAQNVIAEIGLDMSVFPTAQHLASWAGQCPGNDQSAGKRRSGRTRKGSKWLNIALKEAAMAATSSRDSYLQALYRRKKAQGGHNKAIGAVKHSIICAIWHMLSTGELYRDLGPDHFHQRNPERQTRRLVDQLQRLGHVVTLEPTTTTAAELVAA

SEQ ID NO: 438412 - protein, 372 aa, unidentified
MRRVCGLDVHKDSIYMCILYENGSKIESVFGVLTPELDKLRDLLVSHHVCEVALESTSIYWIPIWNILSVDFSLKLVNPYFIKQLPGRKSDVKDAEWIATVLQKGLIRGSYVPDRMIQCLRQYERRNHELSKNIVHAEQRMDMILQRCNIRISNYVSCISCKGYQKVVNAIISGESNPKVLVTLIHKRTLNKHGRQVVEDSLNGFVSDTDRDILRQYRDERMQMEQHKSENKAKMQAICEAHYCEELELLQTLPGIKEESAANIIAEIGVDMKMFLTASAIVGWAGLKPRNDQSAGKIKSRKITHGNKYLRKILVEAAWSAARTKDSRFMKMYQRLLARGKSKQKALIAVARKLLVLIWNMLSKKRGFQSRI

SEQ ID NO: 438413 - protein, 355 aa, unidentified
MTSIAPDAHRRKIVVGVDTHKYAHVAVALDQLGARVGERHVPANREGYARLEAWAASLGRVSAFGIEGTGSYGVGVASFLRRSGHRIVEVNRGDRRSRRGNGKTDTLDAEAAARAVLSGEAAAVPKSADGAVEMIRQLKIARDTARKGRTSAIVTLKALIVTCPDELRETFEGFTDKALIERCAALRPGAVSSPTAAAKHALRALAKRYQALGAEIAAHDAVLDELTKNHAPTLRDGFGIGVDTAAEVLIVFGDNPERVRSEAAFAKLCGVCPIPASSGMSNRHRLSRAGHREANAALYRAVIVRMRFHQPTIDYVARRTAEGLSKRDIIRCLKRFLAREIYQRVMADHRARQAA

SEQ ID NO: 438414 - protein, 369 aa, unidentified
MTNLQVKADFTGRIMFIGIDIHLKNWHVSLYYEQKLIKSFRQEGCPKTLSNYLNEHYPGAKYVCAYESGFSGFWAQRQLEQLGIECIVVHAADVPQTNKGKHFKTDKMDSKRIGAALGSGMLRGIYIPEAEAESDRQLVRCNVKLGNDVTACKHRIKSMLYQLGISIPQQYNNGNWSNKFMTWLKDLRFENESTRLALDLYFQTLLNLRQEKLNALRQIRRLQNKDRYSKLFKLLTSIPGIGPMTAITLLTEIVDMKRFNNFDELNSFIGFCPNEYSSGDKERKGRMSFRQHKRLRSLLIENAWIAIRNDPALLLYYSETKAKLGEKRAIVKIARKLVSRIRMVWNNEKPYEIGVVATNKIKKQNQIKQ

SEQ ID NO: 438415 - protein, 343 aa, unidentified
MDYFAGLDVSVKETSICIVDDAGNIVREARVASEPEALLQMLANNTYRFKRIGLEAGPLSQWLYSVLAEAGLPVICVETRHMRAVLKAQINKTDRNDARGIAQMMRVGLYRPVHVKTLRSQKLRVLLTHRKLLQSKAIAIENDLRATLRNFGLKVGMVGTAKFEARIRELVENLPDLAVLVEPLLIVRRVVREQLGILHRRVLAVVRDDEVCRRLMTIPGVGPVVALTYRVTVDVPARFRNSKTVGAVFGLTPAKYQSGENDRTGAISRCGDEMMRMMLYEAAQSMLVRSAKWSWLKAWAMKIARHRGMKKAIVALARRLAVIMHRMWVDGTEFRWTREVAAA

SEQ ID NO: 438416 - protein, 338 aa, unidentified
MYYTGIDLHKKTSFITTVNGSGKVVFRRNFPNNPEKILDYFFNLGEPTKIVIESMCSWHWLYDLLKANNFDVVISNPLKTKAIASAKIKNDKVDSHMLAQLLRADLIATVYVCSLKTRKLKELLRHRRRLVNDATRMKNRIHMLLMKNNISVAVSDLFGVKGMKYLKEIDLPIYHRQQLKCYLTLYGQLTKQIEPLTKRIKNLADKDPMAKLLMTIPGIGSLTAMFIIAEIEDISRFPSYRNLASYAGLVPCLDASADKSRTGRITKQGSPYLRTALVEAAQVIPRMKKSRLNIFYRKRIVRAGYQKAIVATAHKILRYAYYVLKNQTPYREEYPTCA

SEQ ID NO: 438417 - protein, 350 aa, unidentified
MIIIGCDYHPGFQQIAFVDTETGDYGEQRLGHSEGAEKFYRDLAAQGKKVRVGMEASGHARWFERLMAELNFELWIGDATEIARKRERKQKTDRQDAQHILQLLMENRFPKIWVPSGENRDLRQLLWHRHRMVQARTRIMNQLQAVALNEGLRCRKRLWREKGRQQLEAFRLAPWASRRREDLLQLLDRLNPTISELTQAIEQEVEKCPEARRLRTHPGVGALTALAFVLIIGRAERFQCGKQIAAYLGLVPLEDSSGNRRRLGHITKQGSSILRFLLVEAAQVAARSIPEWRNKYVHLTMRRGRKIAKVAMARRLAIALYWMWRKGWDYEQLRKFGSHAGKLESGDGVK

SEQ ID NO: 438418 - protein, 394 aa, unidentified
MKLVGIDVGKNSHHFCVMDKETGEFNVTPTSFSNNKEGFDFLINSLKPYSKKSILIGMEDTGHYHVALLKFLLSNGYTVALINPKTTDLTRKMEGGITKNDKLDTITICDVLDTPERKKQYRITKVDRFDLYEQRQLTRHHHNLKEELNVYCNRLQKSIDLVFPEFNTLFSSKYGVVYMNLLKTFGSAEAIASTDIRTIRKCFEIKGRGNRISLTPEKLKECAKNSIGISSEVETIQIKHLVSQITLIKEQIAEIDKKIEEFSITNNSPILSIPGISHFSGTSILAELGDIGNYSKPSQIIKFAGVAPYHYESSQYNAQHTGITKKGSKYLRKTLYQIILPVINNNPVFKKYYLLKISQGKGHRCAQGHCIRKLLRIIYHLLETGQSFDPALLR

SEQ ID NO: 438419 - protein, 387 aa, unidentified
MPQPNDLSRSRASFEQDATIVAVIEMSQSSWLIAGTVPGIERQPLKKIVPDAVALLRLLQRWRDEATRGGRCVARIAVAFEAGRDGFWLARWLMRHEIESHVIHPTSVAVSREHRRAKTDRLDTAMLMRVFLGWLRGERGHCGMVAVPSLEEEDARRPSRERENLVGERTRIVNRMKAALARLGIRGFKPELRKAAQQLESLHTPEESPIPPNTLDELRRDLARLAILRGQIIAIEQTRLERLEQAPHTGANAMIRLLASVIGVGIETADMLVREALSRGLRDRRAVARYAGLTGSPDESGTRRHEKGLAKSGNARVRRGMIQLAWRFLMFQRDSVLAQWFRARTEGVKGARKTTMIVALARKLLIALWRMVTTGEVPQGVVLRQPT

SEQ ID NO: 438420 - protein, 371 aa, unidentified
MKRILYVGMDVHKESYTVCSYSYERDALEYKQTLVPDYKMVLKYLEQLRRRDGDEVEFVCGYEAGCLGYTLYHQLMSHGVKCVILAPSTMGITNTGRIKNDKRDAGNIARCLAFRTYSEVHVPTAEDEAVKEYIRMRDNQKKALKIIKQQILALVLRQGYRFDLGKNYWTQKHVAWLRGLDMGGVTQETLDEYLITYEYLMDKIERLDMRIEELAGGERYQENVRKLSCLMGVKTHTALSVLVEIGDFNRFAKADKLAGYLGLVPGEDSSGSRQRNTGITKAGNSHVRRLLVEAAQSYTRGVAGHKSVALKKRQTGNLPEVIAYADKANERLRRKFYRMVLKNKSQRNVAVTAIARELACFMWGLMTDNVA

SEQ ID NO: 438421 - protein, 344 aa, unidentified
MPIVTIGIDLAKNVFAVHGVDESGKATLVKPRVSRDQLVTLIAQLPACLIGMEACSGAHHWARMFQQHGHTVKLMAPNLVAPYRMSGKRGKNDAADAAAICEAVTRPSMRFVPLKDEHQQATLCLHRTRQGFVEERTATYNRLRGLLSEFGVVLPQSPEKLRRHMTEHLDTLPGWAKRSISDLLEHAGHIEDRLLEYDRAIAEIAREDARSKRLMQLRGIGPTTASALLASIGAGHDFRNGRQVAAWIGLTPGQYSSGGKARLGSITKAGDAYLRGLLVNGARAVIANLGEKQDRFSRWARTLVERRGYWRAAVAIAAKNARLAWAMLKYGHDFKCAKVGTAQG

SEQ ID NO: 438422 - protein, 407 aa, unidentified
MIFVGVDWAEAHHDVAVLDEEGKRLAKARLPEGVEGIARFHDLVGAHAAEAAEVVIGIETDRGLFVTALVAAGYQLYAVNPMSTSRYRDRYSTSGAKSDAGDAQVLADMVRTDRHQHRLMAGDSEGVEAIKVLARAHQSMVWSRGRQTNGLRSTLREFYPAALVAFDDLASPDALEVLRIAPTPTLGAGLSRSKIAAALRRGGRQRRIEERAVEIQAALRSAQLAAPDLVATAMGASVAASVAVIAEMVAQTARLAEELSSGFEAHPDAEVVRSLPGLGTILGARVLGEFGDEPNRYASPKSRKNYAGTSPITRASGTKKAVLARHVRNRRLADAIYLWAFASLSASAGARAYYDARRAAGDGHHQALRALGNRLVGILHGCLDHHAVYDETIAWGHRPENNLAQAA

SEQ ID NO: 438423 - protein, 398 aa, unidentified
MLSIGIDVSKGKSTVCGMKPRGEIVYTPFEVQHTREGMSELVSLLRGSGEEVRVVLESTGSYHCPVVAALLENGIFVSVVNSLRMKRFCSQSIRRVKTDQIDAMQIALYGLAYWQELQPTRLPENTYRELQLLARQYYQMTSLLIKAKVDFNAICDQVLPGMQELMSDHAGRHKLSDFVLRYRHTTHILKMGETRFRKDYCKWAEKKGYRNHERMAALIFATAQNGIPVLPDAPSTQIVITEAIRVLHTVEASRDAILTQMQALAKTLPEYSLVREMPCIGDTLAPRLIAEIGDVRRFHSKRALIAYAGIDVPPYQSGKFSANNRHISKRGNRYLRKTGYEVMQSYVMHKPANDPIFTFIEKKRSEGKSGKLAMVAGLNKFLRVYYGKVTELYRSLPQ

SEQ ID NO: 438424 - protein, 350 aa, unidentified
MTGASTSYEGKHVYIGIDVHRKSYTLTCRCEGLVIKRCHMAADPAALVAFCRKQFPDASFASAYEAGFSGFGLHRTLAAHDIHNIVVHPASIEVAAHDRVKTDKRDSAKIAEQLAAGRLHGIRVPTEDEEQKRLLTRGREQLLRHRTRLQNQLRMRLHQFGLLAPTDSRRMSREIVTEVLQQALSPELRLTVETLYTMWQGIDEQLRHLEAKLREQAKHDPLEQWYRSVPGIGPLAARVLANELGDMQHFPNERALFSFTGLTPSEDSSGDTRHIGHISRQGAGRLRYVLIESAWVAIRKDPDLATAFARIAHRAGKKRAIVAIARKLVGRIRAVIRTQQLYEVGKRHAA

SEQ ID NO: 438425 - protein, 430 aa, unidentified
MTTKQITPSGAVLVALDIAKSRNEVLVEFPDRQRLRKLSIHNTRDDHDRLIGLLAETGKTVVCGFEATGNYHRPIAWRLIQAGFDVRLVSSMAAARTREALHNSWDKNDPKDAQVILHMLRIGATQHYHDPLVAGINDVQELSKTHEAISRSKTEILHRIQTHYLPLYFPEVERFRQNSRSDWFFAFLEMFPTPASITVMDQTAFVKSAWEVVGRKVAKATLLADIYQTARASIALPIPLDAPAITMFRMVLAETRSLIRQRDMIEKMADAMLAQSADYQQLRKIPGIGPINALSIIAEAGDIRRFGHHRQFLKFCGLDLSTHQSGTFRGRTKLSKYGNARLRRTLWLAAQVAIRQRENSFRDKFERYIARDRDDPDLRRKALTAITAKMARVVHAVVKSGSDYRPFFEGPVPGGRTPLRAAVRAQSATL

SEQ ID NO: 438426 - protein, 344 aa, unidentified
MDHVAIDLGGRESQLCVRRANGTIVEERRVLTRQLPKVLAALPPSQVIVETCAEAFAIADAARAAHHDVCVVPATLVKTLGVGARGVKTDRRDAQVLSEVSSRIVLPSVHIPSLQARELKSLTGARELLIETRTAFINNVRGWLRTQLWRIRTGAPTSFADRVRGHATALQTPLPTHVERQLVMLDALAPQIKAADQQLAQFAKTHPVCRRLMTIPGVGPVTAVRFLAAIDDPTRFASAHRVQSYLGLTPGEHSSSDRERRTGITKAGPAPLRRTLIQAAWSMIRSYPDDPMVRWATQIALRRSRFVAVVALARKLVGVMFALWRDDATYQSTRAAAPEPAPAR

SEQ ID NO: 438427 - protein, 318 aa, unidentified
MEEKRSYVGIDISQDRLDLAVHGRHEVRSFANTATGIKHIVRFVMNLGPVLVVMEATGGYEISLAAALGDAGIPAAIVNPRQARNYARSTGKLAKTDAIDARILAAFAAAVRPEPRTLADVQTLELREILARRSELSEMITAEKNRLHHARGLVRDHIVAHLAWLTKSLAEMESELGRFIKESPLWREEDNLLKSVPGIGFVTASTLIASLPELGKLDRRQIAALVGVAPFNRDSGKMRGRRSCWGGRAHVRTALYMPAVVATRFNPVIKRLYQRLLAAGKLKKVAITACMRKLLTIVNAMIKHHTTWHYVPEQAVIS

SEQ ID NO: 438428 - protein, 460 aa, unidentified
MAHPMVQVKPSRRQRDMSPVHPNAAAIDIGARMHVAAVGPDRDPEPVRTFNTFTDDLHRLADWFEQCGVKTVVMESTGVYWIPIYEILEQRGFAVSLVNARDAKHVPGRKTDVSDAQWLQRLHEYGLLRSSFRPQGEIATLRAYLRQRERLLDNAAAHIQHMQKALTQMNLQLHHVVSDITGVTGMRIIRAIVNGERDPDVLASYRDRGCHASVETIRQALIGNDREEHIFALSQALELYDTYQAKVAECDKRIAAVLKRLEASPTPADPLPAARHKGRSSNPLTFDVREALHAVIGIDLTQIHGLGPYLALKLVGECGTDLSAWPSAKHFTSWLGLAPHNKISGGKVLSSRTRRSGNRAASLLRLAAVTVGRTDTALGAFYRRLSARVGKAKAVTATARKIAVLFYNALRHGMDYADPGASYYEERYQQRVLANLQRRAKSLGYVLQQADTAPAAVGVS

SEQ ID NO: 438429 - protein, 509 aa, unidentified
MVPMCPYVSLVPSNASKSLVKLHTLVACGAIPFRRLRSSFILGLKPQNMKNKHSNPKNRKLKKIALDENWEKINSNAAGIDIGAREIFVCVPSDRDRESVRRFGTKTPDLEEMAQWLKDCRIETVAMEATGIYWIATFQLLERKGLKVVLVNPRQIKNVTGKKSDVMDCQWIQKLHTFGLLGGSFRPADPYCVARTYMRLRDDLISGSTAQIQLMQKALHQMNIQLSHVLSDLTGSSGMAIIGAIMAGQRDPIVLAELASRRVKSTKDEIAKALIGDWREEHLFCLAQAHQMYLRYQLDIAECDAKLAAELENLPNKVDPNSKPLPPKIDRKKEINERLRLGLYCKFGVDVTAIEGIGPTAALTLLTEVGADLSAFPSEKSFCSWLGVCPDNRISGGKVLSSRTRRVVNRMADVLRMSATTLKNSQTALGAFYRRMVARLGPPEGITAVAHKLARLLYSLIKHGHEYVRTGMEQYEKKNADRKMKVLRKMAESLGVQILEPQLVTTGVS

SEQ ID NO: 438430 - protein, 352 aa, unidentified
MRTSQKTPESITTIGIDLGKNTFHLVGLDNRGAIALQRKVSRSQLELRLSNVPRCLIGMEACSGSHHIGRQLTALGHDVRLLPAQYVKPFLKGHKNDYRDAEAIAEAVQRPTMSFVAIKTPEQMDLLALHRVSSRLVGQRTRTINQIRGFLIERGIIVRQGVMPLRKALPDILSSNTNLLSPRMVNLIADLMQDWRRLDERIETVSTEIEALALQDDSCQRLMTVPGVGPIISSAMVAAIGNGAGFKQGRDFSAWLGLVPKQESTGDRTILGKISKRGNKYVRTLFVQAAHVVLVRRPNTAMRGLWPWIEQASKRLHRNMLAIALANKLARIAWAVLARGQAYQPRIAANAA

SEQ ID NO: 438431 - protein, 341 aa, unidentified
MSEISMVGLDLAKSVFQVHGADERGAVVLRKKLRRDQVRAFFAGLGPCVVAMEACASAHYWAREIMAAGHEVRLIPPAHVKPFVKRQKNDMADAEAICEAAQRPTMRFVQPKSADAQAAAVVFRTRDLLVRQRTQLINAMRGHLAEFGYVVRQGAGHAAKLVELIKDPSSDVPPEARTVLAVMAEALGVMQAKISLLDREIAIRAKADETARRLMTIPGVGPVAATALVALAPAASTFRRGRDFAAWLGLTPRQHSSGGKERLGRTTRMGERSLRRLLILGASAVTKVAARDPSRANRWLAGMLARKPRMLVTVAVANKIARTVWALMANGGCYRAPAAVA

SEQ ID NO: 438432 - protein, 339 aa, unidentified
MDQITAIGLDISKNVFDVHGVSSEGTVVLRKRLRSGHVVEFFATLPPCLVGLEACASAHHWSRELAACGHDVRQMPAQYVKPYVKRNKNDRADAEACCEAVQRPGMRFVPTKTPAQQAELVAHRVRDLLMRQRTALINTLRSHMAEFEIIAPKQPIKTAELKAVIADASDARLPAVARRALKEVVAQLDALERRTIELEKQIVRRLKTDPVAKHLLTVPGIGPIGAALLRATVPDPTIFASGRAFAAWLGLTPRERSTGGRTKLGHVSKRGNGHVRRLLVIGAVSTIFGSRRMGGEPWLAQLRGRKPLFVTAVALANKMARICWAVMVRGTDYRVPAAA

SEQ ID NO: 438433 - protein, 404 aa, unidentified
MELNAIYRCVAALDVHQAKLTVCILFETDAGEVVSQLREFGGFKRDRREMAAWVSSFKPELVVMESTGIYWKSPYAALEWYGLNLAVVNAYHVKHVPGRKTDIGDAQWLAILARSGLLRGGFVPPQHFREYRLISRQLQKLTSLAAGEKNRLHKLLTDAGIRLSVVLSDLYGKSAKAMIKGLLDGETPEQLLAHADSRLKASPDELRDALDGDLSESHRFVIRELMAHIDELEARVLRFRQTLLNHLSSYQVILQNLQTLPGIDELSAAMLFVEIGDDMSAFGSPNKLASWAGVCPGQNESAGKRKSAKTRKGNPYLRRILCEAANAASRTRCSLQDRFKGLMIRRGRKRAIFAIAHKLLKTVFLLIQRGDYYRDANTDYEALSVQRNAPRWIKKLVQYGYINA

SEQ ID NO: 438434 - protein, 457 aa, unidentified
MSQRSQKKKSRKFQVTQLPAQLQHINLNAAGIDIGSERHLVAVPAGRDDVSVREFGTFTADLEALADWLKKCGVTSVAMESTGVYWIPVFEVLERRGFEVKLVDARHVKNVSGRKSDVLDCQWLQQLHTYGLLAGAFRPPDEVCVLRSYLRQKEMLTQAASMHIQHMQKALQQMNLLLHNVVSDITGVTGMKIIKAILAGERDPKVLARNRHGLCKNSPSTIAKSLIGNYREEHLFALRQAVELYEMYQAKIADCEQAIIKQLEKQPNVSDDEPPPADKETQARSRMRADVDVQELLYKKTGIDLFAIPGLAADTLLTLASEVGFDMSPWKTEKHFASWLGLCPGTRRSGGKVLNSKTKRNPNRATQAFRMAASSLSRSKTALGAFFRRLKMRTGGPQAITATAHKIARIYYAMLTKRTSYIELGQQAYEQRYQQRRINSLKNQAKLLGFQLVPYTT

SEQ ID NO: 438435 - protein, 347 aa, unidentified
MSITRIGLDTAKSVFQLHGLDETGKAKLKSKLQRSQMVPFFEQLERCTIYLEACGAGHYWARVLIGLGHDVKLIAPEAVRPFVKKGKKNDPADAAALCEAGARPDIKFVPVKTVEQQAILAVHSVRTLLVKQQTMLSNAMRGLAAEFGLIVPKGIDKLVELMALIGADESVPKQARQAARELFDQREAVGERIETLEAEIVAHARQDEAARRLATIPGVGPITASLIAATVADFGVFKRARDFAAWLGLVPRQHSSAGKTRLGKITKSGNREIRKSLVMGALSMTFRAPQWKSAAGAWTCHLLESRPVRLVSVALANKIARIAWALMTRGEVYHAKGRLVAAAEPAA

SEQ ID NO: 438436 - protein, 408 aa, unidentified
MIFVGVDWAEAHHDVLVMDEAGVMLGRARCGVGVAGLAQLHALVADHAQEPEQVILGIEVDQGLLVRSLVGAGYRVYAINPLAASRYRDRHTTSGAKSDAADAKLLADLVRTDRHNHRPVAGDSDEAGAIKVLARAHQALVWTRQRQANALRSGLRDYFPAALEAFGADLAGRDALAVLALAPTPERARALSRAKIAAALGRAGRERNRQRRASEIQAALASEQLAAPAVVADALGATTSARVVVLISLNQQIAELERALGEHFDRHPDAEILHSLPGLGAVLGARVLGEFGDDPSRFGDARGRKAYAGTAPITKASGRSRVVLARVARNKRLADACEWWAFCSLTRSPGARRYYDLLRAREKTHHQALRQLANRWVGILHGCLEAGRRYGEDIAWPAEGPVGLEVAA

SEQ ID NO: 438437 - protein, 309 aa, unidentified
MNKAVVYIGVDVAKASLDVAWAERSRRFANNKSGLSALTKWVKQSPFAVHLICEASGGYERGLLDAAEQNAIKVSLVQANRVRQYARAAGILAKTDKVDARVLCAFGSAMQPEPTPPLSGQQKRLRELETQRQHLSRMMVAEQNRLAQLNDKELQRLTRSLLATLKKQMAAIDMRMVGLIAEDQTLKQKAQKLTAIAGVGTRTAMLLLARMPELGTLNRTQAAALAGLAPFNRDSGTLRGKRTIFGGRRALRCGLYMAALVAARHNLILRNFYQRLRSNGKPHKVALTAVMRKLLLALNHTLKPAASFA

SEQ ID NO: 438438 - protein, 419 aa, unidentified
MALKIVYPICCGIDVHKNFVIACIAATNSKGVTSYKKRRFSTYTNDLKRLAEWLSANNCTNVCLESTGKYWIPVFNVLEQTCNVVLAHPKYVKAIRGKKTDPRDAMWIADIFKHDLVSASFIPPPQIRQLRDLLRYRLKLTGFSVGEKNRAQNCLTVSNINLDDVFTDVFGKSASAIIDQLILHPDGAFDVSPYIDKRCKSSPEKIQSAVDGLMCSEQIKKLQIIRSHLDSLSLYKDDLDSVILELSKPFQPQIELLLTVPGIQQFSAVSILSEIGVDMSVFLTAKHLCSWAGLVPQNNESAGKKKSTRISRAGAYIKPLLVQCALTICNSDKHPEIKSRYLALKKRRGHKKAIIAICRMLLTAIYAILKKGEAYNPYLYRKESASSVPANRLLSVEQALAFVQSKGYLIVNPDGELIA

SEQ ID NO: 438439 - protein, 317 aa, unidentified
MEQHQSSTRVGGVDVGKKHLDAHVHGLGDGVRVENTQAGISELIGWLRAREVGRVGLEASGGFERRARKAFDLAGFEVVLHQPLEVRRFAQLKRWRAKNDRLDARLIAAATAQVDAIKAAQDPRLAELAERLTVYEHITEQIASMKALLESVALEDLLALLRAQICALEAVKAKLAADLLARIKAEPDLLKRLRLLLSLPGVGPIVAAGLVIRMPELGAMRRGQAASLLGVAPFDRESGQWKGQRFIGGGRSRPRRLVYLAALAACRCSPTFKSFAKRLLEHGKPKKLVLVAVMRKLIEAANLVLARGQPWSAQPAS

SEQ ID NO: 438440 - protein, 406 aa, unidentified
MKQIVSVGIDVSKGKSTVCAMIHPNTIIKESFEVLHTVEEMSMLADYIGSLDGAIRIVMESTGHYHLPVAQFLYQKGFFVCVENAYIIRQFSRIMLHGAKTDPLDAKKLAKYGLAYWSELKPYKFHPSCYTELSLLSKQYQTYIKLLIAAKQNVIHLMDEMLPGFKEALDTASSVQFSKVKYVDFAKEFYHVDMIKSMGKEIFRENYKQWCKEKGYRFQSEKADELFHLAEDGIPTLPTEFPSTRLCMEVATEQVSQLGYALEQILSQMQNLAKTLPEYQTIRQMGGMGEKLCVRFIADIGDVRRFHNGKALVAYAGIDAPPYQSGQYTGTKRRISKRGNSALRKTGYEVMKSLKSHPPKTDTRVYDFIIKKENEGKSKKQAKIAGLNKFLQIYYARVIEIYKNIV

SEQ ID NO: 438441 - protein, 342 aa, unidentified
MYYIGLDVHKKTISYCVKDASGQAHQEGKVGATRCELDAWIRTLPRPWTVAMEATIFTGWIYDHLLPHATQVKVAHPLMLRAIAAAKKKNDRIDAGKIADCLRCDFLPECHMASTQIRDRRRTLRYRHLLVRQMVQMKNRISGLLMETGVSHNKKRLHKVGYFRELLSANEEVQESIRPLLRLSRDTIVRMQKAEYALVSSLQRDPLLAERIKRLRTVPGVGPITALTWALEMGDVSRFRSSRQAISYCGLCGDEKSSAEKVTRTPLSKQRNKHIQRVLVEAAKLAPRQDHTLALVYEREKQKGNANRATLAVARKMVAYLLAVDRGQRDFVPFADPRSVAA

SEQ ID NO: 438442 - protein, 339 aa, unidentified
MKLYGGIDLHSNNSYIVLMDSRGTVVQRSRVGNDMGLILRSLAPYREQIDSLVVESTYNWYWLVDGLKAAGYAVKLANPSAMQQYQGLKYSDDRSDARWLAEMLRLGIVPTGYIYPEAQRPLRDLLRQRSLLVRQGTGQLLHTGNILCRNQGRKSSRQQIRQMTVADAQQLFPDRERTLAVESSLRVIEVLEQQIAAIEKQVLSRIKPEAGFQNLQTVYGIGPILAMTIWLETGDISRFHQVGDYASYCRCVASTRLSNAKKKGENNSHNGNPYLAWAYVEAATYAARFYRQASRFVERKTAQVNRTLAIKALAHKLARACYYVLRDGVVFEPTRLLGS

SEQ ID NO: 438443 - protein, 357 aa, unidentified
MTSNKKYIGMDVHKESISIAVMNSTGKFVMECVIETKASMLLQFIAGLRGDVRVTFEEGTWAAWLYDLLKPHVSEVVVCNPRKNALLKNGSKSDRIDARKLAELLRGNQLKPVYHGEQGLRTLKELARSYLTISKDVTRVMNRLKALYRSWGIACAGTHVYAPRHRSEWLGRISEDGVRRRAEHCYQQLDVLRLLRQQIRRDLLLESKKHQAWRLLGLIPGIGPIRAALLIALIQTPHRFRTKRHLWTYSGLGLETHDSAQYRVVEGQLQRSKKPVTLRGLNQDHNHDLKDIFKGAATRVSSSSHGPLHDFYEHLLAQGRKPTMARLTLARKIAAITLIVWKKEVHFDASYLTSQAA

SEQ ID NO: 438444 - protein, 276 aa, unidentified
MQVVRIGLDLAKYVFEVHGVDNHGKVVVRKRLRRDAVAGFFANLPACLVGMEASNGAHYWARVLTELGHQVRLISPQFVTPYVKSNKNDQNDAEAICEAVGRPSMRFVPPKSTDQLAAQAVHRIRRRLVADRVRLVNQIRGLLSEHGIVIARDIAQLRRGLAVIVGNINDGLSEMLRALMRELQEELSELDTRIAAYDRRIREIFRTSEQCQRLGKIEGVGPVTATALVAAVGDRSCFKNGRQFAAWLGLVPKQRSSGGRARLFGISKRGDRYSGR

SEQ ID NO: 438445 - protein, 404 aa, unidentified
MIFVGVDWAEDHHDICVMNQDGAVLGKRRVPDSVAGIGELHELVAEHAEDDEAVAVGIEIDRGLVVTSLVAAGYQVFAINPMASSRYRDRHGTSGAKSDPGDAKVLADLVRTDRHNHRPLAGDTELIEGVKLLARVHQSAIWGRQRQLNALRSALREYYPAALVAFGTDLSHGDATQVLALASTPELGRTLSRSKIASALRRGGRIRNLERRTDEIQGALRAEYLQAPPTIAGAYGTITRSALRLIETYTAEIASLETALSEHFEQHPNAKVVHSLPGMGTVLGARVLGEFGDDRTRFANAKCRKNYAGTSPITKASGHSRVVLARFARNRRLSDACDQWAFCSLTRSPGARHYYDELRARGKTHRQALRQLANRLVGILHACLEEGVLYDETIAWQGAEQSAA

SEQ ID NO: 438446 - protein, 355 aa, unidentified
MDSTKYIGMDVHKESISIAVMNTAGKIGMECLIETKASMILQFIDGLRGNLQVTFEEGTSAAWLYDLLKPRVTKLVVCDPRKNHSMREGNQSDKIDARRLAELLRLDHLTPVYHGEHGLRTLKELVRSYLTITKDLGRVMTRVKAIYRSWAIPCTGQQVYAASHRAEWLAKINEPGVRRRAEFYYQQLDALRVLRQQVRRDLLAESKKQQAWKRLCQIPSIGPIRSAALLGILQTPHRFRTKRQLWTYSGLGIETHSSADHRSVHGQLQRSKKSVLVRGLNRNCNHDLKNLFKGAAVVASSKPGPFEQFYAALVAKGMRPEMARLTLARKIATIVLIVWKRGVCFDAQYLKPQTA

SEQ ID NO: 438447 - protein, 446 aa, unidentified
MICAAVERCAGIDVGKEFLAVCVLTGPLQGEARKQTRRFGTNIAELERLRDWLKQEEVTHVVMESTGSYWQPVFNVLEDTVKVYLANPREVKARKGHKTDDKDGWWLAHLLRHAMIHPSFIPPRAIRELRDLTRRRKKLLGAGTGEKNRVQKILEDANVKLGNVLSDVFGVSGQLMLDALLQNKAEPAEIAQFAQRRAKQKIPQIIAALEGHRMSDHHRKIIGYSLEHMRFLEEQVAKLDEDIVAKIKEAGLEREWQLVQSAPGLKETSAANVLAEIGPDMSQFPSARHISSWGGVCPGNNRSAGKNKSSHTTGGNPWLRAALTECAWAAATKKECFLKEKFWRITTKSGGKKAPAIVAVAHTVLSLVYEALRTGQPYQEKKVADLNPGQRDRMIRHHVKRLGKLGVKVRSTPLNHETEAVKTKQAKRTRAKDNSPGIRHLQLRAE

SEQ ID NO: 438448 - protein, 309 aa, unidentified
MGDLFVGIDVSKATLDVALSTGARRQVSNDDKGISTLVAELAQSLPTLVVLEATGGYQTAVVAALIVRKIPVAVVNPRQVRDFAKAIGQLAKTDAVDAQVLTRFAQVVRPEPRQPPDEQTLALEAVLTRRRQVVDMITAERNRLAQSAKRIRPSIEATIEFLRKQLADIDNDLDTAIRESPVWREKEDLLRSVPGVGRIVATTLLCQLPELGRLNRKEVAALVGVAPFNRDSGTLRGRRAIWGGRASVRSVLWMAAVSASRFNPVIRGFYQRLLASGKVKKVALVACMRKLLTILNSMMRDSRPWQLPA

SEQ ID NO: 438449 - protein, 413 aa, unidentified
MSVTDVPEPPRPTAGVDWAKDDHAVSVVGPDGEQTHRFSITHDAAGLRSMIKRLLGAGVAEVGIERPDGPVVDALRAAGLVVYVIPPGQLRNLRSRYGSAGNKDDRFDAYVLADVVRTDRRRLRPLLVDTPATTALRQSVRARRDLVVHRVAVANQLRAHLQICFPGAVGLFRDIDSEITLRFLERFPTPERAAWLSVKRLTAWLASIGYCGRTPPETLYQRLTTAPAAATGADADTAAAVTAAFVAVLRTLTTQIEALAARISEQLDLHPDQAIFTSLPRSGRVRAARLLAEIGDARGRFPTADSLACLAGVAPSTRQSGKVEVVSFRWGADRQLRDAICDFAGDSRHANPWAADLYQRARNRGHDHPHAVRVLARAWVDIIWACWTSHSPYDPDRHGALQRILNQDQRAAA

SEQ ID NO: 438450 - protein, 367 aa, unidentified
MKKVNTAAAKQSKNLSQQKLTIGLDLGDRNSWYCVVDEAGKIQLEQRVRTTAKALQEVFGTMPRSRIALEIGTHSPWISRMLSDLGHEVIVANARKVRLIGESRKKDDRLDAQTLARLARIDPELLYPVKHRSAQAQADLTVIRARAGLVRARTGLVNSARGLAKSYGERMRGCNVRNMNPEKAEGLSPELQAALEPLLNAIESLSERIVEYNERIENLAQQDYPQVALLKQVKGVGTLIALTYLLTLEDPHRFQKSRDVGCYLGLQPGRRNSGQSEPQMHISKEGDPYLRTLLVQGAQHILGPFGIDCDLRRWGLRLAERGGKSGKKRAIVATARKLAVLLHHLWVSGEVYEPLHNSSRTIVAAAA

SEQ ID NO: 438451 - protein, 358 aa, unidentified
MDKYIGFDIDSQKTVACVVQNGKKDLFETFPSNLKAMKNFLKKHQQRYAKLHLTFEISGQAGYWYDGLIDSVDDITVSNPHKMTWIFRTSKKNDRIDARKQAILLSIDEIPKVHMPNQDIRQWRTTLQHRRTVIKHTTSVKNRIRALLKANGHLKSLHTGSWWKKANRAWMMRLTSQEPIDSESLWRLQLADLLDALALKESQLKRITKYLDSYLEQQPGATLLMSIPGIGPRTAEAILAYTDDIKRFKRSKQYCAYFGLTPKLDESGSVRRLGRISKEGPSLVRWLLVESAWRTVKKSPALQDFYVRVQSGQKNRKGIAVVAVARKLLTIIRSMLITGELFNEELVGQAITQEKIPA

SEQ ID NO: 438452 - protein, 415 aa, unidentified
MALKIVYKICCGIDVHKTFVVACIASTNDKGVTSYESHRFSTYTSGLKTLLQWLLDRNCKDVCMESTGKYWIPVYNILEKDCSIVLAHPKYVKAIRGKKTDKKDAKWIADLFKHDLVAGSFMPPADIRQLRDLMRYRFKLTCFKSSEKNRLQNCLTVSNIQLGNVVSDTFGKSAQAILDKILEDPADTSFDLEPLVFKSLKKKLPELRDAIDGYITPEQAGKLKVIKAHYENLEARKAELEELILALATPYQQELAILQTAPGISSDFTAIGIISEIGTNMEAFPSAKHLCSWAGLTPTNNESAGKKKSVRVSKAGCYIKPLLVQCANAVVKSNKHPEIRNRYLRIKKRRGHKKAIIAIARMLLTALYHILKNGENYNAELYRKSDLPPVDREITVEQALLMAQFQGYKIKSATA

SEQ ID NO: 438453 - protein, 349 aa, unidentified
MRFYTKQHQHYCGVDLHAGAMYVCILDAAGEIVAHQNIPTRPKSFLRLIKPYRKDLAVAAECMFCWYWLADLCAEEGIAFVLGHALYMRAIHGGKAKNDRIDSHKIAVLLRGGTLPQAYVYPKGMRSTRDLLRRRNHLARKKAELLSHIQNTATQYNLPEPLGRIAKPSERGDLPARFADPAVRRMVEVDLATIEHYEHLLDGLERELVRMATLHDPVNLALLQSIPGVGRILGLVMLYEIEDIARFPRVQDFASYCRLVKPSKESNGKTYGHSGKKIGNAHLRWAFAEAVVLMLKGNKPAQAVVQKLASKHGKGKAFAILSHRLGRAVYYMLKNQVPFDPQQFLRQGT

SEQ ID NO: 438454 - protein, 411 aa, unidentified
MDVFCGIDWAEDHHDVALVDAGGQLLARLRITDDAAGLTALLELLAQHGDSQQDPVPAAIETPRGLLVACLRATGRPVYPVNPMSVARYRDRHSVAGRKSDKGDATVLANVLRTDRHAHRPLPADSELAQAVAVLARAQQDAVWERVHAQNKLRSHLREYFPAFLAAFGSLRGGITRPEARAVLAAAPAPADAARLTRARLASLLRKAGRQRGIEAEAARLHAAFGQEQMRQLPLVEQAMGRQALALLRQLDAACQSADDLQQAAEESFNQHPDAGIITSFPGIGALTGARVLAEIGDDRSRFKDARGLKAYAGAAPITRASGKSRAVTQRKVKNNRLAAVGYTRAFAALTASPGARAHYDRRRDAGDRHTAALRNLYGRLLGCLHHCLVTGQHYDEATAFPTAKATPAAA

SEQ ID NO: 438455 - protein, 361 aa, unidentified
MDKYIGFDISSKDVSVCVIQKNKQERYATIGPDVGSMRNFLVNEKKDGSRLNVVYEISGQAGFIYDLLIDCVDSITVANPDKMTWIYRTTKKNDRMDARKMAVLLSIGEIPAVYMPSKEVRQWRMIICHRKKLLEGLVAAKNRIRALMKSQGIVKPMHKGSWWKVVNRLWMRELSGGGFDVNNLWKVQLSNLLDELEQKEKQIALVTQYLDGYLDKQSGGKLLMSIPGVGPRTAEAVLAYTDDVERFAGGKEYCGYFGVTPRLDESGDSRRLGHISKKGPSVVRWVLVECSWKVIRYNPSLREFYERVRAGQKGRKKIAIVAVARKLLSIMRAMLLTGATFDDKCVSSLEYGKIEKLKKSA

SEQ ID NO: 438456 - protein, 360 aa, unidentified
MEFIVGVDIAKRSYEATIIDAEGKIVRRAFSFSNNCSGYNLLLNHVRKLTNTKGQIIFAMESTAHYWMALYARLTKDGYHVVVLNPIQPHSLRNLYIRKTKTDAKDSLIIADVVRFGRCKASNVPQDKLAALRELCRGRSYLKDTAADLKRKLIAVLDKLFPEYETMFDFVFSKSSMAVLRKYPSPQKLKNANLNKLTQLLWETSNGHFGEWKARQMKELAHNCFGIEDCCEVYSSLLLMYLEQISALTEKADILEKKIEELFVEFDCPLTTIPGIAALLGATILCEIGDISRFSPADKLLANAGMDPSVKQSGELKGTFSRMSKRGSPYLRRAIWKASTVAVQFFVPIMRKRWRRVFAT

SEQ ID NO: 438457 - protein, 364 aa, unidentified
MPERICFVGLDVHARKTAGAAVQLGSGEVFKAQIPGPPVEALDWMQTLPGPVRAVYEAGPTGFGLARAARAAGIEMIVCAPGAIPRQPGDRVKTDTRDALKLARLLAAGQLRPVVVPEPELEALRDLVRCREDLRGDLIACRHRITKLLLRRGLLYPGPGAAWTRRHASWLGSLAFTEPLVQLTFAEHLSCHEVLLTRRDRLDHLIAEQATTGPWAPLIARLRCLRGVDTLTAIGLLTEVGDFTAFAHPRRLASFVGLTPSESSSGDRRRQGSITKCGSSHARRLLIEASWHYRRHPALSVDLRRRQANQPPAAIDAAWRAQLRLHRRWTHLDAARGKKRTTVAVAVARELACFVWEIANQPDL

SEQ ID NO: 438458 - protein, 408 aa, unidentified
MGRAAEVVAPSSSIRTDGDCPVAQVNDLSRSLTAFDPISTLVVVVEMSKASWLVSGAVPGVERQPLKKLEPDATALLRLIERWRNEAVRAGRPISRIALAYEAGRDGFWLARWLIARGIEAHVIHSASVAVSRERKRAKTDRLDAAMLMRVFLGWLRGERGHCGMVAIPTMEEEDARRPSRERESLVNERSRITNRMKSALARLGVRGFKPHLRKAPERLAGLRTAEGTGLPANVIEEFRRDMARLALVREQISSIEKTRAERLERAPDTGPHAMVRLLARVIGIGIETADMLVREILSRKLRDRRAVARYAGLTGSPDESGLKRREKGLAKAGNARVRRGLIQLAWRFLMFQKDSALARWYRMRTEGPSGARKTTMIVALARKLLIALWRLVTTGEVPDGVELRPAA

SEQ ID NO: 438459 - protein, 407 aa, unidentified
MTDAPNRYIGLDIHKEYFVAVGVNDKLETVFGPQRGSNYQLDDWISRYLTPEDAVVLEMSTNTYQFYDALLPHVHSVMAVHSPNVAMVTNVRVKTDKKAALALAQLHATGLLTGVWIPPCPIRDLRSLVARRDKMVRLSTMAKNRLHSMLHRHHLIAPEKPFEPEQRTWWENLPLSANEQLLVSCDLEMLDFAQKQAAQIEGCLKQASAEDVRIPLLIQLPGIAMLTAITILAAIGDITRFPSAKKLVGYAGLGTRVHNSGLTCSSGRITKAGRKDLRYAMVNAANHAVEHHVHWKKELARLAPHLGRSKAIVAIARKLLVAVWHVLSKQAADRFADPRDVASSFIRYAYRIGVKNLPNQQPATVFTRDQLDRLGIGKELKEIPWGSKRFKLPPSKLMLEKSERCPK

SEQ ID NO: 438460 - protein, 395 aa, unidentified
MFIVGIDIAKRSHEAIIIAEDGQVVRKAFSFRNNCTGYNLLLEQVRRLTLVKSQIVFAMESTAHYWLALYARLLKDGYAVMVLNPIQSHSLRELYIRKAKTDARDSLIIADLVRFGRCKASNVPQDKILALRELCRSRAYLVDMAADLKRKLIALLDRIFPEYESLFDSVFSKASIAVLRKYSTPQKVKNAHLGKLTDLLMESSNGHFGEWKAHQLKEAACSSFGIDDSDGVYSMLLGMFLEQILSLTAQADSLEKQISVFFQEFNNPLTSIPGVGTVLAATILSEIGDVTRFSSADKLLAYAGLDPSVKQSGEFKSNQNRMSKRGSPYLRRAIWLASTVAVHRDPMFQTYYEKKISEGLHYMNVIGHVSRKMTTVIFAVLRDGQPYQPILQSAG

SEQ ID NO: 438461 - protein, 318 aa, unidentified
MTTGIGVGVDVSKDTLDVATSDESVTLHVANDAEGMARIVEALEELKVHRVLLEASGGYERNALIALYEAKLPVVLVQPLRARHFARAVGRYAKTDKIDAAMLARMAQLVVDEAPLWKPTEEVLADLKALVERRQTLVAVREAEQKRLRLARSIVRADIEAAIADLADKVGELEQRIDKILAKSKELKEEVAVLEGVKGVGRISAATLLVALPELGTLTRGEISALAGLAPMNRDSGTWSGSRFIRGGRAQARRALYMAALVASRWNPVIQERYRSLVARGKKHKVALVACMRKLLIHLNGLIRAHKNGPTNAARQLS

SEQ ID NO: 438462 - protein, 343 aa, unidentified
MDHFAGLDVSVKETSVCIVDDTGRIVREVKVASEPEALLAVLTNPACHFKRIGLEAGPLSQWLFSALAEAGLPVICVETRHMRAVLKAQINKTDRNDARGIAQMMRVGLYRPVHVKTLRSQKQRMLLTHRKLMQSKAIAIENDLRATLRNFGLKVGVVGTVKFEARIKELVENLPDLVVLVEPLLIVRRVLREQVGILHRRLLAIVRDDDVCRRLMTVPGVGPVVALTYRATVDVPSRFRNSKAVGAVFGLTPSKHQSGESNRTGGISRCGDEMMRMMLYEAAHIMLVRSAKWSWLKAWAMKIARHRGLKKAIVALARRLAVIMHRIWVDGTEFRWTREVAAA

SEQ ID NO: 438463 - protein, 408 aa, unidentified
MNTLYVGIDVSSKSNVVYLMLPNGDKHSNFSVANSHEGSTLLVKKIYSALTSHSLDTVLIGLEATSVYGDNLVYFLREDATLAPFNRKIHVLNPKQVKKFHDAYNDLPKNDYVDSFVIADCLRFGRINKEVYMGDYRYKALQNLTRARFFAVQNLVKEKQRFMNVLFKKYSTMTQEKVFSDAFSTTALAVYDEFESAEALANMDLHELTDFIIEKGKNRFPDPDAVAKAIQKAARSSYRLPKTVNDSVNQVLSISITSMKALESQIKEFDKAIKALMELLPNVLISIPGIGPVYSAGIMAEIGDINRFDNQASLAKYAGLAWKQHQSGGFEAEVTRLIPSGNRFLKYYLCEAAFSLVRCDKKYSDFYHLKYKEVNRCQHKRALALTARKFVRLVFRLLKDNRLYCPAK

SEQ ID NO: 438464 - protein, 410 aa, unidentified
MAYKVAGIDVHKKVLMVVVRDVSDPESDPQRRRFGTTTGELRELSTWLRQQGVQEAVMESTAQYWRPVWYELEPHMKLQLAQAFSNRAPRGRKHDFRDADRLIRRLVAGELILSFVPEPKQRTWRTMTRMKVQLVEDQSRLHSQLECLLEEMRIKLSSVISDLLGVSGCRMLRALADGEIDPNKLAALGDERLQCTEKQLIDALTGSPQPVHLELLALYLNRHQVLVEQIAKLDRMIAEALKPHQEAVARLALTPGLGVDSAQQIIAEVGVDAGTFPTAGHLSAWVGTCPGRNESAEENHSSRSAKGNKYLRRLLNQAAHAAVKKKGSHFQAVFRRLLPRLGYKAAIWAVAHRLCRVVWKILHEGVSYVEQGSEPDARTKRRRARKLIRTLRKLGYEVELRAIDPVPAPA

SEQ ID NO: 438465 - protein, 346 aa, unidentified
MDKFDACGIEVSAQELVVALFRDGRAEHLRSFPNTAEGHTAIRRFLTSGSQCVRVAMESTGLYGLDLAYALHQEAQIEVMVANPRAVRHFASALMQRSKNDRLDAVVLREFAARMPFQAWVAPSPHCFALCAVSRRLETLTEQSTAEKNRQHAASVTVAIPAAVRRDLQRSVRSIQRAIVRLTKEAQRILEKDPLLKSSYHLLLTAKGIGPTSALRLLAETALLSEDLDVRQWVAYAGLDPRECQSGSSVHKKVRISKTGNRHLRRALYMPTLVAVRHEPHLRAFYQHLLARGKCKMQALVAAMRKLLHAVHGMLKNRQPYDGAKLYRLVETFPARPSGHCPAEAA

SEQ ID NO: 438466 - protein, 412 aa, unidentified
MPDLLRRELPAKTLVVAIDPGKVTNRVWLTSGERGLIGEPVSLPVLKDGIDELERLIATSEVDGRPVIGLEATGSLHRAWAAELERRFPGSLRLFAPSETQAARTQLGSRRFKTDDRDCAALVWLLRQGAGRPAADGTLEALLATVRHRRSLVAQRRVLQQRLHDQLNGLCPGLSAPVGHGRALKLEDASGQAVLSCAAAFAGRAPTLRSLMARAPGRLTERNARFWAERWRRLLAPPPDAELRAARLGRDLERHRGLQLDIGLAEDQLAELLPLTDGEVLTSLPGVATVRAAAFAAHSLPIARFATPDHLFSATGLAPASYESATLRRRGRISRQGLPEHRDALMGIAWGLSQHGASFRIRDRELRARGMQPIQARVALARNACRLCFALLTTQQPFDEARYCRSRHRRGR

SEQ ID NO: 438467 - protein, 370 aa, unidentified
MKQVSRAATTKQKPEITIGLDLGDRFSHYCMLNSDGDAVETGRIQTTEEALRRHFQSEPAMRIAVECGTHSPWVSRLLEQLGHQVIVANARKIRAITASESKNDKNDAEKLARFALYDPRLLSPVRHRSMERQQDLNLIHARSTLVRARTMIVNALRGLVKSAGERLPACSTQGFESRVETSIPPALATAARPLLDQIAALNANIQQMDRGIEQLGNRYPEIKLLRTTPGIGPLIAAAYILTLDRPDAIQHSRQAGAFLGLRPRQSQSGDSDPQHRISKTGNVYLRSLLVQAAHYVLGRFGPDSELRRWGLKLAASGGKRGKKRAIVAVARKLAVILHRIWQTGNPWQAFPLSNRNTANNQAASQNPCMA

SEQ ID NO: 438468 - protein, 323 aa, unidentified
MSQPNQQCMGIDVAKLSLDIATTDTIEPFTVGNDEDGFAVITDKLKHTKINLILMEATGGLEAAIACKLQSEGYDVVVINPRQARDFARSMGYLAKTDKLDAAMPAQLALVIDRHPDRSRYIRHLPDEARAVLAAMVVRRRQLNHMLVAERNRLYPSHPQSRKSIDNIIDALQNELDRINEQMKQHMTAFFQEQARLIGSVKGVGDITVASLIAELPEQGKLNRREISALTGVAPLNRDSGKMRGKRTTFGGRAGVRATLNMAALVATQFNPAIKLFYQRLLAAGKPKKLALVACMRKLITILNTMLRKGEEWNASFQSQVIS

SEQ ID NO: 438469 - protein, 360 aa, unidentified
MSFNGTSVGLDVHALSVVAHAVDEETGRVERARLCPDHGEILAWLHRLRGPVRVAYEAGPTGFGLARALAAAQIDCVVAAPSKLIRPAGDRVKTDARDAAHLTRLLRLGEVTAVTVPEADVEAVRDLVRAREDARADLMRVRHRLSKLLLRQGRVYSGGQAWNGVHETWLRRQRFDDAHTRAAFDHYFDAVLTATAARDRLDEQIVTVAASPRWADQVDRLGCLRGISALTGLALTVEIGDWTRFTGSSIGAYVGLVPTEYSSGASRVQGSITKAGNAHVRRLLIESAWHHRAAYRNPGPTMRARWAKVDPALKDRGHAGNRRLYQQWCRFNERKKPHVVANVAVARQLAGWCWSLATLN

SEQ ID NO: 438470 - protein, 336 aa, unidentified
MQQPVTVGLDLAKSVFQVHGVGPDGSVVCRRQLRHSQVPSFFAGLEPCLVGMEACAGAHYWARELTRYGHEVRLMPPAYVKPYVKRGKTDAHDAEAIAEAVTRPSMRFVPVKSAEQQAALLDHKTRDFLVRQRTQAVNAIRAHLSEFGIVAAKGIQNVDRLLTAADDIPKEARPAVQMLADQLSDLERRIADLTARIAATQKADPLAKRLATIPGIGPIASSAFATTTPEVGAFRSARDYAAWLGLTPRAHSSGGKERLGRVSKAGNRYLRRLLYLGAMARISARRGRRSTATSDWLDRMLERKPVKVVAIALAARMARTIWALIARGGSYRAMTA

SEQ ID NO: 438471 - protein, 332 aa, unidentified
MSIIGCDLHTRYQVIARLDTETGEVTTRRLEHEGGEAKAFYAGLGKPALIGIEATGYTQWFERLVADLGHELWVGDPAEIRARAVRRQKTDTRDAEHLLDLLINKRFPRVWIPTPEERDYRQLLKHRDKLVKMQTSVRNQLHFLAMSQGVCWKRRLWSTRGRRELEALQLGRWASVRRQELLAFLDGLAPRIEEMDQAVKAEALRRAEAVRLMEQQGVGPVTALAFVLTVGPVERFPSSRKLVSYLGLNPREDSSGGHQRLGHISKQGNEMLRWLLVEAGHTAARLDPELGRVYQRLKFRRGGRVAKVAIARRLAVRLYWRLRNGNAGSHVQ

SEQ ID NO: 438472 - protein, 400 aa, unidentified
MLSIGIDVSKGKSIVCGMKPGGEIVYAPFEVQHTREGMLELVSLLRGSGEEVRAVLESTGSYHCPVVAALLENGIFVSVINSLRMKRFCSQSIRKVKTDRIDAMQIALYGLAYWQELQPTKLPEDTYRELQLLARQYYQMTSLLIKAKVDFNAICDQVLPGMQELMSDHAGRHKLSDFVLRYRHTTHILEMGETRFRKDYCKWAEKKGYRNCERMAVLIFATAQNGIPVLPNAPSTQIVITEAIRVLHTVEASRDAILTQMQALAKTLPEYSLVREMPCIGDTLAPRLIAEIGDVRRFHSKRALIAYAGIDAPPYQSGKFCANNRHISKRGNRYLRKTGYEVMQSYVMHKPANDPIFTFIEKKRGEGKSGKLAMVAGLNKFLRVYYGKVTELYRSLPTIE

SEQ ID NO: 438473 - protein, 303 aa, unidentified
MSKISRLDFKGQQIYVGMDIHKKSWSISILTDQLEHKTFTQPPDVRTLMNYLKRNFPGAAYKCVYEAGYCGFWIHDSLKEHGAECLVVNPGDVPTKDKERRSKTDRVDCRKLARNLRSGELKGIYIPSRPKVEDRGLIRTRHSMVKKQTRCKNQIKAILQFYGIHIPEEVAAGTCWSKRFIDWIEAIRMERASGNFALKAHLEELNNMRKIIADLTRSIRSLAITEAYRQNVRVLKSIPGISTLTAMTLLTELYEISRFKKLDKLCSYVGLIPDTDSSGETERNTGLTKRRNAQLRGILIESS

SEQ ID NO: 438474 - protein, 349 aa, unidentified
MSSLAEVVDVVIGVDTHKHTHTAAVIDAATGAVLDELTVDTDPDGYDELVALADRHSGLRAWSIEGTGGYGAGLTRHLNRLDEVVIELDRPNRPARRNGAKSDTIDAVRAGREALARDHLAQPRAEGERAAVAVRMAARRSAVDASAVAQRQLHSLVVAAPETLRSRFRGQSTTAMITTATRLRVHSSWDVETASYATVLRDLGRRIKAMQSEAADHERAILAIIRSWRPDLLDEQGVGPIVAAVVLCAWSHPGRCRNEAAFANLAGVAPIPASSGQTTRHRLNRCGDRQLNRALHVIVLSRLRYDPATRAYAERRRAEGKTDREIKRCLKRYIARDLYKLLENPPSPT

SEQ ID NO: 438475 - protein, 466 aa, unidentified
MENNYILYVGMDASKDKADAAILKVCDRRSVKPKFLRKKLSFKFVKSEVTSFLDTVRSYSDDNCTSICFALEVTGIYSTNVYNFIKANLNDNESIRFLNTDFVNQWRKAHNIAKSDPLDAQTISTIIGTDSDVQYVNDNVFENKNGYQDLKALIHRHYQIKKIYSQEINRLIAQCDCLFPELQYVFEPKSAAFIAVLSSYPTTHDIINASKFEVFNVVYEATKHRCSMDKIDKLFDLCRDTLVPDDISSYGRNIILDLVENIKNIKGQLKAIQRYIEDVVSLNPAYKLLLTMTGCGPITAATVIAETGDISRFKNADCFVSYSGSSPRNKRSGTSVETMGKISKKGSRYLRHAIYMIAEFARRHNPVLRHQFERIKNGNKKRHKLANIAIANKIARYIYSIMKNKSSFVILHEHIMRLPEETRDTFFNSISLDFPKNTRKQIYQYSDINGEVHKFVYIKSEDTMIV

SEQ ID NO: 438476 - protein, 428 aa, unidentified
MSKYYDKAVIGIDVASEFSVATILAPNGYVFKKAFKFNHNLSGFKYFLEEIKKVENEFSMKPAIFMESTGIYHSTLFYFLLKNNYEAFIINPLITNSNKNKDIRKVKNDKKDSLNIAKLAKYEDIKAYSYFDISIFSLKSLCRDYYKLIDVRTTFKLKLNSDLRMIFPGYNKIFSDKTSLSSLALLKKYQSPNDILKAPKEDIIKIIYSASKKESWSHQIYYKLLKSASEAVELTIPSSALCVRILNSISMIETLNEQIKILTDEIEKLANSGEVPTSFKNNIKLIMSLKGIGLISTITLLSEMGDFNNFKNPKQLVAYFGVDPSVNESGKFKGNRNKISKRGSRIARRVLYIVALTAIRKKPNGEFSNKILYDFYHNLIETKKKKVAVVAIIHKILKYIFAVLRDQKEYECRNPKIHCKMFLGNNDK

SEQ ID NO: 438477 - protein, 472 aa, unidentified
MTVVGLDVHKRVVEAVVLRAEDGRILHRERFECTREELVRFATKRLGPNARVALEATTNTWSIVELLRPYTGELVVSNPMRTRAIAEAKVKTDKVDALVLAQLLRADFLPRVWQPDGMTQARRRLTARRASLVSDRTRVKNRIHAVLHQRLMEPPVSDLFGTKGMRWLQMLELDAAGRLAIDSELRLLRQIEIEMTAVDEALAQDGYDDPRVRLLMTLPGVDVAVAQTLLATLGDIQRFKDPDAAASYMGLVPSTRQSAEHCYHGPITKQGKGQARWMLVQAAQHLSAHPGPLGVFFRRLAKKKNRNVAVVATARKLVTIAWHMLKNNEPYRYAIPRSTETKLSRMRVKATGERLRPGLPKGQPRPKAYGSGVRTRTVPALDTIYEREGLPPIAPLSDGELRMLRQQKVLKHVAQTSRPQRLPRRAAAPEPPDVPGAVSPRCPGPRPSAGRAPAAPRRAKSTQTPSPGRRLM

SEQ ID NO: 438478 - protein, 415 aa, unidentified
MKYAPLYRPGTPSDGMSAGIDWASADHAVCIVDAAGAVVSRFTVAHTAEGLRTLTQRLARAGAREVAIERGDGPVVEALLAAGVTVVVITARQVKNLRARYGSAGNKDDRFDAYVLADVLRTDRARLRPLIPDSPPTLTLRQACRARQDLVRHRVAVGNQLRAHLQAAYPGAVGLFCKLHSAISLAFLARFDCQDRADWLSDKRLAAWLKAASYSGRTRPADLCQRLTSAPRGATGEQGAASAQVTRALAAVLASLNTQIKALEAQIAAQLASHADGHIFTSLPRSGTIRAARLLAEIGDCRARFPDPQALICLAGAAPSTRQSGKHKAVTFRWAVSKQLRDAVCDFADGSRHASPWAARIYNDAIARGKDHPLAVRILARAWLYVIWECWHNGTAYNPARHRALQRLLTTEQAA

SEQ ID NO: 438479 - protein, 338 aa, unidentified
MKLFFVGVDISKKKLDICVRDAKTIIQECTFPNSQKPLLKSIKSLINRLNCNLNEVLFCGEYTGMYIYPLVQSCKILGLDLWIEDPTQIKYSFGVQRGKNDKVDASRISEYAFRYQDKAKMFALNDDDLNSLKLLLSERDLLLVDKIKYSAQLSDQENYMSGKDFKDKSKRIKQLVVEFNRLLNEIDSKIESIFEHNEKLSSQRDLLCSVDGVGKRIAYEMIALTYGFKRFQNHKQFCCYAGLAPFQYTSGSSIYSKKKVSQRANKKIKSLLHLAAISVIRYDGEMRSYYLRKKDEGKNGMLILNAIRAKIVARIFAVVTRNERFHKDYLNPSFNIAG

SEQ ID NO: 438480 - protein, 448 aa, unidentified
MGKKRTYSSVDVEKFDIATVLAWLSGRCIVAVDVAKTKFYAGIANEAGQVLAIVRFKHPVQTRAFLGLLEALREAGHTPQLVMEPTGTYGDALRHQCHVRGFPVYMSAPKHTHDMAEVLDGVPSMHDAKAVVVLAKLHVLKPGTLWQPESESRRSVRTTFDRRELYAEPLQRHLNRLEALLAKFWPGFDELFDVHAKRSWMALLEQLPGPESVAAKPEHARQVLRSASRGQLACDKIDAVLASASDCLGVPMQQGDRTQLHELVQEIHRLTTEQDRIDEELRDVVAAEPAAKRMAPVIGTAAAAAILAYLGAPADYGSAAALEKAAGLNLKERSSGKTAGQLKITKRGPGIVRRNLCLAVLRLIQSNAVVCAWYVRRKGFREDTKMKAVVAVMRKLIRAIWHISRNDVPFDATRLFDTRRLDPKAPTPIRPRSSFATTRSSAAAQLGA

SEQ ID NO: 438481 - protein, 394 aa, unidentified
MFYLGIDQHKSQITIDLRNEQGDIILQRQVSTDHAKIDEFFVALKKQTARTKGFMAILEVCGFNDWLIKKLNDYGCKEIVLMQPDKTSNKKTDRRDATALCELLWNNRKRLQNGERPNGIRRVVLPKPEEAAVRQAAHLRQHLVRQRTKCINKIRSVLRKHNMEQDCPSKQYKTKKAKEWLKTLKFTEQIDRMEIDVHLKIWETLDEQILKLEHEMAKQAETNEDVMLLISIPGITAMGAITLLSQIGDIERFQTPDSLANYFGLTPGCRNSGETNRSGSITKAGSQIARHVLNFAVIHAVRKDKAMRDWHKSIKKRRGAKIARVAVMRKLATTVWHILKRQTTFQFRFDPMTKPKKKSASGFLRDGNNAVRVVKNKITKTPSPPKRQTKAKSP

SEQ ID NO: 438482 - protein, 346 aa, unidentified
MMLIGCDFHPSWQQVSWLDVETGETGEQKLVHAGGEAKQFYEQLAAPVLIGMEATGNSQWFIELVEDLGHEIWIGDAAQIRASYVRKQKTDKRDAAHILKLLVEGRFPRLWTPDREQRDLRQLVLHRHKLVLIRSRVKNELQHLSLNKGMQRKRRLWSQAGQKLLRELPLKKWAACRREDLLGLLTMLDEQIGKLDGAVQHAAEENPQSKLLMTQPGVGPNTALAFVLTLGDVGRFPRGKQVASYLGLIPREESSGGRQKLGAITKQGNRMLRALLVEAAQVAVVHDPGLRKQYRHRCHQKPKAVAKVAVARKLAVRLYWMLRTNVAYPEIVRIESSSGLALVGAS

SEQ ID NO: 438483 - protein, 421 aa, unidentified
MSNVTEFGKKANNQVHELMENVSWVVGIDIGKEKLSCALMDIKKALICRFDVEGSLAGYNELLNRVKKETKGSGKIIFALEPTGHYWMVLGQFFEDHNQSYVLIHPLVAARSREVHRLNKGKTDSLDARLIGELACDRSITRTQIPEDYWATIRFFAREYMDREKEIAREKNRIVSYLETTLPGFVEIFPKPLCMSGRACLRFLANFREASKGDMEHFEMQIRKHFPGKRLMTSRVRRLYDMLQRGDVLGLRAGRQAMFFRIIHSLNRLEMYEGQEEAAKQAMLDMYKKSEYKEYLDSIWGTTPSVNALVLGFMGDPALYDSPASLVKLAGCDPVPNESGKFKGRASISHRGRSLLRKAGDRVSFLLEKRNSVFRAFFNHLMSRQKNKFTKRQARVACINKYFRIVWVLCHYRVPFNPALA

SEQ ID NO: 438484 - protein, 343 aa, unidentified
MQTITTIGLDIAKSVFQVHGVDAGGQVIVRRQLKRRYVLTFFQKLSPCLVGIEACASAHHWSRELQALGHTVRLMPPAYVKPYVKRQKNDATDAEAICEAVTRANMRFVPTKTPGQQSGLLLHRARHLFIRQQTSVINAIRAHLAEFGIVAPVGRHGVEELLNVVADPNDKRVPEIARACLSAFGAQLRRIKEQVLEFDRLIRAWHRSNELSMRLDEVPGVGPVLATALVAAVADPKSFRSGRNFSAWIGLVPKQHSSGGKNRLGNISKQGDRYLRGLFVAGALAVIRYAKIHGTTHRPWLTALLARRPTKVAAIALANKIARMVWAMMARGERYKEPFALAR

SEQ ID NO: 438485 - protein, 362 aa, unidentified
MFRPHTLYIRIRIVRKVSEPAFAMKDQDVTDVIRRKQQTAMRYIGIDVSKATFVVAYSSDKGGEIRTFNNTTTGIKQFIGALPKDSSIHCVMEATGNYSAMLLYLLNVAGIAVSMENPLKIKNFARAMLSTVKTDKIDARLIALYGEKMNPQPFKIQGEAILRLRQKRTVIRQLTKQITAMSNLRGSLACLPVPDKGATHTVDETIEFLEKRRDRLQSELTDLVEVEFSRQLALLTTIKGIGITLATALIITTGGFTYFQNAKQVSRYLGICPTYEQSGTSVNIRGHINRNGDAYTRGLLYVAAWTASRFNTKCGETYTRLRQNGKPGKLAMIAVANKLVRQAFAVVTHDKEYVDGFVSNRH

SEQ ID NO: 438486 - protein, 415 aa, unidentified
MSETLEYFIGIDWGCAEHQVVVVDSRGAQVKRTRVRNNGEGLQAIVAICAAFPNSAVGIETPRGALVETLLHAKVAVFHVNPKQSERLRDRHTPSGSKDDAFDAFCIADGLRVDTTDRPAFRRVDPPADRLVELQELARLDNALTADRVAVQNRLREQLLRLHPPLVALCDGADELWYWELALAAVSATRDLRRSEVQAILKRRRISRFTADQVVSALKEPGYFVSVGTRKAVAHAVKILVHQLQMFHQQEHELGKTTAALLDELAKPDPEGKSSEHRDVAILRSMPGVGVKTAATMLAEVPQFLRDRNYPGLRAITGVAPVTDATGKRSGKKARVFMRRACRNHLRNTMHFWALNALKKDEWKSYYAKLRAQGVGYNAALRRVGDRLLRVLVGALKTDTLYVATTLQPKTKVAA

SEQ ID NO: 438487 - protein, 349 aa, unidentified
MLADEVDYVVGVDTHRDEHVLAVVVAPSGAVVAQQSVRANTRGYAQSLRFVEQHSSGRRVWAVEGAGHYGAGLARHLSGRGEAVVEIGRGPRDERRLRGKDDSLDAIRAARTALASQKLSLPRTGQRREALRLLLLARRSAVDVRREALVQLRSVIVTCPDRLREQLRGLPAGRLIGRCSRLRRSSACAPDELASRLVLRSLARRVEAATAEAAELEREILAHVQALAPQLLDEPGIGPIVAAQLIVTWSHRGRVRSEAAFARLAGVAPIPASSGQTIRHRLSRGGDRQLNCALHTVILHRRQHDPATKDYIARRLAEGKTTRDAVRLLKRYLARHLYRVLNNPAPLTT

SEQ ID NO: 438488 - protein, 374 aa, unidentified
MSRTIIYLGLDVHKDSITIAVLPEGAPAPSRVERLPNDLAKLRRFCERLAAEGDLRACYEASGAGYVLHRALREWGYPCDVIAPSLIPTKPGQQRNHDKYDAAQLARLYRAGELTCIRIPSEAEERVRDLVRCRETLQREVLKSRHYILKFLARRGFVYREGTNWSTAHYNWLRRLAAASSPLVAEDQIVFGEYLGLLEYKLSRREELDRRIGELALTPALAPAVNRLQCFRGVQRHVAMVLTTEIGDWRRFSSPRQLMAYLGLVPKERSSGDRERRGSLTKAGNSHCRHVLVQAAWAYRFQPKVGLALKARQRGHSPVVIAHAWKAQHRLHTLYRRLAFRTKPQIAVVAVARELVGFLWAVMQDQDVTKSVAA

SEQ ID NO: 438489 - protein, 429 aa, unidentified
MSEEKSLELRISVDVGYRRHSVAMGLSSGEVLEEFEIDHRPEGFQEFFSRIEAQRKKRNCAVSVAMEGYNGHARPLDSLVRERGYRLYNLNNLKFARFKEIFPGAAKSDRIDARKGLELFQLSDHLPLAKEVLQEVSGTAPENEILKRLTRRRRRLVNERVRVVNNLQADLQAVCPGLLEITGEASNQWFLNFLLSADTLPQLARLKRSTLLKIPSVGVKSAAIIEHWQKRAHFSQEVEWVSEMIQEDATRCLELDEKIKRLQAKIAEVAKNSKIAKTLRSIPGFGAVCTSELAGEIGTIERFASEGSLSLYLGMSMLDNSSGKYQGTKAPKHVNTRAKAAMMIGVDRHRKYVPESQRYYEKKRSEGKKHNQAIRALGRHLSRIIYKMLKQEREYEIRPEKGDTKAKVGPRSFVKTKIRTPKISSKETK

SEQ ID NO: 438490 - protein, 346 aa, unidentified
MSKHSVSAGDIAALLARILELRRKAYARTGKSFPIIVIQEAGLDGFWIHRVLLSEGIESHVVDAASIATSRRRRRAKTDRIDGEALLRALLAHKRGEPRVCSMVRAPTPEDEDCRRICRERKVLIMERVQHVNRIKGLLFSQGAFGYEPLRRDRRARLDALQTGDGRRLPEHLKAQVCRELDRLELLLEQIKAVETERDALLNAQQTKGLAPPPMLLGVHGIGPEFASVLWSEGLSRRFDNRRQVAAYAGLAPTPWQSGSVNREQGISQSGNSRLRTTMIQLAWLWLRYQPRSALTLWFQDRNERNGGRRRKTTIVALARKLLVALWKYVSAGVVIEGAMIRAAGR

SEQ ID NO: 438491 - protein, 343 aa, unidentified
MKLQVLGIDLGKTVFHLVGLDSTGRLVIRKRCSRRQLLAFTANLEVQLIGMEACSGAHFLGRALREQGHEVRLMPAQYVKPYVQTNKSDYLDAEAIAEAVQRPRMRFVPIKTEEQLDLQALHRVRERWVMRRTAVVNQIRSLLLERGLTLSKGRRHLDEQLPRILEDAELHLSCSFRVLLAQLQLELQQLAARIEEMDRVIQKMAKENEACQRLTEIPGVGPVTATALISAVGNGSTFQKGRNLAAWMGIVPGEYSTGGKQKLLGISKRGNKYLRRLFVQGARSVLQQRHKQALGLSTWLAQLLGRTHQNVVVVVLANKLVRMAWAVLCKNQRYRTPVLAVSA

SEQ ID NO: 438492 - protein, 340 aa, unidentified
MSEITTIGLDLAKHVFQVHGIDAQGRTVLRKRLRRGQVLAFFSRIPRCVVGLEACATAHYWARELGALGHEVRLMPAQYVKAYIKRNKHDAADAEAICEAVQRPTMRFVPVKTAEQQATALLHRGREQLVRQRTMLVNALRAHLAEFGIVAAQGLRNVGELIAIVRDDGDRRLPDVARQVLQVLAAQLEQIEAAIAALEKQLMAWHKANAVSQRLASIPGIGPIIATAIATTVADPGVFRSGREFAAWLGLVPRQNSTGGKTRLGGITKRGNRYLRRLLINGASANLLRSKATKADPWVIGLRRRRPPLVVAVALANKTARIAWAVMLREREYQPRAVAA

SEQ ID NO: 438493 - protein, 381 aa, unidentified
MKKNSIARLQVTKSQIRRMAAKQRLTVGLDLGDRSSRYCILDEAGEKASEDQLPTSKAGLDMLFAKMAPCRIALEMGTHSPWVSRHLAAMGHEVIVANPRKVRLITQSVKKNDRMDAEQLARLARVDPKLLAPIRHRGPEAQADLAVIRARAELVEGRTKLINAARGLTKPMGERLKSCDADTVKESMADGLSEATQKVIRPLLKSVEVITQQIKVYDQQIQEIEKRYPETKLLKQVHGVGPLVSLAFILTLEDAERFEHSRDVGPYLGLTRKQRESGESAPELGISKAGDELVRRLLVQAAHCILREDAPDSDLKAWGLTKVGAGAGKKGSKSRKKKAVVAVARKLAVLLHHLWVTGEVYDPQYNRKAIEASKRTKQAAA

SEQ ID NO: 438494 - protein, 354 aa, unidentified
MKKKTKTQAVAVERDLYAAVDLHGDNGFYCVINGKDQRVFQQRLPNDLKTVLTALEPYRPRLAKGIAVESTFNWYWLADGLQEAGYPVQLVNTTAVQTYSGLKNSNDKTDAFWLAHLQRLGILPTGYIYPREQRGARDLLRRRMLLVQQRTAHLLSFKSLVERETGQSISSNRVKALAPEGVEKLLEGSEVVLMGQTNVRVIKFLNQQVQGLEKAAQAKLKVLPEYERLEQIPGLGRILNLVIMLETGPIERFATAGNYVSYCRAVQAEKLSNERKKGENNRKCGNRYLSWAWMEAANFAIRYSPEIKSWYQRKLRRCGNLAVLALKAVAAKLAKAGYYMLKKREAFKMEQVFG

SEQ ID NO: 438495 - protein, 311 aa, unidentified
MNDSEVHAGIDVSKAFLDVACGSECWRVSNNPSGIRVLVRRLQGVNPARIVLEPTGRLERPVVEALDSAALPVAVVNPRQVRDFARATGKLAKTDRIDARVLAHFAAAVRPPIRAIADASSRELAALEARRRQVVEMVTAEKNRLGTARGPVARQIREHLRWLERQLEELDKELKEFLRSSPVLRSKDDLLRTAPGVGPVLAANLIANLPELGTLDRRQIAALVGVAPLNRDSGTWRGKRRVWGGRAPVRAALYMAALVASRFNPSIKAFYQRLCAAGKPKKVALTACMRKLLTILNSMLQHQRPWSVQHP

SEQ ID NO: 438496 - protein, 340 aa, unidentified
MSLYIGVDFHPHQQTVAWCDTRDGEIRFRTFKHSERTVLNSFYKGLSEPAVIGVEATGGLDWFERLIFENGHELLVGNPHEIRRRALSRHKSDRRDAETMLDLLVNREFPTLWRRCEADRSTLQMLNFRQHLVRQRTSVSNQLQALARKAGLAKFRVKTRIGRSILLSAGLKETDAYLRENLYALFDDLTVQLHRVEDHLQSLAKQNEAAQRLMTHSGVGYLTALAVAATLGDASRFNNTRQVVAFIGFDPLDKSSAQKRRIGRISKNGSRLCRHLLGQAASQSRDRQIRESYQRIKSRRGHAVAKVAAARRLLVNCYVILRDNIDYQEFSRRGEVGLHD

SEQ ID NO: 438497 - protein, 311 aa, unidentified
MIKNRGRVVGLDVHPDSFAGAVVEGTDPASARVLSSSTRVELEQLEQWALRHTRTEDTLVLEASGNAFAVAARLRTIGRETEILESHRAGKVGKVYCANDRADAVKIARIYLSALSPIVWQPDQKTLERREVFSAYQAVVKESTRAKQQLRSMLNEHCVRLKKGFRLCHPNAITRLLALREWTPARRMLLQQLHGSLVAARVRRTLLRRHMAQEIVAEEALLRLTRLCGINLVTLYGVVAAVGDVRRFSHSKKLVAYLGLNPSVSQSGNFEGSGALKRHGRGALRALLIQSGKKLLEVNNPLQKWGLSGTS

SEQ ID NO: 438498 - protein, 369 aa, unidentified
MDPSLCAKMKKYFIYRVQNTDGILKEDPSMNNISIVGIDLAKHVFQLHAVDVRGHKLFSKKVKRDQLSAVVASLPPCVVAMEACGSAHYWAREMTLLGHDVQLLPPQAVKPFIQGHKNDARDAAGIAEAAARPATRRVTVKTQEQQSLQALHRVSSRLVRARTAVGNELRGLLNEFGIVVAQGHRVIRQGDIRRLLDEQRESLGVALCEVMHDLLNEWQALDIRVTEYDRRLMSYVQAAPCMQQLMSVPGIGPINATLLVAHMGDAKRFPNGRQFSASLGLVPRQHSSGGKSVLKSITKRGNSEVRRQLVHGARSALRKFQRQEHPDRLAQWIIQLAARVGQRKAIVALANKMARICWSILAYKQPYQA

SEQ ID NO: 438499 - protein, 428 aa, unidentified
MLDRVAAIDVHKKMLAVVVADVAGEGEYPFERRKFGTTPEQLELLTRWRIQQEVEEAVMESTAEYWRPVWGTLEQHGKPERQKREGATQMSGALPLCQAKSNRGRRGRKSDFIDAERMVKRLVAQELVLSFVPDPEPRLWRTVTRRKYQLTRDKVRFQNQLESLLEQAYIKLSSWVSDLLGLSARRMLQALADGESDPAALAALADHRLRATPAQLRDALGACAHLHPVYRRLLKMALEELKLLEDQIAKLDGEAAELLQEHQETIQRLAEVPGLGASSAVQIVAEVGPKAEAFESAKEMSSWVGVCPGSNQTAGEAHSTTSPKGNQNMRRLLNQAAQAAVKVKGSIFEIAFRKFLSRKMPYKEAIWAIAHRLCRLIWLLLRRKVRYEERGPAVSAKSQCTRTTRMIKELRKLGYRVDGGPLPAAIPA

SEQ ID NO: 438500 - protein, 403 aa, unidentified
MNPCITIDVSKETSHVQGFLDNNVPLSKPKKILHTKEGFSNILTVYNQMVYRTGIKPTVFFEYTGVYHKTLMAYLKANNLSFIPIPPLVAAKVRNSDLRNKKTDTRDCKTLSFVYYEDKVKKYYEPTKDEKRLKDLQRYYMITEKQYQEITVHLYEMIDTIYPFYKSIMSEFDCFTSLKFLQKYPHPDYVTFHREKTLIKDFMEITGHGEKYATKVIHKLLNVINDTIPGCCNDDFEVEMLKDYATQALFYKTRLNKTLEEINRIINQDSSKKSLVENIDSIPGVAKNTAARFIAEVSNVDRFKSSKALIAFAGTDPNINQSGIIDGKHLSITKCGNKRLRTILFIMVRSMIRKRVSANPIKDFYKKKTQLGLPPKVVLVACINKLLGIIYQLNKTGEVFVLK

SEQ ID NO: 438501 - protein, 387 aa, unidentified
MTKNKGRVVGLDVHPDSFAGAVVQGRDPASAMVLRTSTRVELERLEEWARRHTCTEDTLVLEASGNAFAVAARLRAIDREVEILDSHHAGKVGKVYCANDRVDAVKIARIYLSALSPIVWQPDQKTLERREIFSAYQAVVKESTRAKQQLRSMLNEHCVRLEKGFRLCHPQAIARLLKLREWTPARRMLLQQLHGSLVAARARRTLLRRHMAQEIVAEEALLRLTRLCGINLITLYGVVAAVGDVRRFTQSKKLVAYLGLNPSVSQSGNFQGSGALKRHGRGALRALLIQSGKKLLEVNNPLQKWGLAVAARRGRNKAAVAVARKLCVALWHVMMGHAIGTLERLDTLQTKLSKFATEIGPAALIAFGYHNKADFVEKKLYVLRSYP

SEQ ID NO: 438502 - protein, 342 aa, unidentified
MYITTVGLDLAKNVFQVHGVNERGKTVLKKQLKRSQVLPFFANLAPCLIGMEACAAAHHWARKLVTLGHDAKLMAPQFVKPYVKSNKNDARDAEAICEAVSRPNMRFVPSKTPAQQAVLSLHRARQGFIKARTAQANQLRGLLGEFGIAIPQGIRQLSTHVPDIVEDADNGLPGVMRGLVQWLWEHFQELDRQVGELDRDIRRLQREDEASRRLAEIPGIGFLSASALAATVGDAKAFANGRQLAAWLGLVPRQHSSGGKEILMGISKRGDCYVRTLLIHGARALIQQAERRNEADSWLKRLLARRSKNVATVAVAAKNARIAWAILAHGRDYDSEYQPVAP

SEQ ID NO: 438503 - protein, 356 aa, unidentified
MSRDTKYIGMDVHKEASVIAVLNDSGKLVMESIVETQASSILQFIYGLRGELHVTWEEGTWAAWLYDLLKPHVHEVLVCNPRRNALLKEGSKSDKVDARKLADLLRTGMLRPVYHGENGLRTLRELARSYQTISKDLNRVMNRLKALYRGWGIACSGTQVYAARYREEWLHKIPHAGVHRRAEVLYQQLDGLQALRRTLRSELLAESRKHKAAKLLRQIPCIGPIRAARLLALMQTPHRFRSKRQLWTYSGLGIETHESAQYRYVRGQLQRSKKPQQIRGLNQNHNHEMKEIFKGAATRASCGVGPLRDFYVALLDKGMRPEMARLTLARKIAAIALTLWKKEERFDAEQLKTQAA

SEQ ID NO: 438504 - protein, 428 aa, unidentified
MKYNTQNAKIASITEKTLIVGIDVGSETYFARAFDWRNYEFTKKPFEFSNNEAGFLSFKAWVEDLLEKNGKSVVIPGMEPTGHYWFALGKFLQDNGMRPVHVNPHHVKKSKELDDNNPNKNDRKDPKTIASLVNEGRFSYPYIPSGVYAEIRSLSNMRFQAQEELTRAKNRIARWFSIYFPEYKDVYRDFKAVSGRIVLQAAPLPEDIRKLGVEGVNRIWRGAKLRGAGMKRAKTLVSAAEHSIGSKEAPEAARIELRNLLNDMDVYASRVEELLGMIGEKLKEIPYIDKLMAIKGVGLLTVSGFIAEAGDIRRFEDPKQLQKLAGYAIVANESGKHKGESRISYRGRKRLRYVLYEAALSLIGKNAEFKEIHEYYRTRKENPLKKMQSVVAVACKVIRIFYVILTKGVDYDPEKMMGDIRRPQIQAA

SEQ ID NO: 438505 - protein, 348 aa, unidentified
MTVYCGVDFHARKQTISYLTTEDGEVQQTELHHEQDNIRGFYAKLRSQGPVIVGFETSGYAAWFEEMLEELGCEIWIGMPAAIRRQARRRQKNDRRDADLILELMLRGDFPRLHRYTPASREVLQQLRYRHRLVKLRTIVINSLQYLALSRGVSLRTKLLTTRGQQRMKELKLPSHLAKQRDEMCELLQELTAKIETAESWLELKAKQDAQVERLMSHPGIGPLTGLCLVYTLEQVERFANPRKVTAYVGFDPVEDSSGERQRIGAISKQGSRLLRFLLVEAGQVAVRTDPDLKAAYWRVQLRRNHQKAKVAVARRLLVRAFIMLRDEIDYAEFQRRGVAARSTRRTA

SEQ ID NO: 438506 - protein, 345 aa, unidentified
MELHTIGIDLGKTVFHLVGLNPRGEVVVRKKFSRKQLLHFTANLQVRLIGMEACGGAHFLGRALQEQGHEVRLMPAQYVKPYVKTNKSDYIDAEAIAEAVGRPKMRFVPIKSDDQLDLQSLHRVRERWVMRRTAVINQIRGLLLERGITLRKGRRHVDEALPEILEDASAKLSGALRVLLAQLRLELDHLQMRIDEADAVIKKTAAENEACRRLVTIPGIGPITATAIIAAIGNGAAFKKGREFAAWLGIVPGEYTTGGKQKLLGISKRGNSYLRRLFVHGARAVLQQSAKQYSGLSSWLAQLTTRTHRNVAAVALANKLARMAWAVLAKNEPYRPPILVGVATA

SEQ ID NO: 438507 - protein, 320 aa, unidentified
MNETTSSIFVGIDVSKARLDVAVGEKGAQWSERNDADGIARLVKQLVEIQPELVVIESNGGLERPALVELVRVGLAIALVNPKRVREFARAIGLSAKTDKLDARLLARFARDVKPGRTVLPTEDEQQLSALLARRKQLLDMLTAEQNRLGTAPPVLKELILEHIAWLKEHIQAIDKEIDDFNRQDPQRQEKQDLMQTVKGVGRVTASTLLADLPELGQLNKKRIAALVGVAPFNNDSGHWRGKRRIKGGRASVRQVLYMAAVAAARSNPAIRTFYQSLLQRGKEKKVALVACMHKLLTILNAMIRTNQPWREPVPSPISV

SEQ ID NO: 438508 - protein, 411 aa, unidentified
MRVHHNVCCGIDVHKKSVTACLMWGLPDREPQIEVRRFGTMTSELKQLVEWLKQAKCEIAAMESTGAYWKPVWNVLEGQLNLILANAKHVRALPGEKTDNKDGRRLASYLRHGLIRPSFIPPRAIRELRDLTRYRKKLLANGSAERNRIQKVLEDANIKLGSVLSDVFGVSGQRMLQALVDQPSVDVDHVAALAHWRLESKMDDLKKALEGRVTAHHRFMIELSLGHMHDIEQQILRLDEEIARHVAAYQTQFQLLQTIPGIAETGAASVLAEIGPDMSPFPDDDHLSSWTGICPGNDESAGKKFSGKTRKGNPHLVATLVECAWASTHKKKSEFKAQYHRVKARRGPQRAIVAVGHTLLRIIYVVLKTGQPYQEPIRLTLSTTQRTRKAQRLCREIKNLGFEVILKTNNA

SEQ ID NO: 438509 - protein, 386 aa, unidentified
MAEVDDLSRSLIAFEQNSTLVVVLEMSQQTWLAAGVVPGIDRHPLKKLSPDPEALLQLLERWRALAVQAGRPVTRIVLAFEAGRDGFWLARWLRARGIEPSVIHSSSVAVSREHRRAKTDRLDTEMLVRVFLGWLRGEARHCKMVAIPTLEEEDARRPGRERESLVGEKTRIINRMKSAFARLGIRGFKPELKKAPQRLDALRTPEGVPLPPNTLAEIRRDMARLATVREQIDAIEKARLEALREAPDTEPHAMIRLLANIFGMGIETADLLVREILSRNLRDRRAVARYAGLTGSPNMSGNVKRERGLAKAGNARVRRGLIQLAWCFVRFQKGSALVQWYLAQVEGGKRKVSMITALARKLLIALWRMVTIGELPEGLILRTSAA

SEQ ID NO: 438510 - protein, 411 aa, unidentified
MRLFVGDDWAEDHHDVELMDAAGRVLARRRLPEGVAGIARLHELIGERLGEDAQDAEVVIGIETDRGPWVAALAAAGYTVFAVNPLQASRYRERHGVSGAKSDTGDAHMLTDMVRTDSHQLRAVAGDSADAGAVKVVARTHKTLIWERTRQVQRLRHQLREYYPAAVEAFPDLDAPDALELLAKAPDPARAARLTRAQVSAALKRAHRRDIAVKATAILAALRSAQLGQPPAVTAAYAVTVRSLIAVITVLNEQVKVLEEQVGAHFGRHPDAEIYLSQPGLGPILGARVLGEFGDDPHRYVSGKARKNYAATSPITRASGKKKTVMARFIRNDRLTDALMAQAFTALSASPGARGLYDAERARGTEHNAALRKLANRLVGILHGCLKTRTLYDEATAWPHREKTPQSDIAA

SEQ ID NO: 438511 - protein, 342 aa, unidentified
MKFYCGIDLSARDCQVCVIDEQLKVLVQQKLGNELPKICRLLEPYKANLKIVVESTFNWYWLIDGLQAAGFEVMLAHTLGLYLITGAKVKTDRRDAYSLAKLLLVGAVPTAYIYPVETRPVRDLLRRRMHLVQVRAGEYGSLRRLLLRQGILSSKQQEIKTATEAELEQWFEHPLVRLHASQELRRIELYSQQIAELEKTILALAQTAPSYDRLLKLPGVGQTIALTILYEVGELTRFANPKVFSSYCRVVPGIAQSGSVSGRGRASKQGNHYLKAAFSQAAVHAVRCYPKVRRYYERQLKRHQGRGRQMICYNIIAHKLAQAAFHVLKEQIEYREELLFGP

SEQ ID NO: 438512 - protein, 412 aa, unidentified
MYYVGIDIAKKFNVCFIVDDKDKVVKKSFKFNNDEKGFKNFFNLLSSIDNNISNFAIGMEATGLLFENLYLYLKNKGYNVILLNPYQTSKFREMDTMKKVKNDNIDAIMIASLIKSGRYSKAYVSKEVYASLRALHRHREVLQDELKKHKRRVSSLLAVVFPEMEQVIKDPFNVTGLALLEKYPTAMHYRYASPQRILKLFRNIKGNNFNIEKAQKLLDLAKSSVYSGNAYDERAYVIQSHIRVIRLLNEEIKSIDNQMLKLFNQTPSLSKEEEDEVIDIIDNLRTIPGISDKTLFTIMGECGNLDRFKNINAFIGYLGLYPTLEQSGNNTKYGKLAKRGSKLAKKALYQAAVAAIRHNNEMKKLYCDKTSQGKAKKEALVIVARKLAGIVLSIYKHNMPYNPNRVFNQNGA

SEQ ID NO: 438513 - protein, 341 aa, unidentified
MAVHTHKKKGTRKVSFEARLCGLEPLSSEARLSFPSPIISIDIAKDKQDVFDGKNIFTVLNKNLDNILQKYFKPRTAFLENTGEYTTRVVKALQRAGCENIILIDTVKYFHFRQQYSLDNKTDLIDAKLILSFGLKHGGYSYEERTPFFKKLNDLLKKRNFISYHNMRIKIQLSGLRDVPEHDKPLFAEYLETQESINKSLISNVDKELRKLIKNSPYAFLLTKFYGLILIAKLLNAMQDPARFPNAKNFASYLGFRLKTYQSGKIDKKQRINKRGFGDVRKVLYLSVLGQLSKKKDNPIKTKYYRLKGRGKNHYCCMVACMNHTARYFWTLCNKEIQAET

SEQ ID NO: 438514 - protein, 388 aa, unidentified
MFYVGIDLAKRRHSASVVRDDGKRLVRGFSFPNSAEGFAALLARLAKAGATGGDSKVCLEATGHYGRNLMAFLEGRGYEVFEVNPLLTASWRRATSVRKVKNDAVDAEALALWLLAGNPTARRRSKDESDGLRSLARSRTSLSHMIGDCKRRAVAILDVTFPELHGFFSDDFGVAATAVLLRWQSAEALSHARLDSIRKEVREAGGRLSDARAAELRELARASVGTASAPLAFQLRQLLAQIAFTRAQMAELDAELARMVEGSPVLTIPGVGTVCAAVILGEYGDVSRFADASRMLAFAGCDPSVFESGEFVGSRAHMSKRGSPYLRWALWIAADRARMYDPALRAYYARKRSEGKCHKVAMSAVVRKLVSIIYAVMRDGTAYVCPAT

SEQ ID NO: 438515 - protein, 345 aa, unidentified
MEQQREYVGIDLHRRRSVIVRRSSEGETLSVTKVDNADREAFAAAVVAAGEHPEVVIEATYGWYWATDLLEELGCRVHLAHPLGNDWGQRRVKNDTRDAEDLADLLRLGRLAEAWVAPPAVRELRETVRHRAKLVCLRTNLKLQAYAVLAKEGVHVPMTDLFGVAGNELLDSCRLGDAYRNRLESLRELVAAFDKEVALAEAELHRFLAGDLGYLALQEIPGVGPVFAALFVAEVGDVSRFSSPDKLASWVGLTPRHRESDTTVHRGPITKQGSRLVRWAAVEAAQRQASGSRLRADFERIAANHGNTPGARKVARVAVARKIVTLVYYGLRDGTIRSLARDKAA

SEQ ID NO: 438516 - protein, 368 aa, unidentified
MKNVTTYVGIDAHKKDLFIAMLVGTQATPVTWTVPNEPNAVRRLIRKLERQAPGPVQACYEAGPCGYALQRQMTTTRVACQVIAPALIPRKPGERVKTNARDARKLAELHRAGLLTEVRPPTPEEEAVRDLCRARDDVREDLQRCRHRLGKLLLRRGLHYSGRNWTQSHRRWIESLQWTQAAERVVVDDYLLGIDHLEARRIELDARLAEIAETDPYRERVGWLRCFHGIDTLTAMLLLAELHDFRRFQSPRALMAYLGLVPGEDSTGEKHRRGRITRAGNALVRRLLVETAWHYQHRPRVGVALTRRRTGQPGRVIAIADKAQLRLCRRFRQLMDHHKPAPKVAVAIARELAGFLWAALQPVPVAAD

SEQ ID NO: 438517 - protein, 320 aa, unidentified
MTQEGRVVGIDVAKAKVDACIRSLGASLSKPSTAQGQAEMIAWLRENGVAVAVMEASGGYERSWAEALRAARIAVRIVDPKRVRYFAKSAGRLAKNDPIDAEMIAWFGETFGTTTAPTPNPEQVELDQLVTARRRLVELAIQLCQLSEHRQPRAIAQAQQAIGKTIKTQLAKLETAIDAKIGATDAFVARAAIIRSVPGLGPHFTAGAIAWLPELGHIGNKAAAALVGVAPYDDDSGVRRGQRHINGGRREIRDLLYMATLAAATRHNPVIKAFYQRLRGNGKKAKVALVACMRKLIVILNTMLARGQVWNPPTAVTGVG

SEQ ID NO: 438518 - protein, 347 aa, unidentified
MTHYIGCDVHKKYSVFVAMDDRGKVGQPKRVEHDRDSFRLFLASLPAGSPIAVETTGNWYWVVDEMEHAGHLPALAHAAKSKLMMGQINKTDKLDANGLAMLLRNGTLPSVWIPRRELRDQRELPRMRLVLVQMRTALKNRIHATFAKYAIQFEGESDLFGTRGRQAMSKRLPELPPETRHSVEQELELLDQLAEQIGLAEQRIHEVIAVTPAMKLLMSLPGVGPLLAITIALEVGDIGRFPDNEHLASYSGMVPRVNSSGGKTRCGKTRADVNHYLKRAFVEAANVVVLNQSRWPSHHAVKLYQRVRDNKGHGKAVVALGRHLAESTYWVLKKQELYKEPVSSKQG

SEQ ID NO: 438519 - protein, 416 aa, unidentified
MIGKKGEIHVMQHVVAFDVSMGKSMMVIYNRYRQCEVEKEINHNRPSFEQLHETLQELIGRGGEEPEIVFEATGVYSKPLERFFQDNNYAYCRINPLEANLQTASMRRQKTDKSDAHELAKSHFRVGREQTYQEKGYYQQMRGLTRYYDELDIEITHLYSRLHAILQLSFPELEQLFTKRSSLFLNIVQLYPHPDEVLAHSKTRICSRLKANTQKRLSLKRVEEKGTALLKAAKISYPAISRNDVRCEQVKDYASRIADLKEKKAQLVKQMVELSNERTEYHVLRSFPGIGEITAVRIIGELGDIRRFKNNKQLNAYVGIDIRRYQSGNTHYKDKINKRGNNKLRKILFFMVTSMITLRKKTKNHLVEYYDKLKKQPLRKPHKVASVACMNKFLKVAFHLITHEKLYDYEIASTGS

SEQ ID NO: 438520 - protein, 341 aa, unidentified
MKRDISVVGIDIAKRVFHLVGMDERGKIVMRKRCSRGEVLPLLANLGPVTIGMEACGGAHYWARCLREQGHEVKLMAPQFVKPYVKSNKNDMRDAEAIAEAVTRPSMRFVPLKDVAQQDIQALHRVRERLVTARTALVNEMRGLLAEYGIVLPQGMAKFRQTLLSTLEAEQTKLTSLGQELFHRLFAELGSLEAELASYQEKLEALADTHPVCQRLLTVPGIGPLTATALMAAVSDAQVFKNGRQFAAWLGLVPKQYSTGGQTRLLGISKRGDSYIRKLLIHGARATLRWAKTKADRRSQWIRGLLDRRGWNRTAVAVANKNARIVWALLSRGGVYEGNAS

SEQ ID NO: 438521 - protein, 422 aa, unidentified
MAQFKDKICGADIHKRFLVATILSRDGFRTQERFETNPNELLKFRDWIIQNGCSKVAVESTGSYWYPIYAALEGKVEFVLANAYQIKHIPGKKTDMLDSEWIAELCLNNLIKPSRIFPTNYRNLRSLTRGREALIKARTQLKNRVHKILDSCSIKLSSVVSDIFGKSGRLIVEGLLKGESLDEIISEIPSKRIRNKKDQLIEAVRTSLEPAQIFQIQSLLQVIDGLSKEIDETSKEIRIASTTLNEDLRIAISMPGMGFASASVILSEIGDYKDFSTSDQIASYFGIVPSVYQSADKLNTGAITKHGSPHLRRMLVEVAHAIVRSKTESKLKRFFFRIKTRQGTKIAIVALARKVLCILHHLLVHREEYREDGVLRPKWVNKDCNQTQQEMTLDKMIEVLTKAGYVVERMTQEEAISRSLVK

SEQ ID NO: 438522 - protein, 345 aa, unidentified
MSAEYDGSQVVGLDLHRNRTVMVRMTPSGDVLESVRFANDAQALAEQIGKAGRSPEVVLEATNGWYWAVDVLLGVGASVHLAHPLGVKGFAYRRVKNDYRDAADLADLLRMGRLPEAWIATTQVRERRELVRHRHKLVQMRSSLKTQVHAVLAKRGVTVVDSDLFGVTGRKRLGSMALPDPFGVRVASLLRMIDALDIEIDQFDRLIRAELADDAGYRVIQQLPGVGPTFAAVFVAELGDVSRFAGAPQVCSWAGLTPRHRESDHTVHRGSITKQGSRLVRWAAVEAVQRAAASGPIRSTYERIVERRGGTAKNLAKVAAARKLLTLVYYGLRDGEIRCLAARTA

SEQ ID NO: 438523 - protein, 348 aa, unidentified
MHIVVLGIDLSKNTCSVAGLDASGRVVLRRRLHPDSVVKLAFRLPACLIAMEACCGAHHLGRLLQAYGHVIRLMSPEYVQPYVKAQKNDERDAEAIAEAATRPTMRFVDLKSEDQLDMQTLHRARSRLVGQRTALINQLRAMLLERGIAVAQGRHRLARYLAQALDDGNAEPVPLSLRIRLLIEDMRAQWSELDRRIASFDAEFVAATRSDEAARRLSTIPGIGALNATALVAAVGDARSFARARDLAAWLGLVPRQATTGGRPRLLGITKRGNKYLRTLLIHGARAALPSLATTEGALGNWLRGLSARAHRNTVIVALANKLARIAWAVLRSTAIYSARISDRPTAV

SEQ ID NO: 438524 - protein, 356 aa, unidentified
MIKDSMLLVGLDLGDRWSQLQVLDQEGEVVEESRLPTSESALRRKFSTMGRWRVAMEVGTHSPWVSRLLTELGHEVIVADARKLRLIYRNPRKNDRIDAEYLARLARLDPQLLSPVRHRRPETQADLALIRSRDALVRARTMLINHMRGMAKSFGERLPACSADSFHHKVREAMPQALQPAFEPLLDTIGEMTDRIRAYDRQIEDLCRSRYPQTKELRQVGGVGALTSLAYILSLEDPARFRKSREVGPFLGMVPRQNQSGGADPQLRITKTGDAYLRRLLVGSAQYILGPFGPDCDLRRWGLRLAERGGTNAKKRAVVGVARKLAVLLHRLWLTGEDYQPLRQITTAAQPALTVN

SEQ ID NO: 438525 - protein, 366 aa, unidentified
MPEYILTACDLHDKTLVLKIARGLEPPQQRTFYNDPDGRTALVAELRRRAAQAGGAQVIFAYEASGQGFGLYDQLTQEGFTCYVLAPTRIERSAKHRRAKNDRQDALRLLELLRGHVLAGNPLPAVWIPDRQTRDDRELLRAHLDAGEKLTRLKVQVQSLLKRNQVRHPPEVAKGWTSGHRQWLQQLTQAIESSLGPGGRTVLKSLLAQMEALEHERDELKKAVAKLARTRRYARLAKALEALPGVGLMTAMVYLTEMGDLSRFRNRRQVAAYLGLVPSSNESGQQDDRKGHITRQGPRRLRQVLCQAFWAQQRADPASRATYQRQVRRNPKHKKIAVVAGMRRLGVILWHKGLAADLPPGRKAAG

SEQ ID NO: 438526 - protein, 385 aa, unidentified
MADFEFDHSLEGWKSFAEKTSAWPNLAVAIETSQGAAVDQLLQREYTVYPVHPVAAQSYRQRKAPSGAKTDHLDAWGLADALRVDGHGWKPLQPLDPITQQLRLLCRDEVALIQQRTALVNQLQQALAEYYPAALEAFEDWTDAFTWEFVLAFPTPQALVTAGKRRWEKFLHTHKLWRPETAEKRLKLFSQADQFKASDPIVRAKSQLALTLCKVLVTLAQQLALYRKQIETLFQNHPDHDLFGSLPGAKKYLAPRLLAAVGSDPDRYGDHRVLQCIAGTAPVSYQSGKINKVHVRWSCDKFLRHTMHLWADCFRKASAWGQAYYRKKRADGMSHACALRCLGQRLLKIVFRMISDKKPYNAEFHACNQQEHGSWVLKLVGESVA

SEQ ID NO: 438527 - protein, 340 aa, unidentified
MDEYDGRQFVGMDLHRRRSVIVRMTPEGERIGATVRIENDPGALAELVASWGESPEVVLEATYGWYWAADVLAEAGANVHLAHPLGVKGFAYRRVKNDEFDACDLADLLRMGRLPEAWIAPPQVRGLRELVRHRSKMVALRSGLKAQVHAVLAKQGVRVPMSDLFGVDGTKLLDGLALDPPFHTRVVSLRYLIDAFDGEIDTVTKDLRAQLKKHPGYQAIQAIPGVGPVLAAVFVAEIGDVTRFPTPQKLCSWAGMTPRHRESDTKIHRGRITKQGNHLVRWAAVEAVQKLYGGGIGAARNRLAETRGKNIAKVAAARKLLTLVYYGLRDGHIRCLARPA

SEQ ID NO: 438528 - protein, 354 aa, unidentified
MSPWSSLVVVRSLVQTRTVAWVTPRTSKAGIYKMANFSPVVGIDLSGSWWDAAISSGTSEQGEAARFANSPEGRQACLAWVTAHCHAGAVVACEASGGLERDAVALFHGAGFIARVLDPAQVQHFGRAQGRKAKTDAIDAAMIARYAATFTGRPAVPDPARKALTDMIGARDLLVAQVTASRNQATHFTDRSVRRIVELCIATMLRQIAALDRLITRLIDATPAFAERNRIIRSMPGVGPATASRLLASLPELGTASAKRMACLVGVAPIANDSGNRRGARHISGGRHDVRKVVYMAALVATKHNPALRAFYERLCGAGKPKKLALIAVIRKLIGILNVMLQRNQMWHPTTLEA

SEQ ID NO: 438529 - protein, 358 aa, unidentified
MAEHERAVTGGVDTHKDAHVAAALDALGRVMGTEEFPATPAGYRNLLAWLRGHGELIAVGVEGTGAWGAGLARFLATEGVAVLEVQRPNRQHRRRHGKSDPADAVGAARAVQAEEVSGAPKAATGNVECIRLLQIARRSAMKARTQAANQMHAVVTTAPEQLRSDLADLDTKALAKRASRFRPGDPATPTAAARRTLRILGRRWLALSADIDELDNDLDQLTATTAPTLRSLPSVGPQNASALLIAAGDNPDRLCTEASYAALCGSSPLDASSGRRQRHRLNRGGDRQANAALYMIVVSRLRWHRPTQAYMQRRLTEGKTRKEVMRCLKRYVARQVHRAILIDFGLHEPRHRPTELAA

SEQ ID NO: 438530 - protein, 427 aa, unidentified
MKYTQNEKIMQITENTLIIGVDIASDVHYARAFDYRGIELDKVIKFNNDIQGFKVFSDWITKIATNNHKQHVMVGMEPTGHYWFTFAQYLEENNIKIVLVNPYHVKTTKELDDNSPTKNDRKDPKTIAMLMKDGRYMEPYIPKGIYSELRNATNTRWQLVKKLNSIKNQVKRWIKIYFPEFNNVFADWEGKAALMILKHFPTPEKITKLDAPEIIATWRKEISRAVGIKRATKLIKAAKASVGIKEGLIAAENELHILLEEYELLMKQHQNTMNLIEKLTMQIPGVKEILKIKGVGLKTLSGFIAEVGDIERFDHPKKVQKLAGLNLKENSSGKHKGQTTITKRGRKRLRSILFSTIMPIVAKNKEFQQLHKYYTTRKENPLKKKQSLIVLCCKLIRVFFVILKTGVKYDPVKMMNDIKRPILQEVA

SEQ ID NO: 438531 - protein, 505 aa, unidentified
MSSKRTTRKAKPRQNERRQGEGKRKRQAPQQAMPTLEGNAAGVDVGAREMYVAVPPDRDPEPVRVFPTFTCDLEALADWLMECGITTVAMESTGVYWIPLYQILEDRGIRVCLVNARHMKNVPGRRTDWHECQWLQYLHTVGLLRAAFRPEQQVVAIRSVMRHRKRLVELVGIHVRHIHKALTQMNLQIHHVINDITGVTGTAIIEAILAGQRDATVLARLRQPQIHADEETLRKSLEGDWRREHLFTLRQSWEIYGEYVSAIEACDREICEMLGEHEPRVDPEEKPLPPTSKRQRKRHHMRTGDFRFDVRTEAYKCFGVDVTRIPGLEGIALVLYTELGNDLKRWPSASQFASWTALCPDNDKSGGQVLWAGVRPVNNRTGHLFRQAANSLHHSNNEMGDYLRHMKAKLGAEAGITATAHKLARIFYAVVKNQREYDQTIWGQQDQERQRRIQARIRKQARHLGFQLVPIQPSQEPGEQRLLSDGTSFCGPQLLKLRPPCASTA

SEQ ID NO: 438532 - protein, 477 aa, unidentified
MAAKQEATSQVKPNRKQRRDQQRRIWTADPGLEVVHHDAAGIDVGNSEHYVAIAPEKSAEPVRKFGCFTGDLREVVLFLKAHGVRSVAMQSTGVYWIPLYDVLEEEGFEVYLVNARDTKNLPGRKSDVQESQWLLKLHTHGLLRNSFRPVSEIRVLRTYWRQRGDHVHTASECVQRMQKALTQMNLQLANVISDIMGWTGQKILRAILAGERDAEKLAEMRNWRIHASQEEIVASLTGNWRPELLFTLKQEMERYDFCQRQIAECDHEIKQHLDTLPARHRETDPAVQPVAPPKKNKKVQGNSPQFALDKELQRITGVDFTRIDGINVMTAQTIISEVGLDMSRWKTEAHFASWLGLCPHNAVSGGKVLRRGTRKVVNRAATAFRIAGSTLRRSDSYLGAQFRRFRSKLGAPKAITAMAHKLAVLFYRMLRFGQEYVDRGQHFYEEKYRQQQISLLNRKAAQLGFSVIPATNRPASI

SEQ ID NO: 438533 - protein, 355 aa, unidentified
MLYSGIDLHRDNSMITTINDSGAIINQQKLPNEEISLLNYFFSMGKEHRAVVEATANWYWLSDLLNNHGIELVLAHAKYLKAISYAKVKTDKVDSQTLANLLRIDMIPTAHQIDPKLRSLRDLMRARLKMVHKNGSCQNSIHRLLGKSNLAIPDDKKLHDLSTLGTLTDLALPKEALFQMELLIEQMRLLHRQINDLEKSLHPKLIPNPDIQRLLWIPGIGKILAFTIYLEVDGIERFPDVKHFHSYCRLVPGADNSNRKTKHKSGNKDGNRYLKMAYTEAAVRAIQYFKEVKAFYQSKERKKHKAIAKTLVAQEIARICYHVLATKTDFNNTFKGKSLSRRKSLQWPRLASPNA

SEQ ID NO: 438534 - protein, 368 aa, unidentified
MTDVTTHVGIDAHKKDLFIAMLVGTGATPVTWTVPNEPNAVRRLVRKIEREAPGPVRVCYEAGPCGYALQRQLTTTRVACQVIAPGLIPRKPGDRVKTDRRDARKLAELFRAGLLTEVHPPTPDQEAVRDLCRARDDVREDLQRARHRMGKLLLRRGLHYGGRNWTRPHRAWIDGLAWTHAAERVVVDDYLLAIDHLEARLGELDARLAEIAATDPYREPVGYLRCFRGVDTLTAMLVLAELHDFRRFPSPRALMAYLGLVPGEDSSGEKHRRGRITRTGNTLVRRLLVEAAWHYQHRASIGVGLAHRRKGQPGRVIAIADKAQQRLCRRFRRLAEQHKPAPKIVVAIARELSGFLWAALQPVATAAT

SEQ ID NO: 438535 - protein, 391 aa, unidentified
MIYVGIDVAKDKHDCFITNSDGEVLFKSFTISNNREGFETLFQKIESVSENLTKVKVGLEATGHYSYNLLGFLLDKGLPTYVINPLHTNLYRKSLSLRKTKTDKVDSRTIATMMMSDMNLKPYSDTSYHNEELKSLTRYRFDKVKERAKLKSSVSRLVCILFPELEKLVPTLHMASVYALLSEFPGADAIANAHLTKLSNLLTGSSKGRYGKDTAIIFREAARTSIGSHMPAKSLELKHTIKLIHELDAEIEEIENEIKSIMDEIHSPILTIPGISYRMGAMIIAEIGDFSRFDSPDKILAYAGMSPSTYQSGQLDNCYSHMEKRGSRYLRYALYNATKYVCHWDESFAVYLAKKRSEGKHYNVALSHAAKKLVRTIYAMEKSGQPYQSVS

SEQ ID NO: 438536 - protein, 466 aa, unidentified
MPHARSHRARRVRPARLPPELRHVHLNAAGIDVGAGGHYVAIPPGRDPEGRDVREFGAFTADLYTLAEWLRRCGIETIAMESTGVYWIPLFDLLAERGFEVRLVDPRQLKNVPGRKSDVLDCQWIQQLHTFGLLSAAFRPDDQICALRSYLRQRAMLVTYASHHIQHVQKALEQMNVKLTRVVSDVTGVTGMRIIRAILDGQRDPRALAGLRDRRCQHDEATIARSLEGSWRPEHLFALRQAVELLDFYQQQLAACDREIEAYLGRFDAKHGGETLPTRPRTTKPSRTAPTFDVRTHLYRLTGVDLTRIDGIDAHTALKVVAETGLDMSRWPTEKHFASWLSLAPGTKVSGGKKLSGRTTPSANRAAAALRLAARSLYQSKSALGAFFRRLKARLGTPKAITASAHKLARLIYRMLRFGTEYVDQGQDYYEQRYRARVVSTLTRRAAALGYTLLKTEGLSSAPSEI

SEQ ID NO: 438537 - protein, 389 aa, unidentified
MKIYVGIDIAKLNHFAAAISSDGEIILEPFKFTNDADGFQLLVSKLESFDKNSIIIGLESTAHYGDNLVRYLVAEFYQVCVLNPIKTCQMRKNNIRKTKTDKVDTFVIAKTLMMQDDLRFVSFYDLDMMDLKALGRFRQKTIKQRTRLKIQLTTYVDQVFPEMQYFFKSGLHQHAVYALLKEAPSPKEIASMHMTHLANLLKVNSHGHFTKEQAKELRVLAQKSVGANDSAISIQITQTIQQIELLDSQLEKIEAEMTDIMKFNDSVIMTIPGIGYINGGMILGEIGDIHRFSNPNKLLAFAGLDPSVYQSGNFQAKTTRMSKRGSRVLRYALVNAAWNVVRNNATFKAYYDAKRAEGRSHYNALGHCAGKLVRVIWKMLTDEVEFNLE

SEQ ID NO: 438538 - protein, 379 aa, unidentified
MMQGGNTMQSRIIMSQEKKKGISNLPTKVLKYSVGIDVGKLEFAACISSIDLEQRVKVIATRQFKNTEKGFRLFLEWVKSKIKEETKVVFSMESTGVYYENLAYFLYESACFVSVILPNRSKKYLMSIGLKSKNDKIDAQGLAQMGAEQSLEQWHKPKKTFVELRSLTRQRQSLQENKTVFNNQLEAIMHSKYASPIIVASLNQLIHALDVQIEVMNKEIDKVMREDEEIREKMENICSIKGVSTITLATILSETLGFSQFKNLRQLTSYAGYDVVENQSGNHVGKTRISKKGNSRIRRVLHMPAFVTVTCKEPIFINLWNRVYDRTKMKMKAYVAVQRKMLALIYTLWTNGEIYEPEHLVMQSRSSSFRMASQKPNKK

SEQ ID NO: 438539 - protein, 411 aa, unidentified
MENIYPCCAGLDVHKESVEACVRRMGPNGRLDQQTRHWGTITSDLLAMSYWMAAQGVTHVAMESTGVYWKPIYNILESRFAVLLVNARHLKQVPGRKSDVRDCQWIAQLLQHGLLKPSFIPPQAQRELRDLTRHRTQLAEERTRTVNRLHKVLEDANIKLASVATDILGVSGRAMLGALMAGQESPVKLADLAERQLRGKIPELERALQGHVTEHHRFMLRLLWKQLAEQEELIAELDARIEAQTRPFADEIERLDAVPGVDRRVAEVVLAEVGADMNPFPSHRHLAGWAGLCPGNEESAGKRTRRRIPPGNRWLKRSLVQAAWAASHTKHTYLASQYRRLVGRRGRKRALVAVGHSLLVIFYHVLKRRTTYADLGGDFFDRLEPERLTRYFVRRLEALGHKVTLESAVAA

SEQ ID NO: 438540 - protein, 414 aa, unidentified
MLTERSPAPATRFVALDVHRQYLMVGAVDSQQHVVLFPRRFGFAAFAEWAHVHLTHADAVVLEATSNAWLLYDQLQPLVSEVVVAHPQAVKLIAAARVKTDSRDTIKLASRLSANLIPAVWVPPQEVRELRALVTHRNRLVQQRTQAKNRLHSVLQRHNFDPPPGTPFAVHQREWWLTLDLSLAEKLRVQQDLSLYQTLETLIQEIEAELGRLSTCDPWVKQVPFLVQLPGLGVLSALRILAAIGEITRFPSAKHLVGYAGLGASVHQSGETNRGGRITKEGRSDLRGVLVEAAWVAVEHHPHWKAQFERLAARIGKQKAIVAIARKLLVTIWHVLSQQEADCHAQVEAVTRKLLNWISHTGTIPGKKRDRLLLLYDYLDQLGLSEEVEQVNYYGSTYRLSARQKLLRATHQRG

SEQ ID NO: 438541 - protein, 387 aa, unidentified
MLHDHPSVGPTAIRTQFGAIFVSLELSLSTWLITSLSPGSGEKMSKHVVHGGDIAGLLQRFAQLREKAVAQTGRNFPIIVIHEAGLDGFWIDRVLKNEGIESHVVDPASVATSRRRRRAKTDKIDGEALVRTLLAYKRGEPRVCAMVKAPTPEEEDRRRLCRERKVLITERVKHVNRLKGLLFSQGVCGYEPLRRNRRLRLDELRTGDGRPLPKHLKAQISRELDRLELLLEQIKAVETERDALLAAQQIAAPSSAAMLLAIKGIGPDFAAVLWSEGLFRHFDNRRQIASYAGLAPTPWKSGSIDREQGVSKAGNPRLRTTLIQLAWLWLRHQPQSALTLWFKERVVRNGGRLKKATIVALARKLLVALWKYVTAGVVIEGAIMKAV

SEQ ID NO: 438542 - protein, 347 aa, unidentified
MIIIGCDLHTRFQQIAMLDSETGEVVEKRLEHENGEAKRFYQSLEPPVLVGIESTGYTLWFAEMLSELGHELAVGDAAKIRASETRKQKHDRRDAGHLLELLAEGRFPRLWLPSVEEREVRVLLEHRHQLVQMRTRAKNGLQAIALNHGLRRRQRLWTAAGLKQLEGLPVGEGTERRRGDLLRLLHQLDSWVEELDERLKAEVERRPEAQRLMTHPGVGPLTALATVLILGEVERFSETRQVTSYVGLIPAEASSGGKQRFGHLTKQGSRLLRFLLVEAGQSASRGDAGLSRLYKRLTFRKGKSIAKVAIARKLIIRLYIMLRDKIDYQEFFRRGSHAGMLGELALA

SEQ ID NO: 438543 - protein, 396 aa, unidentified
MTTIGIDIGGRSHAVARCRAGTSRADREILRVSQNRAGFAALDTWLERQPEPVTLVTMESSGHYWMPLASHLRRREIPVAVVNPLAAKYFAKSRLARTKSDPADARSLAEMAMRDTPPARDPLTGIELRQAARFAMTLVEEQAKVCQRLIRLVELGFPELGELFEDPTCRTAREVLRIAPTARAAGRRRTATLANANAGPGHRRLGQTKAERLQVAAAESIAVPELDAEVAFEVGLLLDQYDLLERQIEAADGRVAGLLDGETARRLQTIPGVGPSIVATLLAEIGDITRFSDFDQLLAYAGVHPAERSSGRKGANPETAWHMSKAGNSHLRAAAYRMAVVGVQHNPIIAAYYARKRAAGKSKMNALGHCMRKALSLVWGVWRNGQDFDPNWGIGA

SEQ ID NO: 438544 - protein, 364 aa, unidentified
MKRKVYVGMDVHKETNRIACLTNNTKEIVKEQQIKHNEVQIKKFVNKLKSEWNEIHSCYEAGVTGYPLYRYLKSLGVNCILVAPGKIPRQSSDKIKTDKRDAIKLAKLLRSGDLESIHVPSEEDEAVRDYLRSRDSLRLDLGRNRQRLMKFLLRKGITYSATKYWTVSHNKWLNNLQFNNEILQETFNDYYSRVRVQEENLKAMDKRIQEIAESEPYREKVGILRCFRGVDYLTAMFLLCEVCDFKRFKTAGSFMSFLGLVPGEYSSGSKRKQTGITKTGSPRLRRILTEAAWQHRFPGTGSKIVTARRSGQPALVVALAEKASLRLHKKFRNLQQRGKTPQVMITAVSRELSGFLWAAMNLVA

SEQ ID NO: 438545 - protein, 418 aa, unidentified
MNEDESARGIRRYVALDIHKHYSVIAAVDREGRVVLHAVRVEHADLEGWLKKKLQSGDHVVFESTTNAWHVYDLLEPLVERVVVANPIKVKQIASARVKTDVRDTLILARLLAANLVPDVWVPPAHVREMRQLLSQRRQLVETHTQIVNRMHSVAHRHHLKHERGKRFNEKNTLWQKDKRLSKTEQFQLELEMENRAYTEKQISRISKEVAKMSHRKPWAEGMTYLMQLPGFGVITAMTVLAAIGEIERFGSAKHLASYSGLTGGVEQSGTHLVQKGITKEGRKELRWAMVEVAQRAVKSDPRWTGKFQELHKRMHRNQAIVAVARQLLELVWYVLTRRQPYRHFSEERIAYKYLTWAWQMDEAARDGLTRQQFARYYLMRLGIGHDLTRIALNPKYPRKLASEAELLALQPELKHIE

SEQ ID NO: 438546 - protein, 328 aa, unidentified
MCTLGIDVSKNKIDLCLLTAGPGGKKKHKVLTNEPAVARKVVDWLNAQKCVPESVTVVLEATGIYHENLAYGLHEAGVSVCMANPCRVREFAHGMDILNKNDAVDAFVLACYGELKSPAVWVPPSPEVRKLRALLRQRDALREDVQRTVNRLEKANSTSTPQEVIRSLERTKSWLNEELARIEKLITDHTDNDPGLKADLDLLKSIKGVKDQVGREMLALLKDGTFKSASQVAAYLGLTPVEKTSGSSVRGRPHMSKTGPSGVRAKLYVAALTASRWNKQAKAIYERLVAKGKAKKAALGAVMRKLVHLCFGVLKTRLPWDENYVATA

SEQ ID NO: 438547 - protein, 411 aa, unidentified
MERVYERCCGLDVHKGSVTACVHVPRREGGRGELIESFTTMTADLLALRDWLQGLGVTHVAMEATGVYWKPVWYVLEDDFELLLCNAGHVKNVPGRKTDVSDAQWLCQLLEHGLLRSSFVPPKPIRELRDLTRYRKTLIRERQREANRLHKVLEDAGIKLSCVASDVLGVSGRAMIEALVAGEGDPSVLAELARGRLRAKLPALQRALEGRFSAHHALLCSHILAHLDYLDEAVESLSEEIGRRTRPFARELEQLDTITGVGKRAAESILAELGPDMSRFPSHRHCARWARLSPGNDESAGKRRSGKTGRGNPWLREILIECARAAARSKDTYLKAQYLHLRRRRGDSKAIVAVAHSILVSAYHILNNAEPYHDLGFDHFQRRERPDRIVRRLTRQLEQLGHRVTLEPLPA

SEQ ID NO: 438548 - protein, 337 aa, unidentified
MAVASIAHAHVPVRIIVGVDTHKDSHVGHAKDGLGRDLGHLEVPTTARGYAALLAWAQGFGEVTAFGVEGTSSYGIGLTRYLQGQGQLVLEVIRPGRQDRRFRGKSDPIDAEVAAAAVLSGKARHLPRASAAKVEMIRALRIARTSATKARTQAINAIKALVVMAPEAVREPLRELPTARLVATCARFRVGPIDDSTTAIKAGLRSLATRYQMLDAEAGLLERQIDQLTSATDPLLRSRFGVGPDTAAALLLAAGDNPARLRSDASFSMLCGSSPLPASSGQTKRHLLNRGGDRQAYAALYRIVMTRLRWHGQTKAYMRRRLNEGKSKTEVIRCLKR

SEQ ID NO: 438549 - protein, 428 aa, unidentified
MRDTNFAKLAAIDSSTLLVGVDIAKYLHWARLTDYRGLDLGKALKITNDKQGFANILASIETTCKLKGFKKVIVGMEPTGHYWKPLANYLILKGITVVIVNPYHTKRAKELDDNSPTKNDKKDALTIARLVRDGRYYEVYMPRDIFAELRVLSNSRISLMKRHNALKNTITTVMDEYFPEIVTVFKNPLKGKASLQIIKSCPFPPLILELGVEGVLAEIKKVVKKTVGLKKAQQLVEKAKDSIGVHYGVASAKLRLGFLIEELELLTKQLEQIESAMELALAETGLKEIILGIPGIGVVTAASFLGEIGDPLRFDHPRQISKMAGYNLVEDSSGKNVSGTSISKRGRKNLRNILYLMARTMVAVNPEMKELYQYLKTRSNNPLKKKQALVVVSKKIVTVIYNLVKKQTAYKAELVLGEFRKNQIKQAA

SEQ ID NO: 438550 - protein, 410 aa, unidentified
MLELFVGDDWAEEHHDVELMDPAGRRLGRARLPEGVTGMARLHAMIAAQLGEGVEDAVVKVGIETDRGPWAQALIAAGYEVFAVNPLQAARYRERHSVSGAKSDKADAHTLADMVRTDSHQLRPVAADSPRAEAIKVVARTHKTLIWERTRHTQRLRHALREYFPAALEAFEDLAASDTLELLSKAPDPAAAVRLSISQISAALRRAGRRKIEEKAAVIQTALRAEHLRQPEVVAAAYAASVQSTVAVLKVLVEQVKTLQGQVESHFGRHPVAEIILSQPGLGPILGARVLGEFGDAEDRYVSAKSRKNYAGTSPITRASGKKKLVLARFVHNDRLIDALAAQAFAALSASPGARAYYDRIRARGVGHRAALRQLANRLVGILHGCLKTGTVYDETTAWPADATDSPAAA

SEQ ID NO: 438551 - protein, 326 aa, unidentified
MFFIGIDVSKAKLDCCLLLDVASNKRRAKVVANSKTGIVDLLVWCTKQQVPVHELHAILEGTGVYHEQAALALSDAGATVSIVNPAQVKDFGRSLGVRTKTDGVDGFVLARYGALLKPKSWTPPAQEARTLQALLSRREAIAQDLQRERNRLEKADATDTPSLIRQSIDDSIDFLEKQLTKLQQDIDDHINKHPNLKDDRDLLMSIPAVGPQVGNHLLCVMHNHDFQSAEQLAAYLGLVPVERQSGTSVQGRPRLSKAGPARIRAVLYMAAIVATKHNPHVKALYQRLQERGKTKMSALGAAMRKLVHLCFGVLKTREAYQADYAI

SEQ ID NO: 438552 - protein, 322 aa, unidentified
MICAAIERCAGIDVGKTFLAVCLMTGPLEGEPRVERRRFGTVTAELEKLRNWLQQEGITHVVMESTGSYWKPVFNVLETAVQVYLANPQEVKNRKGHKTDDKDGWWLAHLLRHAMIHPSFIPPRAVRQLRDLTRRRRRMIGNATAEKNRIQKVLEDANVKLGNVLSDVFGVSGQLMLEALLKGKAKPQEIAEFAQRRARQKIPQIIESLNDHRMSAHHRRMIRYSLEHMRFLEEQIGKLDEDIVAEIREAGLVQQWQLVQTVPGMQEASAANVLAETGGDMKQFPSSKHLSSWAGVCPGNNRSADKNSSSRTTGGNPGFAAR

SEQ ID NO: 438553 - protein, 345 aa, unidentified
MKILALDLGKNKSVFVEYITGNGERTFGKISTNPRELRNLLERGTPDRLVIEAGPAAGWVCDLAESMKVPVQVANANDERWRWKTVKEKSDRKDAIKLAHLSEMDCLPTVHVPKASVRQWRSLIEYRHALVRRRTAVKNSIRSIYERRGLNLPSAKRAWTDAVMEELKKEASHYSSQRLWLFQVHCELQQFESIQRQIEAVEEKLEERARADGRVEQLKTAPYVGPRLGETVVAILDDPHRFQNGRQVGCYAGLTPRRWQSGESDRQGHISHAGNGLLRQMLVEIAWLGVRRGTWMTAVYEQVRRGSDKRKKIAIVAVARRLLVKLWAMLRDGTEWKEPLPAAAT

SEQ ID NO: 438554 - protein, 344 aa, unidentified
MVTFGVDAHKRTHTIVVIDDHGKPLGQTTIGTTSKDHLGLVQWAARFGAERRWAVEDCRHLSRRLERDLLGAGEQIVRVPPKLMAHVRDSARTYGKSDPIDALAVARAAQREPDLPAARLDGPERELRLLVDHRESLVAERTRAICRLRWHLHELDPGWEPKARSLDAQRTLDEVQRRLDDQSGLVARLARELTSRCAELTVSIKSLEVEIADLARQLAPTLLAIPGCGTLTAAKILGETAGVERFKSRDAYARHNGTAPLPVWSSNKARHRLSRTGNRQLNAALHRIALTQARWHPPAQAMIERRRSAGNSGREAMRILKRRLSNAVFQALRTDQLEQLSPAA

SEQ ID NO: 438555 - protein, 351 aa, unidentified
MKKVIKQVLGIDVAQKELVVRLGKMVEGLIIELCAGKAFANTAKGFELMVQWVKKLTDETVPVRYVMEATGVYHEPLAYFLANRGLDVSIVMPNKISNYMRTLDIKTVTDKTSAEAIARFGLERSLDNWQKPLPVYKKIRQLTRERDQLIQERTIVKNQLHAEQSEAEPNENSLERINQRIDFLDSQEKEINAEIKATVKTDERTDTLVTLFSSLPGVGVLTAATVLGETNGFNLIRNKKQLASYAGLDVKEKESGTSVKGKPRISKKGNRFLRKTMHLPALAAIRIDNRFKALYIRLVAIHGIKMKAVVAVQRKLLEMMYTIYKTNTKYDREYLQKQEAKRIKNENKEAA

SEQ ID NO: 438556 - protein, 348 aa, unidentified
MNALHYIGFDVHKKTISFCVKTAAGEIVEEGSLVAQRAVLRRWAAARPQPWRGALEATLFSNWIYDTLQPYGGQLEMAHPAKMKAISAGKKKSDTIDARTIADLVRCNLLPACYVATPQIRELRRLLRYRSLVVSEAVRMKNKMAGLLMETGALYVKEKLHRKKYFASLLEELEEVPESVVDLLRLSRGALEMFESTQKRLVRELLAYPELAERVERLMTIPAVGEITALTWALEVGDPQRFHSSSDAMSYCGLTAALKSSAGKQQRGPISKQRNRWLQTTLIEAAKLAPRWNPQLAALHARELERGHRNRATLAVARKLVAYLLAVDKSGQPFRVRAPSEVPTQKAA

SEQ ID NO: 438557 - protein, 420 aa, unidentified
MYNELLAQSYYVKLKIFKLMKVSGLDVHKDSIFCAIYDGKKFGEVQEFSTFTECIRTMGDHLKYEGVKKIAIESTGIYWIPVWNILEKMGFDLMLVNPYLIKQMPGRKSDIKDAQWIAKLLHKGLLRSSLVPDKTIRQLRTYSRSYVRMQSMITRVTQEMERILETSNIRITSLVSCNNSVSIHRVIEKIIAGEDTVEELACCIHGRIIKSKGALVKLSLDGHIEEHHRFSLSLAYERFKLFTMQLNMLEGKMEEICEQNYSKQMELLMSIPGIGKQAAMQIVAETSGDMQAFENSGKLTGWTGLRPRNDESAGKYKSTATTKGNKYLRRIMVQCAWAAARTKGSFYKSKFDQLSIRKSRKKALIAIARKLLTVIWHVLNEREPFNPQFLPVYDPRRMEMKMKYHRREIEKLEKLGYSIA

SEQ ID NO: 438558 - protein, 422 aa, unidentified
MLEETQDTEEIIARVAALDIGKAELVCCVRVPGARGSGKRLQEVTTYKTMTRSLLVLADRLAGLGVTRVVMEATSDYWKAPFYLLEAQGFAVWLVNARDVKHLPGRPKTDRLDAVWLAKVAERGMLRPSFVPPPAIRRLRDLTRYRADLVAVRTAEKQRVEKLLEDAQIKLSVVASDIFGVSGRAMLAALIAGERDPKALAQLARTRLRAKRSQLEEAFTGHFSDHHAFLLQTMLARIDQASADIAELEAKIDQEVAPFAPAVDRLDEITGVGRTAAQVIIAEIGLDMARFPTPGHLASWARFAPGVKQSAGKTKGKATTGHGNRYLARVLGEAAVAAGKTDTFLGERYRRLAKRRGTKKAIVAVGRSILIIVWHLLADPTARFHDLGAGFYNTRINPERAKRNHVRQLEALGYKVTLEPAA

SEQ ID NO: 438559 - protein, 415 aa, unidentified
MALKIVYKICCGIDVHKNFVVACIAKTDKQGVTTYERHHFSTYTKGLKQLLKWLLDRNCKDVCMESTGKYWIPVYNVLEHDCSIVLAHPKYVKAIRGKKTDKKDAKWIADLFKHDLVAGSFMPPADIRQLRDLMRYRFKLTCFKSSEKNRYQNCLTVSNIQLGNVVSDTFGKSSQKIIAKILENPDDTSFDIGSLIHGSMKDKLPELELAIDGYITPEQAAKLKIIKEHFDNLEARKAELEELILALANPYQQEISIILTAPGFKNTFTAIGIISEIGTNMEAFPSAKHLCSWAGLTPTNNESAGKKKSVRVSKAGCYIKPLLVQCANAAIKSKKHPEIRDRYLRIKKRRGHKKAIIAIARMLLTALYHMLKNGENYNPDLYQKSDILPTTREITVEQAILMAQFQGFRIKSATE

SEQ ID NO: 438560 - protein, 324 aa, unidentified
MEKQGSKELYVGIDVSKKTLDIAIRQSDEVWQVNNDPEGIAQLIGQLKMLDPRLIIMEATGGYETNAALELGVAGFAVAIINPRQARDFAKSMGRLAKTDKIDALMLARFGEAIRPEPRELPNEQSVKLQALLVRRRQVIEMLVAEKNRVKMTHPTMKPRVDEHIEWLEKELEDLDYDLGNMLHLSPIWREKEELFRSIPGVGRVLAVTLLAELPELGQLNRKKIAALVGVAPFNCDSGKMHGKRAIWGGRASVRNSLYMATLAATRWNPIIMEYYHHMKELGKPSKVALIACMRKLLCILNAMAHTNQPWSSSLALPKVPVHA

SEQ ID NO: 438561 - protein, 309 aa, unidentified
MKEELVYLGVDIAKAYLDTAMGNEKSRFSNDALGHRQLINWIKQMPAKVQVICEPSGGYERALVRALVGAQLKISLVPANRVRQFARAKGILAKTDRIDAKLLCSFGEAMQPGTINASQLEQQHLRELESQRRHLTHLLVMEQNRAARMSDLCVCKMNRRLITQIKKQIEQLDLLIKGHIDQSHELSAKAAKLTAISGVGARTAALLLAQLPELGELNRREIAALVGVAPFNRDSGRMRGKRAIYGGRKPVRHGLYMAALVAAHHNPILRNFYLRLRAAGKPAKLALTATMRKLLIMLNSALKPDLSYA

SEQ ID NO: 438562 - protein, 340 aa, unidentified
MNITTVGIDLAKNSFSLHVVDERGKACWSKTVSRKKLLVTLANLPPCLVGMEACSGAHYWAREIGKLGHEARIMAPKFVIPYRKGGKNDNNDAAAICEAVARPDMRFVPVKTPEQQAVLALHRVRQGLIEHRTALINQLRGLLTEFGLIIPKGRYQTHEHIPAILEDAENGLPDLAREIIHDVWQRYQVTREQVLAADRKLSALVRESVEASRLMTIPGVGEQVATAMVASVNPAQFDNARQLASWLGLTPRQYTTGGHIRLGRITKRGDKYLRMCLIHGARAVIANLRDKQDRTSCWIRELVARRGYKRAIVALAARNARLIWTLLVKQEDYRVTPAAA

SEQ ID NO: 438563 - protein, 382 aa, unidentified
MVTLTGHDSRILGFQFMHALLANRKYMTTQEKSQCLFIGIDVHKDTHTAVGISPYGEKMFEITVGNYQEDFEKLEEKVKEHSSVLSPYIGLEDVRGYGERLSEFLYQRYPVYHVPSILVDQLRQNATHPEKSDSLDALGVAKVMIQSIDTLLQYTISEESEKAKQLKEISIDREDLVFEQTRLKNQVHTLLYRIYNTEYANKFKDPFSLKALKHWRGTTLKCDPYLLKTMKRKVRRLLDIHTEVAELEKDMQQLLDDNYTIQTASGCGVVLASAIVGEIGDINRFKSPGSLAKYAGCAPREKSSGKKVRHVKTRSGNRRLNCAFHRMALSQISRMGNDKARAYFKRKISEGKSKSQALVCLRRQMVNIVWMMLKHKTVYRNA

SEQ ID NO: 438564 - protein, 412 aa, unidentified
MKPILESCCGLDVHRDQVTACIASGPLDRAKEKLIVKEFSTMTYGLRELSSWLKEHNVKTVAMESTGVFWKPIFNILEDDFEVLLANAARIKNVPGLKTDKKDARWIARLLRYGLVPASFIPPRNIRNLRDLTRTRKKLTEERTRHKNRIHKILQDANIKLSSVATDVFGVSGKAMIMALLEEDEPSPDEIKSMTKGKLRNKIGLLVKAMDGRVTDHHRFLLKMHFEHLESNSSQINELDEEIYRKLEPFEKEFRLIRTHPVISEVTGASVIAEIGVDMTQFPDARHLSSWAAISPGNNESAGKRKSGRTRRGNNYLKTTLVEAAWVASRTKDTFLSARYYNIARRRGSKRAAVAIGHQILKDIYYILSTGEPYKELGAEAARNRKSDARKCSMIQELEGMGYSVQKVEASA

SEQ ID NO: 438565 - protein, 408 aa, unidentified
MERFYLGVDWADQFHQVWVSDFDGKKVVEKKVTQNIDGLAEFGRWLDEQRAKPIELWAANEKPQGRIVDFLLDHGVEVYPVNPKALDRARDRFRMSRSKSDGFDAYVLAQFLRTDHGHLRALKPNSVQAQELKLLTRDQQRLGHQKTRLLNQLTATLKEYYSRPLEVFSDLETQIALDFLKQNPTPDDLSKLTRRQWNRFAKREHHLGAERAQELWEELNQPQLTVPEHVVRAKAHLLRVLLGQLDPLRKAVKSYEERIKSFFGSMPAAELFKGLPGAKTGTIIATLWAELGDAKSRWESFRHLQAEAGVVPVTKTSGKSRVVQFRFSCNKIMRHAAYWLAFVSLNRSEWANHYYRDQRAKGHSHHQSLRALGAKWLKIIFVMWRDHKPYDENYHLANIARQKMRQAA

SEQ ID NO: 438566 - protein, 451 aa, unidentified
MDTVVNNVQIHGMPTPYLPVLDATAAAIDVGSEQLHVSIAGGPPKVFGTTTGELHALRDYFLAQGVKSVAMEATGIYWLCPYEVLEKAGLQVVVVNGKYVKNLPGRKTDMSDCQWQATLHAHGLLRPGFVPPEHIRRLQDYLRLRSDHIVMAGSHEQHMQKALERMNLKIHDVISDLTGVSGLKMVEAIVTGERNPETLLALCDPQIQKKKAGRLRAALEGTWKDEHLFALRQAHELWQFYQKKIAECDQAIEGVLKIVAGPEDPQNPAPLATKRGGVNAPQIAGLHGLLLRLCGGKDPTQLPGIADYVLLQLLGEVGTDLAKNWKTEKHFTAWLGLAPGSRNSGKRRASQRRSRNRAGRLFCVIARSVGRSVDKALGGFYRRIKGRKGGLVANLALARKLAELFWRLMVHGLTYVEKGLRKYEEKVAQTEQHLLQKLARKYNMVLQPQVT

SEQ ID NO: 438567 - protein, 345 aa, unidentified
MKIVGCDLHTRYQQIAMLDTETGELIERRLEHANGEARAFYAGLQGPVRVGIEATGHTRWFERLLAELGHELWIGDAAQIRASMVRKQKTDARDAAHLLQLLLDDRFPRIWRPTMAERDLRQLVWHRQKLVWMRNAVGNQLHALAMGEGVCRKKQLWTKQGRAELQALNLGAWASYRRQELLEMVDQLDGSLEKLDRAVEEQSQQNEAAVLLRTHPGVGPVTSLAFVLTLGPVERFKRSKQVVSYLGLNPREHSSGGKQRLGAISKQGNPMMRSLLVEAGHSAARLDAELHKDYQRLKLRRGSGVAKVAIARKLAVRMYWMLRQQANYAQLVRMQGSPWATLVEK

SEQ ID NO: 438568 - protein, 418 aa, unidentified
MEIVYERVAGIDVGKKIIAVAVRTPGEEPGKRRQQLRKYNTFHQTLTTMVAWLVAEGVTHVSMEATGIYWKPIFHALCAAERPLEVLLVNARHVKNVPGRKSDALDAVWLAELTECGLLRGSFIPPPQIAAIRELTRYRKKLIEQRTSELQRLAKVLEDSGIKIDSVASALTTLSARDMIEALIAGERDPAVLANLARGRMRAKIPDLTLACAGRFGDQHALMCLLHLEHIDHLADMIARLDTRIDEATLPFARQTELLATIPGVGERAAQVVISEIGVDMSRFPTAAHLASWAGLCPGNNESAGKHRSGRTRKGNTELCTVLTECAWAARRTSTYVGAQFRRFHRRFGTKGGKKAATATAHTLIVIIWHVLAEATAYRDLGSDYFTRRIDNPEARKRRLIQQLEALGHKVTIEPAAA

SEQ ID NO: 438569 - protein, 439 aa, unidentified
MNPLKYDFFVGIDLGQWLHMASVVDAKGRFLGERGFPHSNEGLSGTIDWLLEETSQDTERIAVAIEKPHGAVVELFLDNAIAIFSINPKQVDRFRDRHSMSGAKDDRRDAFVLADSLRTDGHRFQRLHLPPPEILAMRGLLSTRDQLVKNHVALSSQIRELLTRCWPHLVSLAPKDKALDAFFCELLQLFFESSPNPLSSHTIETLAQKHRIRRLKPEKILDTLKQKPLRVAPPTTQVTSEHIELLLQQLLLVRQHRRASDQQLEKWFKRLQALTDTDAAILASLPGVGAYVLASVLCYAHDPIRLRNLNAFRSLGGIAPVTKKSGKRGQLRPTILMRRARSLPLNNALHHWARTAVLRDPHFKKHYDRLRDRGHTHARALRGVMDRILPIAMAMLRDTTPYDPSRRSIKTEVPISTNEGFDYKHLYFSALHDFQVASF

SEQ ID NO: 438570 - protein, 303 aa, unidentified
MSQKTSGYSPQALRGGLHGGQRRATGLHQLVTPACPLSPDLIILEASGGYELTAAATLRQAGLPAERVNPRQVQDFARATGLLAKTDRLDALVLACYAEAVRPALRAFPEAEQLELAALMGRHRQLTEMVVMEKNRLETTFSFRVRQSLLNHLRSLEQQLKELEEELNDFLKQQPLFADKAKLLRTTPGVGPGTCFCLLAWLPELGTLTRKQIPALAGLAPFNRESGQWRGKRAVWGGRARVRAFLSMSAVAASRCNPAIRAFSRRLREAGKAPTVALTACMRKFLDILNAMLKNHQPWCGQE

SEQ ID NO: 438571 - protein, 337 aa, unidentified
MEQVQQYVGIDLHRRRSVIVRRTESGETLDTVRIDNDPVTLAAELAKAGEHPEVIVEATYGWYWAADVIQECGGNVHLAHPLGNNWGNRRVKNDERDATDLVDLLRMGRLAEGWVAPPALRELRELIRYRAKLVHLRSNLKAQVHAVLAKEGVAVPMTDLFGVGGQRLLDEVKLGRAYRIRVESLRDLIELCDREIAILEKETAPFFAGDLGYHAVQAIPGVGPVLAAVFVAEIGDVSRFTSARHLTSWAGLTPTHHESDKKVRRGHITKQGSRLVRWAAVEAVSRQRGDTPIRAHHQQVGERRGAQIGRVAAARKLLILVYYGLRDGEIRCLAKAG

SEQ ID NO: 438572 - protein, 462 aa, unidentified
MSNRKTLASKKKQSGRKNVDWKVLDIMHPDAAGIDVGGNEHWVAVSPDRDAEPVRRCGCFTADLREMARWLTEKGVRSVAMQSTGVYWMPVLEVLEQHGLEVYLVNARHTKNLPGRKSDIQECQWLLKLHTFGLLNNSFQPTDEIRIARALWRQRGNLVADASSAIQRIQKALIEMNIQLTSVLTDISGVSGMTILDAVLEGERDPWQLAALAQPGVKAIPADIAKSLEGNWREELLFVLRQEVELYRVYQEKIAACDQQLRQHLEKLGSKVDLEAQPIGLRPKGKRESKHAPEFDLRTELYRITGIDWAQINGMDVLTAQTVIAEAGADLSAFPSEKQFASWLGLCPTNEQSGGKILNRRTRKVVNRATVAFRNAANSLLRSQSYLGAQYRRLRTRLGAPRAITAMARKLACLFYRLIKHGKQYVDKGTEYYEAKYREQQIRSLTRRAQKLGLQLVTPKAA

SEQ ID NO: 438573 - protein, 369 aa, unidentified
MKEVTTIGLDLAKAVFQVHGVDAVGAVTLRRTVRRRQVLAFFAKLPPCLVGMEACATAHYWAREISKLGHDVRLIPPAYAKAYVRRNKNDPADAEAICEAVSRPSMRFVAIKTEGQQAAAGIHKVREMLIKQRTMLINTLRGLMAEFGIVVAEGSQHVGELVAILADPANRRIPTPLHEGLLAIVETLRGLERRIEIVEKQIVGWGRGNATCRHLITIPGYGPILSSAMAAFAVDPAAFASGRHFSASLGLVPRQDGTGGKVKLGPISKRGNGYLRRLLVSGAMAVLCSKQAKADPWLVKLLETKERKVAACALANKMARIGWAAMTRQEDFRSRRHDQPCPDLGQLGTVLTAVKTASRAPSAVAFGQS

SEQ ID NO: 438574 - protein, 326 aa, unidentified
MSQTPPASLGIDVAKAKVDAAVLHEGTLAQRTFAMDHTGFAALGGGIREQGRAHVHACLEATGEDGAALARALYEAGHLVSILNPTRIAAYAKSRLARTKTDKTDAALIAYFCAREQPPIWTPPSAEVHELQALVRRVEMLQEMVQQEENRRQSGGSSSAVRASIEAPLAFLRQELATTPRLVQQQVEQSAELRSHQQLLCSIPGVGAWTAARGLAEIEVLRATVDARQLAAYAGLTPRERTSGSSVHRAPRLAKTGTSRLRRALYLPAIVAMRHHPAVHALAERLRARGKRPMVIVGAAMRKLLHLIYGVLKSGTPFDPAVAMAA

SEQ ID NO: 438575 - protein, 370 aa, unidentified
MHQPTTLSVGLDVHKDSISVAYALDGSPEPAQFLGPIGTRQCDLDKMIRRLHSKASHLVFAYEAGPCGYVLYRYLTAKGFDCQVVAPSLIPKRPGDRVKNDRRDAVELARLLRSGDLTPVYVPAVEDEAIRDLCRARDATRITLRSAKLRLKSFLLRLGLHYTGRANWSAAHRRYLAKVVCPTPTQQIVFQESILAVDEQVERLNRIEQELLDLAPSWRLYPVVEALQAMRGVQWVVAITVVAELGDLTRFDNPRQLAAFVGLIPSEHSSGAKRRLGAITKTGNSRARRVLIEGAWAYRYPAKVSAHIQARIEGLPKAVQDIGWKAQVRLCKRFRRLSSRGKHSNVVVTAIAREMLAFMWAIAREVPIKV

SEQ ID NO: 438576 - protein, 440 aa, unidentified
MSCTDFAHPVATATRPEDSTVFVALELSRKSWLVATSSPGEERISKRVVTAGDGPGLLALLGKLRETAERRLGRAVRVVVIQEAGLDGFWVHRLLVDNAIESHVVDAASLAVDRRKRRRKTDVIDAEGLLRALMAWARGERRVCSMVRPPSPEEEDRRRLCREREALVTERIRHTNRIKGLLAGQGILDFDPLRPKHRERLDELKTGDGRPLPPCLLAEIRRQLGRLDAVVRDLATVEAERNGLVGLRAMDRPAQSPEEGAEPGGVAEAVTAPVAHGTGPAVAPEEVASSAASEAAPANAASRTAPAEPAALLMKLKGIGPEFAAVLWLEALFRSFGNRRQIAAYAGLAPVPWQSGGIDRDQGIAKAGNPRLRKTMIQVAWLWIRHQPGSAISQWFAERVGTARGRVRRIAIVAVARKLLVALWRYVTQGVIPEGAVLKA

SEQ ID NO: 438577 - protein, 321 aa, unidentified
MKKSKNYVGIDISKLSFDVAIIDNKDTYKHYKFSNDHKGFESFIAVLKNKTDVCVMEASGPYYLQLATYLNQKSIGVCVINPLVIRRFCQMRMSRAKTDKKDAIMIAEYGKVENPCLWVPESNYVLELKQMQAYLEQLNKNRTGFIRQREAFSHNSNESLKVKESLNSMIKTIEQEIKGIEKNMESIIKTYHDTMFNQLQSIPGLGRKTSLFLIVLSGAFTKFENPKQLASYIGISPRIFESGTSVKGRSKICKMGMSKIRAMLYVCAWSAKKCNKSCKELYDRLVEKGKSKKLALIAVVNKMLKQAFAIATKKEFYLEIH

SEQ ID NO: 438578 - protein, 377 aa, unidentified
MSKSIVEARRFVGLDVHADTIAVAVAEKDGEVRSLGTIPNRMSSVRKLLGKLGDPRAWRACYEAGPTGYTLYWQLTGLGVECMIVAPTLIPMKAGDRVKTDRRDAERLARNFRAGELTPVWVPDAAHEALRDLVRAREAAKADQLRARHRLSKFLLRHGRRPSERMRAWTDRHLDWIRREVKFEQFAQQATLEDYLAEVDHLGQRIVRLEKAIEEALEGAPPTMKAVVSALQALRGVAKMSAITIVAEVGQLSRFAKARQLMGYSGAVASEDSSGNHTRRGGITKTGNAHLRRVLVEAAWCQRYTPTLTRALRARQEGLPAAVVEIAAKARHRLSARYRRLLARGKPKQQVVTAIARELLGFVWAIGVEVERTAEAA

SEQ ID NO: 438579 - protein, 347 aa, unidentified
MQIQSIGIDLGKTTFHLVALGSRGQVVVRKKFSRQQLLLYTANLPSSLIGMEACVGSHFLGRTLREQGHEVRLIPAQFVRPFVKSNKNDYRDAEAIAEAVERENMRFVAIKTEDQLDVQALHRVRERLVSRRTSVINQIRAFLLERGISFRKGPASLRRQMPEILENADEKLTTRMRRLLDFLWQEWKHLQLQIESLSEDLELIANSDEACARLQQIPGVGPLVATAVVSAIGNGAAFHKGREFAAWLGLIPGQWSTGGKTKLLGISKRGNPYLRKMFIHGARAVVLRAKREGSYLGQWMKGLEGRAARNVVIVATANKLARISWAVLSSGENYHPMPVLAVASQTK

SEQ ID NO: 438580 - protein, 425 aa, unidentified
MHDKHYNKQMVKRSRIGNRTLVVGMDIGSEFNAACFMDKEGNVLGRYPKIYNSRKGFDYFHTMVEQAKRKHKLTRVFIGMEPTGHYWRKIAFFAKEQGYEVRFVRTTAVRHQRELDESSPAKSDIKDAFTIGNITREGKYIDTIIEDGVFRNLRTLAHVRERTQRSSIGSTHVLQAVLDDYFPELRKIFWSTKAKGLMALLAHYPFPEDVCNAGLAVITALLEPTNKRRRQAREKAKQIYQAATESVGLKTIGDADRVRLAICLEEVKRSDARIKDLERAIKELLKQIPLAVYILSLPGIGPISCGIFLGELGNPDYFKHPRQIIKYAGYDPKEDDSGSRVGRKIISKKGRWLLRKVLFFMALGVVQHSSFFRGYYEHKKKGLHYPLKKKEALCAVILKLIRVIFALMRDRRTFTEEINRCREAA

SEQ ID NO: 438581 - protein, 429 aa, unidentified
MNCTQNKKIEQVKETTMIVGIDVGSEKHYFRAFNWRGIELTRKPVAFSNSMEGFNSFYNTIVELMQKSELEEALVGIEPTGHYWFDLGQFMGEKNIKFVMVNPHHVHKTKELDDNSPSKNDRKDPRVIAGLVRDGRYFYSYMPTGAYAELRNASNRRFVLVEEQTRAKNRLQKWIAVYFPEYKGIYTHIDAKGGMLVLKKAPTPEEIVRLGVEGIIKIWKDAKLRGNGHKKAMLILAAAMRSIGLKAGLTEARMEIQDLIEDYELQTKRLERVNDLIKGLCQQVRYADKLLEIKGIGITTIAGFIAEVGDITRFDSTKELQKLAGLELVADSSGKHNGKTKISKRGRKRLRYLLFEAAISVVGKNEEFKEIHRYYTTREKNPLKKMQSLIVVACKLIRVFHAILTKGIRYDASKMLKDIRHPGEQLKAA

SEQ ID NO: 438582 - protein, 345 aa, unidentified
MELHAIGIDLGKTVFHLVGLNLRGEVLVRKKVSRKQLLQFTANLHVDLIGMEACGGAHFLGRALREQGHEVRLMPAQYVKPYVKTNKNDYIDAEAIAEAVARPTMRFVPIKTDDQLDMQSLHRVRERWVMRRTAIVNQIRGLLFERGITLRKGRRHVDGALPDILEDADSKLSVALRVLLAQLKLELDQMAIRIDEADAVLNKTAHENEACQRLVAIPGIGPITATALIAAIGNGAAFRKGREFAAWMGVVPREHSTGGKQKLLGISKHGNSYLRRLFIQGARAVLQHRTKQAPGLSEWLAKLASRTHHNVVAVALANKLARIAWAVLAKEERYQPLALISLVTD

SEQ ID NO: 438583 - protein, 391 aa, unidentified
MSHVLSEHAQKKKGKSLTFGYNFVDDKTLTERRLAMNNSNKLDFTGQPIYLGLDIHKKSWSVSIFTRQGEYKTFSQPPQVETLVHYLGHHFPGALYYAVYEAGYCGFWIHDQLVKQGVHCTVVNPADVPTKNKEQRRKGDGVDCRKLGRGLRNGELEGIYVPPRGRLEDRSLIRTRLSMGRKQTRCKNQIKSMLLFYGVEIPEEKEMGHWSRRFIQWIEGIRMERASGDMALQIHLEELSHLRQILAKLNRAILALSRTEEHRSWVHLLRTIPGISTLTAMILLMELGEITRFRSIDQLCSYVGLVPDTQGSGDKEHVEGVTQRRHSHLRWLLIEASWTAVRKDPALMEAFDQYCKRMKKSQAIIKVARKLLNRVRYVLKNQAEYVPCVIE

SEQ ID NO: 438584 - protein, 339 aa, unidentified
MKAIATIGLDIAKQVFQVHGADKSGRQVLRRKLRRGEVARFFSEVSPCLIGIEASGSAHYWARVLGGQGHTVRLMAPQFVKPYVKSQKNDANDAEAICEAVTRPNMRFVPQKSIEQQDLQCLHRVRSRLVSCRTQLINQVRGLLAEYGIVLPQHPGQVRSGLPAVLEDAENQLTGFGRELFRNLYEELAQLDEKIATADNRIQIAFQNHPDCRRIAAVEGVGPLIATAIVAAISNGQAFENGRQFSAWLGLVPRQNSSGGKSRLLGITKRGDPYLRTLLIHGARSVVYRAKAKSDKRSLWIMDKQQRLGTTKACVAVANKNARIIWSLVAREQEYRRAA

SEQ ID NO: 438585 - protein, 405 aa, unidentified
MEVIYERCCGLDIHKVSITACVIVGNQKEIRTFGTMTDDLLQMTAFLKGCGVQMTAMESTGSFWKPIFNIMEMEGIPAILVNAAHIKTVPGRKTDVKDAEWIADCLKHGLLKSSFVKPRDQRELCELIRYRGSLIEERAREYNRMGKVLEGANIKLTSVASKMDTVSGMNMIRSLVDGIVDPEVLASMAKGRMRSKTGDLKRALDGLIAPHQQMMLKGMLSHIEEMSRLVAELDAEIEKRMSQDMELVEELDEITGVGKISAQVILAEIGTDMSRFPSADHLASWACMCPGNNESAGKKKSGKTRKANSTLKKTLVQCGRSAANSKDTYLSALYHRIAARRGAKRAVVAVGHSILVTIYHMIKNRTSYRDLGADFFQNRNKEALVKQNIKRLQALGYNVVLEKIA

SEQ ID NO: 438586 - protein, 358 aa, unidentified
MQKYNISFKGQKIFIGIDVHKKNWDVAITLEIGIIKRHTQKPSAKELFDFLKKHYPDGDYLAVYESGFSGFSTYYALKEVGIDCIVIHAADVPTTQYEEVMKSDRLDSIKLVKSLKAGLLKGIYIREKENIDDRAVIRIRKTIQKELSRYKIRVRHILHSNGVQLPDRFEKPGSLWSRAFIKWLKEDVILLSSTRNSLDLLIRQVETIRKTLLEATNMMRYMSQTERYKHKFDLLTTVPGIGVTVAMCILTEVYDIRRFHNEKQFAAYLGLIPTCHSSGEKMIHGEMTFRGNKQMGPMLIEAAWTTISRDAGLGSLYLRYKERMKPQEAIVRIARKLSNVIFAILKNEAEYIPYQTGK

SEQ ID NO: 438587 - protein, 353 aa, unidentified
MTSAGRDVFGGVDTHGRTHHAAAVDGAGRLLGDAEFTATAIGYQQLRAWLTGFGRLVKVGVEGTGTYGAGLARFLAEQGVEVVEVDRPDRKTRRRQGKSDPIDAIAAARAVLSGTATGTPKTRTGPVEAIRALRVARRGAVKARTAALNQLHGLLASAPEPLRADLAALSTGELVDRCAGFRVDHTRLLEPTAATKAALRAIARRVQLLQEEIALADARLRPATATVAPRTAAIFGAGPEVAGQLLVTAGDNPERLRSEAALAHLAGISPLPASSGRTDRHRLNRGGDRAANSAIHRIVLCRMRYHERTRAYVERRTAQGLSKKEIMRCLKRYVVREVHAALLADFDNLTSTA

SEQ ID NO: 438588 - protein, 312 aa, unidentified
MSHSSTFVAGIDTGKAALDLAVTPGEGWLRVNNDAAGWQAAAEWLLKAGVDRVGIEASGGYERGVVAALREAGFKVILHQPLQVRLFARMRLQRAKNDRLDARVIAAFTVLFGMDRAAADPTLAGLHEHLVFIDQLVQDIARLKTRLEHLHDTRLASLVAADIAALKARLRDERRRLERAVRADKALGRRLDLLLSVPGIGIPTALALLIAMPELGSISREQAAALIGLAPFDHDSGKHHGRRHIAGGRARPRQALYAAALPAAYRWNRQLMALYARLTAAGKPHKLALVACARKLVIFANTVLQRGQPWTP

SEQ ID NO: 438589 - protein, 318 aa, unidentified
MDVVGIDVSKADFHACLIQGSNRSKKSFPNAPVGYRQMQTWLKNRGCRELHACMEATGAYWEGLAKALHDAGMMVSVVNPSQTAFFARSQLRRTKTDVVDAAMIAEFCQQRRPSGWTPPPEEILELRGLLSYREHIVQEMVRIEQMVTGIHVSSELRKAHRHQLAALKKTRAAVEKQLRGVVKTHEHITRQVKALTAVSGIGLLTASSIVARLPVERLRDGKAAVAYVGLAPSERQSGSSVHGKPRICKTGNAELRRNLYMPAMSAIRHNPILQAFAERLRQRGKAGKVIVVAVMRKLLVLAFTLLRRTLASSPALAV

SEQ ID NO: 438590 - protein, 403 aa, unidentified
MSFFAPEVARPTLVFRGLLGRAEPILITGGRAVADYREAFVGIDVAKLKNAIAVAESGRDGEVRYFGEVEATDANMRRIIQRITAKFDRVHFCYEAGPTGYGLHRLIRSLGHECMVVAPSLIPRKLGDRVKTNRRDALALARLLRAGELTAVWVPDEGHEAMRDLVRARAAAVETLRVHRQQISAFMLKHSRIYPRKKGWTMRYLRWLQEQQFDHPAHQIALQEMVEAVRVSKERVERLEKVIEEFLPDWSLGPVVRALQTLRDVDLIVAVTFATEVGDVTRFESPRQLMGYLGLVPGERSTGETVRRGSITKAGNGRVRHMLVESAWTYRHPPKVGAKKLYRLEEAPPKVREIAWKAQSRLTARYRMLAGRGKRTTVVCTAIARELTGFMWAVAREAQAIKS

SEQ ID NO: 438591 - protein, 428 aa, unidentified
MKLENTIRREQFSQIKSEIRGSDDYLVVGIDVAKDKHHAFMGSATGKSLLRKLVFENNLEGFRKLQERSEAIGTQNALSKVVFGMEPTANYHKPLGAYLIENGHHLVMVTGKAVKNNRELLDGRWDKNDNKDPANVADLICQGKCLYYDYPLASINQLRQLLSLRRRLKKEEHSLRMRIRNNLLAQYFPELDGFYKACETESLAIVRWFLDPAMIACMPFDEFFSLVTRTKRGIAQKQRLEKIHRLAAESVGCPTGPAVEFEADLLVGKLEQVRQQLTKTADLMEDFCMEFSEYSYLLTIPGFGPYIAARVLASISNPWRFDRSNQVIKMAGYDLGAKRSGKKSNAAVPVISKRGNGELRYALYQAAHVASTRNPYFIRYFTQMLRGRQRERGIKTKMKVKLAAKMLKIAWTLMKKNQGFDPDYLITA

SEQ ID NO: 438592 - protein, 354 aa, unidentified
MIIIGADYHPGFQQIAFVDTDTGELQERRLEHREDAEKFYRDLAAQELKVRVGMEASGHARWFERLLGELQFELWIGDAAEIRTKRVRKQKTDRQDAQLILRLLLEDRFPQVWVPNWENRDLRQLLWHRHRMVQARTRIMNQLQAVALNEGLRCKKRLWRDAGRGQLESFRLAPWASRRRHDLLELLDRLTPTIAELTQAIEQEAEKCPAAQRLQTHPGVGALTALAFVLIIGRADRFECGKQIASYLGLVPSEESSGQRRRLGHITKQGNSLLRFLLVEAAQVTVRSDQEWRSRYFHLVARRGRKIAKVAMARRLAVRLYWMWRKGWKYERLKKFGSHAGVPGNPDGVQSNTE

SEQ ID NO: 438593 - protein, 340 aa, unidentified
MKITTIGIDLAKSVFQVHGADARGKVVVKKALKRAQVLPYFANLPPCLIGMEACGSAHYWARKLEALGHTVKLMAPQFVKPYVKTNKNDTADAEAICEAVTRPTMRFVPIKSGEQQAVLALHRARQGFVKARTAQANQIRGLLAEYGIVIPQGISHIATHLPDILEDGENGLPGVFRQLIDRLGAHLKELDRQARELEVQIQVWHRANDASRKLAEIPGIGPITASALVASIGDAKSFDNGRQLAAWLGLVPRQNSSGGKQTLLGISKRGDTYLRTLLIHGARAVVRVAERKFNHAGSWLAGVMGRRHKNVAAVALANKNARIIWALLAHDRKYTADYAS

SEQ ID NO: 438594 - protein, 344 aa, unidentified
MFTFGVDAHKRTHTIVAVDEHGKAVGQTTVGTTSQDHLGLLRWAARFGVERRWAVEDCRHLSRRLERDLLAAGELIVRVPPKLMAHTRDSARTYGKSDPIDALAVARAAQREPDLPTARLDGPDRELRLLVDHRESLVGERTRLICRLRWHLHELDPAWEPKARSLDAKRTLDQVDAHLQDLPGVVARLARELTSRCAELTITINALEREISQITEQLAPALLAMPGCGALTAAKIIGETAGVDRFKSRDAYARYNGTAPLPVWSSNKTRHRLSRTGNRQLNAALHRIALTQARWHPPARAMIERRRAGGNSGREAMRILKRRLSDAVFQALRADQIEVLLAAA

SEQ ID NO: 438595 - protein, 420 aa, unidentified
MTSPDVIPANAVLVAIDIAKVRNEVLIEAPGHKRRRRLPVLNTRAEHDRLIEILQTYDRSVVCGFEATGNYHRPIAWRLAEAGFEVRLVSSLALARTREALHNSWDKNDPKDAQVILHMLRIQATQRYHDPLRAGINDVQELSKTHEAIARTKTEIQHRILTHYLPLYFPEIDRFRGNSRSDWFFAFLDAFPTPASITALTKEEFVKAAWDVVGRKVSKSQILMDIYETARTSIGLPLPLDAPTIRMFRMVIAEARSLIRQRNEIEDQADELLRCSQDYQLLRQIPGIGPINALTIIAEAGDIRRFHHHRQFLKFCGLDLSTQQSGQYRGQTRLSKFGNARLRRTLWIAGQVAIRQRENGFRHKFERYIARDRDNPDLRRKAMTAITAKMARVVHAVVKSGSVYRPFVEGRVPGGRTSVS

SEQ ID NO: 438596 - protein, 334 aa, unidentified
MAAVIDQTGRLLGTQAFPASTRGYVALVTWAEGFGPVERVGVEGTGTFGAGLTRFVRAYGLAVVEVARPDRSTRRRQGKSDPIDAQAAARATLARGGDRHPQDRAGQVEMIRLLRVARRGAMKARVAAAEQLYGVLCSAPEELRQPLLGLKTKALVGACAAMRPGPLTSTTAATKTTLRSLARRWQQLQAELDQLDLQLQALVTSAAPTLVALPGVGVETAGQLLVTAGDNPQRLRSEAAFAHLCGTAPIPASSGRTDRYRLNRGGDRRANNALWRIALVRMHCHPPTRAYVERRTKQGLSKLDILRCLKRYIAREVYHHLTNPPALAPAACPK

SEQ ID NO: 438597 - protein, 414 aa, unidentified
MASMPSQLDPVSRVVIGGVDTHKDLHVAAVVDTEAVVLATESFSTTRAGYRAMVRWMRTFGDIRRIGVEGTGSYGAGITRHLTEAGIEVLEVDRPDRSDRRRRGKSDTLDAQAAALAALTGRRTSIPKRKDGLVESLRVLRLTRATAIRSRTKALQLLRMHVVSAPEELRDQVRNLTRMQLLRTCAAWRPDTIGFRDPVIATRIALKSLARRILELNDEIANLDELINPLVAELAPQLLARPCIGVEIAGQILVTLGDNPTRIRTEAAFAMLCGVAPLPASSGKTQRHRLNRGGDRQANRALHMAAISRMRTDQRTKAYVARKTAQGHSNLEIIRCIKRYLAARSTTSSASPQLSPSPLTHREASRRCTAQYTSWAFTQRAKESGLLPSMGTIGDAYDCETPGRRRAGLTVAYD

SEQ ID NO: 438598 - protein, 455 aa, unidentified
MKQKVTQSFNIIHPDAAGIDVSSKDYYIAVPADRDEIPVRQFGSFTQDLEAIVDWLFKCGITSIAMESTGVYWVQLFMVLQDHGFEVFLVNAKQIKNVSGKKTDVLDCQWIQQLQTFGLLSNSFQPDNITKELRTYVRQRKSLTEAASKEVLRMQKSMTLMNIKLDKVISDIMGKSGQLILKAILQGERDAKVLVSLADSRLKASKEDLIKSLEADWRNEHLFTLRQSFELHEFHQSKIKECDIEIERLLNSYPRTEIAEQKTESKNPYKKKQKQKSDFSFDPQHQLKGIYGIDVTKIPGLSTVTTVTILAETGNNLKNSFPTQKRFVSWLNLSPNNKITGGKVISSKVKKKKNKAGQSFRMAANALQASHCPIGDYFRKVKSREGHGRAIIATANKLAGLFYKLVTEQKEFNYDEYLKSRSNTLIKQLTRLNKRGIEIQNQILKTTGNLNFATT

SEQ ID NO: 438599 - protein, 405 aa, unidentified
MSVVAAPVSSSTVVVAVDVGKNCVAVSVTDAGRHRLFGPVEFAMTRPALERVVARIGAVLPVDGVVKVGVEAAGHYHLPMTAGSAWPTGWEVLELNPAHVGEQRRVAGRRRVKTDAIDLEAITELVLAGRGIPVTAREEVLSELTAWVAHRSRRVGTRTATKNQLLGQLDRSFPGLTLALPDVLGTKVGRLVAAEFADPARLAGLGVTRFIRFAAHRELRVSRRVAERLVTAARDALPTRDAVIARRVLAADLELLADLDQQITQAEQELAELVPASPFRTLTSVPGWGVVRAASYGAAVGDPTRWPGPSQLYRAAGLSPMQYESAGRRRDGGMSREGSVELRRALIDLGIGLWHSDHPARAYAAGLKARGKHGGIIACALAHRANRIAFALTRDRASYDPTRWA

SEQ ID NO: 438600 - protein, 290 aa, unidentified
MDTIGIDLHTRESQLCRDHDDGTVAERRIATTRERFTAVLGARPRARMLLEASTESEWVARHLESLGHEVIVADPHLAPMDATRSRRTKADRRDARTLREACRLRADRPADRLSDARRHIRAELAVREALVRTRTRYIALAKALVRRDGPRVPARESHLIAQRIVALELSESLPAELLPAHHRAAFLGVVPGEYSSGEKRRIGRITKGGNARARYLLVEAGWRILRSKDSDTEALRAWALTIAARRGTRIAVVALARRLAGMLYAMWHAMWRDQRPYDATRRRLPRSRAA

SEQ ID NO: 438601 - protein, 414 aa, unidentified
MRAVGLDVHRDFCEVALVEDGELRSAGRIETKPEALELFAQSLGPHDHVALEVTGNAWEIARIIEPHVARVIVVSPSDTGIRQARAKTDRLDARALAKLLAAGSLDAVWCPDERIRAMRRRLARRAQLVRARTRAKNEIHAVLVRRLKGKPPMSDLFGVKGRVWLSELELPLEERETVDAALRQVEFLDVEIAAVEALIAAEALSWPEVKRLMTVPGVNVIVAATFMAAVGDVRRFPDRRKLTGYLGLDPRVRQSGAGPASHGRISKQGSSSARHALVEASWSTVRQPGPIAGFYSRIKARRGHQVAIVASARKLACLFWCLLTRGEDYAFAQPSLTKKKLRRLELQAGAPRYRGGRSVWSTNDAMRSAERELALQAQRAYERTVADWQQKKGAGATKGRASSGSSKDQVARQT

SEQ ID NO: 438602 - protein, 396 aa, unidentified
MFGLEYLPVRPPFEHAASPAFSWATHWRLGVPRGIKERPVRPTSPWFERSAGRANGKLHSSLFFLFSSCESFVLAIFHTTDMYTIGIDVSKKELVAARTTKRGIVEERWTIPNDPAAIALWLDALPHALLGAEATAEYHNELARQCIARGVPFKLLNPIVTKQFTRATVRRRKTDRSDAEVIARCLLNGEGYLLSAESLSPVRRILRTAEKIRRMDCTLRRMEGQMRSFVKEADTGPLLRCARSVRKAAQALQKQGLAMADETQTKLLSSIPGIGKTLSATIASEIGDCGRFGSGKALVAFAGLDPRVKQSGSTLSRNTRLTKRGSPYLRRAFFLAAMIGERSDPELRAYYEKKRAEGKRFTEATVANARHVAHRVYAVLKRGTPYVKKELSTVEA

SEQ ID NO: 438603 - protein, 337 aa, unidentified
MDITTVGLDLAKNVFHLVGVNAGGQERMKKRLSRSQVLKVFGNLPRCLIGMEACGSAHYFARELSRLGHEVKLIPAQYVKAYLRGQKNDYNDARAIAEAVRAPQMRFVGVKSVEQQDVQSLVRVREGTLAARTALVNRLRGLLGEYGIVVPKSVSALRRALPEVVEDGGNGLSEGFRRLLSQGQSQLRELDAHIESLTAELTAQAQRDERVKRLQTAPGTGPIVASVFAGVVGDGRQYRRGRDAAAAIGLVPRQHSSGGKNVLLGISKRGDRYLRSLLIHGARAVVIAAKNKEDRLSRWINRLRETRGVNKATVALANKLARIGWAILRNGTCYQPA

SEQ ID NO: 438604 - protein, 310 aa, unidentified
MAVYPTGEIRSFGNDDASIAKATTWLKQVNPAIIVMEATGGMEVSLYVALQEANLPLAIINPRQIRDFAKSMGILAKTDKVDAKVLARYAATIQPEARPLPDEEARQLNTLVRRRCQLVEMIIAESNRTTITRDKTMKQRINAHIDWLKQELAGIDKDISQMMKENPVWHAKDKLLQSVPGVGPVLSATFIAELSELGILNRKKIAALVGVAPFNRDSGKHRGERSIWGGRCRVRQPLYMAALSAVRFNPTIRIFYERLLANGKEKKVALTACMHKLLIMLNVMLKRNSYWSCNYAIFNNTCIPDAKTVA

SEQ ID NO: 438605 - protein, 324 aa, unidentified
MDVVIERACGMDVHKDNITACIITPKGKEIQTFSTKTVFLLQLIDWVKQHNCTHVAMESTSVYWKPIVLEAEDIEFLVVNAQHMKAVPGRKTDVKDAEWIAKLLRHGLLKASYIPDRNQRELRELVRYRRSIIEERARQHNRIQKVLEGANIKLGSVVSDVMGVSASDMLNAIAEGEEDPEKLANFARRTMKKKKEELELALKGYINSHQRLMLKTILKHIDFLTEQIEMLDQEVAERVSSHQENIDRLDSIPGIATRMAQQIISEIGTDVKKQFPSAAHMCSWAGIVPGQNESAGKRKSAKTKKGNKYLRSALTEAAHSVRVF

SEQ ID NO: 438606 - protein, 342 aa, unidentified
MQWTVAIGIDTHKHTHVAVALDRLGAQLDAFEAPATSAGYLALYRWAHELGGAAFALEGAGSYGAGLARFLRAAGCSVYECERPKRAERRRGKNDLIDALSAARQLLAGERLGTPRGLSGPREDLRLLLLERRGAVRARTATLNQLQAVLVTAPARLRSRLGERTSEQLARSVARLRAGEGEQAVVRGVLRRLGRRVLSLDAELAALDRELETIVSALVPELIAECGVGPVCAAQLVVSSGDPARMATEASFAALAGTSPVDASSGQQQRHRLNRGGDRQLNRALHVIALTRVRYHAETAAYHQRLLASGKTTREARRCVKRTLARYFHRKLRSLPALALTT

SEQ ID NO: 438607 - protein, 338 aa, unidentified
MVVVGADVHKRTHTFVAVDEAGRKLAEKTVTAVTAGHAQAVMWAREHFGGEVTWAIEDCRHLSARLERDLLALGQKVVRVPPKLMAQTRASARTRGKSDPIDALAVARGFLREPDLPVASHDEISRELKLLVDRREVLVAQRTATINRLLWRVHELDPDRAPKPRSLDLNKHRRLLGDWLDTQTGIVAELARDELADIARLTETINVLAARIGARVRLVAPALLAMPGCGELTAAKLVGETAGVTRFKHEAAFARHAGVAPVPVWSGNTRGRVRMTRSGNRQLNAALHRIAVTQIRLDHGDSTPEALRCLKRRLARVVYNHLHTDHNNRQKPCQPAAA

SEQ ID NO: 438608 - protein, 432 aa, unidentified
MEKIREKAGGIDIGSKKVFVAIEGQEVKSFFTFTEDFEKLREYLFENNIVTVAMEATGVYWNILYEMLEEAGIDVWLVDGRQTKQVPGRKTDVKDCQWIQQLHSYGLLNRCFVAESDIKELRSYQRLREDHIRSASMHINHMQKALTEMNIRLTEVLDQIHGMSGLAMIEAILKGEREKEKLLKLCHTKIIKNKKDEVLKALNGRYTKQGLFALRQAFESYCFYQNQIEQCDQMIDEVLQKISRGKPDQKTDVRRKPIRHNKPDIDNLGSMMLKIFSGKDATTLSGITDYSWMQLLSETGADLSRWPTEKHYTSWLGLAPGQHNSGRMKKNRRKSGRPKAGQIFRQIAQSLLTSKKIALGAFGRRLSARKGSPVAIKSIARKLAVLYWRIMVKGMAFVENGVKKYEEQMLIQKQRSLNRLAKELKVHVVYNV

SEQ ID NO: 438609 - protein, 428 aa, unidentified
MNEGERIRLEDFRQLKKEIRGSERHLIVGIDIAKHQHKAFFGTATGKTLLRVLVFENTIAGFNRLRSRTEALKVQHCLSKVIYGMEPTANYHKPLAEYLIKCGHHVVLVSGVAVNKNRELLDGRWDKHDTKDAANVADLISQGKCLYYDYPSGRLRDLRSLLSLKRRLKKQEHGVKVRIRNHLLAQYFPEFDRYFAKGCSESLAIVTWCLHPSMIAGMEYDEFIEVVAPRMKTLGQEKRLKSIWELAIDSIGCDGGQSLNFEAKLMVEALQQTRDSIRAVDEHIEAICLHFREYRYLLSIPGFGPDISSKVLGAIGNPFRFNSGKQVLKLTGYDLSAHRSGKGSDSAVPVISKRGKAYLRYALYQAAFIASTSNRHFIAYYTNKLRGREREKGIKTKMRVKLAAKMMIIAWTLMKNKEPFDPAYLNRE

SEQ ID NO: 438610 - protein, 346 aa, unidentified
MNTAAIASIGIDLGKTTFHLVALDCHAGVIVRKKFSRSQLLAFTANLPFALIGMEACSGAHFLAARLRDQGHEVKLIPAQFVKPYRKSNKNDFVDAEAIAEAVTRRNMRFVPIKTDDQLDLQALHRVRERLVRRRTALINQIRGFLLERGLVFAKRPANLRRQMPLVLEDADAKLTPYFRRLLNDLWQEWKQVQLDIDALTEEMERLSVNDSACQRLREIPGVGPVVASAIVAAIGNGAAFRKGREFAAWLGLVPAQYSTGDKTCLLGISKRGNEYLRRMFIHGARAVLFRVKYDTGAFGEWVKRLESRRARNVVVVAIANKLARIAWAVLSSGEHYQMPRAFAAA

SEQ ID NO: 438611 - protein, 389 aa, unidentified
MKIFVGIDIAKLNHFAAAISSDGEILIEPFKFTNDADGFQLLVSKLESFDKNSIIIGLESTAHYGDNLVRYLVAEFYQVCVLNPIKTCQMRKNNVRKTKTDKVDTFVIAKTLMMQDDLRFITFFDLDMMDLKALGRFRQKTIKQRTRLKIQLTTYVDQVFPEIQYFFKSGLHQNAVYALLKEAPSPKEIASMHMTHLANLLKVNSHGHFTKEQAKELRVLAQKSVGANDSAISIQITQTIQQIELLDSQLEKIEAEMTDIMKFNDSVIMTIPGIGYINGGMILGEIGDIHRFSNPNKLLAFAGLDPSVYQSGNFQAKTTRMSKRGSRILRYALVNAAWNVVRNNATFKAYYDAKRAEGRSHYNALGHCAGKLVRVIWKMLTDEVEFNLE

SEQ ID NO: 438612 - protein, 415 aa, unidentified
MDVLHPRCAGLDVSKRDAKVCVRIAGSGRAAATSTVTTWSSVTGQILALREHLVAEQVTLVVLEATGDYWKPFYYLLEDAPFEVVLVNARQVKNVPGRKTDVSDATWLAQLGAHGLVRGSFVPPQPVRQLRDLTRTRTAITRERTREWQRLEKLLEDAGIKLTSVATDISGPSGRAMLDALIDGQRDPAVLAELAKARLRVKIPALTEALTGRFTAHHAFLARLHLTLIDQHTHAVDELTTRIEVVIEPFRRARELLVTVPGISTTLADVIIAETGADMTRFPTAGHLASWAGTTPGSHESAGRVTSTKTRPGNPYLKGALGIAALSVARSKQNTRLSARYRRIASRRGPMKALVAIEHTLLTAIWHMLTRDVGYTDLGGDYYTRRNPDKTKQRALQQLRDLGYSVTLNELPVAS

SEQ ID NO: 438613 - protein, 447 aa, unidentified
MPDASPSRRRRARLKVVNPRSAGIDIGSRFHVVAIPTELDDEPVRKFLSFTSDLKRMVEWLLTVNITTVAMESTGIYWVPLYEILVAHGIEVFLVNARHAKNVPGRKTDINDAQWLQQLHSYGLVRASFQPDPCIAKLRAYFRQRDVLVRYRSSHQQHMQKALMQMNLQLHHVVKDITGLTARRIIDAILSGERDSKKLAALRDRRCKESVETIAAALDGNYQEEHLFELKVAVEMFDVYSAKIQECELAGQSVLQELAGDDYVEPKRQASDSRIKGNGFSFNPQELIKSLAGHDLLALPGLGPATVITLISECGLDMTRWPSAKHFVSWLGLSPQNKISGGRVLSSRTRQGTTRAGSAFWMAAVPLSRTSTALGAFQRRLSARVGKSKALIATARKLAILYYKTIRYGMEFQEHGDLAYQQASRERQIHGLERRAKALGYQLVATG

SEQ ID NO: 438614 - protein, 337 aa, unidentified
MVYVGVDLHRKRSHVVALDPTGQVLVSRRIGNAPAEFLRIFGELEPQPIQVAFEATYGWSWFADLLADAGIPAHMAHPLATKAISAARVKNDAVDAKTLAHLLRTNLLAEAWIAPPAAREARRQVRTRAGLVRMRSRVQSQLHALLADLGIIPELTTLFGPAGRRWLAELQLPVGARGRLDAGLRLVDAITVEVGRGDADLRTAFAGDSRTRRLLPIPGIGLVTAATVVAEVWDIQRFPSPERLCSWAGLTPGERTSDAHTRRGHITKQGSRWLRWMLVEAATTAVLDPQLGRFTAQIAQRRGTKIARVALARRLLTLCYYALRDDGGCRAYPVKAR

SEQ ID NO: 438615 - protein, 351 aa, unidentified
MIIIGVDYHPSVQQIAWADTETGECDERQLTHSDGEAEKFYRDLQGRGVSVRVGMEATGHARWFERLLSELGFELWIGDPAQIRAKRVRKQKTDRQDAQLLLTLLVENRFPRVWVPSLENRDLRQLLWHRHRLVQMRTRIMNQLQAVAMNEGVRRRKKLWSVAGRAQLESFVLSPWAARRRQDLLELLDQFNPSIDQLSAAIEQEAEKRSEVLHLMTPPGVGPLTALAFVLTIGTPERFPCGKQIGSYLGLIPCEDSSAGRQRLGHISKQGSSLLRFLLVEAAQVAVRCDPEWRRQFVRLAMRRQRSIALVAMARKLAVRLYWMWRKEWDQQQRSKLGSHAGQLGSSQGVQ

SEQ ID NO: 438616 - protein, 309 aa, unidentified
MSVFVGIDVAKTTLAVALRPNGEIFEVANSPAGHRTLVQRLRKLPVERVLLEATGGYERAVMAALQAEWPVVRVPPHRARSFATAMGRSAKTDPIDAAMLAHLAQVTDAPPTQPETPQQLRLQALVQRRSQVVQQRDDERRRLQQVQDQPLVVASLKRVLRAQQVEVALLDKAIAVAMVEADGQRTDRLLAVPGIGPVTAATLIAFLPELGQIERRQIAALVGVAPYNADSGGKKGLRRIRGGRAGIRRVLYMATWSAIRAQPALQRRYQDLRARGKCAKVALVACMRSFLGQLNAMLRDGKSWQPALA

SEQ ID NO: 438617 - protein, 415 aa, unidentified
MEGTPRYFTGIDWASDKHDVCVINATGSVQARFVIAHTAEGLADLVRRLKRFGKPQDLPLAIERPSGLVVDTLVEAGFPVVPIHPNALKATRPRYRAAPGKSDPGDAYILADILRTDGHRFRPLRPASDETKALRAAVRTRDDLVATRVQLANQLRSLLESFWAGAAAIFADVDSPVALDFLDTFPTPDSAARLGEKRLERFLKRHAYCGRRAPDELLARLRSAPLGLAADLERETKGQLVRGLVALLKPLVTQVRELDGLIAALLQQHPDAALLQSFPRTGSVNAGQILAELGDDRLRFATPDQLAAEAGVAPLTKASGKHKTVVCRFACNKRLRFALTTWADNSRHAHPWATAVYRNARARGCDHPHAIRILARAWSRVLWRCWQDRALYDPARHGRAIPFHAPLQQPTPAAA

SEQ ID NO: 438618 - protein, 428 aa, unidentified
MNCNTQNAKIASITEKTLIVGIDVGSETHYARAFDWRNYEYSKKPLEFSNTEAGFLTFKAWVEDIAEKHGKTAVIPGMEPTGHYWFALGKFLQDNGMKPVHVNPHHVKKSKELDDNNPNKNDRKDPKTIAALVNEGRFSYPYIPTGIYAEIRSLSNLRFQTQEELTRIKNRIARWFAIYFPEYKDVYGDLMAVSGRMILKEAPLPEDIRILGVNGVNQIWRNAKLRGTGMKRAKILVSAAEHSVGSKEAPEAARIELKNLLNDMDVYVSRMEELLQTIEEKLKTIPYVDKLMEIKGIGLITVSGFIAEVGDIGRFDNPKQLQKLAGYAIVANDSGKHNGESRISYRGRKRLRYVLYEAAISLVGKNAEFKEIHEYYRTRKENPLKKMQSVVAVACKIIRVFYTILTKGVDYDPMKLMSDIRRPQLQAA

SEQ ID NO: 438619 - protein, 454 aa, unidentified
MSNKVIFNLDELFISVGIDVGADFSWMSIALPNQQFVGKPYKILHNSIDSLTTAVSKIKEAEELYSLESRIFLESTGIYHYPLFCYLHDKGFNCSVINPIITKNSTNINIRKVHNDRFDSKKAALVGLKPDLKVSLMPSDLALNCRNLCREYYDLMDNRSAYVNKLQGELRIAFPQYLGIFSKVTINTSLTLLETYTSPSAFLKADKQEIIDIIKSTARFGLTYAQNKYNAIIQAATDANQFGYIIDSNIKRIRLYISFIRKYDEEINSILESLHELVDANEDADFVKQIHLIETFKGAGFLSAVSIMGEIGDFSAFSKPKQLFAYFGLDPAVKQSGKFEGTKVQMSKRGSAIARRVIHTLTLQSISISRNREAKNPVLREYYLKKCDSKPKLVAMGAVSHKVCNMMQQMGYRRCNLAVCDCLGCRMDRTCDWNCNLKATKLRPQPALQLTDTA

SEQ ID NO: 438620 - protein, 271 aa, unidentified
MNQEKYIGMDVHQATISVAVMDSSGKLIMECILETKAATILEFIVGLRGTLSVTFEEGTLAAWLHDLLKPHVSHLVVCDPRRNALLKDGSKSDRIDARKLAELLHANKLHAVYHGEHGVRTLKELGRSYLTITKDLTRVMSRIKALYRSWAIPCSGTTVYAVRHRAEWLAKIPEAGVRLRAERLYQQLDLLQPVRQGARRDLMVESHKHPAVKLLRQIPSIGPIRAALLVALLQTPHRFRSKRQLWAYSGFAVETGTQSGAHHRARSESQP

SEQ ID NO: 438621 - protein, 413 aa, unidentified
MDVLHPRCCGLDVHKSSISACILLREAGRVQKHQRRFGAMTQELQELAEWLRQFGVTQVAMESSDVYWKPVWNILEGQFTVVLANAQHIKNVPGRKTDQKDAEWIAQLLQYGLLRASYIPCEIIRDLRDLTRMRTSLSQEASRISSRIQKILEDANIKLASVATNVLGKSGRAMLEDIISGEDNPEHLASLALGHLRVKIPQLRLALEGKIRSHHRFLLGCLLDQIQFVEHEIALLDERLEDIGRQRPDLAQAVARWDTIPGIDRVAAWALLAEIGDNMAQFPTAEHLASWAALCPGNHESAGKRLRGTTRQGSPWLCRMACQCAWAAARTKNTYLSSQFRRLAARRGKKRAIIAVAHTLIVIGYHLQKNQSNYEDLGGNYFDRIHSDGLKRYLVKRLQQLGHKVTLEPMEAA

SEQ ID NO: 438622 - protein, 435 aa, unidentified
MSNILFENLFISVGIDVGADFSFMSIALPNQTFVGKPFKILHSDLNSLSMAVSKVKEAEEMYSLESRIFLESTGIYHFPLFCYLRDKGFLVSIINPIITKNSTNINIRKVHNDKFDSKKAALVGLKPDLKVSLIPSDLVLDLRNLSREYYDLMDNRSAYVNKLQGELRMVFPQYLKIFSKITVNTALTLLEKYTSPDAFLNASKDEIIASIRSTARFGSAYAEKKYNAIIKAANDAKTFGYSVNSNFKRILLYIRFIRQYDEEISAILSDMHELVDSNKDTDFVKQIHLIESFKGAGFLSAVSLMCEIGDFSAFKSPKQLFAYFGLDPAVKQSGNFEGNKISMSKRGSRIARRVLHTMSLISISRNKDGTAKNPVLRDYYLKKCQSKPKMVALGAIMHKVCNIVFAILRDEKEFEIISPEEHQKNYLKAKCDIAA

SEQ ID NO: 438623 - protein, 475 aa, unidentified
MNIKGTKKKNQVVTANIFEQQELLKKSEVIKENLTASTWRELETNGKFDKNKKLSFISDDMLILGCDVGSETHYVRAIDTRGRELSKSAYSFNNDYEGFQSAKEWAVKIAAEHDKSQIVLGLEPTGHYWFCLATWMIANGISVVQVNPYAVKQTKEVEDNSQLKDDRKDPKLIANLVKDGNFGMPYLPEKIYAELRRLSMFRDQLNEDRIRTINRMHREMKIYFPEYKEALGKVDGAFSLELLKEAPFPDELTALGEEGIRQIWHAAKLRGRGYSRAREILQYAKASVGIKDGSIASKAAVKWFVQKIMELDVELAVIENQINQKCQEIPHTGNVLEISGIGENTLSGILAEMGDISRFDDVKEIQKLSGLGLVACSSGKHKGETKISHRGRKRLRYWLFQAAKSAVAHAEEFKELHMYYTTRADNPLKKMQSLIVIACKLLRIIYTILNTGTKYAPKKMLMDIRRPENKEAIVA

SEQ ID NO: 438624 - protein, 370 aa, unidentified
MNDSIFVGLDVHKATISVAVAEAMRGGEVRNLGIIPNRADQIAKLAKKLGNGDRQVSFCYEAGPCGYGLHRQLTGLGHNCIVVAPSLIPIKAGDRVKTDRRDAAMLAKLHRSGELTAVWVPDAAHEAMRDLVRARATAMRVLGKARQHLQAFLLRHGRIYAGKKGWTLAYRRWLTTVRFDHPASQIVLQDYIHAVTDAEVRVDCLTKRIEELAPQWSMTPLVEAVQAMRGVAFIVAVTVVAEVGDFSRFDNPRQLMAFLGLVPSEHSSGATIRRGGITKAGNALARRALIEGAWTYRMQARVSRKLHDRNERLPQAIRDIAWKAQVRLCARYRRLSAAGKPKVIVTTAIAREMVGFLWAITRQVQLRPAA

SEQ ID NO: 438625 - protein, 349 aa, unidentified
MLADELDYVIGVDTHLNEHVLAVLAAPAGAVIAKRAVRANARGYREALAFAAQHANGAHLWAIEGTGHYGAGLARFLSGRGEPVLEISRQPRGERRLRGKDDSLDAIRTARAALASETLALPRSGERREALRLLLIARRSAVDVRREALVQLRSVIVTAPERLREDLRGLPAGRLLERCSRLRRSGSMSVDELATRLVVRSLARRIEAATAEADELEREILAHVRALAPQLLDEPGVGPIVAAQVIVAWSHQGRVRSEAAFARLAGVAPLPASSGQTTRHRLSRGGDRQLNRALHTIVLHRRLHDPATKDYIAKRVAEGKSRRDATRLLKRYLARHLYRVLQDQEPMMA

SEQ ID NO: 438626 - protein, 308 aa, unidentified
MEVFAGIDVAKESLEVFVRPDNIRRSFSNDEQGRTSLACLLGKTGSSLVVLEASGGYEIPVVEVLALSALNVVVVNPRQVRDFAKATGKLAKTDAIDAEVIARFAEVIRPEVRPLKDEDTQRLQALIARRRQLVQMLTEEKNRLQIAPPWTRADIKAHIAWLTECINKVGKDLGSLIRKTPLWREKENLLRTFKGIGPVNACTLLARLPELGQLNRKKIAALVGLAPMNRDSGKYRGKRTIFGGRADVRAALYMATLSAVSHNSILRAFYQRLLQAGKVRKVALTACMHKVLIILNAMVRTNTPWCAR

SEQ ID NO: 438627 - protein, 414 aa, unidentified
MNYTQNQKITQITPSTLIIGIDIAKDKHVARAQDDRGIEFGKRLIFDNRINGFERLLKWVQSHMKEHQKDHVIFGVEPTGQFWFNLAYYLKARGYDFVLVNPMHVKKSKELDDNSPTKNDTKDAKVIAQLMKDGRYSVPNLLEGIKLRDQLVKQLMIIEGRTQNWLHRYFPEFLDVFADWKGKAAIHTLRLFPLPAEIQAMTPEEIVLRWKPFVRRGVGIKRAEQLVLAANESVGLTVSTTFAKRELASLLEQYDLYKQQVEDLEDMVKEIPGATEMMNIPGLGAITVATLYAEAGDLRNYNHPQQLVNLAGLSLREYSSGKYKGETRITKRGRKRLRRALYLAIRPLAHNSTFKALHQYYTKRPERPLKKQQSLIALCCKLLRVLFVIGNKQCAFDGVKLLRGLPQLETLQVA

SEQ ID NO: 438628 - protein, 463 aa, unidentified
MAARKPKRMAAQTVEDEDYQLRYERVAGVDVAKATAMVCLRLPPGPGKARRTSRTWEVTARVPDIEALAAELKAAGVERVSMESTSDYWRIWLVVLEGAGLDVQLVNSSQARNLPGRPKTDKADAQWIARLTEMGLLRGSFVPPPEIRALRQYTRQLVHLSQDRTRYWQRLEKLLESALCKLTSVVSGLAGSVSCLAMLEAMIAGERDPQVLAGYARGPMKSKHAALVKAFTGMQFGPEHAFSARSDLRMIKMLDAEITGLEQQVRDHLAAIPAAWGTDADGVTGPGAGTGPDAAVLPAVDRLAEIPGVGPATAAGLIAEIGLDMSRFPTPHALVSWVGMAPVPNQSGPRKGRGKKGHGSSYARRYAGQAGNGAARTDTFLGQRHRRIRSRPGGGGWKKANVAVGRSILIIVWHLLKDPAARFTDLGPDHYARHTDTNRKARNHKRQLEALGYDVILTPREAA

SEQ ID NO: 438629 - protein, 420 aa, unidentified
MAPLSNQQFKAFVGIDWADTKHDICLQQAGDDRREFDCIPHQVTRIDEWAKALHQRFGGPIAIALELARGPIVCVLQKHAFFTLFPINPLMLAKYREAFKPSRAKDDPTDAELALDLLLRHPERFSPLRPQSAGMRSLLSLIEQRRELVGDKTRFTNRLTNALKQYYPQALEWFDDIDTVLFCDFLTRWPTLPAVRRASRKTLETFFHAHNCRRAKLIEGRLESIRCAASLTDDPGIVAPHRLLALMLVTQLRTALAAIDVFDKEIATVARTLPDFDLFDSLPGAGPHLTPRLLAAFGEQRDRFKGADELQKYSGIAPVPERSGKKCWVHWRWQCPTFLRQTFVEWAGQTINKSFWAGAYYRQQRAKGSSYQAAVRALAFKWIRILYRCWQTGTRYDESVYLNALRKRGSSLLRNLALPG

SEQ ID NO: 438630 - protein, 383 aa, unidentified
MSDHSEAFVAFDTSKLRNAVAIADGGRGDEVRFLGELDNTPAATAKLVRKLAGKYERLTFCYEAGPTGYGLYRQIKSLGHECIVGAPSLIPKKAGDRVKTNRRDAISLAKLLRNGDLTAVWVPDRQHEAMRELTRARETAMNDLRAKRQQISAFLLRRGVHYPPDKKTWGKMHINWLMSQKLEFTEERIVFEELMEAMRQAQGRLDRLEAAIRAAVPNWSLCRLVTALMAMRGLDMISAATIVAEVGDLSRFRTPRELMAYVGIVPSEDSTGDKVKRGPITKTGNRRVRRMLVECAWSYQFPPRLSKDKQVKVEAVPQAVGEIAWKAQSRLNQRYRALLRKGKLKNVAITAVAREFVGFIWAVAQAVGAAPAVATTKAPAVAS

SEQ ID NO: 438631 - protein, 397 aa, unidentified
MLYAGIDIAKRRHMACITDALGNKIAGPFAFDNTRQGFALFTKRMEEACGEEEVVVGMEATGHYWMALFSHLQQAGICACLINPVKTDAWRRFLGSSKVKTDAIDCAIIADAMRIGAFDPSMLACEEIGELKALTRMRQDLSESTSALKCRIIAALDRVFPEYAKLFSDAFSASSKAILKRCPTPKECSKVKASSLERMLAKASRGKCGYEKAQKIKAAARESCGAAFADRAISFEIKSLVAQLEFIERQIDEADLMIRELLDGIEPLVLTIPGISYAIGAQIVAEIGDINRFDNSDALVSFAGLNPSKNESGEFSSTENRITKQGSPYLRRALYLAAQAQLVQGNAFRAFYDRLRGRGKRHRVALVAVAAKIARVVFAVLSKQEPYREEAVGVATS

SEQ ID NO: 438632 - protein, 408 aa, unidentified
MYNAVGIDASKLKSTITIIQPAGVVIRKPFDVLHTSDELNTLVTYLKSLEGETRAVIECTGRYHEPVVKSLSEAGIFISAVNPKLIKGQKRNTLRKVKSDPADARKIAKYALDNWAELREYSSMDTTREQLKTLNSQFTFFMKQKVAAKTNLISLLDNTYPGVNKLFDSPTRDDGSEKWIDYAYSFWHVDCVRKIGLKAFTERYEAFCKKHHYNYQKNKPALLFEESKQLVAVFPKEKSYKLLIQQSIQQLRLASEHIEIIRKEMNELASTLPEYETVMSMYGIGETYGPQLIAEIGDVSRFTHREAITAFAGVDPGVNESGQFKQRSNRASKNGSTRLRKTLFQVMSTYLQNKPVNEPVYQFLDRKRAEGKPYLVYMTAGANKFLRIYYGKVKECLRNLEQSQIEES

SEQ ID NO: 438633 - protein, 316 aa, unidentified
MVGIDVASAHVDVATVGAELPAALGRVGNDADGHSVLVDGLARLKPELVLMEATGGYEAALACALQAAGLRVAVVNPRMARDFARAMQRLAKTDRIDAATLAEFAGVLARRPDCKRFIRPVSVPEQQDLAALVTRRRQLVTMQLSERQRLRLARPVTRPSIEALLEAIARQLDDVDGEMARHVEQHHAQMAQLLQSVAGIGRVAAATLIGELPELGRLNRRQICALVGVAPYANDSGASRGRRRIVGGRFEVRRALYMATLTATRHNDAIRAFYERLLAAGKPKKVALIACMRKLITHLNAIARDHLNAQVGPVNA

SEQ ID NO: 438634 - protein, 482 aa, unidentified
MKKQNIYQNRSQELYALFENAGNNSKVMCIPVDYAKKHHLAMFCNGYGDIIRKPFPVKNSPEGLNYLVDQVKRSCSHRNIQLQHVFFGGEDISSYSESFTHSLRSMGWLVASVNAHEAKKQRENLQASTDRLDLMGIATMLISHRANTCPAQSGIYKNLRTIVRHRKKLVKIKTEVKNRIHALVDQLFPGFLDETRSGIMPFSKSSLYLMSDRFSTRQIKRRKCQSLTKKLNRFGTKNPDKTATKLQSYAANAFSAPKPHMHTLQLSLSCHVKHYLCLVENIKYLEKETALVLSQTQGAFLTSIKGIGIILAAGICSEIGDPFIQKSATNLSSYAGVVPRVKQSGGPDSAPRTGSVSKRNNHILKDYLVQASNHIGRHGPEDLNQDFKRRKCQGQNAEFGMARRLMRITMCMMKTWQIYLPDNLRTERADKKDRACYYLSIWPYITKKWSKLTALDKVFAKEQPLGQWRDVVQKIYKVNLDL

SEQ ID NO: 438635 - protein, 353 aa, unidentified
MPVYVAVDFHAREQTISWCDTADGEVHRTKLRHQHDDVRKFYEQFSGEVIVAFEASGYSAWFEQMLAELGHTVWLGNAAEIRRKAPRKQKNDRRDADLMLELMLKSDFPRVHTFSAESRTVLRQLRYRHKLVKVRTIAKNSVHAIGLNAGLPLRGRLLTPTGLEQLQALPLSPVLSQQRDEWLALIRLMNKQIGAVEESLAQRAKDDEAVELLRTHPGIGLLTALALRYTLDPIARFTSTRCVVGYAGLDCVEEQSSERRRMGSISKQGSRLLRFLLNEAGQTAARQDPQLKQFYRRLRRRRDKPKAKVAVARKLLVRSFIMLRDQIDYAEFVRRGVAARVARETHSPKVTDL

SEQ ID NO: 438636 - protein, 401 aa, unidentified
MSDQYGVFLGLDVGKSDHHAVGLAPDGKRLHDGPLPNTEARLRALFDKLARHGRILVVVDQPASIGALAVAVARACGHQVAYLPGLAMRRLADLHPGTAKTDARDAYVIADAARTLPHTLRRVDAGDEAFAELEVLIGYDDDLAAESTRVSNRIRGLLTQIHPALEHVLGPKISHPAVQELLSKCGGPTGLRKAGRRKLLALVASRAPRMGTRLVEAVLTALDEQTVTVPGTAAAETVLPRLADSLRQVLHQRDQVAGEVERILDAHPLAGVLTSMPGIGVRTGARILLEVGDASAFATSGHLAAYAGLAPVTRRSGSSIRGEHPPKSGNKQLKRAFFLAAFASLSHPPSRAYYDRKRAEGKKHNAALICLARRRVDVLHAMLRTNTPYQAKPADEPRLAA

SEQ ID NO: 438637 - protein, 405 aa, unidentified
MVDIMVSDFRKGRYNLMKIFVGIDIAKLNHFAAAISSDGEILIEPFKFTNDADGFQLLVSKLESFDKNSIIIGLESTAHYGDNLVRYLVAEFYQVCVLNPIKTCQMRKNNVRKTKTDKVDTFVIAKTLMMQDDLRFITFFDLDMMDLKALGRFRQKTIKQRTRLKIQLTTYVDQVFPEIQYFFKSGLHQNAVYALLKEAPSPKEIASMHMTHLANLLKVNSHGHFTKEQAKELRILAQKSVGANDSAISIQITQTIQQIELLDSQLEKIEAEMTDIMKFNDSVIMTIPGIGYINGGMILGEIGDIHRFSNPNKLLAFAGLDPSVYQSGNFQAKTTRMSKRGSRVLRYALVNAAWNVVRNNATFKAYYDAKRAEGRSHYNALGHCAGKLVRVIWKMLTDEVEFNLE

SEQ ID NO: 438638 - protein, 366 aa, unidentified
MLRPAKKAPAQKAHRENPMNAPHYIGFDVHKKTISFCVKTASGEIVEEGSVPAQRRVLRQWASARPQPWQGALEATLFSGWIYDTLQPYGERLEMAHPAKMKAISAAKKKSDTIDARTIADLVRCNLLPACYVAAPRIRELRRLLRYRSLVVSEAVRMKNKMAGLLMETGALYVKEKLHRKKYFANLLEELEEVPESVIDLLRLSRGALEMFESTQKRLVRELLADPELAQRVERLMSIPAVGEITALTWALEVGDPQRFRSGSDAMSYCGLTAALQSSAGKQQRGPISKQRNRWLQTTLIEAAKLAPRWNPQLAALHARELERGHRNRATLAVARKLVAYLLAVDKSRQPFQVRESSQDLAQKTG

SEQ ID NO: 438639 - protein, 467 aa, unidentified
MVVPNDEPSKPKKSRRKSLPVPVPASSAPLNVINPDAAGIDVHSDMHMVCVPADREAEPVRQFGANTADLQEIVVWLKECRVKTVALESTGIYWIPLFELLESEGFEVYLVEPGQLSRCGARPKTDVLDAQWIQRLHSYGLLRGSFRPPNSVLALRAYWRQRQMQVRYAASHVQHMQKALEQMNVKLAEVVSDITGHTGMSIIGAILDGERDPIKLAKLRDERCHHSEDQIALALQGTWRPEHLFELRQARALYQFHHEQITECDQQVQAELAKFSNRAGEKTRTKKPRTRGRKSNDVRFDAKGPLFQALGVDLTLIEGIDVGTALVILAEIGVDVSRFPTEKHFASWLRLCPPQNESNKTNRHHGHRKATNRVTIALRMCARAVGQTMAPLGLFYRRIRSRIGGLGAVKATAHKLACLVYRMLKYGQEYVTQSMEEYEAKVKANMLKALKRKAAALGFQLSPLPTQ

SEQ ID NO: 438640 - protein, 389 aa, unidentified
MSQPFDASRSLTALEQDSTIIAAIEIAQSKWLVAAVVPGIKRQPLKKLDADEESLLKLLYRWRKEADQAGHPIKRVVVAYEAGRDGFWLARWLRTRGVEAYVIHPNSIAVSREHRRAKTDRLDTELLLRALLGWLRGEKRHCSMVAIPTIEEEDAKRPNRERDSLVTEQTRIGNQIKAILTRFGIRRFRLKLRKAEQQLKELHTAEGSLLPENTRAELFRHLARLHMVREQIRAIEKARLQKLEANRDRKKSPYAMVHLIARVVGIGVETADMLVTEVFSRQFRDCKAVARYAGLTGSPDESGKRRREKGLARAGNARVRTGMIRLAWRVLRFQDGSALAQWFQTRTADGRGNTRKTMIVALARKLLIALWRLVTTGEMSDGIVLRPAS

SEQ ID NO: 438641 - protein, 367 aa, unidentified
MKNTIVHHEGAASLKVAVNKIGLSGSVIKIGLDVHARLYVAVAQYDQLLPKPARRLAPTEFVPWVTQLLQAGHTVHVVYEACGFGFGLYRELKALRVHCYVIAPRKLDEGCTRVKTDPRDATTLCQRLSRYVEGNTRELAVIRVPSEAEEQARHVSRQREQLVRHRQKLEAQGRSLLINHSLPAPAHWWKNQTWSRLSKLLPAWICLRLEVHRPALLTLEQQISALSAELEAAAPADVPAGVGKLTTVVMTREICSWERFSNRRAISSYTGLCPGEHSSGSKRVPGSVTKHGNPRLRAALVECAWRMVRFQPNYPPVKKRLSVLAKGARATGAQRKKAIVAVARHLAVDLWRIHTGRCSAVQLGLAI

SEQ ID NO: 438642 - protein, 365 aa, unidentified
MQKISTMQASGKNIFEGQLTIGLDLGDRSSAYCVLNAAGEIVLEHKLATTPEAMKQVFGSLPRCRIAMETGTHSPWVSRLLMALGHEVIVGHAQKVRLITKSRRKDDRLDARTLARLARIDPELLSPVKHRSAQAQLHLTEIRARAALVSTRTALVNAVRGLVKSYGERLRKCHTQQVGREMTRELSMGLREALKPLLQEVESLNERIKEYDRRIEKMAKEMYPETALLKQVKGVGDLIATAYVLTIEDPHRFRKSRDAGCFLGLQPGRRNSGESEPQMRISKEGDEYLRTLLVQGAHYILGPFGEDSDLRRWGQKLSARGGKNAKKRAVVAVARKLAVLLHRLWVSGEVYEPLRNSQKPMSTAA

SEQ ID NO: 438643 - protein, 349 aa, unidentified
MKILALDLGKIKPAVCVLDTAEMKEHYTTIRTTPFELSILLEGQQPDRVVFEVGTLAGWVHDVVVGQGCAVQVANPNHEGWRWRNVKRKTDRLDALKLARLSAAGQLPTVHMPAASVREHRALIQYRTQLVGRRTRIKNTIRSMIARQGRKMVPGASAWTRKETATLQEWSRPWDQIERSEDLWRGQLHEELTALEQIEQQLLRLERKLDTLGRRDQRIVRLQTIPCVGPRTAEMLVAVLDDPQRFKSLKEVGSYVGLTPRQFQSGQMDRSGGISKQGHRQLRRMLVEVSWLALRYNPYLRSIYLRVCRGSASRRKIAIVAVARKLLVIAWAMLRDGTVWRPGAACTAA

SEQ ID NO: 438644 - protein, 355 aa, unidentified
MLSFMSSTIGCDLGDRKSHVCCLNADAKVETEATVRTTRQDMRQFFSARAKARVVLEVGTHSRWVSELLKSLGHEVVVANPRRVKLISQSDSKSDISDAKLLARLGRADPELLAPINHRGTEVQADLAAAKVRDALVRTRTRLVSQARGLVKSFGERLPRCSAESFHRRARAEVPGALKAALEPLFDTLEKLEIQIKLQDLAVEQLARKYPDVEVVSQVNGVGTLTALVFLLTLEDKNRFKKSRTVGAFIGLRPRKDQSGDTDKQLPITKAGDPFLRRLLVNCANQILGPFGKDTDLRRWGLELASRGGKNAKKRATVAVARKLAVLMHRLWVTGEEYQPVGYDNTKKNIKTTAA

SEQ ID NO: 438645 - protein, 411 aa, unidentified
MSEQYRWFVGIDWATQNHEVCIVDCDGGVVDRKTIEHTGAGIAQLVKRLEELTRAEPGLVAVGIEVPRGAIIECLIEHRFAVYSLNPKQMDRFRDRHTVAGSKDDRRDALVLADSLRTDRPLFHRVRLDDPLVMRIRELSRTEQDVQQQQTRLANQLRDLLWRYFPQLIKLSPSMDEGWLWDLLELAPTPEKARGLKRSRIEKILRAHRIRRLSGEEVEAALQVQALELAPGSAAATSEHVLLLLPVLRLLQSQHKEIARRMETVLEEMEQQEQESEHRDVTILRSMPGAGRVVAATMLAEASQALAERDYRALRSYTGVAPVTWQSGKRKVVGMRRSCNPRLRNAVYHWSMVSIQHDERSREHYAALRKKGHSHSRALRGVADRLLAVLTVMLRTGSNYDPTLRSAASRQ

SEQ ID NO: 438646 - protein, 348 aa, unidentified
MIAIGADVHKQQCTLAVQRPDGKLSMLPSMDNTRENWLDLLTQLPPEAQIALEVSTSGHFVMSVLEEAGWRDRAHWVHTAGIDSLRKQKTDRLDAKRLARKLSVMEQDPLPEAWFPPRPIRELRLRARQRCWVAVLRTRVKNRVRSLLQMSGRCAGTNPFTASGRTWLKEQKLSEATRESVEQLLRFHDFLTTEREKSETSLRGMEKDFPEIARLQTLPGLGHILSAVIWSEIGELKRFDSPRALVNYTGLAPSLYESGERSVRGGITRQGPVWLRWALITAVNAATRGDNAFARRYRRLRRHKLPNVAKTAVARSIARCAYGVLKHGIDYQEQRWGRKAGIEMEQEA

SEQ ID NO: 438647 - protein, 338 aa, unidentified
MGTYAGIDLHSSNNYIGIMNQDHKRLFGKRLPNSLDEILMVLEPFKSDLKGVVVESTYNWYWLVDGLQEHGHRVHLANPSAIKQYEGIKHTDDKWDSFWLAHMKHLNILPEGYIYPKEQRAVRDLLRRRLFFVRHRTANILSLQSTITRNLGIQMSGNEIKKLDMDDACDLFDSANLVFMAQNNISTIKHLGKIIKGIEKEVKSQVKLRKEFAMLTTTPGIGLILGLTIMLEVGDIGRFLKVGNYSSYCRCVGSKRLSNGKKKGENNKKNGNKYLSWAYVEAAQFARRYLPSAQRFYQQKMAKSNGALATKALSNKLSRASYFIMRDQVPFDEDMLFR

SEQ ID NO: 438648 - protein, 340 aa, unidentified
MINNFLGIDVSKDRFDVFLLFISKKGKRESRKRSFKNEDHGFQGLLSFLQKHNVEQVKASMEATGCYSEALAEFLHNAGHFVSVVNPYCIKSYARSKLVRQKNDQIDAEIIADYCQRQEPSRWTPSSPEMKKLKHLYRCSAALKDELTLVNNHLEKKERLPKEVATAWEDLAMNIEQKIETIKNSLRELLKQHKELLENFQLLLTIPGIGEESAIAILAEVSDIKAFRDARQLAAYAGTIPQNITSGSSVYAKPRLSKSGSRTLCKAMYFPAIVAKNHNPIIMTFCERLKEKGKHNMAIVGAAMRKLLHIVFGVLSSKKAFDPDHIKNYRAKRLAEGLVL

SEQ ID NO: 438649 - protein, 338 aa, unidentified
MSLYAAIDLHSTNSVLAVTDEADAPLRQHRLPNELPAILKELEPFRDEIVGVVVESTYNWYWLVDGLKAHGYKVHLANTAAVPQYSGLKYSGDESDARHLAHLLRLGILPEGYVYPREDRAIRDLLRRRFQLVRMATGLMISIQSTWARQTGRGLPANEFRQLSHGQIERAFADLSVRFGVLTHLNAWRTIEEQVQQLERWVVKARLRRPEPIALRTTPGIGRILSLTIALETGTIHRFASVGDYASYCRLVKSERISNGKKKGQGNRKCGNRYLAWAWIEAAHFARCHSPPIQRWYLRKCSKRHKIIAIKAVAHKLARAGYYLMRDGGVFDVKRAFG

SEQ ID NO: 438650 - protein, 415 aa, unidentified
MALKIVYKICCGIDVHKTFVVACIASTNSKGVTTYESHRFSTYTKGLKDLLQWLLQRNCKDICMESTGKYWIPVYNVLENDCTIVLAHPKYVKAIRGKKTDKKDAKWIADLFKHDLVAGSFMPPADIRQLRDLMRYRFKLTCFRSSEKNRLQNCLTVSNIQLGNVVSDTFGKSALAILDKLLENPADTSFDLEPLIYKNLKKKLPELRDAIDGFITPEQAGKLKVIKGHFEDLESRKAELEELILALAAPYQQELAILQTAPGISSVFTAIGIISEIGTNMEAFPSAKHLCSWAGLTPTNNESAGKKKSVRVSKAGCYIKPLLVQCTNAVVTSKKHPEIRNRYLRLKKRRGHKKAIIAIARMLLTALYHMLKNGENYNAELYRKSNLPPVDREITVEQAIIIARNQGYKIKSATA

SEQ ID NO: 438651 - protein, 394 aa, unidentified
MATIGIDIGAYQHAVAVCRDGQTEAERRVLRIPATRAGFDELDRLLATLGPVDRAVMESSGHYWFGLASHLHGQGVPVAVVNPLASRYFAKRRLQRAKSDPADARTLAALGMVDRPRTSVPLAGSELREAARFAMRLVQEQARTCQRISRLIDIGFPELRDAYEDPGCASAIALLRVAPTARAAARRRTETLASAKTAGGRAVGRWKAEQLHAAARTTVAPAELDAQVGFEMELLIAQHDFLEQQIARADARLAELADTELVRRLRTIPGVGAATAAALIAEIGDIHRFTDFDQLVAFAGVHAAERSSGTKGADPSTSWHMAKTGDAYLRAALYRMALVGTVHNPVIRDHYQRKRAQGKSKMNALGHCMKKALSIVWGVWRSDHDFVVPTAIRP

SEQ ID NO: 438652 - protein, 389 aa, unidentified
MYLIGIDISKYKHDCFIATEAGEIIKDSFSFDNNALGFSQLLDVLQALDSSQTKKIGLEATGHYGYNLKVFLDRHGFDYMEFNPFLVKKLSTALSLRKTKTDKADARFLSMILLSVDYRTYPVKSYHIQELKSLTRYYKGLVKKRSRELVELTNTLDLIFPEFKSFFQNRFSQTAYYILEHYHTPERISRMTYQNFEKLHSISKGHFSYAKFLHLKDLAKHTVGSSSELLVFEMKSCIRLLNDIKQEIKALESLLIAWTHKIDSPVFSIKGIGFVSALSLIAEYGNFISFDSPAQMLSFAGLEPSIIQSGTSNKQGHMVKHGSGYLRDTLMNITIPFMMHNPVIYDYYLKKKNEGKPHLVALSHVAKKLIRIIFFLVKSNQQFNETKLV

SEQ ID NO: 438653 - protein, 376 aa, unidentified
MNEKLRFLGLDVHAETIAVAVAEPNGEVRSLGMIANREDSIRKFIRKLGSPEHLRACYEAGPTGFVLYWQLTQLGVKCDVVAPSLVPKKPGDRVKTDRRDALKLARSHRSDDLTAVWVPDEGSEALRDLVRAREAAKQDQLRAKHRLTKFLLRTGQRPPLGVKAWTEKYVEWVQQVRYTHPAQEATLLDCLNEVQHMEERVKRLEQSIVEVIQLAPAPMQEVVRGLQALRGIAHISAVTIAVELGNITSRFESARDLMGYSGAFPSEDSTGKRIRRGGITQSGNAHLRRIVVESAWSYRHRPAIGARLRRRQEGLPAEITEIAWKAQNRLHKRYMTLMARGKEQRKTMTAIARELLGFIWAIGIKAEAACKQQMAA

SEQ ID NO: 438654 - protein, 391 aa, unidentified
MAATQNYSTTARGSVLYLAFELGASKWKLAMSPAFGQSPRWKTIDAGDLAKLQSEILSAKKRFGLDKAAPVRSCYEAGRDGFWVHRYLTSVGIENLVVDSASIEVSRRKRRAKNDRLDGEKLLALLIRYHAGERRAWRIVRVPSVAEEDARHLHRELDQLKHERTTRINRLRGLLATQGLAIESVARLAEAIPDLRTWDGKALPAELQRRLMREWERLRSVSREIQDLTRERAQRIRQGDPADGVEPVRHLLTLRGIGVNSSWLLTKEVFGWRQIENRRQLGSLAGLTPTPYQSGDSNREQGISKAGNRQLRAMMMEIAWGWLRYQPDSDLSQWFRLRFAGGTSRQRRIGIVALARKLLVALWRYVEAGEIPKGARTRTWQEGLVRHSGAA

SEQ ID NO: 438655 - protein, 464 aa, unidentified
MNGDSKAGSGQEGGRKEEGIAALGRRVAGVDVGSKEHWVCAPVREGEGGEVGVFGATTAQLEKMATWLIERRVESVALESTGVYWVAVYEVLEARGLKVRLVDSRALARVPGRPKTDRRDCQWIQRLHSCGLLQGAFRPPEQICMLRTLVRDKGNLVAEQGDWVRRMQKSLEQMNVRVHRAVADLTGATGMALVRAIVKGEREARELAKLRDPRCHKSEEEIAEQLKGHWREDHLFSLGQALKMYEAIQERMQDYERAILEKLKAMEREECRQQEPPELKNKKKAQTILHRGQEPLRQALYRASGADLTAIDGLGVETVQAVTSEYGTDLSAFPQEKQFVKHVLLAPNRPTSGGKPVKKKQKHGTASSRVAAALRMAALTLRHSQTALGAYYRQIARHKGDDVAVFATARKLATLIYRMLRWGKDYVDEGAEAYQNRYREGRLRRLTSLARELGYQLAPLPANP

SEQ ID NO: 438656 - protein, 472 aa, unidentified
MKSKSSRKRNPVDPVAEEIPDAEHELEIERVAAIDVAKASGKVCVRLPGKTGRRFSRVWDVPARTGAVSELAEQLIESGVEKVTVESTSDYWRIWYYLLEAAGLDVQLVNARDVKNVPGRPKTDKLDAVWLAKLTEKGLLRPSFVPPAEIRQLRDYTRLRVDLTRERTRYWQRLEKLLEDALIKISAVASTLDTLSTRDMIEALIAGERDPGRLADLARGKMKAKRSELIAALDGRFDDHHRELARMLLDQIDTLTAQIAALTSRIEQLLAAMPDTRSRGDGGTGGDPDRPSTGHGVEPETAARFTDATLLTPVERLDEITGIGELNAQVVLAEVGLDMTRFPTPAHLVSWAKLCPRTIQSGPVTRGGKTGRGNPYLKGALGEAAAAAARTDTFLGERYRRIVKRRGKLKALVAVARAILVVIWHLLANPEARFRDLGPDYHTQRIHTERKLRNHIAQLTAMGYRVTLEPAA

SEQ ID NO: 438657 - protein, 408 aa, unidentified
MRIIGLDVHRTFAEVAIREHGRVRPAGRISTTTAGLQLFARSLTRRDEVVLEATCNTHAIARLLRAHAGRVVVSNPLRTRAIAEAKIKTDKIDAAVLTQLHASGFLPEVWMPDATTEALRRQVSRRAQIVRHRTRLKNQIHAILHRNLLPRCPASDLFGRKGRAWLATQGLPADERAAVTSLLRALDHADEDLTELDRDLAGSILEDAAVRRLMTIPGVDFAVAVGLIAAIGDVTRFRSPQKLVSYFGLNPRVRQSGLQPAQHGRITKQGRAHARGMLVEAAWVAAKTPGPLRAFFVRVRGRRGHQIAAVATARKLAVLAWHLLTKQQDYAWARPSLTEKKRRALELRAGQPAERGQRGRAHAYNLKTLRTRERAIGEQAERAYQTLVTHWRPQQPKRGTGATKAARR

SEQ ID NO: 438658 - protein, 371 aa, unidentified
MDESIKFFVGLDAHKDSIAVAVCEAGREPSRFVGTLGPDVQGVLKTLRKYGPARQVSVVYEAGPTGYGLYRELSRRGYCCEIIAPSLIPRRAGERIKTDRRDCARLAELSRAGELKAVWVPEEAHEAMRNLWRAREDAVNMRLKVRQQLKAFLLRQDRRYAGKTSWTKMHQRWIADQRFGHSADQIALTEYQLAVQAAEQRVQRLTAALQQAIQGWRFEPVVAALRALRGIDTVSAIGLVCEIGDINRFATARQLMGYLGLVPSEHSSGNSVRRGSITKTGNAHARRLLTEAAWNYRFPARISNELRERSKALPPDIRTHAWKAQVRLCSRFAQLSGRGVQANKVCVAVARELAGFVWAIAHQAAPSTATR

SEQ ID NO: 438659 - protein, 381 aa, unidentified
MTKPYDLSKPLVALDHDSTLVCVIEMSGSSWLVAATVPGVDRLQKLPVNPTRLLEQVERWRKEATRAGRTITRTVVAYESGRDGFWLARLLQGHGIEAHVIHASSVAVSREQRRAKTDRLDTEMLMRALLGWLRREPGHCRMVAIPTVAAEDARRPGRERDGLVAERTRLTNTIKAELALWGIQGFKPGLRKAAEHLEALRTLEGEPLPPNTLARLHRLLKRRSLLSEQITAIERSAAQAVERDPTGSNALILLLIKGVGLETAQMLVHEVLSRNLRDRRAVARYAGLTGTPDESGSKRREKGISKAGNPRVRRGLIQLAWRFLLFQPDAALVRWYRERTAGGTGAIRKTMIVALARKLLIALWSYASARVMPEGVVLKEA

SEQ ID NO: 438660 - protein, 385 aa, unidentified
MTATTRRFDPTALANTLCISFELGEGSWKLSFTSGFGEKIVRSGVRSRDLEGVVREIESAKGRLGLAPGCRVVSCYEAGRDGFWLHRFLTSYGVENLVVDSSSIEVSRRRRRAKTDRLDGESLLDLLLRHLAGSRKKVWSVVRVPTVEQEDRRHLHRELASAKRDRTRVTNRMKGLLANQGLTLDLKKNVPGQLQALRQWDGTPLPAGLRARLAREWERVQFYAGLIERLEAERRELLREANDPVIEKVLQLNSLRGIGVNSAWLYGMELFGWRELRNRREVGAIVGLAPTPHESGQQERERGMSKAGNRHVRAMAIEIAWGWLRFQPRSELSKWYQRRFGTGSKRVRKIGIVALARKLMVELWRYLETGVLPAGAELKTDVRIR

SEQ ID NO: 438661 - protein, 387 aa, unidentified
MPQPNDLSRSLVALDQNSTIIAVVELSHSSWLVGGVVPGIERQPRKKLEPSPERLLALLHRWRDEAVRAGSTITRIALAFEAGRDGFWLARWLAARGVEAHVIHASSLAVSREHRRAKTDRLDTELLKRGFLGWLRGERGHCSMARVPTIAEEDAKRPNRERDCLVGERTRIVNRIKSTLVRLGIRTFKPTLRKAAERLATVHTPEGMPLPPNTLAELQRDIARLGLVVSQIREIEDARRKRLEEAPETGPHAMVRLLARIVGVGAEAADMLVQEVLSRPMRDRRAVARYAGLTGSPDESGARRREQGLARAGNARVRRGMIQLAWRFLMFQKESALTLWYRARTADSRSGTRKTMIVALARKLIIALWRFVTTGEPLEGVVLRPAT

SEQ ID NO: 438662 - protein, 328 aa, unidentified
MRWSTQKRGSIPERKLKPGEAVEFYGRLAGPVLVGMEASGNTLWFERLLSGLGQELRLGDASKIRALEVRKQKTDRRDAELLLKLLQEDRFPQLWVPSLEQRDTRQLLVHRHKLVGMRRQVKNQLQHLALNQGVQQKRKLWTRAGRKLLEELPLTGWTGRRRGDSLQMLDELDGRIAELDAAVQLEANQHPIAQLLQTHPGVGPITSLAFVLTLGEITRFRHSRQVVSYLGLNPSEHSSGGRQRYGAISKQGNPMLRSLLVEAGQSAARWDVELKRAYQRLKHRKHSGVAKVMVARKLAVRLYWMWRTHQSYSATRMQGSPSHSVAAV

SEQ ID NO: 438663 - protein, 353 aa, unidentified
MIHVGIDLHTDNMVNVALNDNAEVVREAKLPTATRSLEDFFSTFDGPVQAVVECTSSWYWLSDWCRANGVELTLAHAKMVKAISYAKVKTDKVDAKTLAELLRADLIPEAYQITHDRRELRELTRGRLRLIQWRGKLQSTLWNQTIKYNVQISGPQWRKLEKLQQWLQPQLPPAANLQAQLMIEQISQVQTHIHRIEEEIERQVPFEETAERLMAVPGLGKVGAWTILAEIGDITRFPSAKQFTSYCRLVPGAKDSGGNHRHKSGNKDGNKYLRAAFGQAAVSAYTHYKVVKKFYRKIKRRSGRPVARAVVAKELAKGVWHMLTKDEEYKGFKGQPVRAASQTCWPQPISPFA

SEQ ID NO: 438664 - protein, 501 aa, unidentified
MKKHKKTKPKPKEAKPLHEPVANAAGIDLGATEIWAAVPPERCQLSIRRFGAFTQDLKALVAWLVECGIRTVAMEATGVYWIPLHQLLSDANVEVYLVNARHVKNVPGRKSDVRDCQWLQYLHSVGLLRASYRPDQAVCETRTIFRYRQNLLKQGGENLQHMQAALDQMNIKLHYVIDDLSGQTGQAIIEAILNGEREPLRLAKYRNKRIKASEETIAKSLEGDWRREHLFVLRMAWQNGKHVQEQIKKCDQELMEYARQLAASTVVAQPSRPLKSFCLKAEPGLTPLNSAAALRPAKPRRKTSKNEPDGPWREELHRFFGVDLTLIPSIGVLSGITLMTELGNDLSAFKKSHHFSSWLCLCPDNETSASKVLHRSTRRSQNRVRQALRMAASSLHHDKSYLGDKYRRLRARLGAPKAITAMAHQLARIIWHMLTYRVAFDIGIFAAQQKDNQTRRLKHLQSNLAKWAINLPQFPHETDLCNQTHATFPLPPSHVIRPCSL

SEQ ID NO: 438665 - protein, 399 aa, unidentified
MTPDDIDVWVGLDVGKSAHHAHALDHDGNTLYDKPLQQDEKAIRTMLGKLSKHGRVLLVVDQPNTIGSLPLTVARNMGIAVAYLPGTAMRRTAQLLPGDAKTDRRDAHVIAWAALKLPETLRDAGPDDETLAALKLLAGHDEDLAHESTRHVNRLRSLLLQTHPAFERALKGERITRDATLALLERYGGPMGVKRAGIEDVKDWAKSNGLRAGRIIDDMFKAIGEQTVTVPGTLMAETIIPSIAHDIKTIRDRRREVGRQVEKLLEDHPLLTVLTSMPGIGVRTASNILLGIGGDIANFKSSAHLAAYAGISPVTGQSGTSIKGERPSRRGNKRLKNALWQTAFVASTKHPPSVAYYKRKREQGKHHNAAIICLARRRCDVIYSMLKNGTLYQEPALVA

SEQ ID NO: 438666 - protein, 368 aa, unidentified
MNTVKFIGMDVHKKTITIAIADHGRQNKPRVYGAIANDLDALDKFCRKMVSTASRLHFVYEAGPCGYGLYRHLTAKGFDCMVAAPSLIPKKSADRVKTDRRDAAKLASLHRAGELSSVYVPEPADEAMRDLSRARQDAVIATKKAKQRLKAFLLRNSIHYSGRSAWSKAYFRWLADIAMAYPAQQVALQEYIDAVHEGLQRVQRLTDQIRHLVLDWRLAPIVSALQSARGVSLVVAVTLLAEMGDLSRFQKPSQLMANLGLVPSEHSSGERTQRGAITKTGNRHVRKALVEAAWAYRMPARVSRLLLKRQQGVPEQVCRIAWKAQLRLCARFRKLTARGKPRQKVAVAIARELSAFLWAMAKQLQPVV

SEQ ID NO: 438667 - protein, 382 aa, unidentified
MNRIIKIGMDVHSTNYTLCAMEPVLDGEDRIFTNIQVTPDYENVIQFIDNLKERLGSSDSYSIECGYEAGCLGYSLYHQLTKAGVKCTILAPTTMLTQQGKRVKTDKRDAVMIAQCLSYGGYHAVHVPTDKDASVKEYLRMRDDHKLALKKIKQQINAFCLRHGYIYGGHKWTIRHLEWLKKLDLSELYRETLNEYMTSYEEQTAKIERFDKRIEELAADSDYHENVRKLSCLLGIQTYTALSLIVETGDFKRFRKGNTYAAFLGLAPGESSSGEKISRTGITKAGNSRLRTLLIEAATGICKGQVGHKSKALCARQAGNPAEVIAYADRGNIRMRSKYKRMIRHEKKRNVAVAAIARELACYVWGIMTNHIEPREEGKKAA

SEQ ID NO: 438668 - protein, 358 aa, unidentified
MNKNSTLFVGLDLGDRWSHLTILDPEGEVVEESRVPTSGGALQRKFSALPPACIAMEVGSHSRWVSQALRDLGHEVLVANARKLRVIFDNPRKGDRADSRTLARLARLDPKLLFPIEHRSPQAQADLDVLRSRDALVRSRTLLINHVRGVVKSTGARIPSSSASSFPSRAAGSLPESLRPALAPILETVRALNLEIRSYDRQIEDLCTSKYPDCQRLRSIHGVGPITALAFVLTLENPRRFEKSREVGPALGLVPRRDQSGKQDPQLHITKTGNTYLRRLLVSCAQYILGPFGPDCDLRRWGLQLAGRGGRNAKKRAVVAVARKLAIVLHRLWKTGEDYNPEHSSQALGSRVPIAQPA

SEQ ID NO: 438669 - protein, 428 aa, unidentified
MTKRTENLTLIHKDRTLIVGVDIAQNAHWARILDGKTSIETGTAFKFKNNIEGFVRLLDKANQAKERTGAEKIVIAMEPSGHYWKTLAAYLLASEVTVVLVNPFHVKKQKELDDNSPSKSDRKDALIIAMLAWQGRFSRCYIPEGVWAELRGYTVVRCQQKRKLNAARNNLAAILDEYFPEYYGVFKEPLGKASLHVLTHFPFPMDIARLTEAELAQEMKKATQNRVGEKRATLLFSKARMSVGVKEGLAAARLRLSHCLSEISFYREQLAQTEAAMEDALGRTGIADILLSIRGIGVVTLASLLGEIGDPNRFENWRQVRKLSGYNLVENSSGKHKGKTGISKRGRPRLRSILYQASLHLVIHNPEFRALHEYFKTRRENPLKPKQSLTAISCKLLRVLFVLAKKRCPYDPEKVLGAYRQQQLKLAA

SEQ ID NO: 438670 - protein, 342 aa, unidentified
MKIHTIGIDLGKTSFHLVGLNERGEVVMRKKISRAQLLRFTANRKVHLIGMEACGGSHFLGRALQEQGHEVRLIPAQYVKPYVKTNKSDYIDAEAIAEAVGRPTMRFVPIKSDDQLDLQSLHRVRERWVMRRTAVINQIRGLLLERGITLRKGRRYVDEALPGILEDAGAKLSSALRLLLAQLKMELEQLDTRVGEADAVIQKTACENEACQRLVKIPGIGPVTATAVIAAIGNGAAFRKGREFAAWMGVVPREHSTGGKQKLLGISKRGNRYLRRLFVQCARAVLQQKTKQSPGLKAWLEKLTSRTHRNVAGVALANKLARMAWAVLATGEAYRAPLLAAA

SEQ ID NO: 438671 - protein, 403 aa, unidentified
MTIFVGLDWGGSSHAVCVVDAAGKVLDHFVVAHDRDGLADLVARLRRHGPPGETPIAIERPSGLLVDALVDAGFVVTPVHPNVVKACRPRYRAVAAKSDPGDAYILADILRTDGHRLTPLRPQSDAIKALRALVRGRDDLVATRLVLANQLRALLESFWPGAAGLFADIASPIALAFLQRYPTPESANRLGEKRMAAFLAQNQYCGRRSVADVLARLRAAPATMAAEAEADAKGELVRAIAATLESLVSQIGKLSSRIEHAVAELPEGKIVMSFPRAGKICAAQITAELGDVRDRFQSQEHLAAEAGVAPVTYQSGKSRAVTWRWACNKRLRAALTCFADNSRHASPWAAKLYQDARKRGCRHPHAVRILARAWLRILWRAWQDGTSYDPNKHPAASLLLTTG

SEQ ID NO: 438672 - protein, 419 aa, unidentified
MAFKILRKNCCGLDVHKTWIFACIGITDANGRTEYKQARFSSFSNGLRDLAGWLAKYGCSDVCMESTGKYWIPVFNILEKTCWVTLAHPKYTKPQKGNKTDRKDAKWICDLYMCGMVKPSFIPPADIRQLRDLMRYRTKLTNMLTSEKNRALNCLTVSNLKLDDVFSNVFGKSSRSIVQHILEHPGEQFDVAPFLDRRCKHSVEEVQAAVDGALSREQAAKLRECLLHIDQLNEHRKTIETEILRLAQPYSHQLELLRTVPGFSAAPLTAVALISEIGADMSVFPSAKHLVSWAGCCPRNDQSNNKVKSTRISRAGCYLKPLLVQIANAVIKSDKYPECKERYRRIKARRGHKKAIIAVCRMLLTAIWNVLSKLLPYSAKGYLEDKLTEHPVVISKSQGLELLRKRGYIFKDELSADSG

SEQ ID NO: 438673 - protein, 373 aa, unidentified
MMKWTPPCDLIGIDVPKSLLVRKTKEEPVEKHTVVAVDIAKVVFDVAVSHEPGRVSERKRLSRAAFSLFLAQLPASTVVMEACGMAHYWARKVEELGHRVVLLPPHQVRPYVTRNKTDRTDAKGILEAYRNADIRPVPVKSVAQQVLCSLHRFRSGWLSARTAHINTLRGLLRELGLVIPLGAEKVLPLVRSLIADADSGIPDALRPVLATACDEIEALSDNIKMTERQLEALAEQTPAVQRLRSVPGIGLLIATALVAFLGDVQRFPSGRHLASYLGLTPREFSSGMKRRLGRISKRGDAYLRMLLIHGARSILCHAKKAKEHDRLRTWALALEKRTRHNTAAVALANKLARIAWAVWKHDKDYVSTLEQAA

SEQ ID NO: 438674 - protein, 334 aa, unidentified
MEQITTVGIDLAKSVFSLHGVDASGKMVLRRTVRRDRLVETVASLSPCLIGMEACSGAHEWGRRFQEYGHTVKLMAPKFVAPYRKSDKNDGNDAEAICEAVTRPSMRFVPVKSVEQQALLALHRVRQGFVVERTAIINRLRGLMTEFGVVLALRSVTVRRQAAQAAEALPELARGAIGDLLEQLRRLDERIEAYDKQIEAQARLSESARRLMKIRGIGATTALAIVATVGNAREFKNGRQFAAWIGLVPGQYSTGGKARLGHISKRGDAYLRNLLVQGARSVLQTASQHSDRLSRWALELQARRGYYRTLVAIANKNARIAWALLAREQTLRQS

SEQ ID NO: 438675 - protein, 344 aa, unidentified
MNFSTVGLDLAKNVFQVHAVDDGGEVIVRRALRRRQMLPFFAKLEPCLVGMEACGTSHYWARELSGLGHRVKLMPPAYVKPYVKRGKTDAGDAEAIAEAVTRPTMRFVAIKSPEQQSILALHRTRDLLTGQRTQLVNMIRAQLAEFGIVLPKGIQHALKLVDRLLVGEVPDIPTLACKVVIILAEQIRDLELRLGELEKGLTASSRGNEMVQRLRTIPGIGPITASALAATVTDPHQFRSGRQFAAWLGLTPRANSSGGKERMGRISKMGDQYLRRLLVIGMTSQLQAARRKPDAHPWITSLLTKKPHKLVAVAMANKTARIAWVIMTRDEIYRAAMPATEDTA

SEQ ID NO: 438676 - protein, 377 aa, unidentified
MNRLNENTKFIYCGFDVHKDTNSACCFDPQTQQYFGQTKFKATYRNTINYLQRIKQLYDEEVLIICGYEAGPTGLGLCREIQKAGFSCVVIAPTTIRRDNSKVKTDKRDAKLLAETLAYHTYSPVQLPDEKIEAMKEYTRARNSKKLKLKKAKQELLSFMLRTGKVYPKKQNEGNWTSKHFAWLKGIQYEDPWLQESFEVYLTTVRNLMVEVQFMDERIIQMADDEEIKEKVDRLICISGIDIMTAVSIVVEIFEFTRFQTARAFAHFLGLCPGEDSSGLKEKRVSITKAGNSVVRKLLTESSQSIKKTSKVKSKRIIQRQKGASPMVVAYADRAVKRIRTKMFMMERRGVKTNVATTAGARELACFIWGMMTDNIA

SEQ ID NO: 438677 - protein, 341 aa, unidentified
MAGVDTHGETHHGAVIDEIGRELADAEFPATPAGYRKLVAWLTRHGQLQKVGVEGTGAYGAGLARHLRSMGVTVVEVDRPDRKTRRTKGKSDPLDAYAAARAALNGTATGTPKSRDGLVEAIRTARMARRGAVKARTQAMNQLRGLLVTLPADLREQLRHLSATALIETCARLRSGLIGDALTASPDPVLATAKATLRRLAHRQQLSEEIREHDADLVPLVAAAAPKLLLVQGVGIEVAGQLLATAGDNPDRLASEASFAHLCGVAPIPASSGRIRRHRLNRGGDRAANNVLYTIVLTRLRYDPRTRANFERRTKEALSKREIIRCLKRYVLREVYVVLTA

SEQ ID NO: 438678 - protein, 345 aa, unidentified
MKYYAGLDVSVKETSVCIVDERGTIIRERKTVSHPADLVALLSDPQLHLERVGLEAGPLSQWLYEGMAKAGLPVTCIETRHTKAFLKAHTPNKSDRNDARGIAQMMRVNLFRPVHVKTPTSQKRRAMLTARKMLQEKAIAIENDVRGLLRNFGLKVGVVGTLKFEERIRELVEDAPDLAAIMEPLLAGRRKLREEFAKLDRRVLKEAKYDPVCKRLMTVPGVGPIVALAYTSTIDIPARFRNSRSVGAVLGLTPVLNQSGESHRIGHVSRCGDAMMRGLLYEAAQVLLTRVAKWSWLKAWAMNVAKRRGVRKAIVALARRLGVILHRMWCDESDFRWSRETLPAA

SEQ ID NO: 438679 - protein, 343 aa, unidentified
MKISRVGVDLAKNVFQLHGSDRQGKPVWKRRLTRDKWLNTLVDAIEPGCEVGMEACTGAHHWARELQSKGFTVKLIPPQFVKPYIKSNKNDAKDAEAICEAMSRPSMRYVQVKQVYQQDIQAAHRIRSELMNHRKAKANQLRGLVAEYGLVAPKQYARLRAAVPDWLEDAENGLTDLFRRLLHGLWEDLTTLDKRITEMDKEIERLAKEDPMAQRLQQLRGVGPLIATAMVATIGDGKQYKHGRQMAASLGLTPRQYSSGGKERLLGISKRGDVYLRTLLIHGARSVITHAKHKDDGLSRWVKDLGARRHTNVVAVALANKTVRMAWAMMTKEVDYDPTLAAA

SEQ ID NO: 438680 - protein, 359 aa, unidentified
MRALYAGFDLHGNSNYLGIIDGDGKRVFGKKLSNDLGWIREVLVPFEAEVVGVVVESTYNWYWLVDGLMGEGYKVHLANPSAIQQYVGLKHADDKHDAFWLAEMLRLGILPEGYIYPKEERPVRDLLRKRGHLVRLRTSLIISLQNILSRNLGRKVNVNDVKALKEDRVTPLLESSEDLALAGRVSKEAIDFLTHQIRRIEGVVEKRIELRKEHRYLLTLPGVGKILALTIMLETGPIGRFVTVGDYVSYCRKVPSQWTSNGKRKGSGNKKNGNKYLAWAYAEASELARRFYSEPRAYYHRKMQKTNAPVAHSALAHKLARAGYYVMRDQVPFEAQKLFGRGRGWNGEPEVGLVKSHET

SEQ ID NO: 438681 - protein, 420 aa, unidentified
MKEWKEITHYAGFDWARDHHAVVIVNSQGEIVADFEFEHSLEGWNKFREKTTAWPNLAIAIETNEGAAVDQLLQRDYTVYPVNPVASESYRKRKAPSGTKTDHFDGWGLADALRVDGQAWKTLQPMDPLSQQLRLLCHDEVALIEQRTALVNQLQQALVEYFPAALKAFDDWICPFTWDFIIEFPTPQALVKAGKRRWEKFLHTHKLWRPETAPTRLSIFAQADQFKASDPITQAKSQLAVTLCKLLRTLQQQLSKYRKQIEALFQSHPEHDLFGSLPGAKKVLAPRLLATIGTDPERYGSHQVLQCFAGTAPVSYQSGQISKAKIRWACDKFLRHTVHLWSDCFRKASVWGQTYYENKRKQGMSHACALRCLGQRLLKIVFKMLIDKKPYDAELHARNQKKHGSWVLDLVNETAATKTR

SEQ ID NO: 438682 - protein, 410 aa, unidentified
MAERFVGIDVALREHRIAVLDRDGEAVGPSFTIAASQDGVATLLRTLAARAAPAAQTLIGLEASGHLWENLEAALVGAGYRVLVLNPLQTRRSRDVVRRKAKTDDIDAHLIAGLLRSGVAQASYVPDEPIQSLRELARLRARLLADRQDYLRQLIAQLDVVLPEHHAVLGDLLTARARGILAQFPTAQHLAHASPRAIRRAAEDAGARDFSLDDATDVRDRARRSLYRGKAAAARAHVVRTLVSQLERLTSAMDEVDRAATTLLPPSEPGAGPSDAELLQTIPGIGPQTAATLIGELGALSRFTDARALVAYVGFYPVISESGDHAAPPRLSRIGPRIARHSLYLAAFNAVRHSGEWRTIYLRKKAQGKTSKQALVVVAVKLLHAVYAMLKHREPYNPSRLLAAPATIGT

SEQ ID NO: 438683 - protein, 342 aa, unidentified
MKSTTIAVDVAKEVLEVAVSVYPGQVSEQKRLSRAAFMKFCTDQPPATVLLEACGSAHYWGRRLQSIGHRVVLLPPHATRPYVFRNKTDRTDTRGLLEAFRNEDIHPVPVKSVSQQALTALHRLRSTWLATRTARINTVRGLLREFGCTIPIGAHHVLAKTWDLLADADSGLPDALRPALAAACTEIRDMEGRIHVVEDQLQALADQTPAVARLRSIPGVGLLTATALVAFVGDVQRFPSGRHFASYLGLTPRERSSGLVRRLGSISKRGDVYLRMLLIHGARAVLWAARKRPTPDRLRVWALHLEKLRGHNKAAVALANKLARIIWAVWKHDVDFREVTAA

SEQ ID NO: 438684 - protein, 381 aa, unidentified
MTNVSATISNKQSIYAALELSKNSWLLAIQVPGRDNPSLHPIKGGDAEGLMAKLDAARQRVAKDAGQTPAVTLCYEAGYDGFWLARFLEQRGITCQVMESASLQVNRRARRVKTDRIDVESILHTLIAWCRGERHVCSMVVVPSVEEEDLRRCHRERDRLIRERTAHINRIKGLLFGQGIRGINVKSRTKTLKPAELVTGDGRPLPERLGREISREIERLAQVQAQIVAIERERDHPATSCEATERKRHDLLRLKGLGPALSSTLTREVYYRQFSNRRQLASYIGIAPSAYDSGEGHRSQGISKAGNRLARVAMVEAAWLWLRHQPDSALSQWFHDRTQGQKGRIRRIMIVALARKLAIALWRYLETGLIPEGASLKSRVR

SEQ ID NO: 438685 - protein, 386 aa, unidentified
MMLIGVDPHKSTHTATAVEPGTNSEVASIRIEATLGEYRRMLTWAARWPQRRWAIENAEGLGRHLASWLLARGEEVVDVPSTATARVRQLSRGGGRKNDRIDAAAAACVAAAQGDYRAMVAEGTADALAVLDEHRVNLAQARVRAVNQLHALLRALLAGGAPTDLTAANASALLGSVRPKGEAERARKAVARDLIAEIRSLDARLKSSCKAIAEQVENSGSSLTEIVGIGPIIAGRIIARTGAPSRFPNSGSYANYVGAAPIEVASADHTRHRLSRTGDRQLNSALHTAAITQIRMTGSRGNLYYLTKIAEGKTPREARRCLKRRLADHVWRTMIADEHRLAASPGGHPGATLQSSAAGTTPSTSSSEKSLPGPATEQSMRPRPAS

SEQ ID NO: 438686 - protein, 312 aa, unidentified
MVTIGLDPHPDSHTVAALDENGATLTSLTVSNDAAGLARLHQFACSFPKRRWAVEGAANRFILPFASELLAHGEAIYHIPPNLTSQYRARLSRKKNDVVDASNAARALLANPELPAFRPSEGQREFQDLTRTQRRLSEQLKANRMALQALDPGSSARSALTQVIHVLEEQLAELSKQMKTLVKTLAPALLELLGVGPVVASVILGEVGNIRRFTNEGQFASYCGAAPVERGSGKNSRMQLNHGGNRRLNWALHIIALTRSRCDERTRTLLAKLKARGKTQRASLRILKTYIAREMFRYLKCSPSPALAAFAT

SEQ ID NO: 438687 - protein, 316 aa, unidentified
MTEAGGFVGIDVAKAELEVVVRPSGARWTVTNNASGLAQLQERLQAAAPSLIVLEATGGYEVAVVAALATAALPVVVLNARQVRDFARATGRLAKTDAIDAGVLAHFAEVVRPPVRPLPDAMTQDLQAWLTRRRQLVDMLLAEEQRRSRAPRAIQRQIDQHVRWLRAQLGAVEKDVAQTLRESPVWREKEDLLRSVPGVGPILTTTLLGDVPELGQLNRKHIAALIGVAPLNRDSGTYRGRRAVWGGRARVRATLYMATLTAARYNPLIRAFYERLVAAGKPKKVALTACMRKLLTILNAMIARRTAWKPPAAVSA

SEQ ID NO: 438688 - protein, 399 aa, unidentified
MPTLWAGIDAGKRTHHCVVIDGDGAVLLSAKVSNDETELLDLIATVIEIGGGEVCWATDLTDGGAALLIFLLAAHGQQLLYIPGRVVHHAAATYRGDGKTDAKDARIIADQARMRTDLQPVRIANQIAVDLRLLTSHRLDVVHDRVRAINRLRATMLEYFPALERVFDYKKNKAALVLLSHYATPESLRRIGVTRLAAWLKARGCRNSAGVAKKAVDAAHAQDTTLPAQAMGSALVTKLAATIAAIDEDLARIDTEITEHVARQDSAQLLLTMPGFGPVLAATFIAQIGGSLDAFENVDRLACVAGLAPVPRDSGRISGNLHRPRRFNRRLLRTCYLAALSSLKNSPSSRAFYDRKRAEGKSHKQALIVLARRRINVTWAMLRDGTAFVEPAARLPIAA

SEQ ID NO: 438689 - protein, 331 aa, unidentified
MFPVGIDVSKNTLDLCMLYDGIKGRIKTRNIQNNRHSVENILRWLRLQHCGPEDVHVVMEATGVYHERLATELHDAGFRISLANPHRSREFARGMGIMTKTDKVDAYMLACYAFLKKPHRWEPPAPEIRYLGALPRRRDVLLGDALREENRLEKYLSTDTPADIISSCRRMAQLLREEVSNIERQIKAHIKASPALRRDYTLLTSIKSVGPQLGMHMLVVLRSHNFVSAEQAAAFLGVVPIEKRSGTSVRSRPRMSKIGPPQLRAKLYMSALCGKIYNKRMRNIYDEMCLRGKPKMVAIGALMRKLVHWCYGVLKTRTVFNDEDLKPVLST

SEQ ID NO: 438690 - protein, 344 aa, unidentified
MLDDAECLVGELRVNADRWQRDRLLRFAAPFEPRTWAVEAAGGLGALLAQQLVAAGECVVDVLPTLSARVRLLDSGRTDKSDPHDARSAAIVALRHAPLRPIRPVDHSAVLRLLANRHHDLTASRTRTICRLHALLCLLIPGGSSGRLSAQRAGKVLRGLRPIELVDIERKRIALELLADVRRIDDQVETLAKRTAVAVSASGTTVTDVYGIGPIGAAINIGHTADVTRFPSAGHYARYNATAPLEASSGPRVRHRLNPRGNRQLNHALHVAAITQVSHDTPGRVYFDRKITEGKTRKEALRALKRRISDAVYRQLVADTRPWLEGPGRTDGNDSKASVTGSAP

SEQ ID NO: 438691 - protein, 359 aa, unidentified
MKIVGCDFHPAWQQVAFFDPETGEITELKLLHGDGEAERFYRVLESPALIGIEACGNSQWFIELAESLGHVVWIGDAAQIRASYVRRQKTDRRDAGHILKLLMESRFPRLWTPTAAQRDLRQLLIHRHKLVEIRTRIKNGLQHLALNRGVQKKSALWSVRGRACLEKLPLAGWTARRREDLLRLHGELDRHVNELDVAVNLAAKEHPQARLLMTQPGVGPITSLGFVLTIGDVSRFRHSNQVSSYLGLIPREHSSGGKQRLGAITKQGNRFMRQLLVEAAQSVTRLDEGFRRQYLARCHHKAKGVAKVAAARKLAVRLYWMLRQKVGYPEIALIESSSRVPLRGESHLVNLNERSRTQQ

SEQ ID NO: 438692 - protein, 421 aa, unidentified
MKTWPEYTHFAALDWADDHHDVVVVDARGQIALELTFPHTAEGWQQLAQALAPWPGLPVAVETNCGPAVDQLLQRGFTVYPVMPKAAARYRERQRPSGSKDDRHDAGSLADALRTDGHGWRALSPLDPLTAELRTVCRDEITLIEERTALVNQLLAALKEYYPAALEAFDDWTQPFAWAFVIAFPTPAALQQAGKRKWEKFLHVHRLWRAETAPARLALFARAAAFAGSPAITAAKSLLAVALARLLQALQAQLQTYRQRIDELFARHPEHDLFGSLPGAGTKLAPRLLSELAGTDWQDVPTVQCRAGTAPVTYQSGQVKRVQVRRACIHWLRATVHLWADESRKKSVWAATYYQAHRDKGQSHACALRCLGQRWLEIIGGMCRTRMPYDAEKHLQHLQAHGSWVLQLLNPAPAAAATVAT

SEQ ID NO: 438693 - protein, 408 aa, unidentified
MQVLYPRCAGLDVHKDTVVACVRCVSEPEHHETRSFATTTRELLALGEWIASHGCSHVALEATGVYWRPVWHVLEGQVELVLANAHHIKNVPGRKTDVNDAMWIADLLAHGLIRSSFVPPQPIQELRDLTRTRKQVVREISQHSLRIQKVLEDANIKLGSVLSEVLGVSGRAMLGAIIEGERDPHKLADLAHGTARHKHDALVEALHGHIRPHHCTLLKLHLNLIIALEHTVAEVDAAVGKCLDPIRQRARLLTTMPGVRDTVAEVIVAEIGIDMTRFPTPGHLLSWATMCPRNDESAGKRRSTRLLKGNNWLKTALVTAAWAAVRTKTSYLRAQFLRLKARRGAKKAIIAVAASMLTAAYFILRDGVPYRDLGPNHFDRQQRGKTVRRLLRRLHDLGYNLPPQHQPV

SEQ ID NO: 438694 - protein, 424 aa, unidentified
MQNTAARKRKQVPEGYLVVGVDPHKKRHAAVAITQDFTTQAKFKFDNTREGLEAMLDRAKVEMVKSGCRGVMFAIETGGHYWRNVAYFLYEHGIPFRFINQFTLKRRREGKDLNRRKNDYRDSEVAAQLLCTGEFTESKLPQGVYAELRTAHNAYRRLVKETTRITNLIKGLLDALFPEFTQVFKDPCALTALSVLSTCPIPSVIAGMTEDEFEVTIEAQHKGRRLMRKKLRALHYLARTSIGIDAGARSVSSEIAFLVDKLELIRQQICIIEGTLVRLVDETEEGKYLLSIRGLNYIAVAGLLAELGCFKAYRSAKQMIKMAGSNPTESESAGKKKSRTPMSKQGRPVLRYCAWTSVIPMLRFNPDFRAWAKQRRERPVHANPLGGREVVGAALNRLLRLAFALVKNQTYYQVSKPELTLVAV

SEQ ID NO: 438695 - protein, 438 aa, unidentified
MSENILSSKNLARWQQACRRPEMLKVMVDTAKVHHVAAMAAAGQVLCRRLRFTNSREGLERLVRQIQVCRARGECTEVLIGMESTGVYWKGIWAQLERLGYALVCVDPKAMHHNRKTLGGNGSKTDQLDALCGLDLMDQGKFLLPVRREPELQAGYQMMKHYLESRERAGAIRNQLRSLLHLAFPELNARIKKLDGKTALDFLQRNPTPASIRQLGPKRFLRRWRYPRGYWGKRRMEQLYELAKSSIGLPDGSGALLVEIRMLARQLGRQLLQQQSWFEKAMGFAQGRPELALLQTIPGIKEKCALGLLTAVGRPQDFDNAKQWVKLAGLDVRLYTSGESVRRREAISHQGNPHLRTWLYLASLNIVKKPGPFQQLYRQRQEASPGKGAKMRALTAVSDKLVRVLFAMLRDQRAYDPEQDVQTAQAYLPKGERNERAA

SEQ ID NO: 438696 - protein, 428 aa, unidentified
MSPIHPSHEAQFAAVVGIDWGDKKHAWSLLPVGSDQRERGEIEHTPEAVESWACMLSARFNGQPIAVALEQSRGALVFMLAKYAHLHLYPIHPRAAAQFRAALYPSGAKDDPVDGDILLELVLHHRAHLRPLQPDTEQTRLVQHLVEARRRLVNEKTRQVQRLTDKLKLYFPQMLSWFEKVDSPLVGALLLRWPTLEDLQKARPATLRSFLTQHNCRSQELIDERLKQIPHAIPAIRDVAVIQSAAGMTQILVELIATLRQGIDKLEKQIGQAARAHPDFPIFDSFPGAGPALAPRLLAAFGSLRDRYAAASDVQKFSGIAPVMERSGKTEWVHFRRACPKFLRQTFHEWAGHSIAFCEWARLYYEQKKRGGKDHNAAVRSLAFKWIRIAFRCWQDRVPYDDARYVASLHRHGSPLAAALAVKKSDLI

SEQ ID NO: 438697 - protein, 371 aa, unidentified
MEHTRFVGLDIHKERISIAVAESGRSGAVEYLGEVANDPAAISKLCDRLGRPGRPLAFCYEAGPCGYGIYRQLTSLGHRCDVVAPSLIPMKPGDRVKTNRRDATMLARLHRAGELTPVWVPDADHEAMRDLIRLRSVVRQIVTRTRQHLQGFLLRHGRKHGQGTAWRMAYRRWLSTLAFQHTAQQIAFQDYVDAVMDAERRLQRVEEQISCLLPEWNLRPVVDALQAMRGIALINAVVLVAEVGDFTRFSNPRQLMAYFGLVPGEQSSGETIRHTGITKTGNSHARRALVEGAWAYRMKPRIGRHKVDRIEALPKIVRDIGWKAQVRLCARYRRLSARGKNANVVNIAIAREMVGFIWSIACTIQSAPRTA

SEQ ID NO: 438698 - protein, 363 aa, unidentified
MVEAKTRYVGIDLGKKDYTMSIIGRNGKMSIHLGKTTDKGREALYKLLEKNDKVALEAGNLSFIMAGEIINRVGCEVRVLNSAKLPFIWDAPTKTDKEDAMKLAHLIEERRDEKLPIVPLPSEEELKMRKTLASYRRVVKNRTREINLLHAIFVHNGITTIVRKNLATLERRKEAVQLLNGYEREEAQWILKHLELYEQQIIELKTKMQNETKNNEDMKRLQSIVGVGPVIAYAFIAHIGDGSRFSKGAQVSNYIGFVPKLDYSGTIQRNGHITKRGNAYLRGLLVQAAWTAVKSKKGGALRTRYNFYTLQGASKKKTIVSIGRRMAELMFSVLRNKTVYEPRIWSGPKDSPVKIIYGEPMSA

SEQ ID NO: 438699 - protein, 362 aa, unidentified
MTSIASPTTRVVIGGVDTHGQTHHAAVIDDIGRHLGDREFPANPAGYRALAQWVGGHGTLTTVGVEGTGTYGAGLARHLRTIELTVVEVDRPDRKSRRAHGKSDPLDAYAAARAVLSGSATGTPKLRDGHVEAIRALRVARSSAVKARSQATNQIKALIISGPPELREQLRHLTTTKIITTCARLRPGHQLSDPAQATKTALRRLARRHQQLSAEISEADHDIAQLVAQAAPDLLTLRGVGPEVAGQLLTSAGDNPDRITSEAKFAHLCGAAPVPASSGRTHRHRLNRGGDRHANNALYIVVLNRLRYDPRTRAYAERRTQEGLSKPEIIRCLKRYVAREIHRVLVPNSAAQNQPGQPLDSA

SEQ ID NO: 438700 - protein, 323 aa, unidentified
MSTKATKKRRSFIGIDVSKKLLEVGVHQSDYHFRCPNEPKNFPALITELISLRPARILLEATGGLERALLQALHAAGLSVVVVNPRQVRDFAKALGLLAKTDRLDARVLAHFAAATQPAIRPVKAQQETELDALMGRRTQLSDMLVQEKNRRGSAATKDARDDIEAHIEWLEERIQELDEKLKEQLKCSAVWQQKDKILQSVKGIGFVTSMSLLADCPELGQLNRHQIAKLVGVAPLNRDSGQQRGARHIWGGRAQVRGKLYMATLAAIRFNPVLKSFYQRLLAKNKLKKVAIVACMRKLLTIINVMVRENKLWNVKAQPVSA

SEQ ID NO: 438701 - protein, 335 aa, unidentified
MKHYAGIDLSMETSHICVVDADGRKLSAVCVDSTPEAIAAALECYRPVDRAVIETGRMTLSIALGLRELGVAIICIDARQAHQSLKAMKANKTDPHDAAGLAQLARTGFYKEVHVKSPAAHGVRSVITARGHLVEARVRLDNTIRGLCATFGIRLGIGQGERFLARMRVAASIPGLGEAVASLLRVRERLVDEIRQLDHQIKAISIASPACQTLMSIPGVGVQTSAAFAAAVDDASRFKRSRTAGAYFGLVPRRHQSGELDWTGRITKQGDGTVRKLLYEAANSILTRTRQTFALKSWALKIAKRRGLRKARVALARRLAVIMHAMLRDGTLFEA

SEQ ID NO: 438702 - protein, 386 aa, unidentified
MRGKTFIPQDYDVFAGLDVDKRSISVTFTNHEGLIRSLRMPYSVEHLVNHVRKHFPDQKIAFAYEAGPTGYALYDGLMAQAYPCLIASPSMIPRAPGQRVKTNRLDSVGLSENLRGGQLRSIHVPSPLYRELRHLTQLRDTFVCELVAMKLRIKSLLLLEGIRFPPAPPGSQWSSMVKAKLRQLPCSGTVRFKLDQLLDSLAFCETQVLKTTREIRRFCQHDAELSQCIKYLMTVPGIGWIVASQLLARIGDWREIQNIRQLAGFLGVVPTEHSTGETIARGSITHTGDGRLRSKLIPASWSAIRQDGELREFYRSVCQTHPRDRAARVAIVAVARKLTTRISAVLMQQRPYVVRDQVPSAPVTQAETVPQGTPRRQAEPGATNDS

SEQ ID NO: 438703 - protein, 343 aa, unidentified
MLTKNIVGIDLAKNTFQVCHISTHGELLSNKAMSRQKVKEFLAKIKPSVIAIEGCSSSHYWGRYAEQFGHEVRIISPKKVKGYLEGHKTDKNDALAIANAAIQIGIKFSQPKSVEQQTLHSLETSRQFLTRSIVSLGNHIRAIIFEYGISYPKGEKGLRASVEFVLNRESDLPQNLINVLSVLWEQYKHQKEELKALEKEKNTLTRQIEPCNRLMKLEGVGETIAAMLYSTLGDGLQFKNGRQASAFIGLTPKQYSTGGKVVMMGIDKYGGVKDLRSLLYLGAMAYISRLSEVPVTQKDLWLLKAVKRLGFKKACIALANKTVRTAWAMLRNQTKYEPVLIVN

SEQ ID NO: 438704 - protein, 386 aa, unidentified
MSQPTETLPRPVDYDQTLVLAIELSNKSWVLAAQVPGLPQTKAKRTIEPDKDALLAAIEGYRTRAAAAGYNVTRVIATYEAGWSGFWLARWLIAQDVEVHVVQPSSVPVDRRMRRAKSDGIDAELLLRTLLAWVRGEPRVCSMVPVPEETDEDARRCIRERTELVHERVRLVNRIGAVLATLGTGDYNPLLLSRHRRLAELRTGLGAPIPPNALAKIQRLLARLELVLTQIAELEHERDTILQDAAPDQAGRMIQQLAGLRGIGVQTATVLVREAFVRHFSNGKALGSYAGLASTPYSSGGLDREQGIGKAGNRRLRTVMVELAWVWQRYQPTSAQVVWFRERVGSTGRRIRKVMVVALARKLLIALWRFVIDGVVPEGAVMKPSI

SEQ ID NO: 438705 - protein, 290 aa, unidentified
MQKTSSSIVYLGVDIGKATHAWTLVDDCGHLLEEGTVTNTPTHLSVFVKRFVKAFPTLLVGCEATGSYYENLAIAFLKKDVEVRVINPALTSTKALRSSMRVTKTDKQDARGIARKLQERQGKIGTLFAWNPEERRLQAMARHLQFLKKQRSALKVRTLVMQGRPFEKIEVNTDLFDQEIVRLELTLLQESKHLYAQAMNTLVSIRGVSENSVALILAETMCLKRFKTSKAFAAFVGLDPTLKQSGTSVHGKSRLSKAGSPHLRSKLTWSAKLLVQWNPRFHTCFENALS

SEQ ID NO: 438706 - protein, 373 aa, unidentified
MPKYSTAFGMDVHLRSTTVCALDADTGEAVTRRFPGNPWGEIAGWMDGFPGPSLAAYESGYLGFAPQRELAGLGVECVVAAVSKIPRSAADSASKNDRNDAARMAKAILAHDISPVWVPSPEIEGIRDLAGAYDGATARLATAKQRLLAFLAKRGFVYGGTTPAGNPRKYWTYDFLRWLDKVRPEDDGGVRTLAALRNEVEAAAEARADLLSEYRAAADASPIAAEAAALQSIKGCAFALAAAFSAEVGDFTRFRSGRQVTAYFGLAPSQRSSGGSVRLGGISGAGNALVRKLAVEGSWCYAAARHQPKLMPRDTGVPLEIRMHGRKGSERLLRRREEMLARGVPAAKANAATAAELVRWLWALGMMCREGAE

SEQ ID NO: 438707 - protein, 354 aa, unidentified
MKRTTKYVGLDVHQASTVASVREASGRVIARSVLPTEGGALTEFLRGMRGAVHLTFEEGTQAQWLHDLLTPLVDRVVVCDRRGAPRQGNKGDQVDADQLSELLRRGSLRAVYHGSPHLATLKELTRAYRNVVEDATRVMLRLKALFRARGIPTCGTKVYQTRDRAHWLAQLADRGARFRARVLYAELDRLRMLRPKVKAVMLAEARRDPAWAVLRTIPFLGPVRVALLLATLGTPWRFRTKRHLWAYAGLAVVTHSSADYLVVGGQVMRRRRAPRTRGLNRNHNRVVKDVFKGAATAATARPGALHDFYHRLLTQGMRPELARVTLTRKLAALTLRLWKRGERYDPTQLTMPAR

SEQ ID NO: 438708 - protein, 348 aa, unidentified
MMLIGCDYHPSWQQICWLDTATGETGEKKLEHASGEAQKFYRGLPGPALIGMESTGNCQWFVEMATTAGHDVWIGDAAKIRAADVRQQKHDRRDAALILKLLLEGRFPRIWTPSGEEKDLRQLLIHRYKLVRIRAQVKTELQHLAMNQGITKKRKLWSKAGEKVLRELPLKPWASRRREDLFRIREMLNGQIGLLDQAVVEAAEKNEKARLLMTQPGVGPVTSMAFVLTMGDVSRFQRGKQVASYLGLIPREYSSGGHRRYGSISKQGNRFMRMLLVEAAQGAVRCDPGMRSEYLHRCHRKAKGVAKVAAARKLAIRLYWMLRTNTGYPEIVRVESSWRNDPPKSDSP

SEQ ID NO: 438709 - protein, 386 aa, unidentified
MKYYTSTTQFNCGIDLHARQMYVCVMDRDGKKLVHTNVRNNDFAFFLKLVAPYRHDLTVCAECMFGWYWLADDCQAAGIHFVLAHALYVKAIHGGKNKNDRIDSEKLCHLLRSNLIPPGYVYPAEKRPLRALLRQRILYVWNRSELLSRIQSHQLAHNRPTCRQTPYHRQPWEQQLMASEPDPVRQLALQNDLAIIRHYDTQLATLEKDLLQLTKQTASRDFTVLQTVPGIGDYLGLTLLHEIGDIARFPTVKDFLSYCRLVKGTVASAGKIKGLRGAKLGNPYLRWGFQRRGFFSFSAAAFHFVINSCALNGTRPRLHLPSNVTITFPRSMPAARVGGRMTEISRCSPLPARLSFGPGCRAGSRAIALPPSRAETSRDRSAEWLH

SEQ ID NO: 438710 - protein, 473 aa, unidentified
MPRRKSPSAPLDTATQSLVQTLNPHAAGIDLGATEHWVAVPEGAVPPTAQRIHGSVPARVRRFGTCTADLHDLADWLKKVGVDTVAMEATGVYWIPVYDLLESEGLRVLLVDPHQIRNAPGRPKTDVKDCMWIQRLHSLGLLSAAFRPDQAIRVLRSYQRHRHSLIEDQSRFILRMQKALEQMNVKLTETVTHITGVTGMAIIKAILAGQRDPQQLAQLRQPGCKHSKEQLARALEGTWQAEHLFALQQSLQVYEYFHEQIVDCDRHIETHLQTMALPVPPQPLPSPRQRSRSKNALHFAARSLLYEMAGVDLTAIEGIEANTAFVILSEIGTDMSRWRNERAFGSWLGLAPNPKKSGGKLKSARTRPGVNRAAQALRVVAQTLHRSKSALGAFFRRIAGRRGVPKAITATAYKLARIIYALLKHGQEYVQQSVAEYEAAYRARVVRKLQQKASELGFELREKEQRTAETTAQ

SEQ ID NO: 438711 - protein, 332 aa, unidentified
MENFYFIGVDVSKKKLDFCVMFEGKVLREDQVSNHQQAVAGLIGELKNDFGMDNEQFLICAEHTGQYTFPLVCACKSADCRLWLENPSQIKYSSGIQRGKNDKVDARRIAIYAARFGDRVRYYDRPTEQIERLKQLERERVLYSTDLAKYKAQLKDQKGYMPEDIYRKKAKRLESLMDELQTAITSIAAEMEEIILSTEVLDRQMKLLMSIDGVGKVIALNMIIETEAFTRFDDTRKFCCHAGVAPFSYTSGSSQHSKNKVSHRANKNIKRLLHMAAVCITHRTGGELKEYYLRKVDEGKNKMLVINALRAKIVARMFAVIKRNEFYSPIYN

SEQ ID NO: 438712 - protein, 337 aa, unidentified
MSYLGVDLHTNSFTVCYRTKQGKERMGTYAIDRMDSFRKTLRRTDHLAVEATGNTAWFIEQVRSRVRKVVPVDPNQFKVIRKSVKKTDKHDARMLALFLSKGMLPEARMKQKENAQLHSLATTRDKLVKQRTALVNKIHNVLNSYGLKWKKETLTTEKGLKSIMVYEWDPIVRIELEVLADQIRSLTKHIKRLDDDLVEHGRHLKGHENISSIKGIGDKSASILLSVIGNVKDFASEDKLAAYLGIVPRVKDSNETIRHGRITKHGSTLARTTLVQCALSAKRYSPYLRAYYERIKRTRGSGKAIIATARKLLGIIYKTLVNGWVFEDFPNFVIAKT

SEQ ID NO: 438713 - protein, 444 aa, unidentified
MAMSKSKEAAKLEVVHPNAAGVDVGGSSHHVAIRSDAPGKTVNEFGCYTKDLHEMADWLLSSGVKIVALESTGVYWIPVYEVLERRGLEVLLVHARHVKGVSGRKSDVLDCQWLQRLLSYGLLRGAFRPQDQMCELRELNRLRTRLLREQGRSVQHMQKALTVMNVQLSNAISDVAGVTGQKIVRAIVAGERDPQELASYRDARIKASAEEIAASLQGNWRSEHLLALKVALATFDFCGQQIEQCEVEIERAMQALQRFMQEPQKAKKRSKAKNAPKFDVRERLFKMCGVDLTRINGIDVSTAMTIISEVGTDMSRFPSEKHFASWLGLCPGTNISGGKRLGAASKHSANRATVALKQAAAALRTSQSALGAYFRTLCGRMDKAKAVTAAAHKLARLIYAMLTKGQEYVDAGQLYYEERYRERAVRQLQRRANKLGMLVVPAGS

SEQ ID NO: 438714 - protein, 315 aa, unidentified
MAMRVSLSKPIVGVDVAKNELVIYQADNDLLKEIPNTKTSIKQWLNTLPGTVAIAIEATNIYHLDFADLAYEAGCAIYMVGGYELKHYREGVKIRAKTDALDAKLLARYLKNEAEELHPWTPPSPLYRQLLSLFRRRAALVQARVGLVQSWSNEPLLKAAFAEQVKSMQQLETLIEKTINDQLKEAGLLGQLKRCLKVEGIGFLTGARLITAFQRGDFRNADAFIAFLGMDLRVSKSGQKDGRRSLTKRGDPEARRLLHNAAMSASRTKAWKGFYEAQRARGFSTTEALVMLARKLARVAFALLKGQSEYQSKVS

SEQ ID NO: 438715 - protein, 401 aa, unidentified
MWYAGLDWADSHHDIVVIDEVGRQVASRRVVHSAEGLAELIAFLRQIAPLDQIACIVETNQGLLISTLLEAGCTLYPVNPKTIDRRRNASGAKTDLIDAYLLAKTGRSDLPDLRKLTPDSASIQELKALTRDQDSLVQSQTRVVNQLTACLKAYYPVALQLFSKLQQRSTLIFLQTYPTLEAARQASVEEITRVLKEAGHPNPSKVAPKTRETLHQPQLHADAITTRTKSRLMLALAAQLLPLIEQIASYDKEITNLFLTHADDEIFSSLPGAGKRLAPRLLAEWGDDRTRYTASTSVQALAGTAPVAFQSGKYAKAHKRYACLKPLRNVLHQFAWQSTRQEAWALTYYQRKRAEGKSHSMAVRSLANVWVRIIYAMWLEHKSYETATFEAAQHHHAPRAA

SEQ ID NO: 438716 - protein, 380 aa, unidentified
MSQAYIGLDVHKRTISIAVAFLGNDEPVSYGKCSSDINRFLKILRRLMKKYSFEKKDIKLCYEAGPCGFVLARHLLRLGFDTVVIAPSLIPRQSGDKFKTDKRDARKLARHFRSGNLTTVHIPDESDEVIRDLCRARTDAVDDCRRSRQRLLSFLLRNGHHYTGKSNWTEAHMRYLRELVLQDPSQKVILEEYLQTIDRNMQRVSDLEENMRTLQVDWTRGKFAEALQGFRGFQLIASMIITSELGDLTRFDHPRKLMAYLGLVPTEDSSGDRRRQGAITKCGNSHARWIFVEVAECYRYDPKISRALSYRQEGLSKAVKELSWRAQKRLNHRYVRLAMRRLHKNKIKVAIARELAAFIWELGQILRKESSVPDSQRYAA

SEQ ID NO: 438717 - protein, 382 aa, unidentified
MQASTAVTPTADHNGTIFVSIELSQKTWLVTLHSPVRDRISRHKLEGGNHVELLALIEKIKARAAEKLGSVPRVVSCYEAGYDGFWLHRLLLTAGITNYVFDPASIAVDQRSRRAKTDRIDGELMLRTLMAYLRGEPRVVRIVRVPSVEAEDARRASRERDRLVKEQTAHTNRIKALMRLSGMAVGNPRRRDWLSFLEQQRDWEGQPLPPHSLAEVKREHARLTMVREQIAALEQVQTAQACPVPPPMAERRSSLQRLKALGPAFTATLVNELFYKDFRNRREVASYCGLVPSPWKSGGIDREQGISKAGNPRARNKAIELAWLWLRHQSDSALSRWFRTRTANAGKRAKRVAIVALARKLIVALWRYLTTGLIPEQAIMKA

SEQ ID NO: 438718 - protein, 345 aa, unidentified
MYYVGVDLHKHNISLCAMIQDGSERRVVARRRFACCNVSRIKAFFVKLRTFQAVVEATASYEWFVALVEPLADRVVLAHPKKLRVIAESTKKTDKLDAFVLAEFLALGMIPEAWRPTPRVRAYRALVRHRYYLQKRSTSVKNKLRHILADYNADVRELFTERGREYLTQVPLSDADRFRVRLLSEELDQHVRRRNRTDRKLRQFARRGPVAEQEARRILQSIPYVGPVTIDVVLSEIGDVRRFSAQRKTTAYAGLAPGIRQSDGRSRDLGITKEGSRLLRWALIQAAWRLVGHTRRWGFLYDRLKQRCGPKKAIVAVARRLWCVMVAMLKSGQQYRLPSEALVRP

SEQ ID NO: 438719 - protein, 401 aa, unidentified
MKELWCGLDWATRTHAVCVVDEDGQIRARFEVPNTGKSFAGLIKRLSKLKVTGVGIERVDGPLVEAMLEAGLAVHVIAPSMLKAVRTRYGAAGAKSDPGDAFVLADLLRTDHHRLAPLVPDGPATKGLRALTRTRKDLVQARVALTNQLEAQLHVCFPGAVGLFADLHSAVAAAFLRRYPTASRAARLTEARLAGFLRRISYCGRTPVDELLRRIREAPAATLGAEEDEARAACVLALVDAIQTCQGRARELEAEVVERLEVHADASIFTSLPRAGRGVRAASLLAEIGDVRERFPDAESLIALAGAAPVTRASGKHRSVNFRWACDKKLRQAVVDFADDSRHASPWAADIYGRAVDRGCTHPHAVRILARAWLRVIWRCWQDRAPYDVTKHRGAVMLQAA

SEQ ID NO: 438720 - protein, 384 aa, unidentified
MAPPSHESQDNHKMGWLPPSPDGIAMCQDVVLKEPRNGEDGEMKDIMIGVDLAKTVFQLHGASMTGQLKYRQKLTRPRFRKFMADQPPSMVVMEACGSAHYWAREMVRLGHDVKLIAPQYVRPFVKRQKNDAADAEAIVIAAQRPEMRFVAPKSQDQQARAVLFRVRERLVHQRTELVNALRAVLYEFGHVIPKGIGNIKRIDAILEEPNCDLPTLVCDECQDLVKQIAEQTIRIDAKTKTAKEMAAAADTTRRLQTMPGVGPLTALAVEAFAPAMKNFKRGRDFAAWLGLVPRQHSSGGKERLGRVSKAGQADIRRLLIIGAMSRLNWMGRKTIPEGSWLARMLARKPRMLVAVALANKMARGIWAMLTKNENYRDPAQAVAA

SEQ ID NO: 438721 - protein, 334 aa, unidentified
MKTSFFIGIDVSKKTLDFAVRDHRQHLFHAKVANSLTGIEQFKKECVAKNINLQHSLICCEHTGIYSQNILSLATQENLSLWLESSLRIKRSLGLQRGKSDKIDAIRISEYAYRYSDKAVIWQPERGVIAKLRQLVGLRKRLLNAKSALKVPLHEVAEFQDKKLQKEMEKLNKKPIEALEKQISEVERKINELIKEDDSLSHLFSLVTSVEGIGPVVFWEMIITTNEFKLFSCPRKFACYSGVVPFEHSSGISIRGATRVSHIANKRMKKLLHMAALAVISKQGDLANYYHRKVEQGKNKMSVINAIRNKLIHRVFACIRDNRKYEKNYTPTLA

SEQ ID NO: 438722 - protein, 453 aa, unidentified
MTNSMTGGHPDLKMVNPNAAAIDIGSTMHMAAVNPDSCDMPVRAFGTFTQDLHALAAWFKSCGVTSVAMESTGVYWIPAFEILEGHGLHVILVNARYAKNVPGRKTDVSDAGWLRQLHSYGLLRGSFRPEAEIATLRAYMRQRERLTEYAAAHIQHMQKALMEMNLQLHHVVSDITGITGMRIIRAIVGGERDPEALAAFRDVRCKSSVDMIKAALLGNDREEHIFALTQSLELYDFYKAQIKVCDRRLEAAVGALTVRADGDLAPLPKARIKRKQHNAPSFDVRAALYGVLGVDLTQIHGLGPSLAQKLVAECGTDLRAWKSAKHFTSWLCLAPGNKISGGKLLSSRTRRSSSRAAALLRLAAVTIGRSDTALGAFYRRLSSRIGKQKAVTATARKIAVLFYNAIRHGMTHQDQGAAAYDERHRQRVLSNLQRRAKTLGFALAPITEEVAVS

SEQ ID NO: 438723 - protein, 345 aa, unidentified
MESMYYIGLDVHKKTISYCVKDRSGQIHREGAIPATRVGLDLWMKTLPQPWTAAMEATLFTGWIYDHLLPHAAALKVAHPLMLRAIAAAKKKNDRIDANKIADGLRCDFLPECYMASTEIRERRRTLRYRNLLVRQAVQLKNKISGLLMEAGVSYNKQKLHKVGYFRELLATNQEIGEGLRPLLRICRETLVRLQKTESALVRSLEHDPLLAERVERLMTIPAVGPITALTWVLEIGDVKRFSSIKKAISYCGLCGAENSSANMIKRTPLSKQRNKHLQSVLIEAAKLAPRRSSGLALVYDRERQKGNANRATLAVARKLVAYLVAVDRRQKEFLTVERENRTAA

SEQ ID NO: 438724 - protein, 421 aa, unidentified
MENTAARKRKQVPEGYLIIGIDPHKKRHAAVAITQDFTTRDKFKLDNTREGLETMLRRARTEMVKSGCRGVMFAIETGGHYWRNIAYFLDERGIPFRFINQFTLKRRREGKDLNRRKNDYRDSEVAAQLLCTGEFTESKVPQGVYAELRSAHNAYRRLVKERTRITNLIKGLLDGLFPEFTLVFKDPCGLTALSVLSICAMPSVIAGMTEDEFVAAVEARHHGRLMRRKLRALHQMARVSIGIVAGARPVSSEISFLVEKLELIRRHIRIIEGTLVRLVDETEEGKYLLSIRGLHYIAVGGLLAELGCFKSYHSAKQMIKMAGSNPTESESAGKRGAHTPMSKQGRPVLRYCAWTSVIPMLRLNPDFRAWAKQRRERPAHANPLNGREIVGAALNRLFRLIFAMVKNQTYYLSPQLVQVTG

SEQ ID NO: 438725 - protein, 367 aa, unidentified
MKEYIGCDAHKKYSVFVAVNELGQHGRALRVNHERDEYRKFLASLPANSRIALEATGHWYWLADEIEAAGHQVHLANAGEAKKRMGKTNKTDKLDAAGLGMLLRMGTLPEVWMPPAELRDQRALLRTRMNLVRLGTGLKNRIHGALDRYGLQSEGYSDLFGKSGRLHLAACLNHLPEYTRLSVERELALLDDLQPQIATLEEHIARVVKPNPEITWLRTLPGVGEILAPLIAWEVGQVKRFPGPGKLTAYAGLVARTISSGGRTWHGRVSPAVNRYLKWAFLEAANAVVRHQQKYDGWHVVTLYQRLRGPKGHAKAATAVGRHLAEATYWILQRGEAYRDPARSTLEAAAEAAGSSCPDKRDVALTL

SEQ ID NO: 438726 - protein, 423 aa, unidentified
MPGTVNTMETEREVVCGADIHKQFLLATILTKDGQKFQDRFDSNFEGLLNFRQWLLDHDCQRLAVESTANYWQPIYFVVGKDVEFVLANAYQIKHIPGRKTDVLDSEWIAELCLKDLISPSRIFSEDDRDLRSMTRTRENYVKMRSQIKNRIHQELESACIKLSSVLSDIFGKSGIHIIRGILNGLSIDDILDRIPSKKLKAKRGEIQDAIQANISPVQIDLISLLLDSVDFLNREIESIDKQIQSLISTRQEDLKIAMSIPGMGFTSASTILAEIGNLKDFNNGEKLAAYCGLVPSVYQSAGKLITGHITKHGSPHVRRMLIEVAHAISRTKADSKLKRFYFRIKSRHGAKVAVVALARKVLCILHHLIVNREMFEDGISSKSKREKTGRSSSSTEMIIEDAIQIFVRAGYLVQKRSEKEGG

SEQ ID NO: 438727 - protein, 321 aa, unidentified
MAYFREVVGIDVSKESLDLYVLSSQQRRTVANAAAGHAELACWLKSLGVRMAVMEASGGYERAVAGALRRAGFDVRIVDPKRVRHFAKAAGRLAKNDRIDAQVIAEFGAVFAAAQRCEIPLDAQREHLASLVAARQALVDHQTALQNRISACPKGRARQALAAALKPIPASIKQLDRSIAEAIAAHPPFAALGERLDTVPGLGPVTIAALIAWLPELGRLDRRALAALVGVAPFDDDSGKRSGQRYIRGGRCKLRNIAYMAVMGAATQHNPVLKAHYVSLLNRGKLKKVALVACLRKLLTILNTMVAKQQDWNPALVAPAA

SEQ ID NO: 438728 - protein, 307 aa, unidentified
MFVGIDVSKARLDVHVRPTGAAFSVARDEEGLAALVARLKALAPKLVVLEATGGLQLRAAAVLAAAGLPVAVVNPRQVRDFARATGRLAKTDALDAEAIARFAEAVQPEPRPLPDAETDRLNGLIVRRRQIVEMMTAEKNRRHQVTRPDLKADLDAHLEWLGKALNRIDEDLDNAVRSSPIFRAKEELLKSVPGIGDVASRTLLAELPELGRLTRRQIAALVGLAPFNRDSGTLRGQRTIWGGRAALRATLYMAALAAIRHNPAIKAFHARLRAAGKPAKVAITACMRKLLVTLNAMVRDNKPWQTA

SEQ ID NO: 438729 - protein, 425 aa, unidentified
MKKTDYLSTLFVGIDIGSRTNVVSAIDFNREYFIRMKPVPNAKEGAEILESLLVDVLSAHHEFKHVIIGMESTGFYGVHIANYLSASDMLSPFGAEVYCLNPKEVAKYKESFNSINKNDGIDSFVIADFARVGRITIKPWRGAQYLALQRLTRHRLHIAECIAREKTYVLNNIFLKFSEFAMLKSEDHPFSNKYGATAEAIIEQYVTNDDIIRASIDELVELIESKSHGRITDPEETAKLLQSAARGSYRLDKVVAKPITLSISSSFNCIRAFEKELKAIEKAIEQTVHGINPLEYQVLKSIPGIGPTYAAGILAEIGTIKAFPNNDALAKYCGIIWKENQSGNFRAEDTKMSKAGNHYLRYYIIEATGSVINHCPEYKAFYGKKFAETTTHQHKRALALTSRKFLRMLFGLLDKTQLYSLERSR

SEQ ID NO: 438730 - protein, 339 aa, unidentified
MDNHTQYLGFAGVDLAKKVMQIHFVTEDGEITDKSAKRAEFLDFFRNRGKCLIGMEACGSSQDWARKLEAMGHEVHLLPPKAVKPFVSGQKNDHNDAIRIYKAMFNGVRRVPVKSTEIRDLQTLRRIRSQVTKDKVKEINHVRGLLAEYGIVMGKSLNAFNKDISSALEILTERGDVSPLVAEELRTTVQAIKAKIERQKKLDQEIEQLARGCKNYENFLKTPGVGPFTAAMLCVLLCDPSIFANGRQFAAYIGLAPRSRGSGGKNYVTGIPSNESRAVLVECAQAIARCKNKSLWVEEILRRKPKKVALIAIANKLARQVWAMANKGESFKQMTVLTA

SEQ ID NO: 438731 - protein, 456 aa, unidentified
MKKYYLGIDVSKGYADFVILDANKKCVVENFQLDDTFDGHSRLYERLCRFFKDHQEAIIYAGLESTGGYENNWFNALIKFQGSLNIQTARLNPVGVSANSKAQMNRIITDKISAQNVAEYMISHHEKILYQNQDHLASLRKQWCFVKMLTKQNTQLLNQLESLLYIANPELLAYCKDGINEWLLKLLLKYPTTALLSKATISSVKAIPYVSEPRAKELVNNAKKSVASAIDKVTEQLIISTVKQIIHLKSLIKSQTEIMAKECSLDEVNLLKSFPGISDYSAIGLILEIQTVERFSSTKKIASFFGLHPVYKESGDGRGGIRMSKQGSKEVRHILFMVALNSVRSNPLIRSIYLEHIEKGMPKMAAIGLCMHKIIRIIYGMLKHNTPFDPEVDKKNREKKSQTRKKVSKDKNRRYQEYDRKAPVSRRENKKRRERSQSQSDNNTKDGIINPVPVTP

SEQ ID NO: 438732 - protein, 317 aa, unidentified
MASAGVGIDVSKDWLDVATTESSSPWRVPNSLEGIATLVEELGSVHVHRVVLEASGGYESPALLGLHEAGHKVVLIQPIRARHFARAIGQRAKTDAIDAVVLAKMALLAVEETPVWAPVDDVVADLRALVERRQQLLVLRDGEKKRLRFAREIVRADLERSVTSLQTELASLERRISEVVAANQRIADEIEVLESVRGVGTLTAATLRVFVPELGTLTRQQVAALVGVAPINRDSGGKTGRRFIEGGREKARQSLYMAALAATRWNTIIKARYAHLVAKGKKPKVALVACMRKLLIHLNSLMRSHLDGPTMAAPAES

SEQ ID NO: 438733 - protein, 409 aa, unidentified
MDVFHERCAGLDVHKEAISVCVLIGRGSGFQKLTFRYGTFHHQLVEMRQKLVELGVTHVLMESTGVYWMPVYDALEGFVEIVVGNAQHIMNVPGRKTDESDAEWLAKLLRFGLVKPSFVPAREFRELRQLTRYRRAVVQTRASEQNRVEKHLQIAGVKLSSVASHVFGVSGTDMLNRIAEGTTDPGELAGLARGRLRKKMPQLRDAFAGSISEHTQHLIALQMEQMNRLESTIAQAELKIDEKVKPYEEILARLDAMPGLNLRSSIDVLAEIGTDMSPWATHRQIAAMAGLCPGNYISAGKRLKNRSRQGNPYLKSILVQAACSAINVDGSYYQAKFKALKKRRGHKRALVAIAHAMLVAIYHMIKKGEPYREIGAKVVSDHEHGRKKEYLIKQFQNLGYSVSLTPLTE

SEQ ID NO: 438734 - protein, 367 aa, unidentified
MAESIMVACDLHDRTMLLLMAQGRGAAEKLSLPNTKAGRLKLRKLLRTRSTEAGGAQVVFAYEASGLGFGLYDELTAAGFTCYVLAPTKIARSSQQKRNKTDEKDAALILQVLRGHVLAGNALPEVWVPKPATRDDRELVRARLDLADKLSSVKTQVRCLLKRWQVARPPAVGKGWTKLHLAWLRGLTKDKVLSVGARQTLESLLRQLTFLQEEEERLDKALDRLVNDPRYTEQVYALARLSGVGVLTALVFLTEIGDLWRFHNRRQVGAYLGLVPVARESGEQSDRKGHITRQGPSHVRRVLCQAVWARVRSDKEDSSDVLAYQRIVAKNPQHKKIAVVAVMRRLAVRMWHAGRNATLAAAPALTK

SEQ ID NO: 438735 - protein, 337 aa, unidentified
MKYSGIDLHSNNCVVTVTDDEDRVVVEKRVPNDLPRIIGMLMPWKEELTGVVVESTYNWYWLVDGLQAAGFTVHLANTSAIKKYEGLKHSGDEADAHYLAHLLRLGILPTGTILPPEARAVRDLARKRMQLVRSRTMHILAVENITARQRGARISSNQVKRLTPEVIEQMPVPEDVVFAIKANAAVITTLSAQIEVIEKRLQEKMAEQADYALLTSVPGIGRVLATMILLETGPIDRFASVGNFASYARCVGSERTSNGKKKGEGNTKNGNKYLSWAFVEAAAHALRNCTEAKRFYERKKTKTNGVVAMKALAHKLARACFHILKERKPFDVTRCFA

SEQ ID NO: 438736 - protein, 338 aa, unidentified
MFIIGIDPHKGSHTAAAIDRDEQLVGELAVQADRRQRDRLLAWAARFEPRLWAVEGATGHGSLLAQQLVASGETVVDVPAALSARARLLDSGHKDKTDPHDARSAAIVALRHRNLRTVTLEDQRQVLRLLARRHHQLTAARTRAICRLHAVLAEMIEGGLSKNLSVKRASIELRKLRPQDAIGIERKLIAHEFLDEVRRVDRALTDLHARIEHAVNASSTSVTDVHGVGPIVACYLIGYSGDIRRFPTAGHYARYNATAPIEASSGPKVRHRLNPNGNRQLNHAIHIAALGQISHETPGRAYYLNKQTQGKSRKEAMRCLKRRISDAVYRQLRADAGH

SEQ ID NO: 438737 - protein, 371 aa, unidentified
MMFYLGIDQHARQITISLRDENGDVLLACQVSTQPDKIKAFFHKLTRERLGNGDTFVSVLEVCGFNDWLIHMLHDYHCHKVILIQPEERKKCKTDRRDAAALSELLWVNRDRLLQGKPVRGLRQVDIARSTDQENRRLTTLRKEVGQARTRLVNKTRHILRRHNLQWQMPTRKFPSKSGIAWLRQVALPTIDRLEMNHLLADLEQIQERRKELEQVIAERCGVSDEAVLLSSMPGVSYFTAVSLACRVGRVERFPRAHSLANYWGLTPGCRNSGEKTQRLGSITKAGSSMARWLLAQVTINVLRRDARLREWFKRIKRRRGSTIARVAVMRKLATIIWHMLSKRSSYAQCRTLAEAGADEREQPHGAEAGR

SEQ ID NO: 438738 - protein, 415 aa, unidentified
MCKVIMIGCDLHDATTVLKVADGPDATVRKGFATSNRSAMIEWVKDFASQRGAVRIVFAYEASGQGFGLYDDLTDAGIECHVLAPTHLPHTTHSRKNKTDDKDALMILDEVRAHVLAGRTLPDVWVPNHQTRDDREIVRLRLEVATQRTRLKNQIRNLAKRSRLAFPDDFTSSGDWSKRSVAWLREVAAGKTGALREGVRTALASLVELYQAMSAQIQALDQAIRRLSRTERYAQSYRKLKLLSGVGTLTAMVFLTELGDLARFANRRQLAAYLGLAPSAFESGERDDRKGHITKQGPQRVRHVLCQAAWAALRVSPEWRAKYDRIRRGSKSRSRIAIVAIMRQLGVQMWQTARSPELDALLDERDALASQKTKKTTSARAPQKGAAPSTPPSPRPRRGEAEATATRKGLARHPE

SEQ ID NO: 438739 - protein, 414 aa, unidentified
MDVVYTHCAGLDVHKKVVVAAIIVPDGAGGLLRESRSFGTVTAELLALSDWLMGRGVTRVAMESTGEYWKPIFNILENNFEVILVNAQHISKVPGRKTDVSDAEWIADLLRHGLLSASFIPPVGQRELRELTRYRSTFVKERATLVNRVQKVLESANIKLASVASNVIGVSGRAMLEAIINSTATPEQMAELSKGRLRSKRTELSQALEGRVKPHHRFVLTELLCQIDSLDETIARFDQEIEEYCRPFEEAVVLLDTIPGIARKTAEIIVSEIGTDMSRFPTANHLASWAGVAPGNNESAGKTRSGRTTKGNKPLGVALNQAAHAAAHTKNTYLSAQYHRLAGRRGKKRAIVAVAHSILVIAYHLIKRKEPYHELGGDYFDKRRPDATAKRLVRRLEQLGFQVSLQQLSAPVSA

SEQ ID NO: 438740 - protein, 428 aa, unidentified
MNETELSRVKEFRQLKKGIQGSETHLIVGIDVAKERHHAFLGTAAGKTLVKKLIFENSASGFSELLARVEAVRAQNGLSDIVFGLEPTSNYHKPLGRYLISKGCHVVLVGGKAVKNNRELLDERWDKHDTKDAANIADLVSRGKCFYYDMPSREIEELRGLLSLRARLKKEEHSLNLRIRNNLLAKHFPELDTFYSACERETLAIVRWCLNPQTIAAMPFEQFFKRVAPSARGIGQKLRLQKIHRLAHESIGCPVDSAVQFQAGLLVEKIKQVREQIVQVEQVIQQLCVQFPSYACLLSIPGFGPYVASKVLATIADPRRFDTAKQIIRTAGYDLCADRSGKSSDQAVPVISKKGNSQLRYALYQAAMVASSRHRFFMAYFAKMLQGRERERGIRTKMRVKLAAKMLVIAWTLMKRGESFNPEYLNVR

SEQ ID NO: 438741 - protein, 349 aa, unidentified
MKKTVEIFVGIDVSKAWLDEAVHEQKEVNRFSNDEVGIASLVKVLKKLKPKLIVLEPTGGFEMLVVAELSQAGLPVAVVNGKRIRDFAKATGQIAKTDKLDARVLAHFAAAIRPEVRPLQTEEEEQLTALLTRRRQVLDMITVEKNRLVTVRAKMRPDLEAHIHWLSDNLKELDQEIEEFVKGSPSWKEKDTLLQSVPGVGPVTSATMLGMLPELGLLNRQEIAALVGVAPMNKDTGNKQGKRCIYGGRADVRSVLYMAALSAKKHNPFIRKFYERLIRHGKEKKVALTACMRKLLVILNAMVRTNQPWRSQTGVDPFWWTVVGLGKGAKKCPRPMHPIRRNIANRFWN

SEQ ID NO: 438742 - protein, 343 aa, unidentified
MEHSAGLDVSVKETSVCIVDDTGKIVREVKVASEPDALLAVLTNPAYRFKRIGLEAGPLSQWLFSALAEASLPVICVETRHMRAALKAQINKTDRNDARGIAQMMRAGLYRPVHVKTLRSQKLRMLLTHRKLLQSKAIAIENDLRATLRNFGLKVGTVGTVKFETRIKELVENVPDLVVLVEPLLVVRRALREQIAILHRRLLALVRDDDVCRRLMTVPGVGPVVALTYRATVDVPARFRNSKAVGAVFGLTPSKYQSGEIDRSGAISRCGDDMIRVMLYEAAHIMLVRATKWSWLKAWAMQIARRRGLKKAIVALARRLAVIMHRIWVDGTEFRWTREVAAA

SEQ ID NO: 438743 - protein, 446 aa, unidentified
MVIGGPEIRASRRKVIDVKQKSNSLTKGDRVGKTIKARGPVQRDAREVMAELVVKLSQKLEPQSTRKSEEDPRKAGMPGPNRDRLTVGVDLGDKWSNFCILGLDGEKLTEGELRTTPQDFAEFFQAMAGARVVMEVGTHSAWARDVVARSGHEVLVANPRQMEGPKQRKRKNDRVDAHKLARVGRMDPQSLFAIEHRSVEVRQDLVALRARHAVVAVRKDLINTVRGLVKSMGTRLPKCSTESFAKKVEGALPAEVRDALLPLVRLVEALSNSIKEYDERIEKLATEKYPHTKLLRQVKGVGPLTSLAYVLTLQAPQRFVKSRDVGPYLGLVPKQEDSGDSQPQLRITKMGDMMVRQLLVGSAHYILGPFGPDTDLRRYGLRLSERGGKNAKKRAVVAVARKLAVLLHCLWVSGEVYEPLRHALPKATRKKAERPTAAEASGRAAA

SEQ ID NO: 438744 - protein, 426 aa, unidentified
MNFTKKDQTNQRIERITMKHAVVGIDIAKDAHAAQITDYRGRALTPRHLAFTNTQEGYERLLRWVKDVQAKKGLSYVVVGLEPTGHYWFNLAHWLREQGVKVVLVNPVTTHRNKENRDNSPSKNDPKDALVIADVVSRGYYTEYNPQADTFEQMKAMVSQREFWVKQSVTYKNRITRWIDLYFPEFSQVFPDWTRLRSLATLRIYPLPSDLVNISADQILDTWREQGMKRVGGVSGVAKATELLSVAQRSIGKANVPEEARLEIKCLLKAYDEAVAALDAIELHMETLLESLPLTEQLQSIHGLGSMTIATIIGCAGDLRLYAHGQQLLRRAGLNLAESTSGRHKGQIKLSKRGDATLRKHFFLAVLCLIRQHPDFKRFHEHNVKVKGMKKMVSVFKLIGKLARMIVGMIQRGESYRSDLHFQAVA

SEQ ID NO: 438745 - protein, 361 aa, unidentified
MRIIGCDLHARQQTLAMLDMATGEVKEHVLEHNGNAVRDFYAALEGRLRVGIEATGSMHWFLELMEELGIECQVGHPAKIRACEPRKQKHDRRDAMLLLKLLSEDRFPKIWMPTVEQRDVRQLLLYRHQWVRIRVRVQNALQSIALSHGLRRGTSLWSQAGLEAMGALALPPYASQRRDALVRLYRQLEAEIDVLNKTVAACAVQRPQARRLMTHPGVGPITALATEVFLGDAARFADGKAVASYIGMIPSEYSSAGRQRCGALTKQGNALVRFLWCEAVGHAVRRDEALKRFFRRKLAQKGLGKATVATGRKLGIRLWIMMRDEIDYDEFCRRTRQTREPHAEMPACKHGPASGSDRTPE

SEQ ID NO: 438746 - protein, 426 aa, unidentified
MKNINVLTTLFVGIDVSARTNVCLALDFNSNVLLRLDVANNQIGADTLKAKLLDLIHRNDFKTTIVALESTSFYGLHISNFLSADEELIPHNVYVHPLNPKMISNYRKSFIGLGKTDSIDAYIIADFARVGRITTEPWKGPQYLALQRLTRYRLHLVECITREKAYMVSNIFLKFSELAVLKEGDHPFSSNHTATAEAILTEMLSLEDLIRLSSEELIEFVCSHSKNRYSHPEEVCKLLKKAARDSYRLDKTLYEPLTVSIASSFNCIETYEREIKSINKAIEKTLKGLCPDAFTVLQSIPGIGQVFASGILSEIGDIHAFHSADALAKYAGIYWNRHQSGDYEADDTSMSKTGNKYLRYYLIEATNSIRCHEPSFAAYYRKKYDESKTHHHKRALALTSRKTIRLIYSLLDKNQLYSANRVQITP

SEQ ID NO: 438747 - protein, 359 aa, unidentified
MRIIGCDLHARQQTIAMLDTTTGEMSTLTLMHEGNEVREFYSQLPRPVLVGIEATGSMYWFLNLLDELGIECRVGHPATIRAAEPRKQKHDRRDAELILKLLVEKRFPAIWLPSKELLDLRALLLHRHQWVRIRTRLQNALQAIALANGLRRGPSLWSYDGQAKIAFLPLLPHASYRRSALQGLYRKMEEEIENLTQQVAEQAEQRCRSRLLMTHPGVGPVTALATEVFLGDPRRFVDSKALASYVGLIPGERSSGRRQRLGKITKQGSPLLRFLWGEAGTHAVRRDPELKRFYRRKLVQKGLGKSRVAVARKLGIRLWIMLRDEIDYEEFCRRGQKQSGEACAGMPETRMVNDRRAVE

SEQ ID NO: 438748 - protein, 411 aa, unidentified
MRLLVGDDWAQDHHDIEVMDEAGRVLARARVPEGVAGIGQLHQLISRFLPEQGADAEVQVGIETDRGPWVAALIAAGYTVFPVNPLQASRYRSRHGVSGAKSDGWDAHMLADAVRTDAHQLRPAAQDSSQAEAVKVLARTHKTLIWERTAVTQRLRAQLLEYFPAAVTAFEDLDAPDALELLGKAPDPARAAKLTRAQVSAVLKHAGRYKIAARTDAILAALRSPQLGQPPALSAAYAATVRSLIAVIATLNDQVAVLQGQVEAHFGQHPDAEIYLSQPGLGAITGARVLGEFGDDPHRYACAKARRNYAATSPITRASGKKKIAAARFVPNAWLIDALMIQAFAALRVSPGARRFCDGLRARGIEHNDALRRLANRLVGILHGCLKTRTCYDEATAWGHRENTGQSPVAA

SEQ ID NO: 438749 - protein, 431 aa, unidentified
MLGGNQEKLMSQNQPEIQYAAFVSIDWADQKHVWSLQEANSSTREHGEVGHMPEAIEAWIAQMSQRFVGRQIAVAVEQSRGALVFLLSKYEQLHIFPVPPAMTANLRKAFYSSGAKTDPADTDLLQDVLQMHREKLRRLSPDTEATRLIQNLVEERRKLVDEKTAQSNRLEAHLKIYFPQIPQWFGDVDSPLVCALLERWSALEALQKARPDTLRSFFRKHQCRKEELIESRIKAIGEAMPALKDRAVVEAQLAVVKVLVQVIQVLHQGIEDFNRQIQEAAEAHPDFFIFESLPGAGAVMAPRLLAAFGSQRERYRNAAEVQTLSGIAPVTESSGKSSWIHFRFACSKFVRQSFHEWAALSITQSQWARAYYELQCRRGKRHHAAVRALAFKWIRIIFRCWKERVAYDEKVYLAALAQHNSPLLAATKIAL

SEQ ID NO: 438750 - protein, 415 aa, unidentified
METIYDRVAGLDIHKKTIVVCLRTTRPDGSVQEEIRTVGTMTDDLLALGDWLSEHHVTHAAMESTGVLWKPIWNILEGYDLQLQLVNARELKQVPGRKSDVRDCQWIAHLLACGLLNSSFVPERGQRQLRDLTRHRAQLHGEHTRCVNRIHKVLQDANIKLSSVATNILGKSGRDMLAALVLGQDDPNSMAELARGKLRKKIPELKRALKGHVLDHHQFMLEQLLDHLGLLEEQISRFNDRIEEALRPFVDDETFNALDAVPGVNRITIENVVAEIGVDMAQFPSSQALASWAGVCPGNEESAGKRKRRRTTKGNVWLRRALCEAAWSAGRSRETYFNAQYRRLASRRGKKRAIMAVAHSLLVVFYHLLKSEHPQYQELGGNHFDTLDPMRLRRHLVKRLESLGYEVTLAERKAA

SEQ ID NO: 438751 - protein, 414 aa, unidentified
MDIVHYRCAGLDVSKRDAKVCVRVQEPNRARATSTVTTWEAVTSQILALCEHLIEQHVTLVVMEATSDYWRPFYYLLEDGPFEVLLVNARHVKNLPGRKTDVSDAAWLAQLGAHGLVRGSFVPPEPIRQLRDLTRTRTTLVRERAREIQRLEKLLEDAGVKLSSVATQLTGVSGRAMLDALVTGERDPAVLADLAKRRLRSKIPELTEALTGRFNEHHAFLVKVHLDLIDQHTKAIDEITQRVEEAMVPFRAARDLLVTIPGVSTTVADVIVAETGADMTRFPTAAHLASWAGVCPGSNESAGRVKSTRTRPGNPYLKGALGIAALAAARSHHTYFSVKYRRIASRRGPIKAVVALEHATLVAVWHMLTTGETYRDLGEDYFDRRDPERAKRRALSQLRHLGYAVTLEPTAEVA

SEQ ID NO: 438752 - protein, 408 aa, unidentified
MEVLYPRCAGLDVHQQTVVACVRLADGAKVETHVRTFGSTTAELLALSDWLAEHRCTHVAMESTGVYWKPVWHVLEGQVTLILANAMQIRNVPGRKSDTNDAAWIADLLAHGLIRTSFVPPSPIQELRDLTRTRKQLVREVSQHTLRLQKVLEDANLKLTSVLSDVLGLSGRAMLTAIIAGETDPERLADLSQGRLKASRPAVIAALRGSVTPHHRFLLRLHLTHIQTLEAVIRDVESHLGDALWPFRAAIDRLLTIPAVGETVARVIVAEIGVDMTRFPTVGHLISWAGLCPRLHESAGKRHSTRTRAGNAWLKTTLVQVAWVAARTRNTYLRAQFLRLKSRRGPKKAILAVAASILTAAYYILKNEVPYQDLGADHFDRRDKAQLAKRLVRRLEELGLAVEIRPAA

SEQ ID NO: 438753 - protein, 402 aa, unidentified
MNAVGIDVSKGKSMVAIMRPFGEIVSAPFEIKHTASDIHSLVELINSVEGESRIVMEHTGRYYEVLAHQLSKANLFVSAINPKLIKDFDNDSLRKVKSDKADAVKIARYALDKWQNLKQYNVMDELRNQLKTMNRQFGFYMKHKTAMKNNLIGILDQTYPGVNTYFDSPARSDGSQKWVDFASTYWHVDCVRKMSLNAFIDHYQNWCKRKKYNFSQSKAEEIYGKAKELVPVLPKDAITKLIIKQAVYQLNSASTTVESLRTLMNETASKLPEYPVVMAMKGVGTSLGSQLMAEIGDVRRFSSKKLLIAFAGIEPQPNDSGKIVGNDSGISKVGSAVLRRTLFLIMTVILKTQPQDEPVFQFMNKKRSEGKPYKVYMMASANKFLRIYYARVKAVMDSKHSK

SEQ ID NO: 438754 - protein, 327 aa, unidentified
MMFIGIDISKEKIDLSWLRDQLTNKIKTKVFKNKHQDFLEIEKWLLNTTKSTASELVITLEPTGVYHEALMYFLHEQGFNIILANPGKAKKYADALNIIHKTDKSDATMLAHYGCAKHAVVDYWQPEALEVRELKALIRRLDALESNRQREANRLDASEFSNVSARVCQPIKVTIAFLDDEIKQLKSDIDNHIDNEPDLKRNRKLLESIPGIGPVLSRELTYLFAAKKFNKAKEAAAYCGLIPRHNESGKLKGRTSISKLGPARIRCKLYMAAIVAGQWNKTIKRHKLTLINNGKTPMQTVCANMRKLIHICFGVIKNQEAFKLQVS

SEQ ID NO: 438755 - protein, 340 aa, unidentified
MNKELYCGVDLHSNNGVYQIVRTDGIPVWRRRLGNCPQIVLRTLEPFRERLISVAIESTYNWYWLADCLQRAGYTVELANPSAMEQYNGLKNSNDNSDAAFIAELMRLRILPKGWICPPEDRAWRDLLRRRMQMVNARTRLILSLQSMVTRQTGQSFKTADLEKVSIDGLDGLLEHTALCSIAHEQLRLLGAHNESIASLEQLALERCKPRPEYRLLTTVPGIGMILAMVIMMEVGDITRFRSPGKFSSYCRSVPARRSSNGKSKGKNNARNGNKYLGWAFIEAANHAIRCCAPARKWYQRKTASAPPVVGRKALAAKWSKAVWYMLTEKKPFQLKHVFG

SEQ ID NO: 438756 - protein, 415 aa, unidentified
MSDPFRFFVGIDLGSASHQVCVVDASGQTLGERGVAHSGADMAALFQWLATLTQGADPQSIAAASEMPHGAMVEAFLERGYAVFAINPKQLDRFRDRFSVAGAKDDRRDAFVAAHALRTDRYAFRPLALGDPRLLRLRELGRAEESLQQDLRRAANQLWQLLQRYFPGLLTLVPAADEAWLWDLLENAPLPEKAARLRPSTLQRILKKHRIRRVSAQQLAELLAQPALPLAPGANAAIAEQVLLLLPRLRLLRKQHTQLGRNIETLLEQLAGDESFKQHRDVQILRSVPGVGRIFTATVLAEAAEPLAQRDYRGFRTVSGVAPVTQQSGKTKLVSIRRACHPRLRHAVYHSAARYAQDDPRGQQHYARLRARGCSHARAVRGVADRFLALIFALLTHNQLYDPCRRALLDPAPTC

SEQ ID NO: 438757 - protein, 400 aa, unidentified
MNRTRTVAGLDVHKDSIYLCIMGYDQAIIWENTYGVLTPDLRQMHHDMRAHGVTEAAMESTAVYWVPVWNELCESMELRLVNPYFIKQLPGRKSDVKDARWIAECLLKNLIKGSFVPEPIVQDMRKLNRRIMDLCEDTTYNSNKLDAALQRCGFRLSNYVATTKSKSYRSVLKAIIDGQTDPDELLRLVHGRILNKHGRERVKAALTGSFSETDLIVLRQLKETLDLIEEQTAYCQQELVRLCKEHYPKPYERLQTIPGVKERAATAIIAETGVDMKMFATAASLVGWCGLKPRNDVSNGRFKSRKVTHGNRYLRQILIEIAWAASRTRNCFFSHFSYLQTTVKKKNKMKIQVAIARKILVAIWHMLSKEEDFIDIYLKRQEKLKRTEEQIKLLESYMAD

SEQ ID NO: 438758 - protein, 322 aa, unidentified
MPSNSPSNIGIDVCQHKLDVAVYETNEHFVVSYQLPECVDLIERLKRLNPARIVIEASGGVEHFIVSLLATAGLPVIVVNPRQIRDFARATGKLAKTDRLDAFAQARFAAMVKPEVRPLKSEETQALDALLTRRHQLVEMTVAERQRMTQARQQRRLEVAEDIKAHLEWLQERLTKCEAELANAIRQSPMWREREQLLRSAPGVGRITALTLMADLPELGQLEHKQITALCGLAPHPNDSGKSHGRRSTHGGRSRVRATLYMATLTAIRNNEIIQTFYQRLLANGKTKQLALTACMRKLLVILNAMVKSNSPWRSDTNPQIS

SEQ ID NO: 438759 - protein, 343 aa, unidentified
MQVVTTVGLDIAKSVFQVHGVDAAGQVVIRRQLKRRYVLAFFEKLPACLVGIEACASSHHWSRELKTLGHTVRLMPPAYVKPYVKRQKNDTADAEAICEAVTRANMRFVATKTPEQQSCLTLHRTRHLFIRQQTAVINVIRAHLAEFGIVAPVGRKGIETLLDVVANPTDKRVPVIARACLAALGAQLRRLKEQILEFDRMIMAWHRSNEASKRLDAIPGVGPVLATALVASIADPKAFRSGRNFSAWIGLVPKQHSSGGKDRLGNISKQGDRYLRSLFMAGALAVIRYAKIHGTTHRPWLTALLARRPTKVAAIALANKMARMVWAMMTRGERYKDPIALAA

SEQ ID NO: 438760 - protein, 356 aa, unidentified
MKQRITQRGKKVDFQGKRCYVGVDVHKLTYFAAVLSEDGLSMQFSCPAKPDTLVSKIQGMGVEIIALAHESGPTGYELAWHCQEAGVPIVVAAATKIPRKITPDSKTDRLDGLKLAEYLSKGMLCTVAIPTREEYALRELERRRQQLVRARRKSRQQIKSFLLKNGIESPKGLEHWTEGALKELAEAELGSPYLRLTLDSFLRELKFICLEVIQTQKALSRELSKAGKDGLLKNLQTIPGVGIIVSQTFVTEIFRPERFDRAEEICAYVGLSPITSQSGQGKARARLVHAGQTYLRSILIESAWTLVWKDKYYRSFYNRILSRTNLAQKAIVAVARKLLVILWRISVENRGYQFRV

SEQ ID NO: 438761 - protein, 439 aa, unidentified
MFSRSEERSLNKKGKQTPMKAAQTILHVGLDVHKDSIAVALAAQDGSLRRYGEIPGHIEAVDKLLKRLDRADQQIRLCYEAGPFGFVLCRHLRRKGYVCEVVAPSLIPKRAGDRVKTDARDAEQLARLFRAGELTAVRVPDEADEALRDLIRGRLSAVFEQHRARHRLKGFLLRLGFRYPGKTSWTPAHMNYLSKLKMSHPAQQIVLEEYIQAVQSATERLDRLTTQVHAQLPGWKWEPVVRALMCLRGVSVINGMTLVAEIGDIDRFESPRRLMSFLGLTPSEHTSGDKRHQGAITKAGNGACRRALVEAAHHYRIPPRISPTLRQRQHGQPEQVRQIAWKAQQRLYSRQRTLSLRRKKSVVVVTAVARELCGFVWAICRALKHPHPKAPTRTSEGSARVYVLKPDLKFKSGAGRSRLASSAAAPPARARKGPTSLAS

SEQ ID NO: 438762 - protein, 361 aa, unidentified
MKRVQSNKLDFSGQNIYVGIDVHLKSWSVAILSEYSALKRFSQSPEPEALHKYLVSNYPGANYFSVYEAGFCGFWIHEKLTGLGITNIVVHPADVPTMSKEKLRKTDAVDCNKLARELRSGSLEGIYVPKADVLEIRSLIRTRNMIVKDSTRTKNRIKSLLRFHGVDIPEEFTRSSIGRWSKRFLAWLHSIELSTEYGKKTLELHLEQFVRLRNMLLQETRAIREISRKAPFEKPMRLLTSVPGIGVTTAVTLMVELDDIVCFRNADHLASFIGLVPMCHSSGESNGTGDITVRRHFMLRCLLVEAAWIAIRRDPAMTVAYTEYRRRMNPQKSIIKIARRLVNRIYYVLKHEKEYIPCVVE

SEQ ID NO: 438763 - protein, 374 aa, unidentified
MSNITSLETERHRFLYVGMDIHKDNHTAVATNCFGQNLLELVISNSEQDFDDLVARVERLSKAKNLKLIFGLEDSYGYGLRLAKYLYEKGLSVKMIAPVLVDRERQYETHPEKSDSLDALGVAKVLIQRIDRLPNYSISKNDEISKNIKELTLDREFLVKEQGRLKNQLHRLLHKAHNSEYRAKFKDPFSLKALKYWRGYPVPQKRTEIMGNVSIIKNQIRRKIKRLLDIKKEVKEIEQELSCLIQQTNQKIDTLNGCGTVLASQVLAEIRNIDRFQSPHSLAKYAGLCPREKSSGKTFRHIKTKSGNRRLNMAVHRIALSQISKSGNQYAKTYFQRKLSEGKTKVQALCCLKRRLIDIIFMMLKYKQAYNYIG

SEQ ID NO: 438764 - protein, 360 aa, unidentified
MTATMTWVGLDVHARSTHAAAIDRESGELTRARFGAGADPVVEWLSGLPQPVYGCYEAGPTGYALYRAAEAAGLRVDVVAPSKTPRAAADRVKTDRKDAELLVRLLLAGSLSVVAVPPASFEAARDLARAREQVRADLARLRHRVSKLLLRYGRVYDGGGTWTQAHRRWLAGQRFEHVATELAYLDALAAIDGLLARRAALDERLSLLAAEPDHWPTVARLRCFRGIETLSALVLHLEIGDFARFQRPGQLAAWLGLVPSLHQSGESETRGSITKTGSGFARRILVEAAWHYLREPRIGVTLANRQAGQPDHILQIAWRAQHRLYRLHQRLRGRGKPGNVAVVAVARELACFLWAAAVAD

SEQ ID NO: 438765 - protein, 402 aa, unidentified
MAYDFVIGVDVGKYFHHACVLDPQGRQVLSKRINQHESSLRKLFGQFIADNASVLVIVDQPNNIGRLTVTVAQDMGADVRYLPGLAMRQLSRIHVGNSKTDVRDAYVIAHAGLNLPDALRSVDRVEEVFIQLKVLNGIDEDLARAYTRLINQMRSALVGTYPAFEHVLRGQMIHRKWILHLRAKYGGPTKIRRIGRTRLAAFARSHKARNPEPVIDAMLAAIHAQTVSIAGAEYAELGVAMSAKDALTKLEHRKEIEAQVLKLIQDIPQTEILLSMPGIGPRSAAQILMTVGDMSDFPDAAHLASYAGLSPRTNQSGTSIMSSSPNRAGNKKLKNALWQSSFASIRLHERSRQFYERKRKEGKRHNAAVVALARRRLNVLFAMMRSGELYRDISTVREAAAA

SEQ ID NO: 438766 - protein, 452 aa, unidentified
MPPKRQRNGPWSTTTHILQPNAAGVDIGATEIYIAVPPDRDSQPVRSFRTFTAELKAAAEWLKQCRIETVAMESTGVYWVPFFQILEAAGFEVFLVNARHVKNVPGRKSDVADCQWLQYLHSVGLLRASFRPEQAVCAVRSILRHRDSLVQIVTIHVQHMQKALDQMNLQLHHVISDITGVSGMAIIEAILNGERDPMLLSQMCDKRVKASRQTIAAALVGDYRREHLFTLRQSLHAYRQCQDLIAACDREIEQQLAAFDSKVDPRATPLPKPKDRHKPRRNQMKFDLRSEMYRIYGVDLTAVPGIDALTAHVLFAEIGPDLSRFSTVAAFVSWLGLCPDNRISGGKLLSVRTRLVKSRVAKALRMAAQSLHRSQSYLGSYYRRMRTRLGTPKAITAAAHKLARVIYHLLATRQAYEESVFVRCEALHQQRLENRIRRQARALGFTLVRPST

SEQ ID NO: 438767 - protein, 303 aa, unidentified
MGVDVGKASLDVVIHEKQIHWQEDNTEQGIKRILKRLSHYQVERLVMEATGRYEFELAEAAYNRGIPVCIAKPLSVRRYAGAVEQLAKTDKIDAAIIAEYAAVVKPRISPRKSKNLIAIKNLVARRRQLVNLRTQEMNRKSIMGKMFEVSCRRMIRSFDAEIERMEKQLLKHVEQQAEWTEKKTILKSTPGVGDTLIYTLLSDLPELGTLNNREISALTGVAPINRDSGKLRRKRRIQGGRASIRSVLYMATLSATQCNPVIKAFYKKLVAQGKHKKVALTACMRKFITILNTMIKNKTEWAF

SEQ ID NO: 438768 - protein, 325 aa, unidentified
MSEPGAFVGIDVSKTSLEVAIDGGESWSAANQTEGIAALVERLRRQAVALVVMEATGGLESVAVAELAAAGIPVVVANPRQVRDFGKASGRLAKTDRIDAQMLALFAARMRPEPRPLASEEAQLFAALLARRRQLIEMLVAEKHRLGATRHAAVRTGINRHIAWLERQLENTEHDLDQRIRQSPVWHAREQLLRTAPGVGPIVSHTLIAELPELGQLNRKRIAALVGVAPLNRDSGLLRGRRKVYGGRRTVRTALYMAALTGVRSDSVLRDFYGQLRQRGKPAKVALTACMRRLLTILNAMARDGRAWSSTRLTVRIGPIAGHSC

SEQ ID NO: 438769 - protein, 400 aa, unidentified
MSKQRARIWVGIDAGKGHHWAAVVDETGATLWSKKIENDESAILTALGEILDLADEVHWAVDISSRPSALLLALLTAHGQQPVYVPGRTVNRMAGAYRGEAKTDARDAYVIAETARHRRDFATLDVPAQLAADLALLTAHRTDLVTDRVRTVNRLRDVLTGMFPALERAFDYSARKGALVLLTAYQTPAALRRRGQARLTSWLVNRGVRDADSVAATAVEAAQAQQTALPGEDAAAQIVADLATQILALDDRLKRIDRQIRDAFRTHPQAEIIESLPGMGPVLGAEFVVAAGDMTAYVDAGHLASAAGLVPVPRDSGRRTGNLHRPKRYSRRLRRVFYLSAQTSIIRDGPNREYYLKKRGEGCKHVQAIIALARRRTSVLWALLRDDRAFTPTPPITQTA

SEQ ID NO: 438770 - protein, 450 aa, unidentified
MATRNRALNRKGLELTHPNAAGIDIGSASHYVAVPADRDDEPVREFASFTADLHRLADWLRDCGVDTVAMESTGVYWIPLFELLDARGFTVLLVNARHVKNVSGRKSDVLDCQWLQQLMTYGLLRGAFRPSDQVCVLRALARQRATLLRTQARSVQHMQKALVQMNIQLANVIADVAGASGQAILRAIVAGERDPYALARLKNSRVHASDEEIARSLQGTWRAEHLFALRQALDAFDFCGGQLQQCDQEIEAQLQRLHITEVEPDKGKKRSKARNAPKFDLRTRLYQMCGVDLTRIDGIDVTTALVVVSETGTDMSKFPSDKHFASWLGLCPGTKITGGKVMSGKTKRCANRAAQALRLAAAALRTSQSALGAYYRRICSRMDKPKAVTAAAHKLARLIYSMLTKGEEYTDQGQAYYEERYRQRVLHNLNRRAQQLGMTLVPTAPGAQAA

SEQ ID NO: 438771 - protein, 479 aa, unidentified
MNIKARKAKKQVVINNSITNVLSQEELGRRIAAIKAGMKASTWRDLETNGKFAKNDKLTFISDDMLILGCDIGSETHYVRAIDSRGRELSRDAYPFSNTAEGFQSAKAWALQIAAEHDKQQIVLGLEPTGHYWFCLAAWMISNGISVVQVNPYAVKQTKELEDNSQLKDDRKDPKLIANLVKDGNYGMPYLPEDVYAELRRLSMLRDQLTEDRIRNINRLHREMKIYFPEYKDAFGKLDGAFTLTILEQAPFPEDILLLGADGVREIWHKAKLRGRGYSRADQIVKFAETSVGLRHGTDGGKEAVRWFAEQTMALSVKLDEIEAVLHEKCREIPHAGNILEINGIGENTLSGILAEMGDITRFDDVKEIQKLSGLGLVACSSGKHKGETRISRRGRRRLRYWLFQAAKSAVAHSDEFKTLHLYYTTRAENPLKKMQSLIVIACKILRVIFTILRTGQKYDPVKMLKDIKHPVPVAVQAA

SEQ ID NO: 438772 - protein, 343 aa, unidentified
MDHFAGLDVSVKETSICIVDDTGKIVREVKAASEPQALLKVLGNPTYRFKRIGLEAGPLSQWLFSGLAEAGLPVVCVETRHMQAVLKAQINKTDRNDARGIAQMMRAGLYRPVHVKTLRSQKLRMLLTHRKLLQSKAIAIENDLRGTLRNFGLKVGMVGKMRFEARIKELVESLPDLAELVEPLLIVRRTLRGQIVILHRRLLAIVRDDEVCQRLMTTPGVGPVVALTYRATVDVPARFRKSKAVGAVFGLTCARYQSGEIDWSGRISRCGDEMMRVMLYEAAQSMMRSKKWSWLKAWAMQIARRRGMKKAIVALARRLAVIMHRIWVDGTEFRWTREHAAAA

SEQ ID NO: 438773 - protein, 331 aa, unidentified
MEVFLERCAGLDVHQASIVCCVLIGVPGRKAQKLLRSFGTTTRELEALRAWLGEHGVTHVGMESTGVYWKPVYAVLEGHFDLIVGNAHHIKNVPGRKTDVKDAEWIAQLVRHGLVAQSFVPPPAIRDLRELVRHRRTLIETRTAGRNRVLKLLEEANIRLSGVASDVSGVSGMAMLAALASGTNNASEMAGLARGRMRRKHAALEAALEGRMREHQCFLLGMQLRSLGTIDRDLDALDARIGAQLEPYQAQHRLLMQIPGVDGVTAASIIAEVGTDMDVFTAARRLAAWAELAKVPRAKRVEYQRRAGSRRATTKARASRRVPAPAGATCS

SEQ ID NO: 438774 - protein, 417 aa, unidentified
MNPNWNEQPYYAALDWAKEHHDVIVVDRVGTIVADFQFAHTAQGWEEFSQKMQPFGKCPMTIETSAGMAVDQLLQRGYSLYPINPLSAKEYRQRKAPSGTKTDRQDAWSLADALRTDGQAWRVLIPQDEATATLRLLCRDEIALIEHRTALVNQLEATLRDYYPLAQESFEDWTKPFAWAFVRSFPTPAALAQAGKRKWQNFLHAHKLWRPDTAAQRLALWAGGQQLNASPSVLNAKSLLALSLVNVLETLQRQIQQYRSRITEAFAHHPDHDLFGSLPGAKRTLAPRLLGLIGSQRQIFPDADSLMCQAGVSPVAYQSGRLRKAHLRFVCDHFLRHTVHLWVDETRKTCPWAQAYYQAKRDKGHDHASALRCLGKRWLKVLWRMWQDHTTYDENKYLQALQQHGSFVWPKLQSLSL

SEQ ID NO: 438775 - protein, 439 aa, unidentified
MNEISKYQSFEIMKSEVQTKEKKALFIGIDVAKDQHVACMGDNFGYSDDKVFSFSNDSKGYEELLKRVGLKISDHDYVIFGVEATGGYEKALSEYLHNKSYGVVRVPTVSVKRERELATGSWHKSDKRDTQAITRIMQRGVFQYYRFRDEHWENVDNLNRLNHLLTKRAKILQTTIRVNILPLIFPELNNYLQRLTTRFCEQLFQYYPSPHHIISISFEEFCDDMRNKAKITKNLKTDLKRIYDLAQKSIGKNQNYGSSKTLELRYLAEQLEMCQRQKRDVSKRIKHLLETHESFDLLQTIPGIGKKNAPVILSAIGDINRFTHPNQLISFFGLNLCYYQSGKYEGQKKISKLGDKKVRHALWLGVHNIYHKEGTHFYEIWQRKTQGKTLSAVRKRKLKVMLMVKLTRIIYSVLKNQTPYSTSYQSEKDTLLQDQGALE

SEQ ID NO: 438776 - protein, 341 aa, unidentified
MGQASTIGLDIAKWVFQAHGADATGRVVFRKRLVRAKVLEFFAGQPPCLVALEACGGAHYWARELGKLGHTVRLIPPAYVKPFVKRQKNDVADAEAICEAAQRPGMRFVPVKDEAQQANAVVFRARDLLVRQRTQCINALRGHLAEYGHVVPQGPAHVDSLVALVEDPKSSVPESARGILQVLIRMLNALEEQLKELDGEIARRAKADPVARRLMTIPGIGPIAATAITALVPAPEGFRAGRDFAAWLGLTPLQRSTGGKHKLGAISKMGERTIRRLLILGASAVVRWASRRGAAAGSWLARMLARKPRMLVTTALANKMARIVWALLVKGGTYRAPAVAA

SEQ ID NO: 438777 - protein, 408 aa, unidentified
MKKHSSFSKSGVSVKEVKPMRRESQDVMAELVAQLKKQLEGERIVEPDDQSAADWERSNLDRLTVGVDVGDQWSNYCVLGLGGETLAEGQFRSKPEDVGEFFAGVAESRVVMEVGTHSAWMREVIVGLGHEVLVANARRMQGSKRRRRKNDRIDAARLARLGRVDPTSLYPIQHRSAEVREDLLVLRAREVLVESRTKLISAVRSMVKTVGARISHSSSEAFSRKAVKEMPQQIRDTVQPMLDLIAQLSEAIKSYDRRINQMADEKYQHTRLLRQVAGVGPVTALAYVLTLETPLRFKRSRDVGPYLGLVPKQEDSGDIQPQLGISKAGDRMLRKLLVGSAHYILGPFGPDCDLRRFGNRLYEHGGKNAKKRATVAVARKLAVLLHRLWISGEVYKPLCHLRPQTVAA

SEQ ID NO: 438778 - protein, 315 aa, unidentified
MSDVPCFIGIDVAKARLDIALRPSGERWAVPNDASGVAMLVERLQTLHPTLIVLEATGGLERAATSALAAAGLPVVVVNPRQARDFARATGQLAKTDALDARALAHFADVIRPTPRPLPDAQTQDLRALLGRRQQLIGMRTAEQNRLAGASERLTKDITAHITWLNAAIATLDDDLETLLRASPLWRENDDLLQSAKGIGPVSAHTFLLELPELGTLTRQQIAALVGVAPLNCDSGTLRGKRTIWGGRAHVRTVLYMSTLVATRFNPQIKVFYERLLAAGKVKKVALTACMHKFLTILNAMLKHRTPWQPQEVQS

SEQ ID NO: 438779 - protein, 351 aa, unidentified
MSAKFNSEIVVIGIDIGKNSFHVVGHDKRGAIMLRQRWSRGQVEARLANLRPCLIGMEACVGAHHLSRKLQMLGHDARLMPAQYVRPYSKGQKNDFRDAEAIAEAVQRPTMKFVATKTAEQLDLQALHRVRERLVSQRTGIINQIRAFLLERGVAVRQGLRFLRAELPRILAAPCDILSPRMVRVIEDLAGDWRQLDERIEGISSEIEALARQDKGCERLMSVPGIGPIISSAMVAAIGTGDAFSKGRDFGAWLGLVPKQISTGDRTILGSISKRGNRYLRALFVQAAWVVLVKVGSKRWEHYGLKSWIEAAKKRLHHNVLAIALANKLARVAWSVLARGRAFEAIRIQAA

SEQ ID NO: 438780 - protein, 339 aa, unidentified
MNRTVVGVDIAKRVFQLHWVELGSGEIVSVQLKRAKFLEHFANRLPCLIGMEACGGSQHWARELHKLGHEVKLLSARMVKAFVSGNKNDAADARAIWTAVQQPGIKAVAVKSEGQQAVLALHRMRAQLVKFRTAQVNGLRGLLAEYGEVLPQGRAGIRRDVPAALERVAERLPAMVIETLREQYARVGELDEQVQRIERRLQQWHRQDEASRRLAEIPGVGVLGATAALATIGDAQVFRSGREFAAWLGLVPRQSGTGGRVRLLGISKRGDPYLRTVLIHGARAVMTHSKAPPEWARQVAERRPKNVAIVALANKMARTIWALLAHQREYEPLYASRPA

SEQ ID NO: 438781 - protein, 448 aa, unidentified
MSRPQVIDDVEHERVWDVVAAVDVAKKDGVVCVRRPHPSEPGVRQSHVSSVPATVGAVAALGAELAGAGVQMVTLESTSDYWRIWYYVLEAAGVAVQLVSATQVKQVSGRPKTDKLDAVWLARLTEKGLLRPSFVPPAEIRALRHYARARTHLTGDRTRCWQRLEKLLEDALIKVSSVASKLTTLSVRDMIEAMIAGERDPQVLAGLARGRMKAKHAALVAALTGMFADHHAQIAQILLDQIAFLDGQVATLTTAIEDAIDAIPAAWGADPLGGTGTGAGTGPDAAALPAVMRLEEIPGVSAELACSIIAETGLDMTRFPTPGHLVSWAGLCPATLQSGPRTRHGKGQGNTYLRGYLGQAAAGAAGTATFLGERHARIARRRGGGRAQVAVARSILVIIWHVLADRGTRFADLGPGYYETKINNNRRARAHVRQLEALGYTVALTQAA

SEQ ID NO: 438782 - protein, 397 aa, unidentified
MDSNYAVYCGIDVGKGEHHAVGLTAAGKKIYDKALPNDEAKLRAVFDRLASHGSVLVVVDQPNTIGALPVTVARVGGHDVGYLPGLAMRRIADLYPGQAKTDARDAFIIADTARTMPHTLRRVDTGDEALAELEVLVGFDDDLAGEATRVSNRIRGLLTSIHPALERVLGPRITHPAVLEILSRCGGPAGIRQAGKRKLTAIAVKHAPRMGARLATDILAALDEQAVVVPGTAAAETVLPKLADSLKETLSQRKAVAADVERALDDHPLTPVLTSMPGIGVRTAARILIEVGDGSAFPSAAHLAAYAGIAPVTRKSGSSIRGEHPARSGNKKLKRALFLSAFAALHDPTSRAYYDKKRDEKKKHNAALICLARRRCDVLYAMLKNKELYRNPTPSAA

SEQ ID NO: 438783 - protein, 422 aa, unidentified
MSSPATFFLGVDGGARHHQLCLLDPAGEVLGEARFGANLAGLAQLRAWLASHGPAEALCAAIERPAGPLVAALLDAGLTVWAINPKQLDRFRDRFNPAGAKDDRLDARVLADSLRTDPRAFGQVRPAPGPVETLRGLERLRAQLVAAHLAVGCRLAAVLEEYFPAALELLDGGVPDRLLMAVLEVTCDPAQARRVQTATWARILAAGRFRRLDAAGLTAILRQPSPPLAPGVVAWGQVAAACLVAQWRLLDRQRRQVEGQIKTLLAQLTKPDPAADRPTAGVLAAVQSMPGVGPVIASTLVGEAWDLLVNRDTARLRAQAGVAPVTRQSGRTRWVLRRRACNPRLREAVYHWARLAVQRDQAWRARYAALRAKGHRHARSLRTIADRLLRLLLAMLRDGTTYDPARLGSRSPDKPNAVSAGA

SEQ ID NO: 438784 - protein, 409 aa, unidentified
MQVVHEVCCGLDVHKKSVTACVLWASGRRRQTREFGTFTRELLELADWLRACGVTHVALESTGVYWKPVWNLLEGQFEVLLVNAQHIKAVPGRKTDQKDSEWIANLLQHGLLRASFVPPTPIRELRDLTRYRASLAQEINRIANRMQKVLEDANIKLASVATDTLGVSGRTMLEAIVNGEQDSQRLAEMSRGLLRNKIPQLQQALEGRVTEHHRFLLRELLDHLYFVESKMRRIEQEVEERLGPFQHEVVRLCTIPGVDRVTAWGLLAEIGLNMRQFPDAQHLASWAGLCPGSHESAGKRKSGKIRKGSLWLRRCLCQAAWAVSTKRNNYLSALYRRLAARRGSKRATIAVAHNLLVIAYYLLRDQTCYQDLGPDYFDRLNPEGLRRRLTKRLENLGFKVILEPSAHAV

SEQ ID NO: 438785 - protein, 356 aa, unidentified
MQAKIKALVDDYDRFIGIDHHKRTSYLTVKDREGNTLKRGNIPTSKNALSLFLDDGENEDGSASIAVFEAGRCYRPMYRWLSEMVETVVLAHPGGLKIVSDTVYKDDKLDSEKLADLLMLGMVPEAHVASDEAWDRRRVIRHRVLMVQMQTKVKNRIHATIDLYPDAEPTRPEVSDIFGKLGMHWLQRLELPLQERRRLDELLDILDFFKKKVSASDALVRNIVRQDKRCQLLKTIPGIGDFFAALIAAEVDDINRFPSSKHFVSSIGLVPGRDDSGDRERPGRMHKKGNSYLRWAVVEAAIPATRSNLALKNHYDRILARKGRKAGPNIAKVAVARKLAEIIYRILKDERPYEHR

SEQ ID NO: 438786 - protein, 384 aa, unidentified
MTDIQYHSTIVPRDYDIFIGLDVDKKRMAITCVDHGTLQKSLSLPYSGRQLLNYTARHFPEQRIAFVYEAGPTGFGLHDELSAAHPCLVVTPAMVPNAPRKRVKTNRLDSKKLAIGLRGGELQGIHVPPQTYRELRQLVQLRDTQTAQLRATKCRIKSLLLYEGIAFPEPHEKWTVAALQGLETLSCNATVRFKLDRLMDALQFHFQMAAQVQKELRRFCNQDPELRQSIKLLTSLPGVGTITATHAVARLGDWRQIKNERQIAGFLGLVSSEHSTGEKENRAEITRIGDQRLRNKLVQCAWAAIRKDPELRAFYRRIYARQPKKVAARKAIVAVARKLTTRIYVVLKQQRPYEIRADSTIAPLTAEETIGLRERLDIAQNDEQ

SEQ ID NO: 438787 - protein, 345 aa, unidentified
MEQISRIGMDTSKHIFQLHGVNTAEEPVLRTKLRRKEMFAFLEKLAPTVIAIEACGASHHCARLLQSFGHSVKLIAPQLVKPYIKRGKNDAADAEALCEAMSRPGMRFVPVKTAEQQAALMLVGVRDRLIRNRTQLSNAIRGYAGEFGLTAAKGKAHLDPLLERIHADESLPALARELFAAQAEEYAQLQAQIDNVDARLMAWHRADECSRRLTRIPGVGPIGAVLLTMKTPEPELFRSGRQFAAWIGLTPKDHSTAGKLRLGGITRAGDEGLRAVLVVGATSVIQHVQRGGRPSPWLTELLKRKSPKLAAVALANKMARIAWKLMVTGENYATRSAPATLAGAA

SEQ ID NO: 438788 - protein, 342 aa, unidentified
MNQYAGIDVSLECSSVCVVAANGKILREARVASEPEALIAWFRSCGFELERIGLEAGPLSQWLVAAMRKAGLAVELLETRHVRKAFEAMPVKSDRNDARGIAQLMRLGWFRPVHCKSMSAQETRTLLTARKLVQSKLRDVENSLRGILRGFGLKVGKTTEREFAGRIEELVVGHRHLQVIANALLAVRAVLRKEFAAFEKQARKMARSDTRARLLMSTPAVGPIVSLTYASAIDDPGRFKSSKQAAAHFGLTPKKYQSGETDYTGRISKIGDSSVRTALYEAAHVMLTKPLKGCSQLKSWAMRIARRAGMSKAKVALARRLAVIMHRMLADGTPFNAAAAAA

SEQ ID NO: 438789 - protein, 405 aa, unidentified
MEHVIIGVDPHKLSATIEVVDQHEELLGSGRFSTDQAGYSAMRKYAKTWPDRVWAVEGANGVGRPLAQRLLEAGEDVVDVPAKLAARVRLFDSGHNRKTDARDAHSIAIVAVRTSNLRVLRVDGELEALRLLADRREALTRRRVQIVDRLQALLAELLPGQAKKDITPVQAKAMLAGVRPRDIAGKTRRRIAAEELAELVAVDSKIKKATAELKAMVLARDSRLMDLRGVGPVVAARILADVGDVTRFADRNRFASWTGTAPLDASSGEQNRHRLSRAGNRRMNHMIHIAAVTQLRLDTEGRAYYRRKRADGKKPMEAMRCLKRRISDAVYRQLVADAQRAALTAFSTGAGPGGHSGATLTSSAVDLPPHIDTSDQPLPGPAKSTLQPTQRPRKSTPNRTPQMTS

SEQ ID NO: 438790 - protein, 407 aa, unidentified
MEVIYRRCCGIDVHKKSITACLNAGGNREVREYGTTTRDIKELASWLTENECEMIAIESTGVYWKPLYNLFELLDLNAMVVNAAHMKALPGRKTDVKDAEWISDLLRHGLLRASYIPDREQRELREIARYRKSLTEERAREINRLQKVLEGANIKLSSVVTDINGKTSRMLIDAIISGETLNADDIEQKLHFKLRPKLDAIMLSIEGITTGLQRKLIEQIVDHIDDMTRRIEGFDDIIKDYMGRYEAAVALIDDIPGIARRSAEVIIAEIGVDMSRFPTSSQLCSWAGVSPGNNESAGKQRSGRTTKGNKSLKTALVQCSKAAVKDKDSYFCAQYQRIAARRGKNRATVAVAHSMLTAIYHMLKNNVPFKDLGADYYDNFNREYKIKSYLKRLDALGWSPEVALSTV

SEQ ID NO: 438791 - protein, 404 aa, unidentified
MTKYHVGVDIGKQKHKACIRTVSQDSYSGVFSVPVSREGFEKLLTTLEKHSHDKDDFVIGIEATGNYGNTLAYFLLSRGYKVEEINPYRANQFRKAQGKKAKSDRIDARSLAAMISLGNHKPLSIPDPTIDNLRELTRFRADLIKDRSALVNQLHQCLVSLFPEFATHFGKLDSSTSLSLLISYPGPEQICHAGEDRVMQALTIASHGRVGKTLAKALIEAAHSSVGIIQRQPALAIRVTTMAERILALNAAITKVEEKIEDLFAKLPYNPNDFPVGNICSLATIIAEIEDINRFPTLKQFLSHFGWCPRSFQTGNYRLEHPRMSHAGNRYVRRLIWMLSIIAIRTVPRYHAYFQRRVEAGKPKMHVIVAVGRKLLSVFYAILKTGIPYDPNWEVNRHLALARS

SEQ ID NO: 438792 - protein, 332 aa, unidentified
MDLLAIDLGKQSFHIHGITSEGEIISRKVSRVKFKDVVASLAPVTVAMEACASAHHWGRQFEALGCMVRLIHPRFVKPFVKGSKNDAVDADAIYEAALRPTMRFVPVKTTEQQDLQMIHRTRDRLITQRTALINHIRGLLAEYGVVIPVGAFRFRNNIAVAVASAALSRLAADMFTALIAEFQMLDTRIAELDRKLVDICRTNEQCRRLATLPGVGPVVATALVAAIDDGRHFASGRALAAWIGLVPRQYTTGGKPRLGGIGRRANHYLRRQLVHGARSVLYRIDNKDDPRSKWAQELLSRAGHNKTLVAMANKTARMAWAMLRHGENYKMA

SEQ ID NO: 438793 - protein, 370 aa, unidentified
MDMTDFTKLSDYLTPFSKDEILIVMEATGIYHLTLLSYLLEQDLDVSVVNPLFIHAFTKSMTIRKTKTDSKDAHIISIFAKRNSATMRLSSASDIETIKPIVREKEKLTNQMSAIKTDIKSLVNQLFPEMLKNTNIFLKSSLNLLLQAPSKRIIRNLKEKKIESYLSQDNTRGAKPKLSAKEILLLAKSSIGINNQSLEKILVSKIKQLEFLQIQLDEYNEIIEQFVDEHHKDDIGLLTSIGGVGKPSAASFLTELGNINNFATYKQLTAFIGTDPTIYQSGTSVNVKGSISKRGNSHLRRTLWHMARAATVWNTTLKEYYDKKRNEGKTFKQSVIAVANKLIRIIFSMLKNNTKFDVNFSNLAIKNASN

SEQ ID NO: 438794 - protein, 341 aa, unidentified
MEQATTIGLDIAKHVFQAHGADGAGHVLFRKRVTRMKLLGFLAAQARCVVAMEACAGAHYWAREIAKLGHHVRLIAPAYVKPFIRRQKNDAADAEAICEAAQRPNMRFVPVKTEEQQANGIVFRARDLLVRQRTQCVNALRGHLMEYGYVFPKGITHVEALVALVEDPQSALRDSVRVILKLLVDTFTALDSQIAALDAEINQRSKSDPTARRLMTIPGVGPITSTAITALVPAAEGFPAGRDFAAWLGLTPLQKSTGGKQKLGAVSKRGERTIRRLLIIGASAVVQQASRRGAPKGSWLAQMLARKPKMLVIVALANKMARVIWALLVKGGTYRTPAAAA

SEQ ID NO: 438795 - protein, 473 aa, unidentified
MARKKGKDPAGIGGPGLTGEPAGVSDEPAEVIARAAAIDVAKGSGMVCTRVPHESGPRRRVQRIWQVSARYSEIAALMAELAKLGIQRLVLESTSDYWRIWYYLAEAAGLEVWLVNARDAKHLPGRPKTDKLDCLWLCKLNERGMLRRSFVPPEAVRDLRALTRLRSRLAQDQARHQSRIEKILEDALLKISSVISDLMGASGRRFLAALVAGERAPDKLAALGDRRLKASPAQLEEALAGRFRDIHALEIGMLLELIDDITAKMARLDAEITARLARIPGLAPACAGCGEIGGGHAPSCPQAGAPVLSVIERLDELTGIGIDAAQVIVAELGTDKTTFPTPGHAAAWAKLASRTIQSGSTSKDGRTGKGNPYLRAVLGRAAMTAAKTDTYLGERYRRIARRRGKQKAIVAVSRTICEIAWMIITDPSVRFSELGPDYYARLDAGRQTRNKIRELERLNPGMKVTLTPAATAA

SEQ ID NO: 438796 - protein, 374 aa, unidentified
MDYNTKYVGLDVSKEKIAVAVADSGREKPRYLGMFPNTMESLRKIIKKLGDPSNLQACYEAGATGYTLYRWLLLLGVQCDVIAPTHIPTNARDKIKTDKRDAIRLAQLHRAGELTSIYIPTDEDESYRDLVRARDDAKKEEKRVKARISALLLRYDLHPKEKVGTKWKSKYMEWLEGVKFSQSLTQTVFQEELHALHVCRERVKRYEELMKEIEENSMRNSLIKALKCLRGVDTITAVSVASEIMCFSRFHNPQQLMSYLGLVPSESSSGPKQSKGEITRTGNTLVRRLLIEAAWSYRYQPALKGSLKQRNEGQPKEIQAIAWKAQKRLHQKYHRLMHKGKPHPKVTAAVARELVGFIWDIARHIEMEEMELVS

SEQ ID NO: 438797 - protein, 432 aa, unidentified
MDEAVKPTTKSEGKHMKIHKYLGLDVHQDDTVIAVAEGDRTGEVRLYGKVSSDLYATEKALRKIRGEHGVLHVAYEAGPTGFVLYRRLQQLGIDCIVVAPSKTPQPKGGRQKTNRRDALQLARLHRAGELTGIHVPDEVDESIRDLTRARSDASRDLKRAKQRLKSFLLRQGYHYTGKANWSEAHQRYLRELVLPLPALKAVLEEYLQAIDRCTERLTRLEELLVAQVPQWRLYPAVQALMCLRGFELVAASILVAEINDVRRFAHPRGLMAYLGLVPSENSTGPTRRLGAITKAGNAQARWILVEAVQSADNPPKVSAPLALRQQGQPEAYRVLGWKTQVRLYKRYWHLTRRGVMAAKVKVALARELVGFVWDLLRQVPVMGGPEKAVVALAPGSRSATRRHPPGAPLPALVGNEAVSPSLLLPPNPVFVL

SEQ ID NO: 438798 - protein, 346 aa, unidentified
MTIVEDACAITGGVDTHADAHVAAALDSTGGLLGVCEFPATAAGYSGLLDWLGGFGQVALAGIEGTGSYGAGLARHLAAAGIRVVEVDRADRQDRHRQGKSDPLDAVSAARAAQSGRAAGAPEGRDGAVEAIRALMVAKRSARHERTQAINQARALIVAGPEEPRARFARHSPAQLVAALAALRPRPGDVTGYATRVALRELGRRARFLDAQIGQLDELIVPLVTARAPGLLALHGVGADTAARLLIAAGDHPARLRSEAAWAHLCGAAPIPASSGKVTRWRLNRGGNRDANHALWRIVICRMSSHPATRSYVARRSKEGLSKKEIIRCLKRYVAREVYPYLRPAR

SEQ ID NO: 438799 - protein, 342 aa, unidentified
MGEVTIIGVDLAKNVFQVHGAGADGSVLFRKKLSRPQFARFMADQPPCLVAMEACASAHHWAREMARHGHEVRLIAPHYVKPFLKRQKNDAADAEAIVEAALRPTMRFVEPKSADQQARAVAFRTREQLVKQRTEAVNALRSHLYEFGHVAPEGIGYLPRLAKVVDDPDTDVPDLARDICRILLDQIALLTDRINALKARIAAMSDEAEMPRRLQTMPGVGPITALAVETFAPPMEQFRRGRDFAAWLGLVPRQHSTGGKQKLGKTSKMGQRDIRRLLVIGATAVIRWASRRGAPAGSWLARMLERKPIPIIAMALANKMARGIWAMLTRGESYRGPVLIGA

SEQ ID NO: 438800 - protein, 378 aa, unidentified
MAQSTTIVAFDQHAATTVAAVLPPGHRTPALHPMTSDVATLGRFVERLRRQGPVQCCYEAGPCGFELQRYLGGRQVPCDVIAPALIPRRAGDRIKTDRRDAAQLAVLYRAGALTAIHIPTEQEEAARDLLRCREDIRADLLRARHRLSKFLLRHGRRFTTTHAWSKRHDAWLRTQTWPLPALDQTHRAYLRTVDEAVARLRAVEQDLRALLDLEPLRARAARLRCFRGVDDLTALTIAAELGDPARFPTAPSLMAFVGLVPSEHSSGTKQSHGAITKTGNAHLRRVLVEAAWAYRHHPFVGQTLARRQCGAPADVVAHAWTAQQRLHRRYARFAARGKPRQHIVTAVARELTGFLWAALVPSADRPSVERRILGRSMR

SEQ ID NO: 438801 - protein, 466 aa, unidentified
MTFVNGEVQARFMARIRGVDPQRCLAIPVDVGKATAVALVADHYGEIIVGPFEFALTEAGFAVLSAAITRAQVERDALIVRIGVEAAGHYHRTLVARLRAAGLEVVELNPKAVKDARGQQLLRTLKSDARDCGAMAELLIRGSGRPPQCRDEALAAQAAWVAHRRRKVAAQVVLSNQIHGQLDLIFPGLTGCFANGLDAASLRVLIRDLPDPDRVRRLGVEGVLRFVRRRGVRMSRPKAAQVVQAAQQALRLPGPERPAPLVVLAADWALFEALDQQIHDATTQLAALLPDTPAGVLLGIPGVGVLTASSYGAAIGDPNRYRDAAAAYRASGLVPISYQSAGRTRPRTGISREGSVELRRAIVELGRGVGLHHPDFIAYRRRLLSRGKPPLVTMIAVGHRAHRLAFAMLRSQRPYNADRWARAVAGHRHRADEQARHGDTTAIGGPPARRDLPAQPTLTHPEASSN

SEQ ID NO: 438802 - protein, 324 aa, unidentified
MIDGVLGIDVSKNTLDASMSSCNKVRARSFANSPDGWRHLLDWLITQRVRRVHACLESTGRYSLGIAGALNEAGHVVSIVNPAQIRDFARTKLGRNKTDGVDASHIREYCELFKPQPWAPPSEAHRRLGELQTIRAGIIAGLTEWKNRKNSGMIDAVAQSLADVTISHFTSQLVAVDEAITQTIDNDPVLRRKRDLLLSISGVGETLAGVVLAELPGPDVLRSGAEVVAYAGLNPRLHQSGTSIDRMTRISKIGNAVLRAALYMPAMSAMQHNPAIVALVARLKSRGRLKPKQIVVAAMRKLLVLCFGVLKTGKPFDPAIAMGC

SEQ ID NO: 438803 - protein, 343 aa, unidentified
MQTITTIGLDIAKSVFQVHGIDAEGTIILRRQLKRRYVLVFFQKLPPCLVGIEACASSHYWCRELKALGHAVRLMPPAYVKPYVKRQKNDATDAEAICEAVRRPTMRFVETETPEQQSCLMLHRTRHLFIRQQTAVVNAIRAHLAEFGIVAPVGRRGVEELLNVVADANDERLPEVARACLAALGDQLRVLKAQILKFDRMITVWHQSNEMSKRLDELPGVGPALATALVASVADPKAFRSGRNFSAWIGLVPKQSSSGGKQRLGGISKQGDRYLRSLFTAGALAVIRYAKIHGTGHRPWLTALLARRSTKVAAVALANKIARMAWAMMARGERYREPVALAA

SEQ ID NO: 438804 - protein, 356 aa, unidentified
MAIVAHTRPFVIGVDTHARSHSYAILTAATGEQNAAKQFPTTPAGLNRAVDWASRLVGGDLAALWVIEGAATYGARLARIVADTGYEVAEAARMNARAHHSVGKSDPLDAHRIGAAVLPLENDRLRHPRADDGLRPALRVLTTAREHMSTERTANVNALTALLRTADLGLDARRPLTNGQIIEVAAWRTRSENLALSAARAEAHRLAKRIRALDAELAENRSRLEDLLHQSKAAPLLDLAGIGPVTAAVAYSAWSHRGRMRDEAAFAALAGVSPIPASSGNTTRHRLNRGGDRRLNRALHMATVTRMVHDPETRAYVARRRAEGLTTKEIRRCLKRYLARRIYRTLEALHAAPAMA

SEQ ID NO: 438805 - protein, 366 aa, unidentified
MFTNIIPAARERWVVGLDVHARSISASALDLTTGELINAHLAAETTAVLRFLTGLNGPAAVAYEAGPTGFGLARALDQAGLRCVVAAPSKIARASGDRVKTDKRDATLLARRLAAADLTAVRVPTPTEEAARDLTRAHEDARTDLMSARHRASKLLLRHGIVYSGGRAWTLEHHAWLARIRLPQPASQTAFDDAHQHVLLLEARKKNLAHQVALLAAESEFTGVFHALGCLRGIAGITAMSLAVEIGDWDRFTGASIGAYLGLTPTEHSSGGTRRLGPITKAGNPHARRLLVEAAWHHRPGYRVGTILQARFDAATPTQAARGHEGNLRLHRRWEHFDTEHKRTTVANIAIARELAGWCWSLATTR

SEQ ID NO: 438806 - protein, 436 aa, unidentified
MRFKDYGRKPKLRKEFVNNPKLLIVGVDIGKLSHSACFGTNSTVLSKKFDFKNSRDGFKKFEFNIRKMRKTTKCKQVLIGMEPSGLYWYGLYERLKKCGFSVCLANCMAVKNNRKTMHDGSSKTDPKDAHSIYDLLTQGKFFLPVERDPELAAAYKLMRKHMFLKKRISRLRNQIRGALHLSFPELNDVIKDLTLPTSLRFLQSNPTPESVMRNGKKRFIQKWHPRRRCGQWRPDKFNLIYELAKVSIGLKDPQRIDEFEIKTMAKDLEDAVTKSQMWLDKAIELVCQRDDFGLLMSLPRIGKPTATAILTAIGNIDEFAYGKQLVKLAGLDIRLYESGTSIKKRPRVTHIGSGYLRHWLYHYAMRLVAFDPDFQCLFERRKKNSPGKGVGQRALVAICDKILRIIYRMLKDQVKYSPEKDKIVAANYRQQSKLAA

SEQ ID NO: 438807 - protein, 350 aa, unidentified
MNVQHFIGFDVHKKSISYCVKTGDGTIVEEGKVAARRESLRQWAGKRSEPWHGAMEATMFSGWIYDTLKPFAAELQVGHPAMMKAIGASKKKNDKIDARKISDLVRCNLLPVCWVAPSEIRELRRLLHYRNLVVKQAVQMKNKISGLLMESGAEYNKKRLHGEKYFAELVENLEEVPESVKDLLRLSRGALETFQATQQRLLASLQKHPRLAERVKRLKSIAGVGDVTALTWALEIGDPQRFSSIGKAVSYCGLTSALVSSADKPQRQPISKQRNAHLQTVLIEAAKLAPRWNAQLAAVHERELKSGDRNRATLEVARKLVAYLLAVDKSGKEFEIRISAEPEKEGQPGT

SEQ ID NO: 438808 - protein, 341 aa, unidentified
MLLIGCDYHPSVQQIAWVNTETGECGERRLTHCAEAEQFYRELKQQGTSVCVGIEATGHSRWFERLLAELNFELWIGDPAQIRAKQVRKQRNDRRDAEHILKLMLKDDFPRLWVPTPENRDVRQLVWHRHRLVQMRTRVMNQLQAIAMNEGVRRKRGLWTQQGRAQLEALPLPPWTTRRRQELLDLLDRFDPNIDELSEAIEQEAQRRPEVERLQTHPGVGAITALAYVLVLGTPDRFRCGKQVGSYLGLIPCEESSAEHWRLGHISKQGNALLRYLLVQSALSAARVEDEWRRQYAHLAMRRHHGIAKIAMARKLAVRLYWMWRRGWDYQQLREFGSHVG

SEQ ID NO: 438809 - protein, 312 aa, unidentified
MDKPIIGVDVSKEWLDCATAGGSARIERIANTREAVTALLDHRQPALVAFEPTGGYERVLQQALRERGIVFVRVHPNDVIAFRKSRGIRAKTDRIDAGLIASFAADELTRRGLRPSITGDEALRELAARRRQLVNMRQAEGCRLALASSAAVRESLSLMLELLTESMRHLEQEIASRIAADPELARLSDLLQSVKGIGPIVAMTLIAELPELGKLNSKEIAALVGLAPHTRQSGKTRHRESTGHGRPSVRRVLFNAARSAIRVQSPFKNFYNRLVDQNQRPGPVALAAVMRKLLVTANAIARDRQPWKFNTA

SEQ ID NO: 438810 - protein, 409 aa, unidentified
MAMLDVALDPATVVVAVDPGKVMNRVWVSNGDGLLEQPVSLPVARAGIAALERMLAAHSGERVIAIEATGSLHRAWAAELERLYPGALRLFAPSEAKAARTQLGSARFKTDDRDCAALTYLARQGAGRRQVEESVVDTLRAAVRHRRGLVDDRKKAQQRLHDQLNGLCPGLSAPAGHGRELPIETPTGQAVLACAAAFAGRPPTMRSLIARAPGRLTKTNAEYWVQRWRGCLPPPPDAEQRAQRLGRDLARFRALQIDIAAIEEEMKAWLAATDGQILTSLPGVAVLRAAAFAAHTLPIARFPDAEHLYSATGLAPALYESASLRKRSRISRQGLAEHRDALMGIAWGLSLFSPSFAERDAELRARGMAPIQARVALARNACRLAYRLLVTQQPFDEEAYRRGRLRRGR

SEQ ID NO: 438811 - protein, 339 aa, unidentified
MDKIPIVVGLDYHNQSVQVAIMHASHIPELLANQSLPNDAAAIERFAAKFGTVERCGIESCGGAANLAQELISKAAWTVDLAHSGIASRMKNNPDKSDYADSHVIADLERVGYLPKVWLAPERLREFRTVVRERTSLAKDQRRLKQQVGAVLREHRVTCPQRPRAWSKPWTQWAATVELPAPSRWVINQKLKRLQQRHQDLILVEAYLAELTRADPVITRLAKTRGIGPVTAWILGAYVGDFSRFKNGKQLARYCGLSPRNASSGQKQADAGLIEFANNDLRSALIEVAWCLIRYNPRWKTLANNLRARGKTGSIVAAAVANRFVRGLWREMTRPPRGT

SEQ ID NO: 438812 - protein, 353 aa, unidentified
MDSKKYIGMDVHKESISIAVRNAAGKLVMECVIETKANAILDFIHGLGGELQVTFEEGTWATWLYDLLKPHVTRLVVCDPRKNSRQGNKNDQIDARELADRLYMNKLSSVYHGGAGVRTLKELARSYLTISKDLARVMSRVKAIYRSWGIPCAGKQVYALRHRAEWLAKITEVGVLRRAEFYYQQLDALRPLRHEVRRELLAESKKHPVTKLLCQIPSIGPIRAALLIALIQTPHRFRTKRPFWKYSGFAIEMHSSADYRSVKGQLERTQKQVSVRGLNRDCNHDLKNLFKSAATIASVKPGPFQEFYAALVAKGMRPEMARLTLARKIATIVLIVWKKGVSFDAQHLKPQTV

SEQ ID NO: 438813 - protein, 343 aa, unidentified
MELYIGLDVSLASTAICVVSSHGKVIKETTAASEPEELERALQSLPGTVVGVGLEAGPLSQWLHRHLTEAGFDTVLMETRQVKGALKAMPIKTDRRDAEGIARLLQMGWFRQVHCKSISAQEMRALLSARKAIQQAIINLELSIRGVLRNFGLKMGRVAKGRFEDRVRELADGNVMLQAAANPILTARKVLRTELAGLEKLSRDHAKSDPVCRQFMSMPGVGAIVALTVKSAIDDPDRFRSSKDVGPWVGLTPRREQSGERDILGAISRAGDVGLRTALYQAALVMLNLGRPSWLTAWAWNVAKRRGKRRATVALARRIGVILHRMWQDGTEFRFKRIETAAA

SEQ ID NO: 438814 - protein, 411 aa, unidentified
MDVLYKTCCGIDVHKMKLVACLCKGHKQEIKEFSAKTKDIKAMTNWLEENQCEMVAMESTSVYWKPLVNIFEMRGLNYMIVNAKDFKAVPGRKTDVLDSAWLADLLRHGLLKSSFIPSREQRELREATRYRKAITEERARALNRLQKLLEGANIKIGSVLSTITGKTTMNLLDYVLNNDEMMDEKTAETLIISRISASVKEVTEAMEGIMTPFQKMMMKQVLTHLHELSERIEEMDIIIDTYMAEYWGAIKKLEQIPGVGKKSAEIILAEIGLDMNQFPTAGHLASWAGVAPGNNESAGKRKSGRTRKGNKILKSTLAQAAKSAAKNKNSFFHAQYQRIAIRRGKNRATLAVAHSILIAIYHLLKDDQEFIDLGSDYYYQFNTEKKINSYLKKLAALGYRVDEHSTISPVG

SEQ ID NO: 438815 - protein, 353 aa, unidentified
MTSTKYIGMDVHKESISIAVRNDAGKIVMECVIETKANVILDFIHGLRGELQITFEEGTWATWLYDLLKPHVWKLVVCDPRKNSRQGNKNDRIDARELSDRLYMNKLSSVYHGGAGVRTLRELARSYLTISKDLARVMSRVKAIYRSWGIPCAGKQVYAPRHRAQWLAKISEVGVLRRAEFYYQQLDALRPLRHEVRRELLAEAQKHHAWKLLREIPFIGPIRAALLIALIQTPHRFRSKRPLWKYSGFGIEMHSSADYRKVQGQLQRSRKQVSVRGLNRDCNHDLKNLFKSAATIAAVKPGPFQEFYAALVAKGMRPEMARLTLARKIATIVLIVWKRGVSFDAQYLKPQTA

SEQ ID NO: 438816 - protein, 339 aa, unidentified
MELYAGLDLHSRNTYIGIMDNEFNRVFKKRVPNHLEQILQTLEPFRDQIKGFVVESTFNWYWLVDGLMDAGYSSAHLANPSAIKQYEGLKHSDDQYDAFFLAQLLILGILPQGYIYPKKDRPVRDLVRKRMFLVRHKTAHILSLQSLLQRSCAMKVRANDMRHLTVEELEMWLEEEHLVLSAQANLDSVNFLKQKIKQLEKAIIQKVKLNKAFKYLLTVPGIGNILAMTIMLEVGDINRFSKVGNFTSYCRCVPSQRLSDGKSKGYGNRKNGNRYLSWAFTEAAQLGRRHNERFRRYYNRKVAQANTSLATKALGNKLARICYYIMRDQVPFREELFCH

SEQ ID NO: 438817 - protein, 388 aa, unidentified
MNKIIYIGMDVHSTNFTLCSFEPGYGFEADKIFGQTQIKEDIFNSTVKYINKLKSMRPDVDVVCGYEAGCLGYNLHRKLKAKEIESVILAPTTMAVSRNCSKKKNDYRDAITIAKCLASSAYKAVYIPDDKDEDVRDFIRMRDDHKTALKQIKQQLNAFCLRHGHHYDKTKWTGLHLNWLRKLELSKLQRETVEEYLVTYETLTSKIAALDIRIEDIASEERYAEKVNKLKCIKGIKTHTALSFVCEIGDFNRFKSADKFAGFIGLVPGECSSGNTERMLGITKAGNRHLRRLVVEISNTYRRGTVGRKSAALKERQKDMPKDVVAYADKATNRCQRKYQRMMFKGKNSNQAVAAVARELCCFIWGMMTGHHSRTAQAEASVYRSELD

SEQ ID NO: 438818 - protein, 410 aa, unidentified
MKLLYQRCCGLDVHKDTVVACLRIVSDGKVTTEVRTFKTTTAGLLQLSAWLAANNCTHVAMEATGVYWKPVWHILDDGEFELVLANAAHVKNVPGRKTDVNDAMWLAELLAHGLIRSSFVPDTQTQEMRSLLRTRKQLIREQSSHTLRVQKTLEDANIKLDSVLSDLMGRSGRAMIEALIAGETNPAKLASLANRGVKASHEELREALRGRVTNNHRFLLRLHLNQIDALDAAVATVDAQVEGILGPFRTAVELVMSVPGIKNLSAQVIISEIGTDMSRFPSDQHLISWAGMCPRNDESAGKRRSNRLRNGAPWLKTTLVQCAWAAKNKKDSYLQAQFYRIKARRGPKKAIMAVAASILTAIYHMLKDGTMYQDLGRKHFDRRSNDQQKRSLVKRLADLGYMVELKPLAT

SEQ ID NO: 438819 - protein, 411 aa, unidentified
MTSDRRIVIGADTHLDTIHLAAITDTGQLLSDAEFRTNPTGYWAAICWARSLGEVVSAGVEGTSSYGAGFTQALQANNIHVVEVNRPDRSARRRQGKSDPLDAHSAARAVLAGHGLAVPKDPHTGALKALLVARRGDQSPHRGHSADQRPPRHRSCRVARALPPLPDHPATGRSVGTLPPTAHEDPTTVSVLTACKTLAQRIEFLERQDRDLTAELDSLTSKLNPALRAAYGVGPDTAAQLLITAGTNAHRLRSEAAFAMLAGAAPIPASSGKTTRHRLSRGGDRAANNALHRIALVRWSHDPRTRDYTACQLAAGRSKKDILRLLKRAIAREMFRHLTAPCPIDDYSDLRPARQAKNITLSAVANHFGVWPNDISRLERGLKRDDTLAADYRRWLNLKPPMGRRGDWLSL

SEQ ID NO: 438820 - protein, 345 aa, unidentified
MSEISLIAIDLAKHVFHLEASDAAGNRLWERRVRRDQLVKVVGSVSTTEIAMEACASAHHWGRQFAALGHTIRLIPPPEVSRLVDRRKKNDRRDTRAIRKAARDEDVRPVPLKSTADQEEQFEHRVREQWVGQRTATINQVRAMLAEFGIVLPKGEGVLLSRCAELPADPRLAGMERLQVLLEAQFELLERLSDLIDEADRRLRKLAKTSPVARRLITVPGIGPVISTGCVAAVPDPTVFCCGRDFSAWIGIIPSQYSTGGKVQLGPITKRGSRYLRANLIHGARSLLASIRRSKAEPTDGLLLWAKNLLGRMHWNKAVVALANKLARIIWTLMAHGGVYRPRLL

SEQ ID NO: 438821 - protein, 308 aa, unidentified
MIGQNWIGCDVSKETLDFFDAGQGRHCRIANEVDAITAFVGRLRAGVDFVVMEATGTYDRLLRHALADAGVAFSRHNPEQTHHFSRSATRRAKTDRLDAVMLADYGRLHRPAADPVPDRKRERLQALARRRDQLVEIRAKQKKHLAEAFDDDVAADIEALIAQLDERIRALEAIIRTAIDEAGRSAEDYALMTSAPGVAQVTALTLLAHMPELGQRSPKAIAALAGLAPIDNASGKHRRRSTIAAGRARVRRALYMAALASIKARSRFKATYDAIAARSGSRKVAIIAVARKLIVALNAMIRDRKRFA

SEQ ID NO: 438822 - protein, 367 aa, unidentified
MSNYVTAIGLDVHARSISACAFDPMTGEVVRARFGYDPASVAEWVLGFESPKAVYESGPTGFHLCRALRALGVDCAVGAVSKMHRPAADRGRKNDRRDAEWLARLLACRNVVEVWVPDDLTEAARDLSRALEDARDDLQRARQRMSKFLLRHGLVFDETTPGGRRRSNWTEAYWRWARSIEFGEADDAAAYEHYMDAVERCAEAKRELERKVEEAAARPEWAPVVDALCLVKGVDVATAFLLAAEAGDFSRFPSAPSFAAWCGLAPSERSSGETESRGGITRAGNSHVRRALVEASWHVPMSTRHPKRPRPGHGVAPAVSRHAAKCNRRLQDRRDAMSQAGKRPCVANCATAREMACWVWAIALMVR

SEQ ID NO: 438823 - protein, 394 aa, unidentified
MIYAGVDIAKTDHVIGAVDERRAEMCRPMPFKNTEAGLERAVAWLEGLAGSPSDVVVGMEATGHYWMACYSFLVARGYSVAVINPMQVKAVRKLKKLDKVKNDRIDAWLIAETLRIGQYDETRLATDEVASLRSLSRYLQSLRGMAAELKTQCVCLMDAHFPEYAGIFSDMFGAGSRAVLSKSPLPFELARRRADSLARDIAEASRRGGKSAGYAARIKAAARSSIGVRLGQEAASFQVKSLIRQIEFADSECAKVEARVRALLDEVEPLVLTIPGVSYATGAQIVSEIGDVSRFRNASALVSYAGLNSSVSQSGQFDSGGGPITKHGSPYLRRALWLAANRARQYDPGLRAFYDKKRAEGKPHRVAVTAVARKLCHIAFAVMRDQVPYDPGRE

SEQ ID NO: 438824 - protein, 449 aa, unidentified
MGIPEQVEDEEHEQRLERVAAIDVAKASGKVCTRLPHESKAGKRVTLVWDVAATTNAICELAAHLVEQRIERVVLESTSDYWRPFFYVLEAAGLSVWLVNASDVKQVSGRPKTDKLDAVWLAKLNERGMLRPSFVPPADIRRLRDYTRLRLDLTRDRTRHKQRMEKLLEDALIKLSTVATDIFGKSGRDMIEALIAGNQDPKQLADLARGRMRVKHAALVQALDGRFDDHHAELARMLLDQVDGLDTQIGRLTTTIDKLITAMPAATPTDPNHDHDADGDPDDRATPMPAIARLDEVPGIAEHTAQVIIAELGLDMAQFPTPGHLVSWAKLSPRTIQSGPRTRGGKTGKGNPYLKGVLGEAAAAAAKTDTFLGERYRRLVKRRGKLKALVAVARSILVIVWHLLTDPTVRFRDLGPDFHIRRVNTDRKIRNLVHQLEVLGHTVTLQPAA

SEQ ID NO: 438825 - protein, 416 aa, unidentified
MDAIVERCAGLDVHLDTVVACVLYGKLDIKPKKEVKTFSTTTKGLLELLDFINQKECTHVAMESTGIYWKPVWNILESGAFDLIVANAKKIKNVPGRKTDVKDAEWIASLLRCGLIEKSFVPPERIRDLRDLTRLRKELLGEVNRNKNRIHKVLQDANIKISSVLSDVFGETGKSILNQIIDNQCITEEFIYSLYEGRGKSKLKSTLMEMYEALNGKIRGHHVILLGMHNSNIVFLEKQINELEKEIDILLQKERDSLELLETIPGISKISASSIIAEIGTSMDVFKTEKHISSWAGLCPKNNESAGKKKRSGIKSWNNWLRSMLCECAWSATKKKDSRFKNKYWSMVPRMGRKKALIAIANMMLRLIYHLLKTKSTYKESEIQYFIDKDKRREDRIIKELKSKGYLVEKDSLQMA

SEQ ID NO: 438826 - protein, 412 aa, unidentified
MNIRVEKACGIDMHQAFLMATMLDLAGTKDTRRFSTCIEDLLNLREWLIDNKCQRVAIESTGVYWIPTYTLLEGKVETIVANPLHIKNIPGRKNDVLDSEWIAEICLNGQIKPSYIPPKEIREIRELTRSHVKLTQARTAFKNRAHKVLSRAGIHISGVISDIFGKSGMIILNGILNGKTIDQTFVEIKNKKIKIKKTELKDSLKGELSQNDIFVIKECLESIKFFDKKINEFDSKINENLKGMSKEMKILMSIPGVGFTTAAAIMAEIGNIDVFSKPKKLVGWSGLAPSINESAGKSSNGHITKKGNKFLRTILVLAANSIAIGRPNKLRFFYQRIKGKKGHKKAIVALARKLVSIIHHLLTFKEVYSEEEGKQKKFKLPKFIPVKDFSIDDMIGILCEAGYSVNKTAANS

SEQ ID NO: 438827 - protein, 324 aa, unidentified
MNGYERVIGIDVCTERLDISDSGKAIPMAIEYAIDEIKSKILKKIKDPKKTLVVCEASGGLEYALVDALHDAKIDVCVANPARVRDFAKGHGFFEKSDKLDAQMLQLYGQQVKVTLAKPRTHEERSFIALTRRRCQLLQLLSQEGNRARQCVDAHTKKFIEEMLKSIKNQLKVVDSEIEKCLNQQAKSNPKIDVIRSVPGVGPVLTATLIAELPELGALSRSKIAKLVGVAPMIKQSGKSDGRRRARGGRGNVRRVLYMAALVGTQKNPVIHRYYINLITRGKPKKLALVACMRKLLTILNDMVRRETHWDQKQKSVADSAVAS

SEQ ID NO: 438828 - protein, 405 aa, unidentified
MDVIYERCCGLDIHKASITACVIVGKKKEICTFGTMTDDLLRMTVFLKERNVQMTAMESTGSFWKPIFNIMEVEGVPAILVNAAHIKAVPGRKTDVKDAEWIADCLKHGLLRPSFVKPRDQRELCELVRYRGSLIEERAREYNRMGKVLEGANIKLTSVASKMDTVSGTNMIRALSGGIVDPALLASMAKGALRKKTDELKRALNGLIQPHQQMILKAMLGHIDQLSGLINAMDTEIELRMSQDVELVEALDEITGVGKVSAQTILAELGTDMTRFPSANHLASWACICPGNNESAGKKKSGKTKKVNSTLKKTLVQCGRAAANSKDTYLNSLYHRIASRRGAKRATVAVGHAILVICYHMIKNRSRYNDLGSDYFRKRNKDALVRQSVKRLEALGFNVSLDVAA

SEQ ID NO: 438829 - protein, 315 aa, unidentified
MTITNKKVYIGIDISKDTLDVAVFDSEEYWHLNNNIKELHNLAPQLKDLSPTLIVVEASGGLEQPVVRELCKENLPVAIANPTRVRNFARSTGQLAKTDKLDAKIIAQYAQAVNPKVRPLRTAQQEHLDALVTRRRQIVDTITAEKNRLSTTHPALLERLKRHIDWLEEELQALDDEINKFIQQNAEWKQKASILESVPGVGPVTVSTLLAELPELGTRNRQQIAALVGVAPVNKDSGKMRGKRRIFGGRAPVRRVLYMATLVATRVNPVIRSFYERLLAAGKEKKVALTACMRKLLVILNSMIRNNRPWNPYLL

SEQ ID NO: 438830 - protein, 342 aa, unidentified
MDITTVGLDLAKSIFQVHAIDDAGEVVVRKALRRSQLMPFFAKLRRCLIGMEACGTSHYWGRELAKLGHEVRLMPPAYVKPYVKRGKTDAADAEAICEAVRRPTMRFVPVKSTEQQAALALHRTRDLLVKQRTQLVNMIRGLLAEFGIEMARGLRHALELADRLSAGDAPEVPALAQRVVKSVADQIGSLQVQLSALDKELLAWHRSSELSQRLATIPGVGVISATALAASVSEPERFRSGRQFAASLGLTPLQNCSGGKERLGRISRMGDRYLRRLLVLGMTSLVRRARAKPSSVDSRISAMLQRRPARVVTVAAANRTARVAWAIMTRGGTYRAPAAVAG

SEQ ID NO: 438831 - protein, 306 aa, unidentified
MARFVGIDVAKATLAVHLRPDGQGWSVPNTDQGHQQLVGTLQGIGAHKIVLEASGGYERAVLAALLAAGLPVARVSPSRARALARALGCQAKTDPLDAALLAQAADVLALPLATPVPPAQSELRALVDLRVQLTGQRDDDRRRLQQASVLAARAVLERMLAALMAEIAQLDEAIAQRLPALAPAVLRSAPGVGPVTLATLTTHLPELGHLSRRQIAALVGVAPYNADSGTRQGKRRIGGGRAAVRRVLYMATWASIRARSPLATVYGTLRARGKPAKVALVACMRRFLTMLNAMVRDHTEWTPRTA

SEQ ID NO: 438832 - protein, 422 aa, unidentified
MRILEPLQIFILEEPVMLNAVGIDVSKERSTVAVLHPGGVIVHKPFDVPHKSRNLHDLAQYLGSLEGDTRVVMESTGHYHEPIRNALSKAGLFVCTVNPHLIKNYGNNTIRKVKTDSADAKKIARYTLDNGAELREYTSMDTTRTQLKTLNSQFSFFMKQKTAAKTNLIALLDTTYPGVNKLFDSPVRADGSEKWVDFAYSFWHVDCVRKAGITAFTDRYKRFCKHHGYEFQEAKANAIYKDSKELIATLPKEAVYKELIQESIRQLNLLSENVEHIRKTMNELASTLPEYNTVMSMYGVGPTFGPQLMAEIGDISKFQHREALTAYAGVDPGKNDSGQEVHNSSHASKCGPSRLRHTLFQIMTTMLQTGGKEDDAVSSFLFKKKAENKPYLVYMTAGANKFLRVYYGKVKECLRNQEQAEE

SEQ ID NO: 438833 - protein, 408 aa, unidentified
MYNAVGIDASKLKSTITIIQPAGVVIRKPFDVLHTSDELNTLVTYLKSLVDETRAVIECTGRYHEPIVKSLSEAGIFISAVNPKLIKGQKQNTLRKVKSDPADARKIAKYALDNWAELREYSSMDTTREQLKTLNSQFTFFMKQKVAAKTNLISLLDNTYPGVNKLFDSPTRDDGSEKWVDYAYSFWHVDCVRKIGLKAFTERYEAFCKKHHYNYQKNKPALLFEESKQLVAVFPKEKSYKLLIQQSIQQLRLASEHIEIIRKEMNELASTLPEYETVMSMYGVGETYGPQLIAEIGDVSRFTHREAITAFAGVDPGVNESGQFKQRSNRASKNGSTRLRKTLFQVMSTYLQNKPVNEPVYQFLDRKRAEGKPYLVYMTAGANKFLRIYYGKVKECLRNLEQSQIEES

SEQ ID NO: 438834 - protein, 338 aa, unidentified
MTYIGFDHHKKWTQAAAMDDQGKIIREMRVLNDRNSLKGFLKGLAKPLKGVVEAGPTWGWIYDTLSELGVKMMVANPSAVRAIAEAKIKTDKIDARMLASLLRVGLIPEVYVPTEEIRTQKMLWRERIWLVRMHVRLKNRIHRLLNNYHVEVPEFSDLFGAAGRRFLEGLKLPDPGNRILKAQLKLLESYRSQIQEVQRWAVQATQGHPNRAYLESLPGFGKVFAPIVALEIDDPKRFANPGKLASYCGLVPSLYSSGGKSWQGGIGKEGNHWLKWAFIEAAWAAIRSSAYFRVVYQRLRQRKTAQVSIIACARRLCEIAFHLLTERRCYEERPYRYA

SEQ ID NO: 438835 - protein, 384 aa, unidentified
MLGGQAGSSQNGTTYQLAGQMGHPPTSPDSIRSAAHAAARVNEVRLERIAHSNSPSLQVDGGSIMNCIGVDVSKQVLITYDGTKVRSFPNHGTLTQFSKYLDLTKHVLIVFEPTSTYSHRLQAFCAARGIRTCQLNPRVVPNLRKVSHKRCKTDQTDAQLLYQYGVDRGQTEGRTTTHIDPLVHKLSTQLSLYRVTQKSRVAYQGLLEALTNDPFTDQALLDQLHETICSLKQREAACVSQAQAVINQDEEAASKLQALLSIPGLGPISSITLFRFLRKYECRNRQQAVALSGLDPISHESGTSVHRKDRISKNGERELRKRLYEATLSAARFNPSVKNLYQRLKKKGKPEKVARTAAARKLLLIAHAIYKTGQLYHQPNQNKG

SEQ ID NO: 438836 - protein, 397 aa, unidentified
MIAVGIDISKAKSTVAVIDSDGTVLASPFTMAHTQPEMEAFVSYLKGLGEPTTILMEYTGHYHYPVLKKLQDEGFPVCIVNPYQMKKYGDVEIHKAKTDKKDALRIAAYALEKSYKLVPYSSMEQKYEDLKFLSRQYNQRISYVAKLKVQLIALLDQTMPGITRILPLNSRNPEKCALLLFIKRFKSFDEIQRIGKARFLASYDVLAKKASERSASSKGLSIYELAVDSITTRGEDPYIWLSQNQCVDLLSATQNAADEIISQMRNIAETIPEYKVLRAMHGVGDRLGPIILAEIGDVRRFHSGKALNSYAGNDAPPYQSGQFESRNRHISKRGSSALRKACYEVMQALKLIKPQDDPVYLFMLKKEQEGKPFNVAKMAGVNKFLRIYYARAMELYK

SEQ ID NO: 438837 - protein, 388 aa, unidentified
MPRQLNDLSRSLVALEQDATLIAVIEMSQSSWLVAGIVPGIERQPLKKLAPDQHALLQLLHRWQKEANEAGQVIKRITVAYEAGRDGFWLARWLRAREIEAYVIHPSSVPVSREHRRAKTDRLDTELLKRAFLGWLRREPKHCSMAAIPTIADEDARRPSRERENLVKEATRLVNRMKANLARLGIRGFRPHLARAARQLQTLQTPEGAALPANTLAELRRDMDRLRFAQQQIKQIEAARIERLEREPAEQRHAMVRLLGRVVGVGVETADMLVHEVFARRLRDRRAVARYAGLTGAPDESGTKRRERGLAKAGNARVRRGMIQLAWRHLLHQRDSALAQWYRARTADARSRTRKIMIVALARKLLIALWRLLTTGEAPAGLLIRPAA

SEQ ID NO: 438838 - protein, 350 aa, unidentified
MIIIGCDYHPGFQQIAFVDTETGDYGEQRLGHSEGAEKFYRDLAAQGKKVRVGMEASGHARWFERLMAELNFELWIGDATEIARKRERKQKTDRQDAQHILQLLMENRFPKIWVPSGENRDLRQLLWHRHRMVQARTRIMNQLQAVALNEGLRCRKKLWREKGRQQLEAFRLAPWASRRREDLLQLLDRLNPTISELTQAIEQEVEKCPEARRLRTHPGVGALTALAFVLIIGRAERFQCGKQIAAYLGLVPLEDSSGNRRRLGHITKQGSSILRFLLVEAAQVAARSIPEWRNKYVHLTMRRGRKIAKVAMARRLAIALYWMWRKGWDYEQLRKFGSHAGKLESGDGVK

SEQ ID NO: 438839 - protein, 429 aa, unidentified
MTVSNDTPQRVTLVAVDIAKNSHDVLIESPARGRRRRLRLANNLEDFEQLAGYLRSLKSPVLIGFEATGNYHRPLAYFLHRQGFELRLIPTLALARTREAMHNSWDKNDPKDAQVILHLLKTGLAQTWHDPVVKGINDLQELSKTHFQVTLARVRVWHTLRNHYFALYFPEIDRFIRSDHSVWLVQLLASFPTPASITALSEAEFQKQAWNLVGRKVSKRALLAEIYAASKRSIGVPVELDSAAIAMFRLVLGEYLELHRLRERIAERAAIMLGDNPDSRRLMTVPGIGPANALTILAEAGDLRRFRHHRQFLNFCGLNLSTLQSGKSRSQSHISKYGNARLRTALWMAAQTAVRMRENSFRRKFDNYVRGNPLDADLRRKAYTAIAAKLARVIFGLIKSGADYRPFFEHKFQVEEPSRAGAVGAISTP

SEQ ID NO: 438840 - protein, 406 aa, unidentified
MRVVHERCAGLDVHKSSVVACALLPEGKQLRTFGTLTWQLEQLAEWLRSLSVGVVAMESSGVYWKPVFNILEVAGVELLVVNARHIKAVPGRKTDVKDAEWIADLLRHGLLKPSFIPSRKERELRELTRYRRTLIEERAHEVQRLQKVLEGANIKLEDVISNVVGLNGRRFLSALIAGDYDPQAVASTANYGLQRKRELLAQALHGTLGTHQRFLLDQLLSHIDFLEQRVTALDEEVKQRSRPFEAAIARLDEIPGIGTRAAEEILAEIGTDMSRFPSHRHLASWAKVCPGNNESAGKRRSGYAGMGNRWLRSILVESAWCATRKKDSYFKVQYHRLAARRGKKRALLAVAHSLLTVIYHLLNNGVVYQDLGPNYFDQRDRSLITRQAVRRLERLGYRVSLTEGAA

SEQ ID NO: 438841 - protein, 410 aa, unidentified
MEAIVECCAGLDVHQATVVACLNRGPAGKRSSKEIRTYGTTCQELRELRDWLKGSGCSLVAMESTGVYWKPVHAELEGHFELIVGNAHHIKNVPGRKTDVKDCDWISDLARHGLIANSFVPPRPIRDLRDLTRYRRKLVEAQAAERNRLIKLLESASIKLSGVISDVFGVSGRAMLRALIEGDQSPAEMAQLAQRRMKRKQPELARALDGHVDEHHRFLLRLQLQRITAAEADLAQLDERLREKLAPYDEELGRLMQIPGVDWVTASALIAEIGVDMSVFHGAAHLAAWAGLCPGNHESAGRQKSAKTRKGNVWLKTAMVTAAIAAGKTRRSYFAAKYRRLTARRGKMRAAVAIAHKILVAAYHMLAQRSDYRELGADYLDRLHHHRTAINLTNRLRAMGYDVQITAKAA

SEQ ID NO: 438842 - protein, 391 aa, unidentified
MTYVGIDVAKDKHDCYIVNSDGEILADVFTIPNDQTGFDLLFQKLLSVAPDRSKVKVGLEATGHYSYNILGFLLGKGLTTFVINPLQTNLFRKSTSLRRTKTDKVDARTIAAMLASDVVLTSYTATSYHNDELKSLTRYRFDKVQERAKLKSSVARLVNILFPELEKLVPTLHINSVYAMLSEFPGAKQIASCHLTRLTHLLSASSNGHYKRDKALEIRETARASIGSVIPAKSLELKHTIRLIEILSEEIDEIEISIRNIMGMNAAPILSIPGINYRMGAMILAEIGDFTRFDSPDKILAYAGLSPSTYQSGKLDNAYSHMEKRGSKYLRYALYNATKYVCIWDSTFAAYLAKKRAEGKHYNVAISHAAKKLVRVICALQRSGKPYCPAT

SEQ ID NO: 438843 - protein, 352 aa, unidentified
MEMIALDCHKHYSVASVQTPEGRCLAECRIEHRRGSIRAFLAPYSNGCPVAVETIGNWYWIVDEIEQAGKVPRLVHARKAKLMLGSINKTDKLDVRGLNRLQQTGTLPTVWIPPASLRDQRELPRTRMVFSTARTRLKNRIHSALDKYGLQDQFIGVSDIFAAGVRERLEGCIQQLPPQAAYTSGLLLEQLEAVQEVIEALEDRIAELFKPTEELKLLDTLPGVGLILGVVLVLEIGDIRRFCCAERLASYAGTVPRVHASGGKTHYGRTRPDVNHYLKWAYTEAANAVAVHRDSLADRHVGQLYSRIRSRRGHASAVGAVARHLAEATYWMLVKKEPYRERGITEVSPQGL

SEQ ID NO: 438844 - protein, 321 aa, unidentified
MESTILGIDIAKQKFDVALLTEEKVITGKFNNTPTGFGMLDRWLVKYGIERVHACLEATGTYGESLAEHLHRASHVVSVVNPARVKGFAQSELCRTKTDKADALLIARFCSVMKPEPWQPPAPEVKELQSLVRRLEALHGMLDQERNRLETADDIVKESIERVIKHLQQEIKATRKLIRNHINRHPDLRGKRDLLESIPGVGPGTSAMILAEFGDVSRFHDAGSMASFCGLTPRHRQSGSSVRGRSMLSKTGSSRIRKALFMPALAAIRYNPVIRAFRARLLANGKHKMIIVGAVMRKLVYFAFGVLKSGRPFDPSIAAAA

SEQ ID NO: 438845 - protein, 321 aa, unidentified
MTYIGIDVSKDTFVVAYSPDKNSKTKTFKNTTRGIHEFIRTISKDGHHCVMEATGNYSALLVYLLSEAGITTSLENPLKVKNFARAMLSTAKTDEIDARLIALYGEKMQPAPYKLRSDAILTLKQKRTVIRQLKKQLIATRNLKGSMEVLPFFDAKCKKSIDKTIAFLEKQIKDLEEDLASLAKSEYKKQMDLLTSVKGIGITLAAALIMATGGFTYFDNAKQLTRHLGLSPTYQQSGTSVNFKGHINRNGDSSLRSQLYVAAFSSIRCNTECRACYDRLRSKGKPGKVAVIAVANKLIRQAFAVVTQEKPYVDGYISSKK

SEQ ID NO: 438846 - protein, 456 aa, unidentified
MSRKKTRLQSLTEAPQVRPGAAGIDISPEVIYVAVEPQKDGRSVRSFGTFTGELYHIANWLKACGTQTVAMESTGVYWIPLFQVLEERGLEVFLVNARHYKNVPGRKTDVCDSAWLQYLHAVGLLQGSFRPAQEVCAFRTLLRHRSGLVQAASEEIQHMQKSLDQMNVQIHRVLSDLTGVSGLAIIDAILAGVRDAHELAALRNGRVQASEATIVAALEGDYRAEHLFTLRQSLESYRHYQKLIGECDRQIREMLDQFEDRTDGQEPPAARKTMRTQSDEKLRQEFHRVFGVDLTAIPAVNVGTVQVLLGEVGPDLSRFRSAGAFASWLGLCPDNRITGGKVQSSRTRKVQSRLAGALRMAAESLCRDQSYLGQFYRRMKSTMKGGAPEAITAAAHKLARIVYTLITRKQEYDESRFEAAEKRNAEKQRQRIIKQARKWGLVLVPNGTGGATTPLG

SEQ ID NO: 438847 - protein, 378 aa, unidentified
MTTMTSAPPVSHCTHEETSAAFGDPPSPRVGVIGGVDTHRDQHVAAALDSLGRLLGIEYFDADTSGHRALLAWLESFGPVLMIGIEGTGAYGLGLARHLATATTADLIEVDRPDRRTRRLKGKSDPIDAEAAARAAWSGAHTGTPKARDGRIEALRNLRVARRSAVQQRADVVRQIKALIVTAEDDLRHRLRHLDTPTLVRTCAALRPDPAHIAEPLHATKAALRSLARRHRHLSEEITDLEALIHPLVEQINPALMAINGIGHDCAGQLLVTAGANPERIHTEAAFAMLVGTAPVPASSGQTHRTRLNRGGDRQANAAIHRVLLSRMRWHKPTKTYLARRVNQRDLSKREAARILKRYITREIYPALINPHHGLDHP

SEQ ID NO: 438848 - protein, 310 aa, unidentified
MDAIYVGIDVSKDRLDVHMLPGGQAFAVTRDGKGLKELVEKLSSVRPRLVAVEATGGFETVVAAAIAGAHLPLVVVNPAQVRHFAQAVGKRAKTDPIDAAVIARFAEAVKPEPRELPDEAARLLSELVGRRIQVLEMLVAERQRERRASAARVVKSLKRHIAALEKELPEIDRDIDTMVRGSPVWREKEDLLVTFPGVGKGTAHSILADLPELGRLTRREIASLVGVAPFTRQSGRWRGKSMIAGGRPTIRSAIYMAALSASRHNPVMRLFYQGLLARGKPKMLALIAVARKTLVALNAMLRDKKQWQHA

SEQ ID NO: 438849 - protein, 370 aa, unidentified
MLDTTTFVGLDVHARSIKAVSLDVMTGEVRCATFGYDAGAVAEWVRSVDPRARCVYESGVTGFDLQKRLSGLGVDCVVGAVSKMIKPSADRRRKNDRNDAEFLARMLSVGNVVEVWVPDDECEAARDLTRALEDARDDLSRSKQRLSKFLLRHGLAFDERTPTGRRKGNWTRAHWSWIESIRFAEGADNDVLAYYVDAVRRAAEEKARLEGLVEAEARKPRWRRRVDSLRCLKGVDTATAADLVFEAGEFSRFRNARSFAAWVGLTPSEHSSGESDRRGAITKAGNKHLRKTLVEAAWHYLTCSGRPKGLAKGQAPDRGARRHAAKGVRRLVERREALLARGVHGNKANVATARELACWVWAVGLMAEEA

SEQ ID NO: 438850 - protein, 385 aa, unidentified
MRPFGEVVVSPFEVRHTASELSKLAGLLKSLDGETRVVMESTGNYHAPVAWLLHDAGLYVSVVNAMLVHDYGNNSLRRAKTDKKDAVKLANYGLDHWLTLPRYVPEEDTRLLLKNCYRQYQQYSKVQTMLKNNLISLLDAVFPEVNRLFNSSPRADGSEKWVDFVSTFWHCQCVSTLPLKSFSARYLKWCRKHGYYFSQEKAFEIHSKAKNCIGVMPRNETTKLLVQQAIAQLKATAAALAALKQEMQSLAAALPEYPVVMEMFGVGSTLGPQLMAEIGDVRRFHSKKALVAFAGIDAPPCQSGQMDIHSRSISKRGSAALRRTLFLVMGIYLQSAPLDEPVYQFMDKKRSEGKPYKVYMMASANKFLRIYYASVTAYLNTLARI

SEQ ID NO: 438851 - protein, 347 aa, unidentified
MRFYNNSHPYYCGIDLHARLLYVCIIDSKGEVVAHKKIGANKDDLLLILEPYIGNVIVGVECMHCWYWVSDWCAELGIDFVLGHALYMKAIHGGKTKNDKIDSFKIATLLRGGNFPIAHDYPREMRAARDLLRRRMKIVRHGAMLKGHVVNTNSQYNLPATDLNLKNISARQKLREQYQNPIVQRNIDLDMALLDCYAKELAQVEWFIEKQAKNHNPVYLELLKTVPGIGKILSLTILYEIGDVARFESVQKFASYSRLVKCKAESAGKTYGTNGNKIGNAHLKWAFSEAAVLYLRGNDKARHYLNRLQKRMSKAKALSALAHKLGRCVYFMLKNKTVFDEQRFLKG

SEQ ID NO: 438852 - protein, 462 aa, unidentified
MPRRKLTTQTRKPSPQPAYRGNAPTLQVQNPHAAGIDIHTDNHVVCVGPGQVATFGAYTADLQAIADYLRQAGVTTVAMESTGVYWIPLFEHLESQGFECYLVEPGQLHGCGARPKTDVLDCQWMQRLHTYGLLKPSFRPPESVRALRAYHRQRQMVIRHAAAHVQHMQKALEQMNVKLTEVLSDITGLSGLRIIRAILAGQREPHALAGLASPKCVKTRGEFALALQGLWQPEHLFELQQAHDLFVTYQRLLDECDRQIEAELAKQPNRASDKPVPRKPRRCGRKKNDLRFAATGPLFQALGVDLTEIEGIDVGTALVILAEIGVDVSRFPTEKHFASWLGLCPNTSRSNLGQKKRSPRQGSSRLRQAFRMCAQSVGRTQTPLGMFYRRIKSRIGGMGACTATAHKLARLVYRMLKYGRDYVKQGMDEYAAKMQANAERLLRKKAAALGFELTPRAAAGTT

SEQ ID NO: 438853 - protein, 345 aa, unidentified
MKIVGCDLHTRYQQIAMLDLETGELIERRLEHENGEARGFYASLEGAVRVGIEATGHTRWLERLLCELGHELWIGDAAQIRASMVRKQKTDARDAAHLLELLESGRFPRLWRPTMAERDLRQLVWHRQKLVWMRNAIGNQLHALAMGEGVCRKKKLFTKKGRVELEGLNLDFWASRRRQELLRLLDQLDASLKEFDQAVAEQAEPNPAAVLLMTHPGVGPVTSLAFVLTLGPVERFARSKQVVSYLGLNPREHSSGGRQRLGSISKQGNPMMRSLLVEAGHTAARLDPELRQDYQRLKLRRGGGVAKIAIARKLAVRMYWMLRGQVRYAQLVRMQGSPRATLVQS

SEQ ID NO: 438854 - protein, 363 aa, unidentified
MHSITNTELSSHEETRCQFNGGRCTIKMGIDVHQDFYVVAEQVGGTNPKPPQRFHKQAFLHWAAKLKHTGAEVHAVYEACGFGFTLQRQLAALGIHCHVVCPQKLDERNKRVKTDGLDAKALCLKLDRFVQGNRDALATVRVPTEEEERSRAIHRQREQLVGARKRLEAQGRSLMVNYGVEPVQNWWKPRTFAVLPIPQWMRELLLNSQPILLVLQEKIAALTLQLQSAAAPNQPRGLGKMTSVVIDREIGNWHRFSNRRQIASYTGLCPGEYSSGNTRLQSCVTKHGNPRLRAALVELAWRLVRFQPNYKPVRKWRQILAKGALATGAARKKAIVAVARQLAVDLWRIKTGRLRAEELGLIN

SEQ ID NO: 438855 - protein, 304 aa, unidentified
MFGIGIDVSKATLDVAVHGEQFRQFSNDKRGFVRLIRWLKTWPIKQVVLEASGGYERAALDALHAAGLPMVRINPACARRFAQGTGRAAKTDRLDATVLAQMAHLLPLTRYVPPAPWQQRLAEFAQCRRHLVQMRVSEMQRLRRLVDPDLIAMKQRYIAQLSDDLKQLDKAIAEQLEGQPGWKNIGALKGVGPILISTLACELPELGSLGSKAIASLVGLAPMNRESGTWQGQRRISGGRAVVREALYMAALTAIRYEPRLRAFYAGLKAKGKASKVALVAVMRKMLVILNARKRDAEVALGCP

SEQ ID NO: 438856 - protein, 348 aa, unidentified
MRGAVHMQITTVGLDIAKNVFQVHGIDAAEKVVVRKQLRRGQVLAFFKALLPCLVGMEACATAHYWARELTKLGHQVRLMPAKDVKAYVKRNKNDAADAEAICEAVRRPTMRFVQIKSPEQQGRLMQHRARDLLIRQRTQVINGLRAHLAELGITAAQGNVGLKELLAIIASDVDARLPADAHAVLIVLAAELQAMQTLITSIEKRIMAQHRSSEESKRLETIPGIGIVGATAIAATVTDPKVFRSGRDFAAWIGLVPRQDSTGGKQKLGPISKQGDRYLRRILVVGAIAVLRRARQQPERYPWLTQLLARKPFRVVAVALANKMARIAWALLAKGGTYRAPALAAAA

SEQ ID NO: 438857 - protein, 419 aa, unidentified
MAKLKIVYPICCGMDVHRDFVIACIASTNDKGVTDYKTKRFSTFSGGLRALRDWLSENNCRDVCMESTGKYWFPVHNILEATCNVVVSHPKFVKAIKGKKTDKKDAMWIADLFKHDLVRGSFIPPEDIRQLRDLCRYWVKLTSYMTGEKNRAQNCLTVSNLKLDSVFSNVFGKSASAIIGHMLEHPGESFDVTPFVHGRCKTPIEQIQEAVDGSFNPFQAEKLKIIREHMSSIQKLKDLLSQLIFNLASPYQSQIDLLLSVPGISDPMTAIRIIAEIGVDMSVFDSSKHCCSWAGLTPQNNESAGKKKTTRIGKSGQYIKPLLVQCALASSRSDKHPEIKGKYLQLKKRRGGKKARIAIARRLLTAIYQMLLNGAFYSPYLAPANVSAPKERVLSPEQALALLRKQGYVISDASSDDVA

SEQ ID NO: 438858 - protein, 338 aa, unidentified
MTVYAGLDVSDKTTHVCVVDGEGVIAWRGVCATDPEVIAKTLGRHARGVERVVLETGPLSAFLYHGLVERGSPVTCICARHAKGVLSTRVNKSDPHDAEGLAQLARTGWFKAVRIKQEATHLDRARLKIHDQLIQSRLAMANQLRGLLKLFGLRMGTVTTPAKRTERLAALFAQKPELEAVMRPLVESLDALDIQIKGSSKQLATRAAADPVMTRLMSVPGVGPIVALTYKSSIEDPGRFTRGEDAGAFAGLVPRRSQSGARDYKGRISKAGDPMLRSALYEAANSLLVRVKRPCALQAWGKALAETKGPKRARVAVARKLAILLHRLWQSETQFCWN

SEQ ID NO: 438859 - protein, 321 aa, unidentified
MDTWVGLDISKSTFDVGWITEDGEFCHLKLDNNVQGFRKLLDRVPADAKFVMEATGNYHLRCALALNNAGRHVSVANPIAVKRLIQSDLRRCKNDKADSFYIARYGMEKRPAAWKPPSKAALQARELIVLMDAVQSSLGKLRNNEESFKQNDLKNDIARRYCKRMIKQLEKELDDLEAELEKVACAEWGEEIEILDSIPGVGKSTACHLMAKVEDFNRFKNSRQLISWMGMSPFNSQSGSSLNKHGGITKMGCSRLRTRLYMCTLSASCKGKGLAMKKRLEEKGKAKKVIFVALINQILRTAYALVTKGVKYNPNFLQSTP

SEQ ID NO: 438860 - protein, 348 aa, unidentified
MAMTIVEAARAVTGGVDTHLDVHVAAALDPIGGLLGVESFAATPAGYRKLLSWMEGFGAVTKVGVEGTGAYGAGLTRFLRRHDVAVVEVDRQNRQARRQHGKSDPLDAIEAARAAQSGRARGAAKTRDGAAEAMRALVVAKRSARDMRIKSLNQIRHLSFTGPDCLRARLKGLSPVMLPVEAAALRPRAGSDPVLYATKLSIQTLGRRILALEEETARIDEVLGELVAGLAPSLLGLYGVGVGSAAALLVAAGDNPERLRSEAAWAHLCGVAPIEASSGKVVRHRLNRGGDRHANAALWHIVMVRMVSDPRTREYVERRTKEGRSKLEIIRILKRYVAREVYPHLPRP

SEQ ID NO: 438861 - protein, 405 aa, unidentified
MPYILALDVSMGHSYSVLYKDDTCLFEDEIEHTQRGFHALLEEIQHLPERPLIVFEATGIYSRPVEKFFQDHHFSYCLLNPLEAKKQMEENTLRSWKTDKSDAHRLAQTHLKNQRQPKEVQSNFYLEMRDLARFYQEIEKKITRLRMDLHNCLQLTFPELEQFFSNRMTPYALTLIRLFPHPDFVLASTRTKIKNKLINETRKKISANRAEQKADQIIHYAQCAYPAVEKDSIHCQKTIYYAELLQDLLEQKEALATQMIKKAEGSPCFLLYQTFPGIGALTAALLLGELGDITRFKTHKQLNAFVGIDIRRYQSGKHTGQDRINKRGNPKARKIIFFTIRNMIRQQRAAPNHIVDYYYKLKKQPIPKKEKVATVACMNKLLKCMHAMVRAHTEYDYAYAVSVDH

SEQ ID NO: 438862 - protein, 454 aa, unidentified
MNARKKSSDQKTQKASPISIINPNAAGIDIGDTMHVVAVPDGRRERTVREFGTMTCDLELIVIWLKECNIDTVSMESTGVYWKPLFSLLLQNNIKVYLVNARHVRNMTGRKNDQQDVQWLQQLHSFGLLKSSYLPEEEQEGLRALVRYRHTLIQDSSRFVLRMQKSLELMNIKIHTIISDLMGKTGKAIIEAIVDGERNAENFIPFIDRRIKTDKATIVKSLQGNWREEHLFTLRESYRFYTFYLQEIKACDIAIENQLIHYEAFIQDGNIEEQQSQPVSKFKKTSKNGPGFNMVHYLQRIHQVNVMAIYGLSDISALEILAETGTDMSKWKDEKHFVSWLNLCPNNKISGGKIISSNILKKKPNLASQAFRTAANSICKSNHWLGDYFRRMRAKGGHKYAIVATANKIAAIYYKMLSLKKEFNPVDMVVYQQKYKTAKIAYLERKLQQLKNTA

SEQ ID NO: 438863 - protein, 366 aa, unidentified
MPLPAAPGCEKVKDCGFTARGEDNMNDVSIIGVDLAKRVFHAHGARSDGSVAFRKRLSRSQLLTFFARQPRCTVAMEACATAHEWGRAIGELGHEIRLIPPAYVKPFVKRQKNDTSDAEAIAEAASRPTMRFVAVKTEEQQARSMIFRTRDLLVRQRTQLINALRGHLAEHGVIAPHGPANVKLLAAALSDFDRSLQPLVRDIGAVYLEQISILNGKIADLEKVLRREAQRGADTSRLQTMPGIGPITAMAIETFAPPMQTFKRGRDFAAWLGLVPVQHSTGGKQRLGRTSKMGQRDIRRLLIVGAMSVIRWASRRGAPEGSWLSRMLARKPLMLVAMALANKMARTAWAMLIKQENYRNPVTMTA

SEQ ID NO: 438864 - protein, 343 aa, unidentified
MQAITTIGLDIAKSVFQVHGVDAEGNVIIRRQLKRRYVLAFFEKLPSCLVGIEACASSHHWSRELQALGHNVRLMPPAYVKPYVKRQKNDMADAEAICEAVTRANMRFVPTKTPEQQSGLVLHRTRHLFIRQQTSVINAIRAHLAEFGVIAPVGRKGIEELLGVIADPSDKRVPDVVRACLAALGSQLLSLKKQILDFDRMIMAWHRSDQTSKRLNCIPGVGPLLATALVASVADPKAFRSGRNFSAWIGLVPKQYSSGGRARLGGISKRGDRYLRGLFVAGALAVIRYAKLHGTKYRPWVAALLARRPAKVAAIALANKLARMAWAMMARGERYKYPAALSV

SEQ ID NO: 438865 - protein, 312 aa, unidentified
MKTPKPKSSPAYAGVDIGKASLDLSLAGQPPCRHANNAALIKVLKKLPVPVQVICEPSGGYERDLLQALWAGGLAVSLVHAARVRAFARAQGLLAKTDPIDALVLREFGELLQPGTLAAPSPQRERLAALVQRREQLVNLLSTEVQRLAQTHDVVVRKLGCHLLKTLERQVEQLAEMIAAQIAADATLKAQSERLQQVKSIGPVTASTLLAELPELGTLSRNESGALAGVAPYNRDSGLHCGRRTIRGGRVRVRRVLYMAAVVAARFNPIHKAFYERLLLAGKPKKLTLTAVMRKLVVLLNHLLKNPHFKLA

SEQ ID NO: 438866 - protein, 320 aa, unidentified
MSHYIGIDVSKATINVHISKNSQDLVLENSIKGFKSLSSKLKKIYKKEIENIVFIFEPTGSYSEALRKYCSQQNTKCFIINPKQFSNYAKALGVEVKNDIEDARVLSKAIHLAKDGQVKVPVFNEDVEHIKELMSFYKFTKKQTTQQKNHLESLTSKKGDKFSIKELKKSIDESKKKELRIITEVQTVIDSKDEYRVAYDNIISIKGIGQIGAIVLFHLFLKYPDANQRQITSLAGLNPIYRQSGTSVQSKYRISKTGSVLYRGTLFMAVFSAVQYDKNFKAFYERLKEKGKHSTVAQIAVMRKMIITAHSLYKNNKKYK

SEQ ID NO: 438867 - protein, 411 aa, unidentified
MDKIYDSCCGIDVHKKLIVACLRKGNRQEVREFGATTRELLELADWLKTSDCKMVAMESTASYWKPLYNILESSDLNAMVVNARHMKAVPGRKTDVKDAEWIADLLQHGLLQPSYIPDKDQRELRELVRYRKSLVGERTRELNRLQKMLEGANIKLSGTVSDINGKSARSILEYLLTGECIDGAKYDEMYEQKIIAHNLKATKEQIIDDLNGVMTPLQRRMMKELLSHLDELNTHIKNLDDEIDNFMKPEEKQASQAIQDVTGIGNTSAQAIISVIGTDMERFSTDRHISSWAGLCPGDNESAQKRKSGKTRKGNSLLRTTLITCAHAAVKNKKSYFYAQFMRISAHRGKKRAYVAVAHSMLIAIYHILKDGVIFKDLGADYYNQFNKERKINAYLKKLKALGWEAPVVAA

SEQ ID NO: 438868 - protein, 372 aa, unidentified
MDERIKFFVGLDVHKDSISVAACDTSREPARFVGTIGPDVNKLLKVLAKAGTPAEVSVCYEAGPTGYGLCRELCLRGYHCEIIAPSLIPRRAGERIKTDRRDCARLAELSRSGELKSIWVPDEEHEAMRDLCRAREDAVAARLRARQQLKAFLLRHDRRYPGKTSWTKSHEVWIAAQRFEHVGERVALGEYQLAEQAAAERVQRLTDALGDATKGWRFEAVVAALRALRGIDTVSAIGLIAEIGDINRFATARQLMGYLGLVPSEHSSGNSVRHGSITKTGNAHARRLLTEAAWNYRFPARLSTTLRERSAALPEAVRNHAWKAQVRLCKRFGQLSSRGVQHNKVCVAVARELAGFVWAIARQADPAPAAVH

SEQ ID NO: 438869 - protein, 422 aa, unidentified
MEEITEDAAELVARVAGLDIGKASLVCCVRTPHDSRPGRRRQQVRTFATTTGQLRELRAWLAAEEVTRCVMEATSVYWKPPFYLLEDAVAECWLVNAREVKNVPGRPKTDKLDAVWLARLAEQGMVRPSFVPPVWQRELRDLCRYRRTLTQERTREKQRVEKLLEDTQIKLSAVISDIFGVSGRAMLGALVAGQRDPRVLAQLARASMRGKISVLAEALTGQFRDHHGYLLAMMLGRIDALTAQIEQLTTRIGEAIAPFAHQVAQLDEIPGIGATGAQEIIAEIGVDMARFPTPGHLVSWAKFAPTARQSAGKSKPGSTGKGNPWLGGALGEAVIGAARTKTFLGARYHRLARRRGKRRALVAVGNSILTIAHRLLSDPAARFSDLGPDWHDRIAPLRRKRQLIAELERLSGKKVLLQDAAA

SEQ ID NO: 438870 - protein, 347 aa, unidentified
MNFYHSTHRHYCGIDLHARSLYVCIIDQQGEVLLHKEIKAQPELLLALLEPFRDDLVVGVECMHCWYWISDLCEEHGINFILGHALYMKAIHGGKTKNDRIDSFKIAMLMRGGNFPLAYVYPREMRTTRDLLRRRTRIVRHGAMLKAHAVNTLGQYNLPPSKANLNNPGGRSQLTAAFSDPDVQRNIDLDLAIVDCYQHELKKLEWHLEQQAKQHDPASLNVLKTTPGVGRILALTILYEVGDIQRFESVQKFASYARLVKCKAESAGKIYGTQGNKIGNAHLKWAFSEAAVLFIRNNDKAKRYVEKLQKRMNKPKALSALAHKLGRAVYFMLKDKRVFDEQRFLRG

SEQ ID NO: 438871 - protein, 389 aa, unidentified
MFYLGIDIGKNTHVASLIDDKKKVIFKAFSFSNSIDGANSLLEKLSPFIQSLEIGMEATGHYWLSIYSFLVEKNLSVHVINPIQTDGWRNGIEIRKRKTDIIDSILIADLLRYGDFLETSLSNEDYLSLRNLTRFRSYLISSVSDLKRKTIAVLDQVFPEYASSFSNVFGKSSKEILMSISTPQDFENITADKLEKVLENITMKKFAKRKIDELSSKATNSFGVKFCLDSFSLQIKLLIEQISFIESQVITVEQEISILMEKINSPITSIPGIGPITGAVILGEIGDISRFSNPSKLVAYAGLDAVISQSGEFESTSNRMSKRGSPYLRKALFQSALRAEFCDSVFSNYYQKKISQGKHHLVATNAVARKLCHIIFAILNKNESYLSQM

SEQ ID NO: 438872 - protein, 387 aa, unidentified
MNVKARRTKKQVNVENWAINLLPKEELSKKIEVVEKELRSYTWRKLEANGKFAKNDKLSFITDDMLIVGCDIGSENHYIRAIDVRGRELSRGAFEFSNTSEGFENAKAWVLALAAKHDKKQIVLGLEPTGHYWFALAAWMISNGISVVQVNPYAVKQSKEIENNSQLKDDRKDPKLIANLVKDGNYGMPYLPEKVYADMRRLSMFRDQLTEDRIRNINRLHRELKIYFPEYMDAFGKIDGAFTLEILKVSAIPSDITALGAEGMKNIWHNAKLRGRGYSRANEIVSYAEKSVGLTDGTDAGREAVKWYAEQILRLDEQLAEIESALHEKCREIPYAENILAINGVGENILAGILAEMGDISRFDDVKEIQKLSGMGLVACSSGKHKG

SEQ ID NO: 438873 - protein, 452 aa, unidentified
MHRDSWSDRSPFRQVNLHAAGIDVGSQSSWVAVPPDSSATPVREFGMFTPDLEELARYLRSCQVTTVVLESTGVYWIALYEVLDASGFEVLLVDAHHVKQVSGRKTDITDCQWLQQLHTFGLLRGAYRPTDALCALRSLVRQRAMLVEQRKTHIQHMQKALTQMNLHLHHVISDITGVSGMQILRAILAGERDVKVLASLRDRRIRASEETVMKALTGNYRHEHLFALRQAMSLYDLHSTLINDCEKAITAQAAVVAPPKPPSDSTTPTDPPPSPPPPRRSKPGVDEQMNATLSRVAGGVDLTTIDGISSTTAAIVISEIGGNVNAWPSERHFASWLRICPNPRISGGKLIKRGGKRPLSRAALALRQAAQSLNHSKSALGSFFRRLKNRIGAVKATTAAAHKLARIIYRLLKNGQDYVDQGQKAYEDKIKQRSIDALEKRAKGLGFKIVPT

SEQ ID NO: 438874 - protein, 336 aa, unidentified
MRFIGVDLHTTQITVCYLKAEEDFEIRKYQLIEMEKFVNTLEAGDEIAVEATGNTRWFAEQVASTARRVVVVNPRQFEVVKNSVKKTDKNDALNLARFLKADLLPEVRAKGEAAERVQSLVNTRTKLVRVKTSLINKIHALYVSNGRKLKKTSLASDKGLEKVLLSEWSAVERIELEIIIEQIRSLKVSIKKLDKAIEAESGKLKGFESLVSMSGIGSLSAGILLSVIGNIKDFATADKLASYFGIVPRVSNSNETVKTGRITKRGNRTGRTTLVQCSLAAIKKNEYLKKYYEGVKARRGHGKAKIALARKYLTIIYNTLSNNWVFADFNNFELAE

SEQ ID NO: 438875 - protein, 410 aa, unidentified
MKYYTSTTEFNCGIDLHARQMYVCVMDRQGKKLVHTNVRDNDFQFFLKMVEPYKHSLTVCCECMFGWYWLADACQQAGLSFVLAHALYVKAIHGGKNKNDRIDSEKLTHLLRSNLIPPAYVYPADKRPLRALLRQRIFYVWRRSELLARIHSHQLAHNRIPAKQTRRNRDPRKEQLLAAEDNELRRSALKNDLAMIQHYDDQIQSMEQELMRLTKDLQGRDYELLQSVPGIGRSLGLTILYEVGDIARFPTVKDFVSYCRLVKGTVASAGKIKGLRGAKLGNPYLRWAFGEAAVIAKRDHYVIGPLSQRLEAQMNGNKFKSNTVVAIKLARAVYFMLKNKTVFDPERLVASMQKCFRPGRRQPGGPTGRDKNAMPLPAADHASCASSTPVCVGQASSPGQSIGTCGQVHH

SEQ ID NO: 438876 - protein, 415 aa, unidentified
MKFEKDTSGIERYIGLDIHKEYVLVGGQTVRQEWVLQPRRVGIEKLREWAGANLRKGDALILEATTNVWDVYDIVAPLVNYTVVAHAGGVRQIAEARVKTDKKDIERLLKLLIADIVPEVWVPPVHVRELRGMISYRNRLVKTATMIRNRLQSLIHRHNLILPKGALTDKAWWAAQTLSALEQIQIRQELAMLEELSKHKAEVDAELGRQCLGETWSKQAVRLLQLSGFGVIISMTVLSAIGDITRFEDDKKLVGYSGLGPGVHDSGKEHIEKRITKSGRKELRWAMVEAAWRAIRISPYWKEQYEKYLRRMRKPNQAIVVIARKLLVAVWHVLTKEETDVHANEEDLAYKMLVLAWDLDEDVRMGLTYKQFAKYALMKLGVENDITRFVRKDVPRRLAPKDEVLARMAELGIPA

SEQ ID NO: 438877 - protein, 348 aa, unidentified
MKHYVGLDVSVKETSVCIVDENGKLCRERKVVSHPEDLVAILSDPKFSLERVGVEAGPLSQWLVEGLAKAGLPVFCIETRHTKAFLDALQQNKSDRNDARGIAHMMRVGLFKDVHVKTLTSQKRRALLTARSLLQEKAIDLENEMRGLLRNFGLKVGHASGGTFERRILELVEHDAELAEIMEPLLAGRCKLREGLAKLEKRVLAEAKQGEVCRRLMTIPGVGPIVSLAYVSAIDIPSRFRHSRSVGAILGLTPVVKQSGEMRRVGHVSLRGDAMMRRLLYEAAQSMMTRVAKWCWLKAWAMNIAKRNGSKKAKVALARRLAVVMHRMWVDGSEFRWTREDTVSTVAA

SEQ ID NO: 438878 - protein, 373 aa, unidentified
MTNYTTHVAMDTHKKQHKLALHYPGDEQIVEFVVKNTPSEIKKMVRRITKRAPGDVLFCYEAGVCGFTLKRRIEALCCKCAVIAPSLTPKKPGERIKTDRRDAKKMLAMFMSGLLTEVYPPDLQQEAAREITRCREAAKEDLNRARHQLLKFLTRHGYIYTDGDHWTARHLRWLRSLEFEQSLLRDVFDNYLTQMQHRMQRLDSLDRQVEELAQSESYKELVGLLRCFHGIDTLTAITVLTEIFNFGRFCNPRDLMGYLGLTPSESSSGDKQHKGPITKTGNRRVRRLLIETAWHYRHPFTVSKALKRRRKNQPQWAIDIADAAGMRLRRRYRRLICRGKMPCKVTVAIARELAGFIWAVLNEYELRKNKKAA

SEQ ID NO: 438879 - protein, 430 aa, unidentified
MKSNTQNAKIEAITEKTLVLGIDVGSETHYARAFDYRGIEYSKKPFKFSNTEAGFVTFKEWILDLKERHEKDKVVPGMEPTGHYWFNLGKFLQDNEMKPVLVNPHHVKKSKELDDNNPTKNDRKDPKVIAGLVREGRYMIPYLPDGVYADLRTASNIRFQLQAELTRIQNRISRWFNIYFPEYKTVYGKPDAKSGMLILKAAPLPEDILTLGIDGVNQIWRDAKLRAVGKARAKTLIEAAEHSVGSKEGAVSARMEIRMLLEDYESRNIRLQEVMTLIEGLVKQIPMAEKLLEIKGVGIRTVSGFLAEVGDISRFNNPKELQKLAGLALVENSSGKHKGETTISRRGRKRLRYLLFEVAMSLVSKNQEFRELHNYYTTRRLNPLKKMQSLMAIAAKLIRVFYVMLTKGVNYDPKKMVNDIKRPAVYLQTA

SEQ ID NO: 438880 - protein, 340 aa, unidentified
MHATMIGLDIAKTVFQVYGEDSEARAVLRKRLSRTALAGLFAKLPPTVVGIEACGTAHHWARTLTAMGHTVRLIPAAYVRPFVKRNKTDARDAEAICEAMQRPSMRQVPVKTVEQQAGRGLETARDLLVRQHTQLMNSVRGLLAELAIVAAQGRRGFAVLCTRIEAGDPAIHPVLLPALQTILEQWHGTGRAITELEARLVAWAKADATMRRLMTVPGIGPLSAHAIVAAIGDGRQFSAARDFAAWVGLTPRQHESGNRRHSGRISRQGDQGVRRLLTLGASAVMRQARAKPQRATAWQRGILARRPVKVAVVAQAAKTARIAWAMLRSGHSYRAAGAAA

SEQ ID NO: 438881 - protein, 411 aa, unidentified
MIKENYIYVGIDLHKETHTAVMIDCYNQKLGEITFPNRPADFPKLVTKVKKCNTDGKEVVYGLENAYGYGRALAVWLIDKGYLVKDVNTAISHRQAKHQGAMYRKSDSDDAKAIALATLNMLDKLPDACPNDAYWSLGQLVHRRDNIMKQRTRLVNQLHEQLCIAYPSYKSFFNDISRPTALYFWEHYPSRKYLRGKSVEDLRKELVPVSHNKCSTKTCEKILDAVARDKVKNIDYQDARDMVTLSIVSDLQHYDSQLAEVDKMLEQMYKMLGCTLTTIPGVNVITAVKILAEIGDIKRFSNANKLAQFVGIAPLHLSSSGKGKDVATKQENRRLHATIYFLAIQMVQLSSKGTPRNPVVRAYYEKRKAEGKTSQQALICISRRLISIIYGMLKNGTEYRMPVVENAGEKL

SEQ ID NO: 438882 - protein, 348 aa, unidentified
MLEDELDYLLGVDTHRDEHVLAVVTAPAGAVVAGSRVAASRRGYQEALCFAERYAAGRRVWAIEGTGSYGAGLARFLAERGEVVLELSRTARAERRLAGKDDALDAVRTARAALASETLALPRAGERREALRLLLAARRSAVDVRRQALGQLRAVIVTSPDPLRDELRRLPLGQLLDRCSRLRRTHSTADHLATRVVLRSLARRVQAATAEAEELEREILAQVGALAPALLDEPGVGPIVAAQLIVAWSHRGRLRSEACFARLAGVAPLPAASGQTVRHRLSRGGDRQLNRALHTIVLHRRQHDPATRDYIARRVAEGKSRRDATRLLKRYLARRLYRLLQNQEPLMA

SEQ ID NO: 438883 - protein, 328 aa, unidentified
MIMLGIDVSKTKIDCCIFPQGLTGKRKNKIFTNTESGFGSLLKWLITLKIEPDQVTAIMEATSVYHENLGYYLYDAGVKVCVANPSRVRAFAKGMSMLNKTDKADSEALSRYGYTAKLIIWQPEPENVRLLKALLGRRDVYLGSLLQEKNRLEKAQSTHTSVVVIKLLEENIEYLNQQLEHIDKLINNHIDQDPTLKQDLKLLQTIPSIGERSGLLLLGLFHSHKFEKASQAAAYVGLVPVHQLSGSSVNKQSHLSKAGDSKIRSVLYMSALTAIKYNPHIEALYQRLLSQGKNKMCALGAAMRKLIHLCYGVLKHQTAYQRDYLVVE

SEQ ID NO: 438884 - protein, 362 aa, unidentified
MDEDGVVFQSKYGVLTPELEQMAGVMVEYGVEEAAMESTSIYWMPVWRVLEPYVALRLVNPFFIKQLPGKKSDVKDAEWIATCLQKELIKGSYVPDELIQQLRQYDRRIFDLSKDIVYKLTKLDAALQRCNIRISNYVSTTKGKAYQEIVRLISEGKTDSEELVKHIHGRTVNRIGKEVLVSALSGVITAADIDTIRQLREEVELAQRHKDECQAKMDEICKQYFPKQYANLQTIPGVQARSATAIIAEVGTNMDAFQTTAHLVSWAGLKPRNEESAGKIKSRRVTHGNKYLRKTLIECSWAASKTQNCFYNRFSYIQCTVRHKNKMKVQVAIARKMLTAVWYILHDNVPYRDFTPDIVPSE

SEQ ID NO: 438885 - protein, 359 aa, unidentified
MDIQGTSVGLDVHALSVVAHAVDEETGKVSKARLCPDHGEVLGWLHQLRAPVRMTYEAGPTGFGLARAINEAGMECVVAAPSTLQRPAGDRVKTDARDAAHLARLLRLGEITAVTVPEREIEAVRDLVRAREDARVDLMRVRHRLSNCFCGRGSSIFGGTPCTCAHEKWLRRQRFDDAHLKAAFDHGFDAVLAATAARDRLDEQITEVAASPRFADPVNRLGCLRGISALTGLALTVEIGDWSRFTGSSIGAYVGLVPCEYSTGTSRVQGSITKVGNTHVRRLLIEAAWHHRKSYRTSGPTLRARWAVVEPALRPRGHAGNRRLYKRWRHFTERGKNPLVANLAIARELAGWCWSLATM

SEQ ID NO: 438886 - protein, 349 aa, unidentified
MNMLADQVDAVIGVDTHKHSHTAAVVDPTSGVIAHLTVPSDAFGAKRILAFAKLHAPGRRVWAIEGTGSFGAGLTTCLLEQGEWVVEIDRPARAARRNGAKSDELDAARAAREALAREHLAQPRRRAEREAIRVLLATRHGAVLSRTRAVTALHALVVNAPEGIRGQLRTLGSDDLLNRCARLRTSPTQSAEHRATVTALRSTARRALACEAEAADLESALEVLVTAAAPGLLAERGVGVISAAAILNAWSHPGRLRSEAAFAALAGVAPIPASSGQTVRHRLNRSGDRQLNRALHTIVLSRLMHDAETRAYASRRSSEGRTPREIKRCLKRHLARRLFKLLERLPMAA

SEQ ID NO: 438887 - protein, 368 aa, unidentified
MILVGIDVAKDKHDCCIINSDGKFPEEVFSILNNREGYETLYKRICSLAVDFTKVKVGLESTGHYSSNLLAFLLDKHLTAYVINPLRVNLFRKGQSLRRTKTDKIDSRNIVHLLMADSSLKPYSLSSYHMEELKSLTRYRGTKVRERTKLKTSIARLVTILFPELEQLVSSIHIHSIYAMLEKFPGSAYIAAAHLTRLTALLLKASRGRFGRETAIRIRDTARRSIGAVSPAKSMELQHTIAHLRVYDQEIGEIESEIEKIMDDVNSPITSVPGIGMQMGAVILAEIGSFRRFDSPDKILAYAGMSPSMYQSGKLTGSYSRMEKRGSRYLRYALFNVTRYVCHYDPGFTAYLSKKRKENIITLPSPMQ

SEQ ID NO: 438888 - protein, 400 aa, unidentified
MNPVVGLDVSKGESQVQAFLDKGQPYGKSFSISHTREGLDTFLHFLKNVESITSKQPPVVLESTGHYQTPITQFLEEQNYLYIVINPLISYQAKKSSLRKVKTDAIDAYHLCELYYKEELQPHKKRGLQLLNLRNLTRQHESLTDLCTQAKLQFHAILDQVFPEFRSVFGDLFSKVSLHILLEFPTSEEVLKARESELTERIAAICISRSNAWAKEKAKKIMDAASRNPFQKVVYESHLISLEMYIRIILQYQEHLSNLEHRIDALASEIEEYKIIQSIPGIGEKIAATIISEIGEIERFNHPKKLVAFAGIDPSVHSSGKFTATINRITKRGSSRLRHALYMAVLCGIRSSRNKKLKEFYDRKRDEGKPFKVTVVACANKLIHWIFTLLKRKETFLDLA

SEQ ID NO: 438889 - protein, 420 aa, unidentified
MKSASNNPNNTLPEFPPHDVTAGIDWARDDHAACVVDSRGRKIADVTVEHTSAGLRDLVAFFGRHGVSEVAIERPDGPVIDTLLAASLTVVVISPNQVKNLRGRYGSAGNKDDRFDAYILADTLRTDRARLRPLVPDTEATIALRRACRARKDLVKHRVAAANQLRAHLRNVFPGAVGLFAEIDSPITLAFLTRFDTQDRADWLTPKRLREWLSKQGYSGKVDPAVLHQRLLDAPRGATGEHATSQAAITAGYVALLRTLLEQIKTLAAQIDRQLDQHTDAHIFTSLPRSGRVRAARLLGEIGDCRAKFPTPESLTCLAGAAPSTRQSGKLRTVGFRWACDKQLRDAVVDFAADTRLVNPWAADLYDRARARGHDHAHAVRILARAWLHIIWHCWQDNLAYDPEKHRALQRVIATQTAAG

SEQ ID NO: 438890 - protein, 346 aa, unidentified
MEHYVGLDVSLKLTAICIVDRTGKIVREGVVSSDPETIAAFIKSHAPHVARVGLETGATSTWLWTELNKMGLPVICIDARHAKAVLKMQINKSDRNDAVGIARIMQCGWYKEVHVKDLDSHATKALLVSRALLVKIKRDLENQIRGLLKNLGLVIGRAKMNVFAARAAELAEARPELAAAVEPLLKAREAVERQIADLDRKVLRLARNDAQVRRFMTAPGVGPITALCFLATVDDPTRFKRSRSVGAYVGLTTRRYASGEIDWTGRISKCGDAMLRSYLYEAANVLLTRIAKWSTLKAWGIRLAKRSGLRKAKVAVARKLAVILHRMWVEGTEFNWSSKEVANQPA

SEQ ID NO: 438891 - protein, 365 aa, unidentified
MVSHINHNQSSVMNDTTAIAWLGLDAHSKNCVLAHLDDHGAEIKWWKFPTQPQKLIAQIQAIPAADKRLMLEESNLARWLSQLLQPHVQQLVVCDARRNHLISQDHHKHDRRDAFALARLLRLNEFKPVWQPAEDQRVLFKRSAQAYENAVQRQTRLKLQLKALFQHWGLFPTGSTVFAPTGRALWLKQLPYDALRSQALILYELLDQALASQTQCRRLLIQTGRAFPEIPRLRTIPGIGLVGAHLFVAYIQDPTRFKKFSQLTRYCRLGIRDRTSDDKPLGYQQLDRHGVGTLKAITYRAYLQAAKRKQGPVWDFYEFSRRHTGDSTHARLNTQRKILYTLWTLWRSGRGFEPEKFSRSQPMDV

SEQ ID NO: 438892 - protein, 357 aa, unidentified
MTQSNRISFKGQNIYVGIDVHLKSWSVTVLSETSVLKRMNQGADPDALHRFLTSHYPEAEYYSVYEAGFCGFWIHDRLTELGIHNIVVNPADVPTMSSEKLRKTDAVDSRKLAVSLRAKQLKGIYTPDSETLEIRSLIRLKNSITKDMTRQKNRIKSQLRYLGVEIPVEYLESHSNWSKRFLNWLKQVGMRTPSGRQALDILIMQFEALRKQKAEMTRKLRMLSHTERFEETLNLLMTVPGIGQTTGLALMAEVVDITRFANAEQLAAYVGMIPMCHSSGEHEGVGDITLRKHAILRSNIIEAAWVAIRKDEAMQLCYLNNCKRMVPSKAIVKVARKLVNRIYFVLKRHQPYVNAVA

SEQ ID NO: 438893 - protein, 415 aa, unidentified
MALKIVYQICCGIDVHKTFVVACITSTNKQGVTTYKRHRFSTFTQGLKELLQWLLDNHCKDVCMESTGKYWIPIYNVLEKDCTVVLAHPKYVKAIRGKKTDKKDAKWIADLFKHDLVAGSFMPPADIRQLRDLMRYRFKLTCFISSEKNRLQNCLTVSNIQLASVVSDTFGKSSQRILDKILENPQDTSFAIEPLIHGSMKKKLPELELAIDGFITPQQAGKLQVIRKHFENLESRKAELEELILALASPYQQELDLILTAPSFKNTFTAIGIISEIGVNMEAFPSAKHLCSWAGLTPTNNESAGKKKSVRVSKAGCYIKPLLVQCANSVVKSEKHPEIRNRYLRLRKRRGHKKAIIAIAGMLLTALYNMLKNKEPYNAELYRKCDVLPVNREITVEQAILMAQFQGYKIKPATE

SEQ ID NO: 438894 - protein, 315 aa, unidentified
MSKQVIEVFVGIDVSKDTLDIGFGSSREVFQVAYDDGGIAEAIRRIREVSPTLIVLEATGGLETRLASCLIAAGLPVAVVNPRQVRDYAKACGQLAKTDRIDALVLADFARAIRPQVRPLKDEATAELDALLTRRDQLVKMRVQEQLRLGRALKVQVKSIKRHIAWLDKCIAEIDTDLTARLRSSEAWRAKDDLLQGIPGIGPVNSLSMMAKLPELGTLSHKEISKLVGVAPLPDDSGKRRGKRFIQGGRADVRCVLYMAAVNAARFNPVIKAFAERLKSAGKPAKVVIVACMRKLLIIMNAMIKNNSPWTPKIT

SEQ ID NO: 438895 - protein, 405 aa, unidentified
MEIIYPRCCGLDIHKKTVVACIITPEEKEIRTFSTMTEDILAMVDWIKSKGCTHVAMESTGSYWKPIYNILEIEGLNPMVVNANHIKNVPGRKTDVKDAEWIAGLLQHGLLQGSYIPSREQRELRELIRYRRSLIEERAREINRIQKVLEGANIKLSSVVMDIMGKSSRAIIEAIINGEEDTVVLSELAQKRLKNKKEELKKALKGLIGPHQRLMLKTQLAHIDFLDEQIGLLDEEIKRRMLPFEEDMERLDTIPGVGRRTAEHIIAEIGTNMDQFPSAAHLCSWAGVAPGNNESAGKRKSGRTRKGNEKLRSVLVEAARAAVHTKDTYLSAQYHRIAARRGANRAAVAVAHSILTIVYYLLKRKERYNELGVNYYKERKKEAIVKQSIKKLESLGLKVIVENAV

SEQ ID NO: 438896 - protein, 412 aa, unidentified
MDLYCGIDWAEDHHDIALVDRDGTLLARRRVSDDAAGLAAVLGLLAEHGDSPEDLIPVAIETPRGLLVACLRATGRTVYPINPMAVARYRDRHTVSGGKSDAGDSVVLANVLRTDMHAHRPLPADSELAQAIAVLARAQQDAVWDRTTAHNRLRSHLREYFPGFLHAFAGARGGIRRPEARAILAAAPTPADAARLSVAQLRALLKKAGRTRGIDAGATRLRDTFRTQQMRQLPLVEQAMGRQALALLGQLDAACASADDLERAVTEAFNLHPDAGIITSFPGLGPLTGARVLAEIGDDRSRFQDAKGLKAYAGAAPITRASGKTKTVTRRHIKNNRLNAAGYTWAFSALTASPGARAHYDRRRHDGDRHAAAQRNLFGRLLGCLHHCLITGQHYDETTAFPAATKQSRRAA

SEQ ID NO: 438897 - protein, 372 aa, unidentified
MHKDSVFVCILNENGVVFQEKYGVLTPELEQMLAKMLEYHVEEVCMESTSIYWMPVWRVLENYVSLKLVNPYFIKQLPGKKSDVKDAEWIATCLLKDLIKGSYVPDDLIQQLRQYDRRISDLNAECVRKLGKLDAALQRCNIRISNYVSTTDSKSYKEVVRLISEGTRDPAELTKVIHGRTVNRVGKDVILASLTGVISNTDIDVIRQLREEVALAEKHKDECQSKMDAICQQYFPEQLKNLQTIPGIKGRSATAIIAEVGTDMSSFEDAAHLVSWCGLKPRDEESAGKIKARSITHGNKYLRKTLIECAWAASKTQGCYFNKFSYHQVVVRRKNKMKVQVAIARKVLTAVWYVMHDSVAYRDFTPDIAPTE

SEQ ID NO: 438898 - protein, 417 aa, unidentified
MKDETNASPCRYVALDIHKHYCVIAAVNRDGEVVLDPVRVEHEDLEARLKKNLLSSDHVVIESTTNAWHVYDLLEPLAAKVLVANPIKVKQIACARVKTDIRDTLILARLLAANLVPTVWVPPVEVRNLRYLLSQRRRLVGMHTQTVNRMHSVAHRHHLNHPKGKRFIEKNTEWQQDDELSDSEKFQLELDMATGEHLDGQAKKIAEKLARMSHQKPWAESMLYLMQLPGFGVITGMTVLAAIGDITRFETHKKLDSYSGLTPGVEQSGTKHRGKGITKEGRKDLRWAMVEVAQRAVKSDPLWKSRFNELQRRMHRNQAIVAIAHRLLELVWFVLTRKQAYRHFTPERIAYKYLTWAWQVDEKFRDGLTRPQFARYYLMRLGIGSDLKRIALNPKYPRKLASEAEVLALKPELNQTK

SEQ ID NO: 438899 - protein, 419 aa, unidentified
MTRSKDSKIIGVVHQICCGLDVHKESISACVIFPDKDGVDQHDIKVFGTFTDDLMRLRSWLLDHSCPVVAMESTGIYWRPVHNVLEDSVQVVLVNARDIKNVPGRKTDIGDSKWLAGLLRHGLLRSSFIPFKEVREWRDLTRLRKKYVQTVGDYKKRTHKLFESANIKIDSVVSDLFGVTGRNLMNLLVSDRKPLTLSEIQICVRGKLKGKEEELYRSIQGFFSDHHRFILKRLLETIDMLESEIAEFESHIRHLMRGQNALLDRIKKAAGIADVSSCEILAEIGPDMTAFRTGEAIVSWAGLCPGNNESAGKRKSGKSPVRKHHLKTIMTEVAWAAVKKKGSYFKDKYYRLKARRGAKKAIIAIAHRILLGIYHVIKDGVEFRDLGEDYLTRRNKSQKMSYLRKQAQLMGYNLVPQAT

SEQ ID NO: 438900 - protein, 479 aa, unidentified
MTRKQSKQAKPRKSQRRSGRKRQKGMCLADRPVLEANAAGIDIGAREIFVAVPAGRDAQPVRACATFTEDLQQLADWLVTCGITTVAMESTGVYWIPLYDTLESRGIKVCLVNARHMKNVPGRRTDWHECQWLQYLHSVGLLRGGFRPEVDVTGVRTVMRHRHELVQMSSQHVLHIHKALTQMNLQIHHVIDDITGLTGLAIVDAILAGQRDPVELAKLRNWRIKADEETIRKSLVGNWREEHLFTLRQSRELYRTYQQQIVKCDQEIERLIGGFEPRVDPEKKPLPADRKRYRSEKKRAKKNGRLETEFNLRTEAYKIFGVDVTQIPGLETMALPLFGEVGRDMSKWPTAHHFASWQGLCPDNDISGGRVLWKGTRRVHNRAGQMFRQAAYSLHHSLTPMGDYLRRMKTRLGPAAATTATAHKIAVIFYTMVKNQVEYDETIWATRDVKRQHRIEAKLKRQAQQLGYQLVPMQKKPAA

SEQ ID NO: 438901 - protein, 381 aa, unidentified
MNEKQATLEKELPTKFPVLYVAFELGNSTWKLACSDGRKVRQVTVTARDLEQVQRVFLRAQAHFGMGEAAAMVSCYEAGRDGFWLHRYLQGRGIDNVVVDSASLEVDRRLRRAKTDRIDAGKLLRMLIRYHGGEKQLWRVVRVPSREDEDARHLHRELESLKRERTRHRNRIHGILMQQGLRLPNPSKKRFLKDLEALRTWDGQKLPVGMKVRLVRVYQQLRLVEDQISILATEKREQLQQVDNAKMHQVSQLLKLPGIGPVSSWAFVMEFFGWRRFRNRREVAALAGLTPTPYDSGRKLREQGISKAGNQRIRTLAIEIAWAWLRYQPQSKLSQWFSERFAGGGTRMRRIGIVAVARRLLIDLWRFLEYGVVPEGALLTT

SEQ ID NO: 438902 - protein, 343 aa, unidentified
MKANPHLLSIDVGSLELVTATVLTNGRIQTMAFANDPIGHKKLVAHARRSAPRGSTIRVGLEATGTYSLEVALLLSRTPGFEVSVINPKTIKHFLRAQGLRGKTDKIDAAGILRFLEVMPFRPWVAPAAPILALQSIARRIYQLSAERVREHNRLHAIRAHGAAGNIVTQELLGSISQLKTRIHALIDSAKKIIQADSCLQRKFDLLTSVRGIADRSAVLLLGELLVLDPQMKGPQWVAHAGLDPRVRQSGSSLDGHRYISKAGNRYIRAALYMPALVTVRREPAFQAKYAHLVDQYHKHKMVALVAIMRKLLLCIHGMLKTDTPFNPLKLQPLENPSAHVAA

SEQ ID NO: 438903 - protein, 402 aa, unidentified
MYNAVGIDVSKGKSTVAVLQPAGVIIRKPVNVNHTSSELDELAKYIGSLEGETRVVLECTGRYHEPVVKTLSEAGLFVSAVNPHLIKNFGNNSIRKVKSDPADAKKIARYTLDNWIELRQYSSMDNTRTQLKTLNSQFSFFMKQKVAAKANLIALLDNTYPGVNKLFDSPVRDDGSEKWVDYAYSFWHVDCVRKIGLKTFTERYQAFCKKHHYNFQPAKPAELFLASKDLIAVFPKEASYKLLIQQSIQQLNLASSHVEELRSKMNELASTLPEYTTVMGMYGVGKTFGPQLIAEIGDISNFSHREALTAFAGVDPGVDQSGTHNSKSNKASKCGSNRLRKTLFQIMSTLLQTAPEDDKVYQFLVKKRAEGKPYYVYMTAGANKFLRIYYGKVKECIRNLEQ

SEQ ID NO: 438904 - protein, 405 aa, unidentified
MDGIGRYAGIDWAKEGHAVCVIDEWGVVTSRFEVEHTSAGLRELVRRLKDVDSVAIERPDGPVIDALLEAGVAVSVIASRHVKALRTRHGLAGNKDDRADAYVLADALRTDGHRLRPLQPDSEATLALRATVRARKDLVGHRVALVQQLTAHLELVFPGAVGLFSDLDSPIAGAFLERFPSAERAAWLSPKRFTAWLRAQHYCGRRTGAELHERLVAAPAGRTGETAEAMVAVTLALLRTIVAVRRGIETLEERIAEQLALHPDGAIFTSLPRSGCVRAAALLAEMGDCRERFPTPESFACLAGATPSTRQSGQHRAVTFRYACDKKLRDALVDFAQDSRFANAWAADIYARARDRKKTHPHAGRILARAWSYVIWRCWQDRVPYDPARHRALQRVLGAPTAVAA

SEQ ID NO: 438905 - protein, 545 aa, unidentified
MSVTRLGIWHFTQLPKSPSFAQFQIFAPRTPSRVYAGLLEYSCCGAWQVCYPLSDTDAGSAHLGPERLGRPSPAYGTTKAFPSVEPVGLLGHPADIKSGTPLAVDEPVSVGVSLDPKIHAPPTHKECSMKSDAESIPIQRFIAIDLHKKYVMIGGQNKRKDWVLRPRKVRMSRFRDWAAKNLRPGDAVVIEATSNTWDIYDLVAPLVTKTVVAHPGKVRQIAEARVKTDKEDIKRLITLLIADVVPEVWVPPMHVRELRSLVSFRWRLSKQITMSKNRLHSVIQSANLNPPQGKILADKNLSWWQQQKFSELTDFQVQLDQQIVEQLEAHKANIDQKLAIMSNSKPWADDIVFLMQIPGFGIIFSMIVLSAIGDISRFERPKKLAGYAGLGAGVHDSGEKHQEKSITKEGRKELRWAMVEVAWGAVRSDPYWKTEYNRLSKSKHPNKAIVAIARRLLVAVWHILSKREPYQHFDEEIIAYKMITWSQRMNEEALKGMTRQQFAKYGLLRLGIGEDITRIHHNGKPRRIAPTEEVLSLKPELRPPK

SEQ ID NO: 438906 - protein, 347 aa, unidentified
MAITMLGIDLGKNSCSVAGFDETGRVVLRRRLTRDGVVQLGAKLPACTMAMEACCGAHHLGHILREQGHEVRLMSPEYVQPYVKAQKNDERDAEAIAEAATRPTMRFVELKSEAQLDAQILHRARTRLVGQRTALINQLRAVLLERGIVVAKGRQQLKRFLTEMLDPAIEPASTLSPRTRLLIEDMRLEWGELDRRIAALTTEFVARAREDQAARRLVSIPGFGALNATALVAAIGTGETFRSGRDLAAWLGLVPRQATTGGKPRLLGITKRGNTYLRTLLIHGARAALPSLSAGQTLIGEWLRGLVGRAHKNKVVVALAGKLAGIAWAVLRSGEGYAARVSQPVAA

SEQ ID NO: 438907 - protein, 410 aa, unidentified
MEVLYPHCAGLDVHKDTVVACVRHMVNGSVRREVRSFKTTTKELLALSDWLAGEGCTHVAMEATGVYWKPVWHVLSDGDFTLVLANAAHVKNVPGRKTDVNDATWLADLLAHGLIRSSFVPDEQTQEMRTLLRTRKQLVRECSRHVQRLQKTLEDANIKLDSVISDIVGLSGRRMIEALIAGETEPGALAAMAHRRIKATPDELEAALRGRVTRHHRFLLQLHLQQIDAVNAAIDQIDQEVDAYVEPFRATVRLLTTIPGIDELSACVILAEIGRDMSRFPTAGHLISWAGLCPKNDESAGKRRSTRMRKGAPWLKTTLVQCAAAAARKKASYLQAQFHRLRARRGAKKALGALAASILTSVYHMLISGELYRDLGPHHFDQRAKAVNTRRLVVRLQNLGYAVQITPLAA

SEQ ID NO: 438908 - protein, 333 aa, unidentified
MSQFWVGIDVSKRKLDVALLNDAGKVKSKSVANDPLGFAALMIWLKDRGAELASTHVCLEATGVYSDGCATAFADAGWVVSVVNPSLPKSFGQSELKRNKTDEMDAALLARYCSKMSPAAWKPAPVEYRKLRSLVDRLQALKDMYQQEANRLEASVEDAAKQSITQHLTWLAARIAELDKDINKHIGGNKGTLREDAKLLTSIPGIGKTTAAKVLGLAGDIRRFTSAKALAAFIGVTPQRYESGTSVRGRSGISQAGHHRLRHALFMPTLVATKHNPPVKAFRNRLVAAGKTKKSAALASMNKLVHIMYAVVQKGVAFDTRFSGLALDVQDGI

SEQ ID NO: 438909 - protein, 375 aa, unidentified
MTFKAWVLDIKEKHGKDKVIPGMEPTGHYWFNLGKFLQDNEMKPVLVNPHHVKKSKELDDNHPTKNDRKDPKVIAGLVREGRYMIPYLPDGVYADLRTASNIRFQLQAELTRIQNRINRWFNIYFPEYKTVYGKPDAKSGILILKEAPLPEDILTLGIDGVNQIWRDAKLRAVGKARAKTLIEAAEHSVGSKEGAVSARMEIRMLLEDYESRNIRLQEVMGLIEGLVNQIPMAEKLLEIKGVGIKTVSGFLAEVGDIRRFNDPKELQKLAGLALVENSSGKHKGKTTISRRGRKRLRYLLFEVAMSLVAKNPEFRELHNYYTTRRLNPLKKMQSLMAIAAKLLRVFYAILTKGVGYDPKKMVNDIRRPAAYAQAA

SEQ ID NO: 438910 - protein, 372 aa, unidentified
MIVVGVDPHKKTHTAVAVSSQLGELKGEVTVKARPEGHAKVIQWARALDKERVFALEDCRHVSGALERFLIARGERVVRVPPKLMGEARRSARSFGKSDPIDALAVARAALRETDLPEAHLDGPARDIQLLVDHRDDLVAERTRIQNRLRWHLHDLDPALDEQAQRLQRSHKRLEQIGRRLAQKEQTAQVRVCRDLLRRLKALSRDIKALEAELAELVGRHAGPLLELPGCGTLTAAKLIAEIAGVERFSSDAKLAKLAGVAPLDASSGKQQRHRLNRKGNRQLNCALHRLAVTQGRAHGPARAFLAAKQAEGKSRREALRCLKRHLARVVFRLLKAIASRSHPESENLFPSERERQLPSPARAGGRLVAAT

SEQ ID NO: 438911 - protein, 349 aa, unidentified
MNVNHYIGFDVHKKSVSYCVKAGDGTILDEGRIAARRASLREWAAKRAQPWQGAMEATLFSGWIYDTLRPFASELQMGHPAMMKAIGASKRKSDRLDARKIADLVRCSLLPVCYVAPPEIRELRRILRYRNLVVSQAVRLKNRMSGLLMETGAEYNKQRLHGAEYFSELLDQLQEIPESVKDLLRLSRGTLEMFHKTQQRLLERLENDSRLAERVERLKSIRGVGTVTALTWALEVGDPGRLGSIARAVSYCGLTAALVSSADKQQRGPISKQRNGHLQTVLIEAAKLAPRWNPQLAAVHERELQRGHRNRATLAVARKLVAYLLAVDKSGKPFQSPAAALQPENTAAA

SEQ ID NO: 438912 - protein, 345 aa, unidentified
MKKRIEGVTVYGIDIGKNTFHVVGLDTTGKPILHCKFRRDRLLVHFANTPTALIGMESCPGSQWLARKLQASGHTVKIIPAQFVKPYVKSNKNDMVDAAAIAEAVTRPTMRFVQVRQPEQSARQALHRVRDRYMSQRTGLINQMRGFLLEFGIALRQGAGVFRMDVTRVLGDEANELPPSMRTLIADLWNDFKLLEARIEDLSKQIQRSVQYSDTARRLMTVPGIGPLAASALEASAGNGHQFANGRFFAAWLGLTPREYSTGGKTTLLGISKRGNTYLRRILIHGARSCVQTCDRQRHPLGAWITKLEQRMHRNKVIVALANKIARVAWKILTRPEEIYRWADA

SEQ ID NO: 438913 - protein, 361 aa, unidentified
MSNSTTWIGMDVHKESIVVAAVNGAGTVAARWETPNTLKGKERLAKRLSEFGTVRCAYEAGPCGYDLRRFLETKGIPCDVIAPSLIPKKPGDRVKTDKKDAEKIARLHRMGELTAICVPTPAQEALRDLLRAREDANEDLVRRRHRLQKFLLRQGRRHEGKNWTRDHWRWIRAQKFTDQNSETVLCEYIAAIDQEIERIGRLDAQIEQESKNPEIAPAIARLQALRGVKTLTAMTILSELIDLNRFPSARKLMDFVGLVPGEYSSGGKQWRGSITKSGNSHVRRVLVEAAWHYRHSPRTTGAAIRKRREGQPPEVIETARKAELRLYKKFTRLVMRGKKTTVAATAVARELAGFVWAIGRI

SEQ ID NO: 438914 - protein, 419 aa, unidentified
MIQPDAAGIDVGAKEHVVAVPCNRDERPVRTFQAFTPDLHELAAWLKGCGIRSVALESTGIYWISLYEVLEQHGFEIRVVNARHVKNVPGRTKTDVLDCQWIQKLHSFGLLNGSFRPDQQIRKLRTYLRLRDNLVVSSTQAVHHMQKALFEMNVQLSNVISDIVGESGLRIIEAIIAGERNPEQLAALCGTRIKASRQTVAKSLHGNWDEALLFCLKAALEAYRFSQVKIQDCDHCIERHLAEFESRAQLPSSPKDLQAHLHRICGVDLTKIPGIKEQSAQIIISEVGLDMNKWNTEKQFSSFLGLCPNNSISGGKVLRRATRKVYNRAADTLRLCAQSLTHSKSALGAKYRRLRARLGAPKAIVAMAHHLARLVYRMLRYGDKYVEKGIEHYEKKFRQQRIKWLKKEASTLNLQLVAV

SEQ ID NO: 438915 - protein, 346 aa, unidentified
MVTLGTDSHKRSHTLVAVDENGRQLSELRVAATSAGHREALSWARQWDDRRWAMENCRQLSRGLERDLLTAGEAVLQVSPKLMGVSRRSGRELGKSDPIDALAVARVGLREPKLPLAQLEGRSRELKLLVDHREDLVGERTRIQNRLLWHLHELEPGFAIAGGGLTRRVVQTELLRRLEAHEGVVAEIARELVARLAELTTAVKRLQRRIEVLAAELGPSLLSLPGCAGLTAAKVIAEAANVRRFHSSAAFAMHNGSAPIPVWSGNQERHRLNRGGNRQLNVALHRIAITQIRLGGPAAAYVAKKLSSGKTKTEAIRSLRRQLSDEVYRRLRLDSPAFSEPNLVAA

SEQ ID NO: 438916 - protein, 353 aa, unidentified
MVHSSRVEAQEVVGLDVGDRSSQICRLDRQTGTILEERRLSTTTASVQRYFGALSPQLIALESGTHSLWLTRLLSSLGHEVIVANASKVQAIASSLQKTDERDARFLAQLVRVDPQLLSPVHPRSEESQQAIAVVRAREGLVKARTMLINQIRGMVKSFGFRLPAVSSAGFARKIQKDETLPSSLKTTLEPLLRVIAEVSQEIARFDKEVEALARRWPVTQRLRQIKGVGALTALVFVLTLGDPYRFARSRAVGAYLGLVPGNRSSGQSSPQMPITRQGDRMLRRLLVQASHYVLGPFGQDSDLRRFGLRLAERGGKSGKKRAVVAVARKLAVVLHRLWVSETDYLPLRVAAA

SEQ ID NO: 438917 - protein, 338 aa, unidentified
MIVIGVDVHKQSLTAVAVDQAGRILDERTAAVTQHELVAWAAGLGSERLWALEDCRQLTRSLERELIAANEQLVRVPPKLMAPERRTGRERGKSDPIDALAVARAALREPRLSRPRPDEQPYRELKLLVDHREDLVDERRRIQQRLRWHLHQLDPAFVVLAKGLDRPVHLDRVARWLARRPAEVQVRVARELVVRCRSLTKTIVGLDRELEQRTAQTAPALLELPGCGAITAAKLLAEIGPIDRFQTDAQLARHSGVAPLQASSGRVQRHRLDRGGNRQLNCALYRIAITQARHHPDARAYLERKQAEGKSRREAIRRLKRILIRTVFNTLKASPALT

SEQ ID NO: 438918 - protein, 408 aa, unidentified
MEVVYRCCCGIDVHKKIIVACLNQGGEQSLREFGTTTSEIKSLATWLTESGCEIIAMESTGVFWKPLYNLFELMDLDAIVVNAAHMKALPGRKTDVKDAEWIADLLRHGLLKASYIPSREQRELREITRYRKSLTEERCRETNRLQKILEGANIKLDSVVKDINGKSARKLLEKIIEDDVPTSEEEISKMIHGRMRSKLGQLVTAIEGITTPLQRKLLAQVIDHIDDLNRRIADLDKLVQDYMDEYEAEITALCDIPGIARRSAEVILAEIGLDMSRFPSAAHLCSWAGVCPGNCQSAGRRKHGKTTKGNKPLKTILTQCAKSARSVKGSYFSAQYQRIAARRGKNRATLAVAHSMLIAIYHMLRNNVPFRDLGSDYYDSFNRDRKIHGYLKRLKALGWEPDALPGSA

SEQ ID NO: 438919 - protein, 494 aa, unidentified
MLSARCLSVVKDNVSDIGEPVVGIPFERMSMMTYPRWPDITNDKTEDFMAARKRKLREFEVKHPNAAGIDIGSASHYVAVRPDRGGDTVREFGCFTEDLVAMAHWLLECGVDVVAMESTGVYWIAPYEILESHGIKVHLVNARHVKNVSGRKSDVLDCQWIQQLMTFGLLSGAFRPEGDICALRAVSRQRDALLREQARQVQRMQKALTQMNVQLTNVITDIVGKTGQDIIRAIVAGERDPKKLAKLRNYRIHASEEEIAKSLEGNWRDEHVFCLGQALALFDTYQKLIADTDAKLEELIRPMRQHQKTLPPNKKKGRGKNAPSFDVLNTLYQWIGVDLTRIGGIDVTTALKIVVEIGTDLSKFKNAKHFASWLGLCPGTKISGGKKLSGASKRIPNRVAQALKLAAQGLHHSQCALGAYYRRMAARVGVGKAITATAHKLARLIFAMLTKGEEYVERSQQQYEESFRNRTLAYLKRKAKALGYRVELIEAEAV

SEQ ID NO: 438920 - protein, 380 aa, unidentified
MVGLDVHPDSFAGAVVEGTDPASAKVLNTSTRVELEQLEHWALRHTSAQDTLVLEASGNAFAVAARLRTIGREVQILDSHRAGKVGKVYCANDRVDAVKIARIYLSALSPIVWQPEAKTLERREIFSAYQAVVKESTRARQQLRSMLNEHCVRLEKGFRLCHPNAITRLLKLREWTPARRMLLQQLHATLVAARTRRTLLRRHMAQEIAAEEALLRLTRLCGINLITLYGVVAAVGDVSRFSHSKKLVAYLGLNPSVSQSGNFQGSGALKRHGRGALRALLIQSGKKLLEVNNPLQKWGLAIAARRGRNKAAVAVARKLCVALWHVLMGHAIGALERLDTLETKLSKFATEMGPAALRAFGYNNKAEFVQTKLYVLRSYP

SEQ ID NO: 438921 - protein, 447 aa, unidentified
MLFVMKPLPVLDPQAAAIDVGSESLHVSVAGDTPKVFGTFTVELEALREWFKGQGVRTVAMEATGVYWLYLYEVLEAAGLEVVVVNGRHVQNVPGRKTDMSDCQWLATLHAHGLLRGGFVPPADIRRLQDYQRLRADHIIGAAGQVQKMQQALERMNVKFHDVISDLTGVSGLKVVRAILRGEREPVRLLALCDGQIQRKKSAAVKESLRGCWKDEQLFALRQALELWETFQQKIADCDRELERLLHQLAGPPPSQGGPGGGELRLAPVKDAGKNAPAIERCQQLLARICGGRDATQIPGLSVYLVLQLISEVGTDMTRWPTEKHFTSWLGLAGGRKQSGKRKGSIKAHRNRAGRMFCAAARALARSMDKALGGFYRRLRGRIGGLAANVALARKLAQLFYRLLRYGMEYVEKGLKAYEVKVWETEARLLRKLAKNQGFILMPATPK

SEQ ID NO: 438922 - protein, 470 aa, unidentified
MELKAYLGIDVSKGYSDFVLLDGQCNVLEEYFQLSDTSSGRQQLKGLIEKWKKEGLVELYCGVESTGGYENNWHSFLKGMQSVDGLWVSRLNAKAVKSVSDASLRRTITDTVSATNIASYLAKFPEKVDYGIDAKQGDEHFKEGRQFVTSIRMWTKQKVQLGNQLEKLLYQNLPELLVYCRNGIPAWLLKILVKFPSSREIKKAGEIKIVKIKGLSKEKAQAILKKLKDSEQQTSKALQQLISMTATEVLHQQELAESGKSYLNELYKDDSSVKLLCEVRGIGVDSAVSIVLELENVNRFDNSKKMASFYGFHPTFKQSGDGFWGNHMSKKGRSNLRSVLYMVSMSAVRYNPMFKTLYARFRAKGMKHKQAIGVVMHKMLRVIYGMLKSGKSFDPEIEKKHKEEATVKQELQKKENKEIKKSFEEKKNRFQTMIETAPISGRNSIARKKQMASQTSTEVNTGSPTANANI

SEQ ID NO: 438923 - protein, 423 aa, unidentified
MMKLKYSICCGLDVHKNVIVATIVTTNKDGISEYLQKSFSTINSDIQRFHNWLIENNCYHVCMESTGKYWIPIFNYLENDIDICLTHPKYVKAIKGKKTDKKDSKWIADLYKFDLVRCSFIPPKDFRQLRELARYRFKLVCMKSSEKNRIQNCMTISNVGIASVLSDPFGKTATEIMSYLLEHTADSMDEKAVRKLIKKGAKAKSDEIIEAIKGYNIETDQAKKLELAQGHLEYLDDMITQTEVELYVRIKPYYEFVEFVSTMPGMTELSSTIVLAETGVDMDIFDDAKHLCSWCGLSPANNESAGKKKSVRIAKAGDYLKPMMVQCALAAIKSKKQPYFAIKYGRIKKRRGHKKAIIAIARMMMVCIYHMVSEKKPFTPTDYEELMDPQNHVERVVLNENNVFAYLESLGYDSSKLVKRNDN

SEQ ID NO: 438924 - protein, 310 aa, unidentified
MDVIIDKGCGLDVHKDTVAACVMGSGIKKEIRTFRTMTGDLCKMKEWLSEKGITHVAMESTGPYWKPVFNILEDSFEVILVNARHIKNVPGRKTDVKDSEWICKLLRSGLLAASFVPPRAIRELRDLTRYRRKLTQAISSEKNRVQKVLEDANVKLSSVVSDTFGVSGSRMIEAIMAGDFDPESISNLAVGKLKSKKDDLKKALEGHFRDHHRFMIQASLDHIESLEKIIAGLDQEINLKLKDSHREFELLQTIPGVKEQGAASIIAELGADMDVFPSEGHLSSWAGMSPGNNESAGKKKVERRPTAIRI

SEQ ID NO: 438925 - protein, 368 aa, unidentified
MQELITGFVGLDAHAESTAIAVAEAGRAAPRFVGSVGARLAELTKALSKLGAPQSLCVVYEAGPCGYVLARELTSLGYRCEVVAPSRIPRRPGERIKTDRRDALNLASLARAGELVPVTIPDERDEAIRDLSRARVDAVRARLKARQQLKALMLRHGQRYSGKTSWSAAHERYLARVSFAHPAQDIAFTEYRQAVGEGEARVQRLRESLTREVEHWRMHSLVSAVMTLRGLDLVAATTVVAELGDLRRFAHPRELMGYLGLVPSEHTTGSKRRLGAITKTGNGHVRRVLIEAAWNYRFPARISPALQMRQERQPPDIRAIAWRAQLRLNHRYRRLKARGLHHNKICVALARELAAFVWDIGRHVAPSP

SEQ ID NO: 438926 - protein, 432 aa, unidentified
MDNRLQVGIDFSQKRADLCLLFPDGRPLESHIAFDNSYLGYSLAKQLLLDALDDYAFDGVDVSGEATGYLWLPFFLQLAADPDLEPHDLDLYLLNPRWVKWFKKCFAQDDKTDQKDAYYIAERTRTRRPDAVWVADPSTLALRFYTRLRFHLVQCLAREKCYFSAFLFLKASAYRRLKPFSDVFGVTSRLVLTQQPSLDELAALPVEDLAMQLHEMSGHHLRDPFKNARKLKRVSQESFPLDDLLALPVQRVLDLTLEHIRFLEGLIAQVDQWIIIEVQHHPPIIQLATIPGVGHVFSSGKGAEIGSTQRFLQSPKWDKKRKRFRPRNLRDVEDAVAKIAGLWWPRSSSGDFEAEDRRMAKTGNRYLRYYLIQAANKMRQHIPEYAEFYARKYQEASKHHHKRALVLTARKSVGLAVGLLHRNEPYRSKERR

SEQ ID NO: 438927 - protein, 457 aa, unidentified
MARKARGASQSQQLPPALKQVHLNAAGIDVGEESHYVAVPVDRDKEPVRMFPVFTADLERLADWLKACGVDTVAMESTGVYWIPLYEILDRRGFKLYLVSPQYLKRVPGRKTDVADCQWLQQLHTFGLLSGAFRPEDQEVVLRSYMRQRGMLVSYSSQHIQHMQKALVQMNVLVHQAVEDITGVTGLRIIRAILAGEHNPRILAAMRDAGCHKDEATIAKALQGNWREEHLFALRQAVELYDSYQEKIHDCDRKILEQVQMMEDRSQTGSGTPPKPEGGYVRKNELSFDGAKEAFRMTGVDLTKITGIKGHTAMKILSEIGTDVGHWPTAGHFTSWLTLAPRNRISGGKRLSSRKGAPKANRVAQILKIAAQSQHHSHSYLGAFYRRLAARVGKAKAIQATARKLAIQVYYALKYGTDYVEKGQNYYDEVYRSKVVANMVRKAKELGYCLVKSEIAN

SEQ ID NO: 438928 - protein, 350 aa, unidentified
MLIIGCDYHPAFQQIAFVDTATGDCGERRLEHREEAEKFYRELAARGMKVRVGMEASGQARWFERLLAELNFELWIGDASVIHAKRVRKQKTDRQDAQLILGLLLEDRFPQIWVPSWENRDLRQLLWHRHRMVQARTRIMNQLQAVAINEGLRGKKRLWGESGREQLEAFRLAPWASRRREDLLKLLDGLNPTIAELTQAIEQEVEKCPEAQRLRTHPGVGPLTALAFVLIIGRADRFQCGKQIASYLGLVPLEDSSGNRRRLGHITKQGNALLRFLLVEAAQVTARSLPEWRSQYLHLTMRRGRKIAKVAMARKLAVRLYWMMRKEWDFGKLTKFGSHAGKPGTGDGVK

SEQ ID NO: 438929 - protein, 360 aa, unidentified
MFTERTSVGLDVHARSVAAAAIDGVTGEVFKARLVPAPEVVIRWVESLPGPSAAVYESGPTGFGLARALSAAGIRCEVAAASKLQRPAGDRVKTDARDALHLARLLRLDEVVAVRVPSEVEESARDLVRCREAARADLMRARHRLSKLLLRHGIVYSGGKAWTQAHDYWLLRQSFPLAGTQAAFQDAYETVVLAAGRRERLDAAILEMAADGQFTAVVRRLSCLRGISTLTAFSLAVEIGDWDRFTGAGIGAYLGLVPSEHSSGASRSQGPITKTGNAHVRRLLVEAAWHHRKPYRPTAVLRRRWELAPPAAVARAQAGNHRLHQRWVSYADRKKRPVLANVAVARELAGWCWSLATMPD

SEQ ID NO: 438930 - protein, 343 aa, unidentified
MQTITTIGLDIAKSVFQVHGADAVGQVVMRRQLKRRYVLAFFEKLSPCLVGIEACASSHYWSRELQTLGHTVRLMPPAYVKPYVKRQKNDSTDAEAICEAVRRPNMRFVPTKTPAQQGCLMLHRARHLFIRQQTAVINSIRAYLAEFGIVAPVGRRGVEQLLEVVADTADRRLPEVARTCLAALDVQLRALKAQILEFDRRIIAWHRSNATSKRLDAIPGVGPVLATALVASVADAKAFRSGRDFSAWVGLVPKQNSSGGKDRLGSISKQGDRYLRSLFTAGALAVIRYAKIHGTAHRPWLTALLARRPTKVAAIALANKLARMAWAMMARNDRYNEPAALTA

SEQ ID NO: 438931 - protein, 344 aa, unidentified
MGVAVGVDSHKSSLAVAALDELGRVVGAKEFPNDARGHDALLRWSKAQDSDRVIGIEGAGSYGAGLARYLIDAGENVYEVPAFLTHRERKRAPSKGKSDPTDAVAVARVTARGEGLSSPRRIDIFVDLKLLSNHRDQLVRARTRLINRTHTDLVISHPGYEKKMPKLNSKKNQDGAMTLLRGDHSVRAGLIRDRIREIRRLSNKIADVERQIAGKVNESGTTLTELQGIGFVIAAKILGEVGEPGRIRSKGAFAMWTGTAPLEASSGATKRHRLNRGGNRQLNYALHMMARARLRHHADTKAYVARRRTEGKSEKETVRCLKRHLSNLVFRQLVADVKALPEAA

SEQ ID NO: 438932 - protein, 338 aa, unidentified
MRDFFVGVDVSKAELVCRVLDEKGQEQGKGSFANGAAGFRKLKKFLLGLDVDGRFHVGMEATGVYHRNLALFLCNSGERLVPGVFNPASVKAFGQSRMSRTKTDGQDALILARYTLELFRDGTFRPWEPERPEVAQLQQLVSRREQLVSMKVSEQNRLHALEEDGGSLPFLVESVRDEILHLEDRIREVEKMIGRHMEGHPKLKADKDLLISIPGIGQITAATWMGHLGDLSRFGNPSQIVAHIGIAPRERQSGSSVRGKPQICRTGLKELRCALYLPVMAAATRLNPVLKSFYERLVTSGKRKKAALIACMNKLVHIIWAIMKSRQPFDPNYALARN

SEQ ID NO: 438933 - protein, 449 aa, unidentified
MPKKRAKSVNLPIMEPNAAGVDIGTTQIFVAAPPERDPDPGRCFQTFTVDLEKLADWLQQCQIQTVAMESTGVYWIPLFQILEKRKIEVRLVNAHHVKNVPGKKTDVEDCQWIQHLHACGLLRGSFRPADEICAIRSLWRHRDNLIELATIHLQHMQKALDQMNVQLHHVISDLAGATGLAIVDAILAGERDPAQLARLRDWRIRASEETIMKSLVGDYREEHVFTLRQSLESYRHYQDQIQKVDARVKQMIQTVPSKVAEGEKPPKERNPRKTPWRNEPPQLRDDLYRTFGVDLTQIPGINTLTAQMIFTEIGPDFSRFPTAAAFCSWLRLCPDPKISGGQVLSSRTRPTKNRAALALRMSAQGLHRSQSYLGDYFRRMRARMGTPKAMTAAAHKLARIVHYMVTTQREYDATVFQDQERRTQDRKRTKLYAKGKEFGLQLVPAEAVP

SEQ ID NO: 438934 - protein, 379 aa, unidentified
MSDQIKTIDTCCAALELSKSGWLCAINPPYSDKTDNHKIKTGDVERLIDLLERSRAKAERKLERSVEIVLCYEVGYDGFWLARLLVERGIQTVVFDPASFLMPRRGRVAKTDRLDAEGMTRTLRRWLAGDLEVATSVQIPSVEQEDAKRLERERKHLVEQRTSIVARIKGLLALHGILITSKGIGTKLLKSLDDLETGDGRRLAPFLRRDLERMLRHHAFLCEQIAEVEADRKEALTDDSGKFPHADKVRQLATLRGIGETSATVLVAEVYHRTFETRRHVASFIGLAPSPYQSGDVDRDRGISKAGTKLARQTFVELAWMWLRYQPQSQLSQWWHERFAGKGMRGRKVGIVALARKLAIAFWRFLEDGLIPEGATLKA

SEQ ID NO: 438935 - protein, 332 aa, unidentified
MNKFSKYVGLDVHQETIAVAVADSGGEVRYIGEIVNTPEGIAKVVARLKRGTGRLAFCYEAGPCYTICRQLRDLKQDCQVVAPSLIPRKPGERVKTDRRDALSLARPHRAGELTPVWIPDEAQEALRDLTRAREDMKHLQRQAKQRLLSFLSRHGHRYTGRSRWTQAHWRWLEGIKFARPEQQIVLQEYIDTVQACGRRVASLDPAVETAAHASPIWPVIEALMALRGISLLAAVTVVAELGDLARFAGAPQLMAHLGLVPSEHSSGKRERRGGITKTGNSHVRRVLIEAAWTYRHTARKTAILQRRAERTAPEVQEIAWSAQKRLCQRFET

SEQ ID NO: 438936 - protein, 321 aa, unidentified
MTYVGIDVSKATFVVAYSSAKSSKTKTFKNTTKGVHEFIQTLSADDYHCVLEATGNYSSLLVYLLSQAGITVSLENPLKIKNFARVMLSVTKTDETDARLIALYGEKMHPAPYKLRSDAILILKQKRTVIRQLKKQLIATRNLKGSMEALPFFDSKCKKTIEKTIAFLERQVKDLEEELANLAQGEYRKQMGLLTSVKGIGVTLAAALIMATGGFAYFDNAKQLTRYLGLSPTYQQSGTSVNVKGHINRNGDSSLRSLLYVAAMASLRCNAECKECFNRLRSNGKPGKVAVVAGANKLVRQAFAVVTQEKPYIDGFKSAKP

SEQ ID NO: 438937 - protein, 345 aa, unidentified
MNKLVFTPQATVFCGIDVSARSLAVARIGSDGSLAQREFANSAGGHKELLAWLARCNTKVRVSLEATGIYSLDLALALDGETSIELAVLNPKLVNRFAQTLRRSKTDSADAVVLAEYGQRMPFTPWQRPLASHLRLRTVGRYIESLVVDQAGLKNRLRTAESTATTPRAVLVDLRQALAALARRVAKMRREAHELVRAEAALWERFRLLTSVPGIAEISALQILSELVLLAPTMTVRQWVASSGLDPAHQQSGTSLHKPSRISRAGNRHLRRALYMPALSAARNDPHLRAFYLVLRSRHKTGLQALMAVARKLLHAIYGIFKSGRPYDGKLLFPNIQTEVESIAG

SEQ ID NO: 438938 - protein, 312 aa, unidentified
MDKIIVGIDVSRDRLDVAVRPSGEALVVERNAAGLEELVERLRPLGPHLVALEATGGFETVAAAALAAADLPVVIVNPAQVRAFAKAIGQRAKTDPIDARVIAHFAEATGPEPRPLPDEATRLLADLVARRRQIIDMIGAERQREKRAPARLKKSIVRLVKALEKELTSVEGDIDDAVRGSPAWRETEDLLASVPGVGPTIARTLIAELPELGTLDRKQIAALAGLAPHTRQSGQWKGRSFIGGGRTTVRTALFMGAMVGKKYNPVLRAFFERLVAAGKPKMVALIAVARKLLTILNAILRDRQPWRQPART

SEQ ID NO: 438939 - protein, 431 aa, unidentified
MSFKILKNNCCGLDVHKTWIYACIGITDSLKRTEYKEALFSSFTKGLNELCYWLSKYNCTDVCMESTGKYWIPVFNVLDKNNIWVTLSHPKYTKPQKGNKTDRKDAKWICDLYMCGMVKPSFIPPADIRELRDLVRYRFKLTCMITGEKNRAHNCLTVSNLKLDDVFSDIFGKSSRSITEQILQHPGEVFDVAPFVDSRCKTPIEEIQAAVDGAISHEQAVKLRQCLKHIDELEMHKAEIEREIFRLSQKYESVLDLIRTIPGFDKNPLTAIQVLSEIGADMSVFPTAKNLVSWAGCCPRNDQSSRKIKSTRISRAGSYFKPVLVQVANALIKSKKHPEFTTRYRRIKARRGHKKAIIAICRMILTAIWHILTDLKPYTPEGFLESRPVNKEKVLTISQALNLIKQRGYIIKDDVGPVCLLYTSPSPRDCS

SEQ ID NO: 438940 - protein, 528 aa, unidentified
MAQTGTNFSILGRPKKVSQLHSEAMTSLNRVVLFADDTFLGSTKPYESLCNYVCTAMQTVSGHLLTLKYCKRMAKKAQKVKKGKRSELLIVNPNAAGIDVASTEYQVCVPEDRDQDPNRRFEAYTCDLHSIATWLKECKIETVAMEATGIYWVQIFMVLQEYGFDVILCNAKHVKNIGEKKTDYVDASWIQVLHTYGLLKESFQPDNQIRQLKDLMRQRERIIQRTSQDILRIQKSLEMMNIKVHKVLSDIKGKSGLNILEAIISGERRPDILADLVHHRVKATREEILKSLEGNWNDAQLLIMKQNFDAYCFALKQVEELDLSIEQSLTAYSQVAGKTRPDKPIVRALKRQQPLGNAFHFDAEQYSYDILGVNLTRIPGISSLTGIKLISELGRNFTEKFPTVKHFCSWLNLTPNNRISGGKILSSKVPKRKNFAGQSFRVAANTLSRSKGYLGDYFRRMKSKLGYNQAIIAVAHKLARIIYKMVQMGIEYDETIDRDKNINMLTMKQKALQKRLAKIEKELSLSYC

SEQ ID NO: 438941 - protein, 339 aa, unidentified
MEVTTIGLDLAKNVFQVHGITADEEVEFNRPLRRAQLLPFFAKLAPCLIGMEACSSAHHWARELTAMGHDVRLIPPIYVKPYVKRGKSDALDAEAICEAVTRPTMRFVAIKTVDQQALLSLHRARDLLVRQRTQLINGLRGMVAEFGVYIAKGLARVIGFAEDILAGEVLDLPDIANEVIHNLCEHLMALHTRIRWYENRLKQVAKEDARVRLLRTIPGVGVVTASAIIASIGDGHQFENGRAFAAWLGLTPANKSSGGKEKLGRITKMGDQYLRSLLVVGMTSLVRQTRSHPERASKWLTSLLERKPARVATVAMANKTARIVWAVLTRNQPYNPHSA

SEQ ID NO: 438942 - protein, 354 aa, unidentified
MSRLRTGTALVFLKPERLRAPLSSAHAQARELKTMSATSVVVGIDVAKAQVDLAVQGAGLPVKQFANDPDGHSALVAALVPLQANLVVMEATGGYEAALACALQAAGLAVAVVNPHQARQFAKSMGRLAKTDRIDARTLADLAAVLLRRDDLARFIRPLVDEQQKQLAALVTRRRQLTTMMLSERQRLQLAIDVVRPSLEAMIQAIRAQLDDVEAQMIIHVRTHFADLDALLQSTRGIGPIASATLIAELPELGRLDRRAIAALVGVAPIANDSGCTRGRRRIQGGRFEIRRVLYMATMTATVHNPILKVFYQRLIASGKLPKVALVACMRKLLTILNAMARDRTRWNATLHSA

SEQ ID NO: 438943 - protein, 350 aa, unidentified
MNATTVAVDLAKNVFEVLVADGNGRVVERSRLTRAQFERWFANREVGVVVMEACGSAHYWGRWLGAKGIAVKLLPARYVRPYVRRNKTDAADCVALLEAARAVDIMPVQVKSAEQQALQGLHRIRSGWMAARTARINTLRGLCREFGLVVPPGARTGLEHMARSLADEHSPIPALVRATMKLLLEEIRLLEARIGQLERELTQVVVHSPSCQRLLTIPGVGLLTATAMVAGVGDISGFKSARHFACWLGLTPREFSSGDTRRIGRISKRGDTYLRMLLVHGARAVLRSGVVASRLGRPLDRLRQWALAVPLRTCHNKAAVALANKLARIVWATWRHGEDFQRREPLGLTA

SEQ ID NO: 438944 - protein, 388 aa, unidentified
MKNRSDLNQSYAAFDQTSTIVSVVELSSKSWLAAGTVPGMKRQPRKHLPTNPHGLLTQIERWRAEAVKAGHEIKRTVVAFEAGRDGSWLARFLRSRGIEAYVIHAASIPVPREHKRPKTDRLDTEMLMRALLGWLRGEPRHCRMVEIPTLEQEDAKRPAREHDTLVREQTSLVNRMKSTLVWLGITNFNIKLVKAGQKLAGLRTPNGEPIPPSTLAELYRGLERLAMIKKHIKAIEEARVKRLREKPNHGTNPLVLMLAQIFGLELETADLLVHEVLTRNLRDHRAVGRYGGITGSPDESGKTRREQGLAKAGNWRVRHSSLQLAWRWLMHQKGSALAQWYRQRTADGSPITRKKMIVALARKILVALWRYVTTGELPAGVVLKPAAI

SEQ ID NO: 438945 - protein, 418 aa, unidentified
MKHSKTEKIGTINKKTLIAALDIGKKIHYGYFRAPSGKDFQPFAFHNTRNGFDKFWEKLCNFKEKQMLEEIIIGFESTGPYAEPICHYLRHKSVKLVQVNPMHTKRIKELTGNSPNKTDKKDPRVIADVMSLGHSLTVIVPEGAAAHLRRLTQARERAIERRTAMSNQLQHLVFLIFPELVHIIKPSTKTGMYLIKHYSDPKKLLFAGIDKLKAIIKKVSRGRLGTDRAEQLHGAAKKSVGITEGKESILFEIAHLVSKIESENHYVEDLEKQMGDYLEKIPYSHSILSITGIGRVTAAGLIGEVGDFRKFKTISEVLKLAGLDLYEISSGVHQGCRRISKRGRALMRKLLYFAAINTTRKNGILHGPYQRHLAKGMPRIKALMAIARKLIGIIFALVRDHSNYIADYSSQLVFKKAA

SEQ ID NO: 438946 - protein, 318 aa, unidentified
MNSYYKVESTEPVSYVSLDVSKARLDYAIAGQPCRQVPNTAAGIATLITAIQPLPGVRVVCEATGGYERRLLEQMHQARVPVCRLQPGRVRHFARAEGTLAKTDRIDVGVIYRYACSMHPRVEKPPLPEVTALRELLDYRRQLVEQGTETTNRLESAGATLQALLLAQREQQVAALAQADELVAQHLREHPVLQAKAERMRQLQGVGPVLATTLLAYLPELGEEDDKRIAALVGVAPHAHDSGESFRPRHVRGGRIEVRNVLYMAAVSASQHNPVLAAFYQRLRAAGKPANVCLLAVMRKMIVVLNRMLKNPHFTLVS

SEQ ID NO: 438947 - protein, 355 aa, unidentified
MALTHYIAMDTHSYSTEICVKTRANKPGRHWSVATTIPALRQVIDSIRRPRHMVFEEGPLASWLYRNLKEDADTVTVCDPRKNALIAKEGDKDDPIDANKLADLFIGGYTRSVHHTEEVSRDVFKQLVGAYHERVEHRVSEANKVIGALRRWGVVVRESAFADKIDRAPLLAKLPEGAELEPARFNLRLMWEGYDQAVKQETKLRQQLRKLAKKQEVIVRLTELPGVAWVRAATFFAYLDTPWRFHSKQALWKYMGIGLVRETSGKGPVFVRVELAANRRLKSMIIGAAESAVIQGDNPFAEQHRRWKEAGLSPRNARRNVARNLAAVMWGMWKNGGVYEPKQVIVKAPERQVEQ

SEQ ID NO: 438948 - protein, 432 aa, unidentified
MKAVVERCAGIDVAKNVLNVCVMTGAADLEPEVELGKFGTFNAELNRLRQWLLETGCTHVVMESTGSYWKPVYAALESSGIQVILANGEDVKARRGHKTDWNDCQFLANLLRHGMIRASFIPPQAIRDLRDLTRRRRQLIGDATSERNRVQKVLEEANIKLGSVLSDIFGVSGQLMLEKLLEGEPNMEAIANLAQRKARMKIPEIVQALEGHRLRDHHRRMLRLSLEHMAFLEQQISAIDAEALQLIEREGYQTSFDLLQSIPGVQQISAAALLAETGADMSIFPSEAQFSSWIGVCPGNRMSAGKNKSGAISRGNRWARTALVECAWAAASKKDCHLKERFRKLCVKGRKPALIAVAHSLAVIIHRTLNTGIPYQEPNQPAPDERKRQRLIRHYVRRLGKLGVAVHSLRPESATHHKSSAGTRTHRVHHKE

SEQ ID NO: 438949 - protein, 557 aa, unidentified
MAFFGGEEIADFADGAPEGVDGPDRPGAQQGLELGESHLDWIEVGAIGRQEQEPSALGANGCLSGRAFMGGQIVQDDEVAGLEGRGQLGFDVSLEDAPIHRRIDDEWRGERATAQAGDEGLRLPMAERDLGKKPLAFGATAAQAGHLGGGSSLVEEDQPMRLKPHLRLANADPFLARLFDVGPIVLAGSRSFMEWPAPPSGVVGSPANQEEEVMDISVLGVDLGKNVCSVVGLDASGAVVMRRKVRRETLIALTEKLPRCVVGMEACCGAHHLGRVFAAHGHDVRLMSPEYVRPYIKAQKNDDRDAEGIAEAATRPTMRFVELKSQDQLDMQTLHRSRDRLVGERTALINQLRAILLERGMVAPQGKRKLEQFLAVLMDEQGGAGLSPRMIVLVADARAQWAELDRRISAFDAEFVRWVKENEEARRLITIPGIGAIVASALVAAVGQAESFDRGRDLAAWLGLVPRQFTTGGKPKLLGISKRGNKYLRRQLIHGARAALPYVAERDTPLGRWAKGLASRVHRNVAIVAFANKLARIAWAVLRRGERFAVTGMPAAA

SEQ ID NO: 438950 - protein, 411 aa, unidentified
MEVVHPRCCGIDVHKASVCACISIKDNQKSGKQKQRFETTTAGLRELATWLREWKVTTVAMEATGVYWKPVWNILEEEFELLLVNPQHLKSIPGKKTDFKDGERIADLLQHGLLRGSFGPPQAIRELRELTRARASFAQERSRIISRIEKTLEDPNLKLGVVASDVVGVSGRAMLEAILRGEEDPAKLAELAKGTLRGKIPPLRLALEGKVTAHHRFMLRQWLDALDFTDRKMAVLDQQIAEQARPFESTLRSWMQVPGLRRVNAYSLLAEIGADRKQFPTAGHLASWAAVCPGNRESAGKQTSGKTCHGNPWLRRTLCEAAWAAARTKNSYFRALYNRKVRTRGKNRALIAVAHSLLVTVYSFTTGGQPYQDLGLDYFDRINRQNLQRSLVKRLEMLGNHVTLEPARSAA

SEQ ID NO: 438951 - protein, 336 aa, unidentified
MQKLVIGIDVSKEKLDLCLKLGEDILKEWVLPNTVEQLKSSFKSLLKEHKCNVSDVLICAEYTGQYTYPLCCACEELGVDLWLENPAQIKHSSGIQRGKNDKLDARKIAAYAVRFQDKARLFSLPEKNIASLRQLISERDLYIIDKGKYQGQLNDQKRFMSKSDYQKKSKRLKKLIEELETCITAIENEIEQLIDNDETLSKQHRLLCSVDGIGERTAIKMIVETNAFKDFDNARKFCCHAGVAPFEYISGSSIRSRNHVSNRADKSIKALLHMAALVVATRKKEGELREYYLKKTAEGKNKMSVLNAIRAKLVLRMFAVIKNDKPYQKNYQFSFA

SEQ ID NO: 438952 - protein, 350 aa, unidentified
MPKPMSKQYVGLDVSLAETSIAVIDENDKVVWRGKVASTPEAIAEALKKHAPRAERVGLEAGQLASWLYHGLKAKGWPVFCIDARHAKAALSLKVNKTDANDALGLAQIMRVGWYREVAVKGHDCQALRALLIARAQIVSQITTLKNCVRGILKVFGHVLPKKLRATFIASVRETIDGNATLEPILDPMLRTLAATMEQLQVYDRAAIRHAREDATARHLMTAPGVGTIVVLGYMTGVETPARFSRSTSVGAYFGMTPKRYQSGEVDKAGRVSKCGDGMVRGLLFEAAKVLLSRSAKPSDLQAWGRALAKRIGSKKATMAVARKLAVILHRMWTTGEPFRWTATPVPTAA

SEQ ID NO: 438953 - protein, 353 aa, unidentified
MDSVYYLGLDVHKKTISYCLKQSDGRVVQEGVVEARRGALERWLAQLPKPWKGAMEATLFTGWIYDFLLPHAHSLDVAHPAMIRAIAASKKKNDRVDARKIADLLRCDLLPVCYMAPAEVRELRRLLRFRNLMVRQAVRMKNKTAGLLMEVGAEYSKEKLDQKRYFQQLLDSVEHVPESVKQMLRMSRAARDLFEESQRRLVAALLKEDLLRERVARLQSIPGVGQILALSWVLEVGEVERFQTVGQALSYCGLTSAQISSAGKEHRAPISKQRNKHLQWVLIEAAKVAPMWNPQLKLVHERERARGNANRATLAVARKLVAYLLAVDRSGEPFRLRPAAESAAESQEEPAAA

SEQ ID NO: 438954 - protein, 375 aa, unidentified
MTNHSEAFVAFDTSKLRNAVAIADAGRSGEVRFVGEIENSGAATAKLVRKLAAKYERLTFCYEAGPTGYGLYRQIKSLGYECLVAAPSLIPMKPGDRVKTNRRDALSLAKLLRAGDLTGVWVPDGRHEAMRDLTRARGAAAEDLRRKRQQVSSFLLRHGLHYSPGRKTWTKSHMIWLASQKLEHLEQRIAFEEMLFALRQAQERIERLEQAIRAAVPDWSLAEVVTALMAMRGIDLISATTFLAEIGDLSRFQTPRELMAYLGLVPSEGSTGDTVKRGPITKTGNRRARRTLVECSWSYQHPARVGKEKQEKVAAAPRAVREIAWKAQCRLSARYRTLVRRGKPKNVAVTAVARELAAFIWAISREVTTARAAAK

SEQ ID NO: 438955 - protein, 385 aa, unidentified
MNQTSSCAISTSTLHCALELSKNSWLLAIQFPDREQPSLYPIEGGNTEKLMAKLAAARDCWAKVSGSPPAITVCYEVGYDAFWLARFLMGRSIECLVIDPGSLQVNRRGRRVKTDRVDVKMLLRTLIAWCRGERHVWSLVRIPSIDEEDLRRSHRERGRLVRERTAHINRIKGLLFGQGIRGINVKSQYKTLAVDNLVTGDGHRLPPRLAYEIAREIQRLAMVQEQIAKIERERDTAPTGCEATERKRHLLLQLKSIGPAISALLSREVYYRQFANRRQVGSFLGLAPSPYNSGAEERCQGISRAGSGHVRAIMIETAWLWIRHQPKSALTRWFVERTAGQSTRVRKILIVAVARKLAIALWRYVEHGMVPQGAILNPPTTGNAR

SEQ ID NO: 438956 - protein, 343 aa, unidentified
MDSYVGLDVSLREVSACVVDEAGTIQFERTLAADPDVIAAWVHAQAPTVRRVGLESGPTSAWLWRELAKRGLPVICIDARHAKAALSMQINKSDRNDAAGIARIMQTGWYREVQVKSPHSHAIRGLLNSRSLLVKVQRDLENQVRGLLKSAGLIVGRAKDGVFSARTKQLLAAHIDLAAIALPLLEAREAIHQQLVQLERRVRQLAKEHRQTSAFMTVPGIGPMTALAFLATVDDPTRFRRARAVGAYVGLTPRRYASGEVDWTGRISKCGDTMLRTYLFEAAGVLLTRVQKWCALKAWGLRLAKRSGMKKARTAVARKLAVILLRMWRDGTQFHWTAAPAAS

SEQ ID NO: 438957 - protein, 324 aa, unidentified
MAKRITICAGIDTGKRKLDVAIDGSSLQLQVENTAEGHKVLLEWLRRHKVKRIGIEASGGYELPVVTELRRKRFVVVVFQPAQVHAYAKFHLQLAKNDKIDAALIAACTAAVKKIHAAPDPRLQPFAEHLTLIEQIGEDIKLYKNRIETCRDPRIQKLWKEEISRLAKRERAELKALVAAIRQHRDLAQRLDLIYSVSGAGMPTAVAILVRMPEIGTLSREQVAALAGLAPYDDDSGERSGARHIDGGRKRLRRALYTAALPASFFWNPHLIALYQRLRAAGKVHKSALIACARKLLIFVNTVVARGTPWQEQQPVRATNPAAA

SEQ ID NO: 438958 - protein, 407 aa, unidentified
MKQKTKQTYQFLLRLDAAGGIDVHKDFFQVAICRENEIPVEAEFGTFTKDLYTVSDFFLKYNIRNVIMESTGVYWKPLYRVLTEAGLKVTVANPLRVKQIPMEKTDKKDAQWLAKLLMNDMVKPSFVPDEQQEALRGFTRMRTRYTQQMTTIKNQIVKLLESCNFKVRSIVSDISTKTGQRLTYAISEGKTDEDYLVKQCHHSVRKRQGDERLKAALKGRLNESIQLQLRILLEDWGHIEAQRSKTDKNIKQLITTEQQKKIEKLDKVEGIAQEQAEIIMAEIGIGIKNFPLANGATKFAGLTPGLKETSKKQKHIKAVPGNKNLRTCMIQIAWAAVKVKNGYWIAEYKHLKKRIGAKKAILAVARRLFKAIYKILATDYDYQIWDAKKFIDNRVRSMAYKQTAKAV

SEQ ID NO: 438959 - protein, 427 aa, unidentified
MSEKKSLELRVSVDVGYWRHSVAIGLSSGEVLEEFEIEQRPEGFKDFFTRIEKHRKTTNSAVAVAMEGYNGHARPLDSLVRARGYRLYNLNNLKFARFKEIFPGSAKSDRIDAHKGLELFQLSDHLPLAKEVLQEVSGTPHENEVLKRLTRRRRRLVNERVRVVNNLQADLQAVCPGLLEITSEAGSQWFLNFLLSADTVPQLARLRHNTLLKITSVGVKYAGLIENWQKRAHFSDEVEWVSEMIQEDAKRCLELDEKIKRLEVKIAGIAKDSKIAKILRSIPGYGATSSSELAGEIGTIERFASEGSFSLYLGMSTLDNSSGKYQGSKAPKHVNTRAKAAMMIALDRHRKYVPESQKYYEKKRGEGKKHNQAIRALGRHLSRIIYKMLKEEREYEIRTQKGNTKAKVSSRSSLKRQIRRSKFSANS

SEQ ID NO: 438960 - protein, 345 aa, unidentified
MDHFAGLDVSVKDTSVCIVDDAGKIIREVKVASEPDALLSVLRLPAYQFKRIGLEAGPLSQWLFSALAEAGLPVICVETRHMRAALKAQINKTDRNDARGIAQMMRAGLYRPVHVKTLRSQKLRMLLTHRKLLQSKAIAIENDLRATLRNFGLKVGMVGTTRFEARIRELVEDLPDLVVLVEPLLIVRRTLREQIGVLHRRLLAVVRNDDVCRRLMTVPGVGPVVALTYRATVDVPARFRSSKAVGAVFGLTPSKYQSGENDRTGDISRCGDEMMRAMLYEAAHIMLVRSTKWSWLKAWAMKVARHRGLKKAIVALARRLAVIMHRIWVDGTEFRWTREQAAAAP

SEQ ID NO: 438961 - protein, 353 aa, unidentified
MERTQTDWAGQTLYAGIDLHKKKWVISVRTRDLYLKTFVTNSDQEILLKSFRNNWPGAEIIAVYEAGCFGYHLAKFLNNNAIKTIVVAPHTIPVAPGLFVKTDKLDSKKLALELAKGSLKGIYQPTSEQLYDRGLLRKRRQLIKRKVQVQLQIKSDLQFYGIKANAYEARYWSKKTFQELRDIEFDNEYFKKAFLLVLTEYEELIKRLKEIDQLLDELSKLDKYRKKIELLRTIPGIGKLAALNIILEIGDIRRFNSAEKFASYLGLTPSERSSGETKWIGSLTGMGQVILRTVFIESSWVAIKKDPALLRKYQRLTAKKRPVKAIVAVAKSLANRTRKVLIDEEPYIIGMVR

SEQ ID NO: 438962 - protein, 342 aa, unidentified
MAGMDLHSNNVMAAVVDEDGRRLVHKKLECDLKKVAEFLAPYKEQLEKVAVESTYNWYWLVDGLSAQGYPMVLANPVKIEQYSGLKHADDTSDAYFLAELLRLGILPTAHIYDAQLRPVRDLLRRRMSLVQQRTALLLSFKGLYARTTGQSLKLGQVKAMTDAEVKRLYEHPANQLIGQLQKVHIKGLTESIYKIEAVIGKVATALPSYKKLQTLPGVGVILGQTITMETGDINRFKTAGQFASYCRTVDARRLSNGKKKAQNNQKCGNRYLAWAFVEAANFSRRSNPKCRQWFDRKAAKTSQVVATKALACKLAKAAWFVMSQQLDYDPNRMFPELAQKTK

SEQ ID NO: 438963 - protein, 440 aa, unidentified
MAMRKREDAVFPNAAGIDVGASSHWVAVPPQAAEESVREFGAMTDDLNAMADWLLACGVDVVALESTGVYWIPVFEVLEQRGLKVWLVDARQMKYVPGRKSDVQDCQWLQKLMSYGLLRAAWRPASEVCEIRAVARLHEVLLTEQASWVQRMQKALVQMNIQLTEVLTDVMGMTGQAIIRDIVAGERNPEVLARHRHKRVKASAEEVTRALTGNWRDEHLFVLKQALAMYDGIGQRIVECETKLQALLGQRAQAKVDVGGAPKTGSKSRATFDVRQTLANWAGVDLTRINGLEVTSVMKILAEIGTDLSRFANVKHFCSWLGLCPGTKISGGKVLSAGTKRSANRVRQALKMAAMALSRSDSALGAFYRRLCSRMDKPRANTATAHKLARMVYFMLTRGESFVDQGQQRYEEQQRQRSIAALKRRANALGFELNPMPEGA

SEQ ID NO: 438964 - protein, 360 aa, unidentified
MRYSTIVGIDTHSKKNAVCAIVPATGEMREAVLSEDPGQLLSWISGQGFPEPVGCVYESGPTGFGLARALEAGGVACTVAATSKLSYRVDRQKNDRADAKWLARQMLARGVRAVRVPTPEEESLCHLSRLRGEVAADLRKAKQRVSSFLLLTGTEYTLTKKKWSKTFRKWAESHEFDQPADTFTFRCKMSAVLRLEERLAEVEAEILRTIASSPKLSERMSRFTCIHGIGKVSAFSLVCEVHDFDRFNNGASFASHLGLVPSESPSGKKVSRGAIAKQGNSHLRRILVEAASCYSKQFKAVRSEDAAVPEAVRAKAEKCAARLRKRRAALKMRGVSANKAKVAVARELAEWIYHIAVMPA

SEQ ID NO: 438965 - protein, 349 aa, unidentified
MNDVTTYGLDLAKRVFQVHWVDVQSGEVHRKTLPRTQVSVFFARAPRGVVAMEACGSAHHWGRLLQTMGHAVKLIAAQFVRPFVKTNKTDAADAQAIWEAAQRPEMRFVALKSEQQQAVLSLHRLRAQWVKVRTLQANQIRGLLYEFGVVVPLGWRALLNVATEQLTDPTKGSVPVLLRDELLKQLQALRDATARIVALEKQLASWQRTAAECQRIMAIPGVGLLTATAVVASVADAQQFRSARQFAAYLGLVPRQSGTGGRVKLLGISKRGDTYLRTLLIHGARSVLLSQSRHGRSVDPWLGALLQRRPSNVVVVALANKMARTIWALLAQRRTFDANWHRGAIHGVA

SEQ ID NO: 438966 - protein, 389 aa, unidentified
MDTMIARVAGIDVHQATMVVTVRVPSADGSRHGETQTFGATSAELIALRDWLEAQRVTHVALESTGVYWRPLYYLLEETFTLVLVNMKHLAHVPGRKSDVRDSEWLAQLLECGLLRGSLVPPAPIRDLRDLTRYRKRQVDDRAQEVNRLHRTLEDAGFKLATVMSDIMGVSGRAMLAALLEGSTDVVAIAELARGRLRRKLPELQRALHGRLRPHQAFLVTEILAKIDHLEEALERLTAEIDRHLAPFEPAMANLMTIPGVARTTAAILIAETTGDMSRFPSAAHLCSWAGMCPGQDESAGKRRRGKTRKGNRALRTALPGPRPIPNRRRCELATIGSNGSAGTSAPSWRSATRSSKSRITSCATASPIRNSAPTISTSVRRSARSVAT

SEQ ID NO: 438967 - protein, 422 aa, unidentified
MLEEAHDGEELIQRVAALDIGKAELVCCVRVPGEGKRARRLQEVKAYPTMTRSLLVLADRLRQLGVTRVVMEATSDYWKPVFYLLEAAGFEVWLVNAKDVKHLPGRPKTDRLDAVWLCKVAERQMLRPSFVPPPEIRRLRDLTRYRIDLVAVRTAEKQRVEKLLEDAQIKLSVVASDVFGVSGRAMLAALVAGERDPKVLARLARTRLRAKTAQLEEAFVGRFSDHHAFLLQTMLGRIDQASADIAELDRKIDEAVAPFAAAVDRLDEVTGIGRTAAQVVIAEVGVDMGRFPTAGHLVSWARFAPGVKESAGKRKGKATTGHGNRYLARVLGEAAVAAGRTDTFLGERYRRIARRRGSKRAIVAVGRSILVIIWHLLSDPNLRYQDLGPGFYDTRINAEHRKRNHVRQLQALGYKVTLEPAA

SEQ ID NO: 438968 - protein, 361 aa, unidentified
MSGTMTWVGFDVHARSTHAAAIDSMTGELSRMRFGAGIEGPLAWLAQLPGPVKACYEAGPTGFGLYRAATAAAIAIQVIAPGKTPRGPSDRVKTDRKDAELLARLLLAGSLTRVVVPPPEVEAAREMTRAHDACRRDLMNARHRVSKMLLRHGRVYPKSTTWTAEHRRWLSAQQFQEPASDLVFADLIAAVDGLTSRKAAIALRLSDLATDERWWPTLARLRAFRGIDTLTALSLHLELGGDWKRFETAPALSAWLGLTPSLNQSGESSRQGAITKTGSMLARRLLVESAWHYSRQPRLGATLANRQAGQPDHILAISNRAQQRLHKVNRSMKARGKPHNLTVVACARQLACFLWAATTAD

SEQ ID NO: 438969 - protein, 453 aa, unidentified
MEILYTHCAGLDVHKKTVKVCLLTQGANEQPHKEFRTYLTTTQELLKLSDWLHEQGCTHVAFEATGVYWKPIFNLLEGHFELLVVNAQHIKAVPGRKTDVRDAEWIADLLRHGLLKASFIPSGPQRELRDLTRYRVKLTEEKAREINRVQKTLEDTNLKLGDVGSSIMGKASRMILHAIADGEKDPSRLAAFAVGRVRASQEQLEAALKGHATDHHRFLLREHLTQIHHLEQAIDRVTAEIIRRFTPPSSPEEPTSAAEKEDETTPERTSDPPSASPEGAVPPKAALSWAQAVVLLSSIPGISERSAIGILAEIGTNMQQFPTAAHLASWAGVCPGNHESAGKRLSGKTRKGNLFLRCLLVQAAHSASHQKQCYLAEQYRRIAKRRGAKRAAVAVAHSILVIIYHLRSSQTTYLEKGETFFEERDREGTQKRLVRQLSRLGYQVELQPITQAG

SEQ ID NO: 438970 - protein, 347 aa, unidentified
MDEHSEIFVGIDVAKGRNAIAIADGERSGEVRYLGEVDASVASMTRIVRRLAEKYDRVQFCYEAGPTGYGLHRLITALGHACMVVAPSLIPRRPGDRVKTNRRDAVALAKLLRAGELTAETLRVHKQQVSAFMLKHGRRYPRRTAWSMRYLRWLQEQQFDHPAHQIVLQEMVEAVRLAKERVERLERTIEEFLPAWSLAPIVGALRALRGVDLIVAATFVSEVGDIGRFDHPRQLMGYLGLVPSERSTGDTVRRGGITKAGNRRVRHMLVESAWTYRHPPKIGKQKLYLLQSVPPKVREIAWKAQTRLTARYRALAGRGKRTTVVCTAVARELVGFMWSVAHEARPA

SEQ ID NO: 438971 - protein, 336 aa, unidentified
MTHYCGIDLHSNNHVVVVINEEDKRVFEKRLSNDLSLTLKALSPYRETLQGIAVESTFNWYWLVDGLQEQGYNLQLVNTAAVKQYDGLKYSGDHHDAFYLAHLMRLGILPTGYIYPKEQRAIRDLLRRRLSLVRTASTQLISVQSQIWRSTGIRINSGDLRKLEFTPPYVDGYTLQAVHAGLAVYQAIQQAIDGLEKSAHQAVKLTDAFTILQTITGIGKILGLTIMLETGDIHRFAGAGNYASYCRCVDSTRTSNGKKKGEGNAKAGNKYLSWAFSEAAHFAVRFEPLAQRFYERKKAKTNGIIAIRAVARKLARATWMMLKHQTPYDARLMFPG

SEQ ID NO: 438972 - protein, 427 aa, unidentified
MAYRIAAVDVHKKMLAVVVADVHVEGEYQFERRKFGAAPGELRLLDQWLVEQEVEEVVMESTAQYWKPVWATLERHWKPARQQREGASQMSGTLHLCQAKSNHGPRGRKNDFADAERMVKRLVAQELVLSFVPDPEQRLLRTVTRRKHQLTRAKVGFKNQLESLLEQAHIKLSSFVSDLLGVSARRMLQALAEGETDPGALAAMADKRLEATPEQLRDALGACAEWSGVHRRLLKMALEELALIETHIEQLDREAMSLLKEHREVVQRVAEVPGFGVDSALQMIAEVGPEAAAFRSAKALASWVGVCPGNEESAGESHSTRSPKGNRNMRRLLNQAAQSAVKVKGSIFEVTFHRLLPRLGYKQAIWAIAHRLCRVLWLILHKGVRYEERGPAVSAKSKRTRTARMIRELKTLGYRVEGGPLPAVTEA

SEQ ID NO: 438973 - protein, 403 aa, unidentified
MNMNAVGIDVSKGKSMVAILRPFGEIVSTPFEVKHTVSGIRSLIEHIKAIDGESRIVMEHTGRYYEPLVRELSQADLFVSAVNPKLIKDFGDNSLRKVKSDKADAVKIARYTLDSWTELRQYSLMDEIRNQLKTMNRQFDFYMKHKTAMKNNLIGVLDQTYPGANTYFDSPAREDGSQKWVDFATTYWHVDCVRKLSLNAFINHYQKWCKRRKYNFSQSKAVEIYEASKEIVSVLPKDDLTKLIIKQAVEQLNMASQTVEQLRTMMNDAASKLPEYPVVMAMKGVGKSLGPQLMAEIGDVSRFTHKGAITAFAGVDPGVNESGSYEQKSVPTSKRGSGTLRKTLFQVMDALIKTKPQDDPVYLFMDKKRSQGKPYYVYMTAGANKFLRIYYGRVKEYLSSLPK

SEQ ID NO: 438974 - protein, 305 aa, unidentified
MIIAPGYIGIDVSKDHLDVFDGRAHRISNTAEAIAAWLADLIAPRLVLFEATGRYDRQLQQQLHSAGIGLVRVNPLHARAFARATGQLAKTDAIDARLLAAMAQALTPAPQPPDDPERLELAELHRRRAQLVSCRQQERTRLHTAIPSIAPSIVSHLDWLDTLIKQLEQQIETLIRRSAALARAACLLRSIPGIGPVNAAALIALMPELGQRSGKTIAALGGLAPINRDSGQFRGQRSIAGGRAEVRRLLYMAAVTASRSNSRFAETYKRLTANGKAAKLALIAVARKLLVAANAILKTGQLFNA

SEQ ID NO: 438975 - protein, 392 aa, unidentified
MNTITKSAASITGCTNTILAIDLGKYKSVASVHDQASGEIGFTTIDTTRAELRKLIDREQPGVVVIEACLLAGWVHDLCAERGVRCLVANTASEAWKFKHLKRKTDKDDALRLAQLYALGQLPTVTLPPTTVRQWRSLIAVRQTLVGRRVAVQNRIRALFVAQGLPAPRGAKAWSATGLAGIASHAKPLPACEPAELWRGLLELALTEYRQLGELITRAEARLDQIGQQSADVKLLETAPGLGPRTAEVVAAYLNDAARFKTGKQVSAYSGLVPRQHQSGEMDRRGRIGKRGPALLRKLLVECAWCMLRYNGWARGIYLRLTGGGQRRKKQAIVALARKILVRCWAMLRDRRAWRDPQAGPKQRLSPSKRLRQAQSAPRAAARAAPKAAAPA

SEQ ID NO: 438976 - protein, 343 aa, unidentified
MEYFAGIDVSLEHSRVCVADATGKIVREATVASEPEALVGWFGALGLPMTRIGLEAGPLSQWLHSGLAAAGFAAVLLETRHVKAALSAMIVKTDRKDARGIAQLLRMGWYRRVHVKSPGAQEVRALLVARKLLQTKAIDVELSIRGLLRGFGLKMGEVSQGQFAARVEELVSGHAMLQPVFAALLQARTALRREFNALHRRVLAIVRQDGVCRRVLMTAPGVGAVVALTFKTAVDDPQRFAKSKTVGAHFGLTPKKYQSGETDVSGAISRVGDAMVRAALYEAAHVMLTRKTAFSSLKRWALDIARRRGLRCAKVALARKLACVLHRMWVDGSAFRWRQPAAA

SEQ ID NO: 438977 - protein, 421 aa, unidentified
MSKRRYKSEEFKNVDWERVEGRIEGERVVLAVDVAKEDFVATLLDREQEALLTFSWCHPQETGEVLERMILLGQGRRLEAVLEPSGTYGDALLWQLRQAGIAVYRVSPKRVHDAAEVYDGVPSLHDAKAAYLIGRLHLQGISQPWQEPSEERRQLKALQTRLRVCKEREQAARARLEAHLSRHWPEILGILPLGSVTLWALISTYGDPASVAADTHGAETLMRRTGGPGLSEEKIQAVLASARDSLGVPALPGERELLQWLGAEALEAGQQVRQVEREIERRVEHDPLLLPLAAVIGKVSAAVLLAAVGSPRDYPDAASYLKALGLNLKERSSGKHKGQLKITKRGPSLARFYLYFAALRLIARDPIVKRWYELKSNRPGAVKNKCVIALMRKLAKALWHLAHGGAFDPNKLFNRKAIAGV

SEQ ID NO: 438978 - protein, 426 aa, unidentified
MFSESHDDEQIIERVAALDIGKAEVVCCVRLPAAAGTKRRVQEVTTHSTMVGSLSELANRLVDLRVTRVVMEATSDYWRPPFYLFEAHGLRPWLVNAKDVKHLPGRPKSDVLDAVWLCKVAERQMLRPSFVPPAEIRRLRDLTRYRVDLVGVRNSEKNRVEKLLEDACIKLSVVASDIFGVSGRAMLAALIAGERDPKALAEMARSRMRPKITLLEEAFAGMPTGTFDDHHRFLLTRMLSRVDQADADIAALDVEIEAHLAPFDDAVARLDEIPGIGPTAAAVIIAEIGTDMTRFPTPGHLASWAKFAPGVKSSAGKNKGNGSTGKGNRYLARVLGEAAVATARTDTFLGARYRRIARRRGKKKAIVATGRSLLVVIWHLLSDPETRFEDLGADYYDRHQDTTTKKRNHIRGLEALGYRVTVEPAA

SEQ ID NO: 438979 - protein, 353 aa, unidentified
MWIIGCDFHPRYQQVYGVNKKTGEVVERRLSHEGPEAKTFYRELPAGAVVGMEATGAARWFERLMEECGHHLWIGDAARIRASAVRKQKTDTRDARQIYRLLELGEFPRIWVPTPAERDVRQLLLHRHKLVQWRTQLQNQLRALARSEGFLSRQSLWSGHGRQELESLALGPWASERRQDLLRLLDPLEQRIAILSAQIESEASKRPEVLALLEQPGVGLLTGLAFVLTLGPVHRFHRSRSVVSYLGLNPGESSSGERQRLGHISKQGNRMMRWLLVQAAWIAARKDPELARVFKRLAFRRGGKIAVVAVARKLAVKLYWRLRTAASNTVQPPAPMQGSSRKVMVNATGSPSF

SEQ ID NO: 438980 - protein, 369 aa, unidentified
MKKHSTVKQSPKRATAGEAGPITIGMDLGDKTSCYYVLGGDGEVLSEGSVATTKKAMTQKFGGMRRCRIAMEVGTHSPWLSRLLSRLGFEVIVANPRQVRLISASSRKNDRMDAQLLARLARVDPRLLRPIRHRSEEAQADLLKIRVRASLMEARTSLINAARGFTKAQGDRLPACDADVMDVEKMEALPESLQETLRPLLEQVESLTDKIQKLDTTIEQIARTKYPETELLQQVHGVGTLIALTFVLTVEDRRRFDRSRDVGCYVGLRPRQGESGESQPQLRISKEGDVYLRQLLVQGAHCILWRGPDTDLKRWGLKLAARGGKNAKKRAVVAVARKLAVLLHRLWVTGEVYEPLRNSQARQEKGRAA

SEQ ID NO: 438981 - protein, 351 aa, unidentified
MTVYVGVDLHSNNNYVGIVNDANGVLFKKKLPNDLDTVLSVLEPFRKDLAGVAVESTFNWYWFVDGLMENGYKVYLANPAAIQQYEGLKNIDDKRSALWLANLLRLGILPTGYIYPKEERPVRDLLRKRLHLVRHRSSHILSIKNILSRNLGLRMRGHEVKKLTEKDLKKLFPDEHLFLAVNASVTIMHELTSQIDQIENAVLARAKLKKEFHGLLSLPGIGDILALTIMLEAGDMKRFPEAGDYSSYCRCVRSTRTSNGKAKGEGNRKNGNRYLSWAYVEAANIAKRHYPIINRYYQKKMAQTNMVVAIKALSNKLARASYYVLRDQVTYDERKLFGGKAEPVKGLARNP

SEQ ID NO: 438982 - protein, 355 aa, unidentified
MTKVRTNFEGQIIHVGMDIHKSSWNLGIYLNDLFIKNVHQKPDPFIMVSYLKQHYPGAQYKAAYEAGKFGFWIQRQLTKLGIECLIINPADIPRSQKDTLQKTDPRDARNLGLQLQSGVLKSIHIPDEQQEADRVFFRHRKRIWKDLTRCKNRIKGLLAFSGIDIPEQYDNANWSHNFINWLKQVDCKQQSRRHALNYMITQTEFLRKELLSISNSIRKMMREQRYKTNYYLLRTIPGIGPLTAASILVEIGDVKRFNTFYHLNSFVGLLPMEHSSGERENKSILTVRKHRQLRSDLVESAWTAKRTDPAMALYFNEQIKRKDSKIVIIKIARKLLNRIRYVLINQKPYEYGIVK

SEQ ID NO: 438983 - protein, 346 aa, unidentified
MEQTITIAVDLAKSVFQLRGETVSGEVVFERRFSRAQFDRFMQHHAASLVVMEACGTSHYWARRLMAMGHQVRLLAPCYVKPFVRRNKTDARDAAAILAASRQPDMRSVRIKSEAEACGRALERARELLVRQRTQVGNCLRGLLAEFGITASPGGKGLESLIAKVEALDAQIPTALVVPLSGLARQWRHLETEALALEADIRARAQADPAMRRLMSVPGVGPLTAHAVACAIGDGRQFRCGRDFAAWVGLTPRAYASGQTRRTLGISKKGDASLRRLLTLGASAHFIHLRKRPDKAGPWITGILARRPMRVAVVAQAARTARILWAVLTREQSYRVEGPGLANPAA

SEQ ID NO: 438984 - protein, 316 aa, unidentified
METPQPFVGIDVSSQRLDVDMLPVSQRSSEPNTEDGIASLVLRLRKLNPQIVLLEATGGYEVPAAYALYEAGLPVVIMNPKALRHFAKAIGKLAKTDKLDAQVLALYAQSIQPPVRPLKDQEQLELANLMTRRRQLQGMIVMEENRRRTCTPRVRGNIELSLAHLRQLLKDLDREIHDSIRRTPLWHENSEILQSFKGIGPKVSASLIAVIPELGTIPGTKASALAGLAPMNRDSGQYRGKRKIQGGRPAVRQALYMAALVASHHNPVIMEFYQRLRLAGKPAKVALTACMRKILVILNAMLKNRTYWNPQLPLAA

SEQ ID NO: 438985 - protein, 400 aa, unidentified
MNERKAQVWAGVDAGKGHHWAAVVDETGATLWSKKVDNDESAILAALGEILGLADQVHWAVDISGTSSALLLALLAAHGQRAVYVPGRTVNRMSGAYRGEAKTDARDAYVIAETARHRNDFATIGVPAQLAADLALLTAHRSDLVADRVRLINRLRDVLTGIFPALERAFDYSSQKGALVLLTGYQTPAAIRRRGRARLTAWLANRSVRGADAVAATALEAAQAQQTGLPGEDVAAQIVADLAAQILALDDRLKRIDKQIRDTFRGHPQAEIIESLPGMGPILGAEFVVAAGDLSAYADAGHLASAAGLVPVPRDSGRRTGNLHRPKRYSRRLRRVFYLSAQTSIIREGPNRDFYLKKRGEGCKHVQAVIALARRRASVLWALLRDGRIFTSAPPVTQAA

SEQ ID NO: 438986 - protein, 321 aa, unidentified
MNKNNQIYGVDISKGVFDVVNSTGEHFQFKNNVSGFKSFLKILIKEDLVVMEATGYYHYRLAQFLYEKGIKVSVVNPLSVKRFIQMKLSKIKTDKSDAKAICEYASTNEVPLYTARDKSQAEALQILRLIAIYTKQSTALKNKLHGEKVLGKPSKVVYHSLNRSLKVLQNEIKTLESRLTEIVKDDQQKQLTLLKSIPGLGNKTAIMLLVLTHGFTSFEDASQLCCYAGITPTIRASGSSVRGKSRISKIGNPKLRNLLFMCSFTACKHNKACRDIYERIIAKGKSKKLALIAVCNKLLKQAFAVATSGLPYDENYASRLG

SEQ ID NO: 438987 - protein, 432 aa, unidentified
MTKSDTTPVHPILVAIDIAKHRNEVLIAEPGRKRRRRITVRNIKEDHERLVETLTAYNAPVVVGFEPTGDYHRPIAWRLQEAGFSLKLISSLSLARTREAMHNSWDKNDPKDAQVMLHMMQTGLTQTWHDPLVHGLNDLQELSKTHAVISQTKTEFWHRLRTHYLPLYFPEAERFAGNSRSDWFLAFLEQFPTPGSITCMPEDTFAEAAWDVVGRKVSKRRLISDIYATAADSIGLPVSIDSPAIAMFRLVLAEGRSLVAQRDQIEQQAEDLLGEHEDFIRLKTIPGVGPINALTILAEAGDLRRFRHHRQFLKFCGFNLSTQQSGVFRGQTKLSKYGNARLRRTFWMAGQVAIRQRENGFRDKYERYIARDHADPHLKRKAFTAIAAKMARTAHAVIKTETDYRPFFEGRGPRRKDPALQVPLRRAHSATS

SEQ ID NO: 438988 - protein, 443 aa, unidentified
MSDLAVLDPCAAFVDVGSEKMHVSIAGGSPAVFGTVTSQLHALRDYLAEHQVRSVAMEATGVYWLPLYGVLEAAGMEVVMVDGRQTRNLPGRKTDMKDCQWGATLHAHGLLRAGFVPPAHIRRLQDYLRLRGDHIAAAAGHVQHMQKALERMNIKLHDVISSLTGASGLAVIRAILAGERDPQVLLGLCDIRIRNVKAERVVESLRGDWAEEHLFALAQAVQSWDHYQGLIVACDRQIAVVLGQMPDAKAPPSAASTKTGKPRTRPGANAPDIADLREILAQICGAKDLTTLPAHSEYSVLQLIGEVGTDLTKWRTEKHFTSWLGLAPGSAQSGKRKASVKRRRNRAGQIFCVMARALARSKYVALGGFYRRMAARRGGSVANKALARKLATLFWRVMVKGLDFVETGVAQYEARVLETKHRILHRLARQLGQQIVPNPAAAV

SEQ ID NO: 438989 - protein, 475 aa, unidentified
MEEVTVNDNREAGRRRTKGSRQRTSPGLLERIQPDAAGIDCGAEYHYVAVPPDRDPEPVRPFRTFTADLERLADWLAACGVKTVAMESTGVYWIPLYELLEARGFQVVLVNARDVRNVPGRKSDVADSEWLRELHSVGLLRASFRPAGEIAALRAYLRHRETLVHGAATHIQRMQKALVQMNLQLHTVIADLTGVTGQRIVRDILAGVRDPHALAAHRDHRCRASADVIAASLTGHYRAEHLFALRQNFEAYEFLKRQIDACDAAIDAHLTTLAERQAPPPHTLPTPRRTRKPRDNDPRFEIRAPLFRLTGTDLTQIDAIGPSTALQLIGEIGTDMSRWRSEKHFTSWLTLAPHNKVSGGRLLSSKTPPSANRAAAILRRCAMSLGRTATALGAYYRRLAYRVGKPKAITATARKLAILVYRVLRGDLVYRDPGALAYEQLHRARTLRGLRKRANQLGFGLLNLETGEVLDAAVS

SEQ ID NO: 438990 - protein, 390 aa, unidentified
MERPMPQLNDLSRSLITLEQDATLIAVIEMGQSSWLVAGIVPGVERQPLKKLAVDESALLKLLNRWREEAEQAGHRIKRIAVAFEAGRDGFWLARWLRTRGIETHVIHASSVAVSREHRRAKTDRLDTELLKRAFLGWLRGERDHCKMVAIPTTKDEDAKRPNRERESLVGEQSRIVNRMKATLTRLGIRGFNPKLKKAAERLDGLRTPEGAPIPPNTLAELRRDMVRRRLVSDQIRQIEGARLERLEQAPCDGPHAMVRLLARVIGVGIETADMLVQEVLSRNMRDRRAVARYAGLTGSPDESGQKRREKGLARSGNARVRRGMIQLAWRFLMFQKDSALAQWFRARTENARGTRKTMIVALARKLLIALWRLVRDGVVPDGVSLRPAQ

SEQ ID NO: 438991 - protein, 387 aa, unidentified
MIYYVGIDISKYKHDFCIISNTGEVIVENSSFENNKKGFQSLLDQLKPYNKSDVQIAFEATGHYSKNLELFLIDQGYSFMKMNPLVIHQFLKARSLRRTKTDKADSLTIANYLMSVPYKPNSDLLYNIFTLKSLCRSREQLIKERSKYQVLLTNELDLTFPELKQFLGNRISATLLFILEKYTNTEHIFLMRDYDSIKNISRGKFSYAKFAKLKELAKNSVGYHNKNTDLLISTYVSIIKTFNDKIDPIEKQISTIIKELNPRMLTIPGLGEISAATILSEYGDISNFSSPNKMLAFAGLEPSIIQSGTIENNGTMVKHGSGHLRYSIMNTAMIILKYSPTFYDYYLKKRSEGKCHRVALSHVCKKLLRVIFTLEKNNINFNPSLLK

SEQ ID NO: 438992 - protein, 332 aa, unidentified
MQMLAIDLGKQSFHIYGITCEGEVISRKVSRAKLVDAVTRLQPQSVAMEACASSHHWGRVFEALSYAVRLIHPRFVKPFVKGSKNDAVDAEAIFEAANRPTMRFVPLKSVEQQDLQALHRTRDRLIVQRTALINHTRGLLAEYGVVMPAGASRFRLQVDKMIEIAELSHLAKDLFLKLVEEYRDLDARVSTLDDMLVDICRRDDRCKRLTTLPGVGPIVATSLIAAIDDGRHFASGRALSAWIGLVPRQYTTGGKPRLGGIGNRANHYLRRQLIHGARSALLRIAKHDDRRSKWAQELQSRAGHNKTLVAMANKTARLACAMLRSGESYKMA

SEQ ID NO: 438993 - protein, 285 aa, unidentified
MQSMTAPTAPVTVGVDTHLDLHVAAVLDHTGRLCGTQAFPASTRGYVALVTWAERYGRVERIGVEGTGTYGAGLARFVRAYGLEAVEVNRPDRSLRRRRGKSDPIDAQAAARATLAGVAATAPKTREGQVEMIRVLRVARRGALKARVAAAEQLYGVLYSAPEELRQPLLGLKTKALVRACAGLRPGSLTSPLAATKTSLRSLARRWQQLQAELDRLDHQLQDLVTAVAPILVALPGVGIDTAGQLLVTAGDNPQRLRGEAAFAHLCGVAPIPASSGRTHRHRLM

SEQ ID NO: 438994 - protein, 453 aa, unidentified
MARKAEKERTKDGLKLKIVNPNAAGIDIAYGEMQVCVPEDRDGENNRCFGSFTCDYEEIASWLKACGITTVAMESTGSYWVGLYFFLEEKGFDVLLANAKDVKNVSGKKTDEADAEWIMLMHSYGLLKPSFHPDAAARNIRELARHRDNMLRSAGKEVQHMQKSLVLMNIKVDTVISDILGKSGKAIIEAILEGNHDPKSLAQLADRRCKASKETIEKSLEGTWDAVHLFELKQSYDLYKYIHTQIADCEAEMDRMLSNYTDGCGTDMTGYKATEKRVAKKNAISFDAEKHAFSMWGVNAMEMPGMSLGGLSVLMGELGSGFIEKFPSAKSFCRWCNLVPNNKISGGKLLSSKVPKLKNRVGQVFRSCANSVKSAKTGLGVYFRRQKSKGGHLQAIVATANKMARIFYTMVVNKKPFDESKVGLDEKTLLQRKITIAQRSLEKLNLRLSVAQG

SEQ ID NO: 438995 - protein, 346 aa, unidentified
MRVVCRIGLDIAKNFFQVHGVDKNGKDVFNKKLKRVDVLPFFANLPPCLIGLEACGGAHYWARELSRLDAGHTVRLISPRHIKPFVINNKTDAADARAICEVVGRPSTRFVAVKTVEQQDMAGWHRIRERKVKERTALVNQIRGLLAELGIIIPQGITHVRKQLPCIIEDLDNRLSLCARDYLSETYGELVDCDALVEKYEKRIKAFAMNNEDCKRLQKIPGVGSLTATAIVAHVGTAKQFANARAFSACMGLTPKEYSSGGKQKLLGITKRGNSYIRKLLIQGARVVTRYCLLKSPEQMDQRIRWVQTLAERRGKHITAVALANKTARIIWALLARGEEYKPALV

SEQ ID NO: 438996 - protein, 326 aa, unidentified
MEYIGVDLHKQYFVATVMDEEGRVIRKDRVSTDRAAIKEYFQKEPRAKERKVAIEACYNWSYFFDEIQGMVTEVKLAHPLKTRAIAEARIKTDSIDSEVLAHLLRSDLIAEAYAPDFETRDAKNLLRYRASLSQMRTMLKNRVPATLARNHIEVPEFRELADKFGKKGRAYLREFQLRGHDTEILHHYLDLIDAIEEKIKLVDRKVKEACKRDEICRLIESIPGIGHLLAVLIRYEIDDIQRFSSAKKLCSYAGLVPSTYSSGDKTYHGRITKQGNRWLRWALTEAAQMAVVKDVGFRGYCRRVEKRGGKKKAKIAIARKLLEIIF

SEQ ID NO: 438997 - protein, 403 aa, unidentified
MNNVAGIDVSKGKSMVSVLRPFGEVVAKPFSIGHTGSELKELADYLKSLDGETRVVMEHTGRYYEPVARFLHEEGVFVSAVNPKLIKDYGNNTLRKVKTDKADARKIARYGLDNWAELRQHTPMDTIRMQLKTLNRQQSLYTKTKTMMKNNLIALLDQTYPGVNALFDSPVREDGSQKWVDFATAFWHVDCVRNMSLTAFAERYRKWCKRHGYNFSQSKAVEVHTGAQDLIAMLPKDALTKTMVRQAIDALNAVSASLERLKAEMQALAAQLPEYPVVMAMHGVGDSLGPQLMAELGDVARFTHRNAITAFAGVDPGADQSGTHEAKSTRVSKSGAPELRRALFLVMDCLLKTQPQDDPVYRFMDKKRAEGKPYLVYMTAGANKFLRIYYGRVKEYLASLEEN

SEQ ID NO: 438998 - protein, 338 aa, unidentified
MRNYVGLDLHSNNTYIGILDEEGRRIYKGKHLNYTALILSELEPFQEKAAGVVVESTYNWYWLVDKLIETGYNVHLANPSAIKQYEGLKNTNDYHDAFHLANLLRLGILKEGYIYPKEERALRDLLRKRAMLVRHRTAHILSFQSLYNRHTGFTLRSEDIKRIKDRELDELSPLEHVRRSGQVNISVIRFLSAEIEEIEKVVLSSMRLKEEFQKLKTVSGIGDILALTIALETGEINRFAKVGNFASYCRLVTSQRLSNEKKKGEGNRKNGNKYLCWAFIEAAHHAKRYCPYARKFFQRKSTKSKKVVAFKALAHKLARASYFVMRDRVDYDPQKAFG

SEQ ID NO: 438999 - protein, 322 aa, unidentified
MVREVKRMQDILEICCGLDVHKETVVACLLKGDTDGEPKTTIRIFSTLLAGLDELRAWLEAENCRHVAMESTGVYWQPVYSVLEEAFDGSMVLTVTNARHMKNVPGKKTDMKDAEWIATLLRAGLLQGSFIPVKPIRELRNLTRYRKSIMEEITAQKNRIEKHMQSCGFKLSTFLTDIFGVSGRAIMDHLCRHGKISAWEVDALVKGRAKSKLHEIKQAVNGKMDLHQREFLKLLLVWLDQHYEHLRQVEQKLEEKMAQYQRQLEQLDGIPGIDKTAAAAILAEIGIDMSHFKTAEHICSWAGLSPGNNESAGKKVHSHHQW

SEQ ID NO: 439000 - protein, 394 aa, unidentified
MTYLNIGIDVAKNSHQACLVDEHGKQIGKYIRLENSRSSIESFREIVEAIAIKMNAIPRIGMEATGIYWYPIYNALSDWYEMNLYNPSQIRGFAQVNIRGTKTDKIDAKTIANMMRFGEAPKTSFEDKNRMEIKEYSRFHFKLKSELINLKRRFLRNVHMIFPGYDQFFSNVFGKTSKAILSKAPDPTDLLEMEEEKLFELMKENSRNYYTREKARELRDKAREAITSDFVKEPVIFELKVLSKLIEELEKQIKETENRILEIWERVKDKHYLQTIPGITELKAAMIWGEIGEVENFKHPDQLVAFSGFDPKVKKSGQKEVISGPNKRGSRVLRCLIGRAVVDARRVNPVIGEYFDKKISEGKHYNTARCAAAKKLIRIIWSVEKNKRPFQIPE

SEQ ID NO: 439001 - protein, 430 aa, unidentified
MKSNTQNAKIEAITEKTLVLGIDVGSETHYARAFDYRGIEYSKKPFKFSNTEAGFVTFKEWILDLKEKHEKDKVVPGMEPTGHYWFNLGKFLQDNEMKPVLVNPHHVKKSKELDDNNPTKNDRKDPKVIAGLVREGRYMIPYLPDGVYADLRTASNIRFQLQAELTRIQNRISRWFNIYFPEYKTVYGKPDAKSGMLILKHAPLPEDILTLGIDGVNQIWRDAKMRAVGKARAKTLIEAAEHSVGSKEGAVSARMEIRMLLEDYESRNTRLQEVMVLIEELVRKIPMAEKLLEIKGVGIRTVSGFLAEVGDISRFNNPKELQKLAGLALVENSSGKHKGETTISRRGRKRLRYLLFEVAMSLVSKNQEFRELHNYYTTRRLNPLKKMQSLMAIAAKLIRVFYAMLTKGVDYDPKKMVSDIKRPAVYLQAA

SEQ ID NO: 439002 - protein, 347 aa, unidentified
MLIIGCDFHPGFQQVAIFDNVTGEIQEKRLQHRAEAEQFYRGLAGQEVRVGMEACGHYPWFERLLAELGFELWFGDAAKVRASVVRKQKTDRRDAEHLLDLLRENRFPRIWVPSLEVRDVRQLLVHRHKQVQARTRTKNQLQAMALSQGVQKKYKLWTKAGREELEQLPLLPYAAQRRKQLLQSLDGLEAEISELDRRVADEARQRPEAVRLMTHPGVGPVTALALVLTLGPADRFESAKQVGSYFGLIPSEDSSGGKQRLGRISKQGSSFLRFLLVEAGQTAARLDPQLKRFYRRLAARKNRSVAKVAVARKLATRLYLMLREDWTYTQLCQAVMQVSPSHSVAGQ

SEQ ID NO: 439003 - protein, 369 aa, unidentified
MAKRSMFVGMDVHKESIDLSIAEEGRDGEVRHYGVIPGDLEAVAKVVRALRAANRRLRFVYEAGPCGFGLHRYLTAQGEDCVVVNPSSMPKRSGDRIKTDRRDGDALARLHRAGELTAIYIPTPDDEALRDLVRAREDAVGLSTQAKHRLKAFLLRQGRRYPGRAGWTQPYRRWLADLSFPLAPQHIALQEYRDTIDETERRVERLTDQLRQLTPEWRWAPVVEALQALRGISFVTAVGLVAEVGDIRRFTHPRELMAYLGLVPSEYSSGPNVRRGGITKAGNPHARRLLAEAAWAYQGVPRIGRQLLYRQEALSKTVCDIAWKAQLRLTSRFRKLVARGKAKPKVATAIARELTGFIWAIAREVPPPA

SEQ ID NO: 439004 - protein, 404 aa, unidentified
MKGPIVSIDVSKGKSDYQAFKNLNVKYTGSRSIKHTKEGFDEIVNLVREMEKKLEAEVCVVYEATGVYHRVLKKVLEDNNIKQFIINPLLSAKTRKNDSLRCPKTDKLDPKSIAKTYYSHSLHNSHKQETIYHELRELSRYYEDILVHIRKDKVAFRAQLDIVFPGYDTLFDDLYGPVALAVIEKYPHPEMLQKKKINTVSKVIQSKTCHRQAVSDTMADKAIEYSKTIYSGCDKDDIEVLILQRFIKKLNEDMAEAERTIGEMIKLAQELPDFSIIKSIPGIGDNLAARIIAELGDMTRFKKKNELVAFAGLDPRISESGKNDGDHMHITKKGNKRLRCLLYLAVTCSIRLKRDDNSIKDFYIKKKQQSNPMCSKAAKTACASKLVRIIYSMCKTGELYQYNK

SEQ ID NO: 439005 - protein, 319 aa, unidentified
MTLYSNFIGIDIGKLSFVICRHQHSHSAEYKNTAAGITQFLSDYQEYLTDGLCILETTGGYEMELLLTLCHKKVSVHRANTRKVKHFIRSYGNDAKTDALDAKALALYGFERHENLDIYEPCSANFMALYELVKRRQDLKQIIVAEKNRLQAPRTHVVRKSCEHMIEVLSAEIEAITGNINDLINKSPDLKMKKAILKSIPGIGEIIANELIALIPELGRLNRREVASLVGVAPKANDSGKFSGYRSTYHGREGIKPSLFLAAMAARNSKSQLKEFYEQLTRRGKTKMVALTALMRKIIVIANARVRDHLVEQAGGIKI

SEQ ID NO: 439006 - protein, 324 aa, unidentified
MKVVFPTCCGVDVHKSFVVATIITTPTDSLQPHYQKKRFSTFNSDLNRFATWLLEHNCLDVCMESTGKYWVPVFNILEKRGIRVVIANPKWVKAVKGNKDDTKDSKWIGDLFRIGLVKSSFIPELKIRILREFLRYRYKLVSMKSSEKNRFQNAFTVCNVALDSVVSDMFGKSATAITDYLTSDESFDPEHCVSLLQRSLKKKAEKVLESIEGYSISDEQKARIKIIREHYDFVEKLIAKVDTCVNEMVEKYEGEINLLCTIPGIDRNSAITIISEIGTDMSQFGSSKRLCCWAGLTPGNNESAGKKKSVRISRAGVYLKPALV

SEQ ID NO: 439007 - protein, 363 aa, unidentified
MVESTTVTVGLDVHARSIRLAAVRADELLEERTLPYDEEQVERLLRRWPAVRCCYEAGPTGFGLYRHLVGRGIDCRVVAPGLVPQRPGDRVKTDQRDARKLARLLAGGLLEPIHVPSPELEAVRDLVRAREDARLDRMRDRQRLSKFCLRHGRLLPTSAWTVIRRKWLGEQRFEHAAEQITFDTYLHAVDLVDRRIEQLERAIREAAEQGPWRELVARLRCLRGIDTLTALALVAEIGDFSRFRAAEEFMAFVGLVPSEHSSGEQRRQGSITKVGNSHVRRLLVESAWHARRRPKVGYELARRHRGQDAAVIERAWRCQQRLYRRWQRMAGRGKPHQKIVVACARELAGFVWAIATEQPLRST

SEQ ID NO: 439008 - protein, 338 aa, unidentified
MHVTTLGIDVAKNVFQLHGTDARGRAVLSRRVKRDQLLHTVASLPPCVIGMEACGSAQYWGRAFEQLGHTVKLMHPKYVKPYVKTNKNDRRDAEAICEAVSRPTMRGVAIKTVEQADLQAVHRTRSLFVKHRTAVINQIRGLLAEQGLVIGQSPEKVRPALVRFLDDAASGLTAFARETFAELYAQLTELDARIERVTHRVERVSRAHPVCQKLAAVPGIGPMTATALVATVGQPQAFHNGRHLAAWLGLVPRQYSSGGKERFGRISKRGSRYVRTLLIHGARAVVQRAERRTDTQGRWLCALKHRKGTNVAAVALANKNARVIWALLAHDEVYRPPA

SEQ ID NO: 439009 - protein, 332 aa, unidentified
MSAYIGLDVHKDWTFATVLDQAGRVVAQRKLANENVPSFLEKFNVEKIGLESSTYIVPLYRALVDRGFRVEVGHPKKTRYIAEARIKSDKVDSKAIAELVRLDALPQSYMPPPEIACLREKVRRRAFLVRERAKLKAKIRGVLAYEGLKPPERLGLFTRKGVDWLRSLGLEPIDCYLRLIVVLNCEIRRLSRELKQLAGLDEDVRLLMTIPGVGYYTALLVKAEMGDVNRFRSGGHLCSYAGLVPSTYNSGGVTRHGGITREGSRWLRWVMVEAAMTHVKYDTGITRSYHRIAEKRGRKIAIVATARRLLLSCYSVLKNRRGFRAFPSRSGV

SEQ ID NO: 439010 - protein, 438 aa, unidentified
MKKIHNHAAGIDIGARKIFVGLEGREVKSFETFTEDLEMAADYLIDNNIETVALEATGVYWVILFDILQARGIDVWLVDGRSTKQVPGRKTDVKDCQWIQQLHSHGLLSRCFVAEDLVQELREYQRLREDHIRSAAMHINHMQKALTMMNIRLKEVLSQVHGASGLRVIRAILKGERNPKVLVELCEKSILKTKRELVIKSLKGHYTQAGLFALEQAVACYDFYQVQIVRCDEKLDEVLKKMSGENGDASLKPGKKKTRKPIRHHKPKIKNLDRYLLSVFNYRDATVLPGITDYTWMQLLAEVGSDMKKWATEKHFTSWLGLAPKQHHSGKMRKNHKSKGQPKAGLIFKQVATSLLNSKKIALGAFGRKLRARKGPSHAIKAMARKLAELYWKLFVRGLDYIEKGIKDYEEKINLNKERSVRKMAKELGMVISYNTAS

SEQ ID NO: 439011 - protein, 412 aa, unidentified
MEGETVIAGVDTHKDVHVLCLLDGLGRKIWSGSFGADPEGYDRLAEAIGDPGSCMVVGVEGTASYGAGLTRRLVELGYNVVEVLRPKRDKARPGEGKSDPLDAERAARKAASGKGCSVPKSQDGWVEAVRQLYVARRLAVATSTSCVACAKSMLTTAPSALRERFRGRERPKDLMPLLARGRKAGDALEESVLASLRSVAAVWKEARSQVESLDERIRALLEANAPALLGVEGCGTTTAAALVVAAGDNPGRLKGEAAFSMMCGASPIPASSGKTERHRLNRGGNRQANWALYEIAIKRMAYDERTRRYVARRTSEGKSRREAVRCLKRYIAREVYHVLMDPNPDGAAPEGPELAKMRKAMRVTQKQAAAELGLSAATLGHLERGKRRSTKLERRYYELLCELERALPQTAS

SEQ ID NO: 439012 - protein, 464 aa, unidentified
MKLPPNQRKNQSVPGAKATSHSEQINQNAAGIDLGSGEHWVCVPPDRTEKNVRRFGCFTPDLMAMADWLIESGMDTVAMEATGVYWIPVFQLLETRGLEVKLVNAHHVKTVPGRKTDVNDCQWLQQLHTYGLLSGSFRPEDQVCVLRSYIRQRDSLIKSASIHVQRMQKALIQMNLHLHKVISDITGLTGMTIIKAIAAGETDPQVLAALKNPRIKSSTTEIAKALTGDYRREHLFVLKQELTLYEVYQEEIASLDTEIEKCLASFEPKTEEELAITKKKHRKKPTANHPIFDLHFFLYQIAGVDFTLIDGLDALTVQTISSEVGLDPGRFPTVKHFTSWLGLCPGQKITGGKVKSSQTRPVVNRAASAFRMAAFSLTQSRSALGAFYRRLRSRLGAPKAITATAHKLARMFYRMWTTTGLYTDPGMDYYEQKYQEQILNNFKKKAQSLGFELVPQTLTTECVS

SEQ ID NO: 439013 - protein, 353 aa, unidentified
MNSLTDLREVVDVVIGVDTHVHTHSAAVVDAATGGVLDEITVEATAQGYCELVEFANNHPMLRAWAIEGTGGHGAGLTRHLLESSEIVIELDRPKRAARRNGAKTDPLDAIRAAREAMARPRLGTPRTGGERQALSVLLVARRSAINASTEAQQQVFSLVIAAPEPIRVRFRGQKLAAMLNTAAKLRLQAAWDVETTSTVLALRTLARRAHAMLKEARELQKALVAIIRNWRPDLLEEFGVGPIVAATVLCAWSHHSRIHSEAAFAMLAGVAPIPANSGQVTTRYRLNRYGDRELNNALHTVVQSRIQYQPATRDYVARRTAEGKTGREIKRCLARYVARDLYRLLENGPATA

SEQ ID NO: 439014 - protein, 386 aa, unidentified
MQASTLGTPTIGHCGTIFVAIELSQRSWLVTMHSPDRDRISRHKLSGGDHCGLLTLLEKVRQRAADKLGARPAVVSCYEAGYDGFWLHRLLRAAGITNHVFDPASIAVEQRGRRAKTDRIDGELLLRTLMAHCRGEPRVVRIVQVPSPDQEDARRATRERDRLIKEQTAHINRIKSLLRLLGMAVGHPRRRGWLSWLTTQRDWQGQAVPAQTRAELEREHARLMLIGEQLAALEQPSAQAEPTPAAAEMGRRRNMLFKLKALGPVLSGTLTNEVFYKDFRNQRQVGAYFGLAPSPWQSGNTDRDQGISKAGNPRARRAAVEFAWLWLRHQPNSALARWFEQRTINATKRVRRIAIVALARKLMVALWRYLTTGLIPEGAVLKPVKA

SEQ ID NO: 439015 - protein, 356 aa, unidentified
MSYDVKYIGMDVHKEAIVIAVQNESGKLVMESVIETKASSILQFLHGLRGELHVTWEEGTWAAWLYDLLQPHVQHIVVCNPRRNALLKEGNKSDKVDAGKLADLLRTGMLRPVYHGENGLRTLRELGRSYQTISKDLTRVMNRLKALYRGWGIPCAGTQVYAARAREQWLSKIPHTGVRRRAELLYQQLDGLLALRRNVRPELLAESRKHKAAKLLRQIPCIGPIRAARLIGLMQTPHRFRSKRQLWTYSGLGIETHDSAQYCFVRGQVQRSKKPQQVRGLNRNHNHEMKEIFKSAATRASCGRGPFHDFYTGLLAKGMKPEMARLTLARKIAAITLTLWKKEERFDVEQLKTQAA

SEQ ID NO: 439016 - protein, 432 aa, unidentified
MEKIRERAAGIDIGAKKVFVSVEGQEVSWFLTFTEDLEKLRNYLLEHSIETVAMEATGVYWNILYDMLEEAGIDVWLVDGRQTKQVPGRKTDVKDCQWIQQLHSYGLLNRCFVAESDIKELRIYQRLREDHIRSASMHINQMQKALTEMNIRLTEVLNQIHGSSGLAIIEAILSGERDKEKLLKLCHIKIIKNKKDEILKSLNGRYTKSGLFALKQAYDSYRFYQHQIEQCDQMLEEVLKRISNQKPEQRINAPRKPIRHHKPSIENLGTAMMKIFDGKDATTLSGITDYSWLQLLSETGTDLSRWPSEKHFTSWLGLAPGQHNSGKVKKNKRKLGRPKAGQIFRQIAQSLLTSKRIALGAFGRRLSARKGSPVAIKSVARKLAAMYWRIMVKGVEFVERGIKNYEEQLLAQKQRSLIRLAKELKMQVSYNE

SEQ ID NO: 439017 - protein, 398 aa, unidentified
MISVGIDISKRKSTAAILNVQGEVICNPFEFRHTKSGFEELLMYVKDYPQDEVKFIMEATGIYHLALLEFLKSKGYFVHVANPLLIKKFFDAEIRKGKTDRKDALKLSLYGTEKWFKLDDHLISEKIYSELMMLSREYNQLIAIRTKSKIQLNHLIERIFPGIEKILTDYYTELLLDFLLKYPHVSYVVKQSEKVFTKQFVKMAEKKEHTKGPQLAKKVYDLALECVPAISSSRSLEIAVESCIHVLRSTQTSTDAIITQMRLLAKELPEYDMVRSMPGIGDTLAPRLIAEIGDIRRFKNAKSLIAYAGIDAPPYQSGQFEGTRRHISKRGSASLRKCGFEIMFILMRREPSEDKDIYEYIQKKRAEGKAFKVALFAGFNKMLRIYYARTMEIYSKLT

SEQ ID NO: 439018 - protein, 354 aa, unidentified
MQGATKYVGLDVSKEKISVAIAEAGREAPRYWGTINHSHEAVRKLMKQLGEPSTLDVCYEAGPTGFDLYHWLTEMNIACTVIAPSLIPQRQGDRIKTDRRDALRLAQLFRAGELTPIHVPTRDQEALRDLVRAREDAREDLHRARQRMVHFLLRHHIHPPASIRRRWTKAYRIWLEKLTFTQTCEQTVHKEYLHRIFECEERLSRIDQALAEEASRGTLAPVVRALQALRGIALVYAVSIAAEIGSFERFRSPMQLMSFLGLVPREYSSGQTVRKGKMTKAGNALLRRVFVEAAWSYRYRPAIKGGLKTRLEGQDPAVQAISWKAQHRLHNKFFRLVMQRNNKKTLRLVQLPES

SEQ ID NO: 439019 - protein, 346 aa, unidentified
MTKYVGLDVSLEETAICIVDEQGHIVAERKVASQPEAIAAFIRSKAADAERVGLETGPLAVWLWNELRILALPVICIDARHAKAGLSMMINKTDRNDAVGLAQIMRTGWFRAVHIKSAPSHLVRALLASRGLLVGMRGEIDNQVRGLLKTFGILFGKAVGGFRKRAAEIVAGDLVDSPELARLMETLLATREDICRRILALDREVMKQAKASDVCRRFMTMPGVGAVVALSVWSAIDDPTRFAKSASVGAYFGLTPRRYASGELDRSGRISKCGDRDPRTHLYEAANVLLTRISRASALREWGLKIAKRSGFKKAKVAVARKMAGILHRMWLDGTAFKPEPKVVAA

SEQ ID NO: 439020 - protein, 435 aa, unidentified
MEEVTDEPLYRDRVCGIDIGKAQMVATIRVPSDKDPARRAAETRTFGTTKREVLALADWLRCWQVPCVVMEATSDYWKGPFYRLEAEGFECVLADAKQVKNLPGRPKRDPADSRWLAACFERGAVTACFVATPEFRIIRLHTRYRRDLTEERTREKQRAEKLLESAAIKVSSVLTDLHGVTGRDIMDHLIAGQRDPKVLAQLARRRARRKIAQLEEALEGAEFFTAGHAALLAKVLARIDRLSADIEDLSEVIEALLAPYEEQLQQAESMPGWARRAAQDAIAETGVDMTRFRTGPHLVSWGGRAPQDHQSGKRAGRAKAKKGNRYLGAVLGETAVAAGRTQTREGVRHRRLARRRGAAKACVATGNTQLKVYHKLLSNPGMRYADLGPDYYERQRNIRRQVAHHVGKLGSLGFEVTLCRIPEPDPDGTAPTQAA

SEQ ID NO: 439021 - protein, 402 aa, unidentified
MNMNAVGIDVSKGKSMIAIIRPYGEIISLPFEIQHTSDEIRCLIDQIKSIEGESRIVMEHTGHYYEPLARELSLAHLFVSAVNPKLIKDFGENSLRNVKSDKADALKIARYALDSWNDLKQYSLMDEIRNQLKTMNRQFGFYMKHKTAMKNNFIGILDQTFPGVNTYFNSPARDNGSQKWVDFAAAYWHVDCVRKMSLHAFTDHYQKWCKRNKYNFSQSKAEEIYGATMKLVPVLPKDALTKLIVKQAVDQLNIASKTVEQLRILMNATASKLPEYSIVMAMKGVGASLGPQLMAEIGDVRRFTHKGAITAFAGVDPGVNQSGTYDQKSVRTSKRGSSTLRKTLFQVMDALIKTKPQDDAVYQFLDKKRAQGKPYYVYMTAGANKFLRIYYGRVKEYLLSLS

SEQ ID NO: 439022 - protein, 295 aa, unidentified
MDHIGIDVHKRESQISIFAEGGAICEQRIRTEPGRFAAVLGARPRARVLIEASTDSEWVARHLEALGHEVIVADPNFAPMYATRSRKVKTDRRDARALAEACVLGAYRPAHRFSDPQRHVRGRVLVRDAVVRTRTRYISLIRALLRQHGFRVPSGSAESFVHRVQSLPLPGRLRSVIAPLLALMRPLNRQLAYSDATIEHLAVQDPRVPRLRSVPCVGPVTAAAFLAAIDDAQRFRHAHQLEAYLGLVPREYSSGETQRRGPITNTGHSRTRWLLIQAAVSILRRRPPQAEEYCG

SEQ ID NO: 439023 - protein, 428 aa, unidentified
MNCNTQNAKIASITEKTLIVGIDVGSETHFARAFDWRNYEYKKKPLEFSNTEAGFMMFKAWVEDIAEKQGKTAVIPGMEPTGHYWFALGKFLQDSGMKPVHVNPHHVKKSKELDDNNPNKNDRKDPKTIAALVNEGRFSYPYIPTGIYAEIRSLSNLRFQTQEELTRIKNRIARWFAIYFPEYKDVYGDLMAVSGRMILKEAPLPEDIRILGVNGVNQIWRNAKLRGTGMKRAKILVSAAEHSVGSKEAPEAARIELKNLLNDMDVYVSRMEELLQTIEEKLKTIPYVDKLMEIKGIGLITVSGFIAEVGDIGRFDNPKQLQKLAGYAIVANDSGKHNGESRISYRGRKRLRYVLYEAAISLVGKNAEFKEIHEYYRTRKENPLKKMQSVVAVACKIIRVFYTILTKGVDYDPMKLMSDIRRPQLQAA

SEQ ID NO: 439024 - protein, 355 aa, unidentified
MSQEKYIGMDVHQATISVAVMDGRGKLIMECILETKAGTILGFIRGLQGSLSVTFEEGTSAAWLHDLLKPHITHLVVCDPRKNALLKDGSKSDRIDARKLADLLRLNRLNPVYHGEHGVRTLKELGRSYLSITQDVTRVMSRIKALYRSWAIPCSGTTVYAPRHRAEWLAKIVEPGVRRRAERLHQQLDLLQPVRQQARRDLLLESHKHQGVRLLRQIPAIGPIRAALLVALLQTPDRFRTKRQLWAYSGFALETHDSGEYRSVRGKLRRNRERMTVRGLSDNHNPDLKNLFKGAAISASSRPGPLYDFYAALLEKGMRPTMARLTLARKIATITLTIWKKGVDFDAKELHRQAA

SEQ ID NO: 439025 - protein, 345 aa, unidentified
MRAWPLLPFKFSGIDLHSNNCFVVILDEMDRILYRRRLPNALGAIVAALAPYRDELCGVVVESTYNWYWLVDGLMAAGYHVHLANTAAIKQYDGLKHSGDEADAVHLAHLLRLGILPEGYIGPPAERATRDLSRKRLQLTRCRTQQILSIENILARQPGATMTSNQIKQLEADGVDRLGLPEDVALALKANLAVTKTLTLQIDKLERRLREKVHLRTEYRVLNTAPGIGEILATTIMLETGTVDRFAAVGNFSSYCRCVDSVHTSNNKKKGEGNRKNGNKYLAWAFIEAANFALRFCPEAKRFYERKKAKTNSIVAIKALAHKMARACYHMLRENKPFDVKRCFA

SEQ ID NO: 439026 - protein, 342 aa, unidentified
MNEYDGRQFVGIDLHRRRSVIVRQSESGEQLSAVRIINDPVALGLEIERAGPNPEVVLEATYGWYWAVDTLQAAGARVHLAHPLGVKGFRYRRVKNDVRDAADLADLLRMNRLPEAWIAPPATRELRELVRYRAKIVALRSGLKAQVHAVLAKAGVVIPVSDLFGVGGRQRLAKVPLGAAYVQRVISLLELIDALDAHETRFSVMVADKLGGHAGYQAIQQLPGVGPILGAVFVAEIGDVHRFADPARLCSWAGLTPTHRESDTVVRRGHITKQGSKLVRWAAVEAIQRHPATSKIALDRTRIESRRGKNIAKIAAARKLLTLVYYGLRDGHIRALAPRRAA

SEQ ID NO: 439027 - protein, 478 aa, unidentified
MPTMTKSRARLKTQGAAPVTALASQDRVDVPTAKRRARRRLEPTETPASPVEAKNLSENRAILPPSGRIPDGTPTRSETQLDGAQGRMTMRIVALDLGVKKTCYCELSQGHVVQRMTVSDVCSLEHLLGPNQPPAKVAIEACRDAWFVHDLLVEWGNEVVVIDTTRSKQLGIGQHGRKTDRIDAEVLARALESGRIPKAHVLTPKRRDLRRVLLVRRALVEARAQLVTTARGLVREQGVKIPTCHTSSFVSRVRAQQLPADIAQLIEPMLVLIQLIDTQLVSISERLDALCAQEPTVALLTTTPGVGTVVAACFVAVVDDAKRFHRSHQVESYVGLVPSEDSSGGKRRLGAISKRGNSYLRALLVQAAWSIVRSRDKSNPLYLWVAQLIERRGNRIAVVALARRLVGVLWAMWRDGTVYDTEHLAKQNVRGLRGAIQTLEQQSAALAQAAKKTSAKHSRTTSTATPRRKTKTPAAKAA

SEQ ID NO: 439028 - protein, 409 aa, unidentified
METMYHRCAGLDVHKKSVEVAVRILDNQGRLQTQTRHFGTYTRNLLEMADWLAEQGVTHVAMESTGVFWKPIYNILEGRFSVLLVNARHVKNVPGRKTDIKDCQWLAQLLQCGLLTGSFVPGRDLRQLRDLTRHRAQLVAEKNRVINRIHKVLEDANIKLGSVATDIVGVSGRAMICAIIQGENNPERLAGNARRRLKNKTEELKLALEGHVNDHHRFMLKLLWEQLLSVESLIQQLEDKIASQMGPFQQAVELIDEVPGIDRRVAHTIIAEMGIDMGQFPTDRHLASWAGMCPGNNESAGKRKSGKTTKGSRWLRQALVQAAWAASHVQDSYLAAQYSRVVKKRGKKRALVAVGHSILVIIYQMLKKKVHYQDLGSNYFDMRNHIHLTKYLVKRLEGLGHKVTLECAA

SEQ ID NO: 439029 - protein, 350 aa, unidentified
MIAVNKDIITTIGVDLGKNTFHICAMNDKGTIVLRERLTRASLPKRLANIPRCLIGMEACAGSHHIGRQLATLGHDVRLMPAKYVKPFLKGHKNDYRDAEAIAEAVQRPTMRFVPFKNDEQLDLQALHRVRSRLVGQRTAVINQIRAFLLEHGVAVRQGPGALRRALPSILAQRTDVLSPRIIHLIEDLTDDWRRFDQRIADVTREIEQLAKQDEHCKGLMGVPGIGPMTASAMVAAIGDGAAFSKGRDFAAWLGLVPKQISTGDRTILGGISRRGNRYLRTLFIQGARSVLQRSNGWEKKSFGRWLIAASKRLHKNVLAAALANKLARIAWAVLSHAREYDAAFALKAA

SEQ ID NO: 439030 - protein, 344 aa, unidentified
MRISVLGVDLGKNVCSLVGLDASGAVVLRRRAKRETVVALAAKLSPCIVGMEACCGAHHLGRVFAVHGHEVRLMSPEYVRPYVKAQKNDDRDAEGIAEAVTRPTMRFVELKSQEQLDMQTLHRSRDRLVGERTALINQLRAILLERGIVAPQGKRKLEQFLVELMDEQGGPGLSPRMITLVADARAQWAELDRRIAAFDAEFIRWTKENEDARRLATIPGVGATIASALIAAIGKAETFEHARDLAAWLGLVPRQFTTGGKPKLLGISKRGNKYLRRLLIHGARAALPYVAERDAPLGRWAKALMSRAHPNVAVVAFANKLARIAWAVLRRGEAFAVKGSLMAA

SEQ ID NO: 439031 - protein, 391 aa, unidentified
MIYVGIDVSSEKHNFMIMNHENKFYSKESIEIPNDELGYKKLHKSIQEFCGATKDYKVRIGLESTAFYHITIVAYLTRMKYEVMVINPSLVTDYKKGRKVHSAKNDNLDAIAICKFLKDPETEFIPYTSISYHSEALKSLSRERYRLVKRLSQEKLRIYRLITLIFPEYLKLFTNIYKGCPKEIITKYPSPNKIKTAHISTLSDMLHGGCKTNAEHLHDVASKSIGKSDDYLSFELIKSYSCLDFIQSQIDSYDEKIKEIIDSSNTKIMTIPGIGYTTASLILGEIGDLSKFKSADSIVAYAGIDTNIYESGKNVGKSKYITKKGSSYLRYALYQAAKVCWIFDSQFNSYYLKKKSENKHHYVILGHIMEKLIKVVYSVLKYNKEYYIPQK

SEQ ID NO: 439032 - protein, 394 aa, unidentified
MGIWVGIDIAKHIHWATAIDDLGQVVLDQRVPNDPAALQQLIEALAGLGDEPVIGLDVVGGIAALAQALLGAAGFRLVRVSGLAVNRARQGTTGGEHKSDPRDARVIAEQVRTRRDLRSIEPVSELDLELRLLVGRRGDLQVEQTRRLARLHDLLVGIHPGLERVLDLTTKGGLWLVSRYVTPAEVRAAGRQGLIEHLQGAGGLSARQVQTLADRALAAAAAQHLTVPGERLAASLVRELAAEALACRQRVGELDRDLARLLERHPDAALIRSLPGMGAVLTAEFIAMAGPLTRFRSADALAAAAGLAPVLRQSGKVRFQRRPSGGNKALKRVFYQSAFCSLSSPDSRAFYARKRREGKRHHQALIALARRRIDVLWAMLHTRQPFQPNYPKAA

SEQ ID NO: 439033 - protein, 347 aa, unidentified
MTYNRQHRFYGGVDLHARTMFVHVLDHKGKTVFEQDLPADPEAFLRAIKPYRKDLVVGCECMFAWYWLADLCDDEGIPFALGHALAMKHIHQGKSKSDKIDAGKLAAMLRGGLFPLAYAYPRAKRQTRDLLRRRSFFVRRRSQLIAHIVNTNSQFNLPALTKKLTYAANRSEEIAGRFTDPSTRLMVETDLALIDDYDRQVARLELHLTRTAKVDDPVTFGFLRTVPGIGPILGLILLYEIDDIRRFPEVGNFLSYSRLVRCEHSSAGKAKGSGPKKVGNAHLKWAFSEAACLMIRAVPAVKSWMRRQEAKRGKRKALSVLEAKLGRAVYHLWRKQQAFDLNRFLKG

SEQ ID NO: 439034 - protein, 317 aa, unidentified
MDVLGIDVGKNELHALLLQGERTARKSVSNTPTGHEQLLRWLSNRKAAQVHICLEATGSYGIGVAEFLHDQGHMVSVVNPTQIKAFGRSELVRTKTDAVDAALIARFCRATQPPRWNPPPAHIRTLRALVRRRETLTELMSAERNRLEAATMRPVQRSIRAVIANLRAELKRLEAEIDQHVDQHPDLRAHIDRLDEIPGFGALTAVKVIAETHAFAVCATSKEIVAFAGLNPRLYQSGTIARRGHISRIGNASLRKALYFAALSAKRHAAYFRTFVDRLKAAGKPPKVIITAIMRKLLILAFQLTKTGTHFDPAYGT

SEQ ID NO: 439035 - protein, 321 aa, unidentified
MSDSVTVGIDVSKLTLDVHVSPAQLHQTVSNNESGFAELKTLLSMQQVSLVLLESTGGYEDAVVCFLQSLGYDVSVINPRQARDFARSMGRLAKTDRIDAELLAQLASVIHARPDRERFVKKITDDRRRKLACMVARRRQVVNMISTEQQRKSAASNYSTDSINKVLSFLRSELKSIDADISLHVRSHFADISGLLASFKGIGLATIGVLLGEVPELGRLNRRQISALIGLAPFNRDSGFMRGRRTVWGGRAMVRNALYMPTLSAVRFNPAIRVFYMRLISQGKPRKLAQVAAMRKLLCIINAMLSSGTMFNPALHPSPGA

SEQ ID NO: 439036 - protein, 350 aa, unidentified
MLAELVHHVVGVDPDRDWITLAVVDARTSGVVAEGRFAATGDGYREAVEFVDGHSVETERAWVIEGSAGYGRGLTVMLSHLGEWVIEFDRPTRKTKDGAKSDALDAIRAARETLGRDRLSIPRAHDGMREAIRVHAVTRAAAVRARTGAINELKAIIVTADESIRAPLRGLRTAQQVAACARLRDRSTVSVELRCTRAALRALGRRIEHLDAEVDDHDRALKGLLDQAAPQLLAERGIGYVTAAQFYVAWSHPGRCHSEAAFARLGGTSPVEATSGQNQTRHRLNRGGDRQLNRALYHVAITKQRCDPATKAYIARRTADGKTEREAIRCIKRFIARRVWRLLEHPSIAT

SEQ ID NO: 439037 - protein, 457 aa, unidentified
MNRKRSKPKIDRTMPMVHPNAAAIDVGATMHMAAVRADRTPEPVRSFGTFTTDLRRLVSWFKECGVETVVMESTSVYWIPIFELLDARGFTVFLVNARDAKHVPGHKTDVSDAQWLQRLHSYGLLRASFRPKGQIAELRAYVRQRERLLEYAASHIQHMQKALTEMNLQLHHVVADITGATGMRIIRAMLAGERDAKVLARLRDYRCHASAETIEKALTGSYRAEHLFALEQALALYNAYHEKVSACDERIEAVLKELSIDRKRTSDSLRPSRRRTDQVNGLAFDVRAALFALLGKDITQIDGLGPYLSLKLIAECGDDLSAWPSAKHFTSWLCLAPSNKISGGKVLSSRTRRCGSRAAALLRLAAVTVGRTDTALGAFYRRLSARIGKAKAVTATARKIAVLFYNALRHGMQYVDPGASYYETRYRTRVVENLHRRAKAFGFVLQPMEPTAGHVVS

SEQ ID NO: 439038 - protein, 423 aa, unidentified
MSYKVAGIDVHKKMLAVVVSDVEGDGEHQFERVRYSSSPEHLRSLAEWLIVRQVEEVVMESTAQYWKPVWEALERYWKPSCQEREDAGPMSGTLHLAQAQSNRGRRGRKKDFPDAERLVKRLVADELILSFVPDTEQRLWRTVTRRKYQLTRNHVRLQNQLEGLLEECHIKLSSLVSDLLGASARRMLKALAEGETNPVALAVMADKNLRATQAQLCDALGACTELKPIYRRLLKMFLEELQFIDQQISQLDQELANLLSRHHDAIVHLAEIPGLGVDSAQQIIAEVGAGASTFSSAKQLSSWVGACPGDEESAEVSKSHRSPKGNRHMRRILNQAANAAAKSKGTIFEIVYRRLVSRLGHNQTIGAIAHRLCRLIWIILHRGVRYEERGPSVNAKTRRHRTNRMIRELRNLGYRVEPLVATV

SEQ ID NO: 439039 - protein, 360 aa, unidentified
MNDAITKGTTLTVGLDVGDRYIQVCVLDETGEVVEESRLPTKAAALNRRFAHCDPLRMVLEAGTHSPWLSRLLQEFGHEVLVANPRKLRLIYENDSKSDRVDALYLARVGRLDPVLLAPLTHRRAETQVDLALLRSRNALVRARTRLISHARGTTKSLGSRLPTCASDAFAGKAGPLVPQELTPALAPVLAIIASLSQEIRALDAKIEEMAKERYPETALLSQVPGVGILTATAYVLTVEDPERFPKSRSVGSYLGLRPRQASSGSLEPQLRITKAGDEHLRWLLVTAAHYILGPFGPDSDLRRWGLALAAQGGKRGKKRAVVAVARKLSVLLLRLWRTGEVYEPLHNARLRGELLLAET

SEQ ID NO: 439040 - protein, 374 aa, unidentified
MNFIGIDLHTNKFTCCYRDEKSPVENPKKGSVTKTFDLNPIGLEMFYKTLTRDTHILVEATITTFCFARLIKDQVEEVMIANTYELKQISLARCNTDKIDADKLCRIIKMQVLSGERLVSPVVLPPVEIQDLRSLFTTYRLYKKQNVQLKNRIHSLLKEQLFGFTQEEIFSKKNREHIRKISSRAAMRIQVNQLLDRLERDEVDVEELEKQVLLHAAPFMEQIEILTSMKGVSVFIAIAIIADIIDVSRFKNSKAFTSYLRSAPKVSNSNTSVSIRGTNKKGRKLSATLLTQSLNHVLDASTKLRRWYNNLCEYKKAGLVRTGLRRRVLAEIFQMLKKGEYHYGREPKKHEAKMAQYQRFLEKSKKGENMKEIA

SEQ ID NO: 439041 - protein, 322 aa, unidentified
MAMLSFGGIDVSKDRLDVMVLPEEQCSWVSNDAAGWDKLIEQLCGSSIAAIGIEASGGYERGVMRALLAADLPVRQVNPFKLRQFARASGVLAKNDPLDARMIASFVAIMPTRPAQRPAPAAERLTEMLAVRRQLSAEKVAAENASRLLEDAMLQRLSRRRIARLAADIDMLDERLVEVVATDDALVHRYRLLTSMPGVGAVLACTLLALLPELGHMNRKQVAALVGVAPYAFESGTLKGRRCIWGGRAHVRQVLYMAAMSASNWNPAFKTFHDRLKAAGKLPKVAIVAVMRKMITTLNAMVRDDVIWADRLTGRHSVPTAR

SEQ ID NO: 439042 - protein, 346 aa, unidentified
MKIIGCDFHPSYQQIAVFDTTTGEVMETKLMHGDGEAERFYRELEAPALVGMESVGNSLWFEQLVERLGHPLWIGDAAQIRASYVRKQKTDKRDAGHILKLLLENRFPQIWVPSHQQRDQRQLLIHRHKLVGMRTRIKTELQHVALNQGMQKKRTLWSKGGMTDLKKLSLEGWTSRRRADLLSLLSMLEAQVSELDQAVEEAAKRDPQAQLLMTQPGVGPNTALAFVTTIGDVARFQRGKQVASYLGLIPSERSSGSKRRLGAISKQGNVFLRTLLVEAAQSAVRHDEDFKKEYRHHCHHKPKGVVKVAVARKLAVRLYWMLRTQTPYPQVVHNEGSPSHFVVSES

SEQ ID NO: 439043 - protein, 296 aa, unidentified
MAQNDLVVAGIDVAKDKVDVCVRPLSLKRTFASTAEGRRELASWLRRQKVAKAVMEASGGYEREWAKALRDAKIEVRIVDPKRVRSFAQSAGRLAKNDTIDAEMIAWFAETFDEAPGQAYDAMREQLHQMVNARQALKDMQTKLESQGEHALPATVQQIHARIMKTIAVELVKIEAAISAMVQATPRFTELAEIIESVPGIGRTTSAALIAAMPELGQANNKIVAALLGVAPYDDDSGRRRGERHIKGGRRRTRNVFYMACLGAATQHNPVLKAFYNRLVAKGKQKRWRWSPACAS

SEQ ID NO: 439044 - protein, 337 aa, unidentified
MEYFAGLDVSMEETHVCVLDRDGVITHQSKVASTPANIAQELKKAPACRRVVFETGRMAPMLFHGLAEPGVPVVCVESRQAHQALKSLTTHKTDRNDARGLAHLARTGFFKSVHVKSLPAHAVRSLILARKKLVGQRVTLENQIRGLAVVFGVRLPRALSPAFIEQALRSSDGIAGLSAAMRGLIGAPAAVLAAVAAIDADIKKMVRASDACRRLMTIPGVGQLTALAFAAAIDDPERFRRSRDVGAYLGLVPRRYQSGEVDYTGSISKCGDRRVRTLLYEAANVMLTRCRRPLKLKEWALAIAQRSTMRKARIALARRLAIIMHAMLRQGTELKPA

SEQ ID NO: 439045 - protein, 427 aa, unidentified
MAYKIAGIDVHKRMLHVVVSDVQVDGEYDFTRRVFGSLPEALRSLAAWLVEQQVEEVVMESTAQYWKPIWGTLERYWKPICQTREGALATSGTLHLAQALSNRGRRGRKKDFRDAERLVKRLVAHELVLSFVPNVEQRLWRTVVRTKYQLTRNRVQLQNRLEALLEEAHIKLSSLVSDLLGASARRMLEAIADGETNRETLAALADRGLRATQEQLQDALGVCQELNPVYRRLIKMVLDEVASIDKRIDQLNQEMANLLRAHEDQVQRLAEVPGLGVDSAQQIIAEVGATAATFPSEKHLSSWVGACPGEEESAEVNHSRRSPEGNRHMRRILNQAANAAAKHKGSIFQILYGRYVPRLGHNQTIGIIAHKLCRLVWKILHRGIRYQERGPEVSKASKQKRTRKMIRQLRRLGYRIEPSASQSAITA

SEQ ID NO: 439046 - protein, 412 aa, unidentified
MGLAAEVVAPSSSIRTDGGCPVVQVNDLSRSLAVFDPISTLVVVVEMSKASWLVSGVVPGVERQPLKKLEPDATALLRLIERWRSEAVRAGRPIRRVALAYEAGRDGFWLARWLIARGMEAHVIHSASVAVSRERKRAKTDRLDAVMLMRVFLGWLRGERGHCGMVAIPTMEEEDARRPSRERESLVNERSRIINRMKSALARLGIRGFKPHLRRAPERLASLRTAEGTGLPANIIEELQRDMARLALVREQISSIEKARAKRLERAPDTGPHAMVRLLSRVIGIGIETADMLVREILSRKLRDRRAVARYAGLTGSPDESGLKSREKGLAKAGNARVRRGLIQLAWRFLMFQKDSALARWYRTRTEGPNGARKTTMIVALARKLLIALWRLVTTGEIPDGVELRPAVGAIV

SEQ ID NO: 439047 - protein, 339 aa, unidentified
MNEVSIVGLDIAKKVFQVHGVDAAGVVKVRRSLRRSQVLGWFAKLAPCLIGLEACATSHYWARELRKLGHEVRLIPPAYAKAYVRRNKNDAADAAAICEAVSRPGMRFVAIKTEAQQAIGGVHKVRALLLKQRTMLINHLRGLMAEFGHVVATGPQHVGELLAILADPEEAGLVEPLGGALLGMTEVLRALERRIEAIDRQIVAWGRSNTTYRHLITIPGYGPILASAVAALVTDPTTFRSGRDFSAALGLVPRQEGTGGKVKLGPISKRGNGYLRRLLVNGAMSVLGSKRARQDPWIAKLLASKPRKLAAVAVANKLARIGWAIMMRQEDFHTQPAAA

SEQ ID NO: 439048 - protein, 354 aa, unidentified
MSQTQNAAIAVVGIDIGKNSFHIVGHDERGAIVLRQKWSRGQVEARFANMPPCLVGMEACVGAHHLSRKLNSLGHNARLMPAKYVRPYSRGQKNDFRDAEAIAEAVQRPTMKFVATKTADQLDLQALHRVRERLVSQRTGIINQIRAFLLERGIAVRQGQRFLRAELPRILATPPDVLSPRMVRIIEDLAGDWRRLDERVESLSNEIETIARQDAGCERLMSVPGIGPIISSAMVAAIGAGDVFTKGRDFAAWLGLVPKQISTGDRTILGKLSRRGNRYLRVLFVQAAWVVLIKPKIWERHGLKPWIEAARKRLHHNVLAIALANKLARIAWSVLARGRAFEARKIDQAANQSA

SEQ ID NO: 439049 - protein, 344 aa, unidentified
MRIASIGIDLGKTTFHLVALGEHNKVLVRKKFSRGQLLAYTANLPSSLMGLEACAGSHFVGTVLREQGHQVRLIPAQFVKPYRKSNKNDFLDAEAIAEAVTKENMRFVQIKSQDQLDLQAMHRVRDRLVQRRTALINEIRGFLLERGIVFAAQPIHLRKNLPGVIEDAEQNLTPRLRWLLDRLWQEWKQIDSDVQAISDEIERISDEDVRCRQLRQIPGFGPLVSTATVAAIGNGAAFRRGRDFAAWVGVVPRQYSTGGKARLYGISKRGNIYLRRMLIHGARAVLFRIKHNTGGFGQWVHRLAQRAPRNKVIVAIANKLARIAWAVLSSGKDYRHQPLQLAAA

SEQ ID NO: 439050 - protein, 429 aa, unidentified
MSEDKAIELRVSVDVGYRRHSVAIGLPSGEVLEEFEIEHRPEGFHEFFSRIEKHHKTKSSPVAVAMEGYNGYARPLDSLVRGRGYRLYNLNNLKFARFKEIFPGAAKSDRIDARKGLELFQLQDHLPLAKEVLQEVKGTPAENEILKRLTRRRRRLVNERVRVVNNLQADLQAVCPGLLEITNDASNQWFLNFLLSGESLTQIARLRGRTLLKIPAVGVKTAAIIAGWQKRAHFSEEVEWVGEMIQEDARRCLELDEKVKRLEAKIAGLAATSRIAKIFRSVPGFGAVCSSELAGEIGTIERFGKEGSLALYLGMSTLDNRSGKYQGTKAPKQVNTRAKAAMMIGVDRHRKKVAESQRYYEKKRAEGKKHNQAVRALGRHLTRIIYRLLKEEREYEIRPEKGNTKTKVSPVACVKTQMRSPKISGKKKN

SEQ ID NO: 439051 - protein, 387 aa, unidentified
MSQTVAAPIPAAVDYERTLVLAIEVSNKSWVLAAQVPGLPHTKAKRTIHPEAEALLAAITGYRARAAATGRSIERVIAVYEAGWSGFWLARWLMQHGVEVHVVQPSSVPVDRRKRRAKSDGIDSELLLRTLLAWLRGEPRVCSMVPVPDEADEDARRCVRERTELISERVGLTNRIGAVLATLGVSDYNPLLRNRCRRLAELRTGLGEPLPANAHAKIKRLLARLELVLTQIAELERERDAVVETEASDKAGKMIQQLISLRGIGVQSATVLVREAFVRRFANGKALGSYAGLASSPYSSGGIDREQGIGKAGNRRVRTVMVELAWLWTRYQPSAAQVCWFRERIGSTGRRVRKIMVVALARKLLIALWRFVIDGVLPEGAVLKPAA

SEQ ID NO: 439052 - protein, 391 aa, unidentified
MFYAGIDIAKFKHDFCIFDGDTGELIVPPTTISNDKEGFQVLLDVLNHLNCSQKIKIGLEATGHYGSNLKTFLSKSGYKFIELNPLQVSRFHSQVSLRRSKTDKIDCQVIAKYLMATATKTYQPQVYHLEALKSLTRLRESFVKQRSQALVRLTNILDITFPEFKKFFTAKLRSETAMFILRKYKTPIRIAKWTDEDVQLVHNKSRKLSTSKLLDLKQAAIDTIGNSPKYLIDELPIILNVYESLDEEVSKLEKRIVSIMEEIDSPTASIPGIGLISAATIIGEFGDFSKFPSAEQCIAYAGLDVGISQSGTKCFKGKMVKRGSSHLRYTLINVAQTVSIHCPTFKAYWARKKVQRNKFLRVADSHVAKKLVRVIYYLETHNVKYDESRCK

SEQ ID NO: 439053 - protein, 313 aa, unidentified
MVFVGIDVSKNQLDVHVRSSGEAWSTGNDPKAHATLATKLAALAPSLVVLEATGGYQAAIAATLAASNIRVAVVNPRQVRDFAKATGALAKTDAIDAAVLAHFAESIRPEPRPMPDELTLELQALVTRRRQLIDMRTAESNRLETCRVEPVRRNIQKMIKMLTQQIGKIDDDLDTTIRNSPLWREREDLLSSAIGIGTTTARTLLTQLPELGKLNRREIAALVGVAPFNDDSGKRRGIRTIRGGRADVRAVLYMATIAAVRFNPQIRVVYQRLLAAGKLKKVALIACTRKLLTILNAMMKTNTQWRLDAAKAA

SEQ ID NO: 439054 - protein, 347 aa, unidentified
MYPFYLGIDLHLKRTFMVLMDAKGEVIDKQRISNDDISRYLQEKVPQETYAVLEATRNWPFMYDLLNEHVQKVDLVHAKGVRAIANAAVKTDQIDASTLAHLARMNYIPKAYAASKEMRDLRQLLRHREWMVNQRTKAKNRIHAALAGYNLVSPVTDLFGVAGRAYLDEVMEKELRPAARQVVADHLALLGHLGERIHALEKSISLNERQNHIVKLLMSMPGVGRLIALTILAEIGDISRFHSPKSLCSWAGLTPRVHNSDAVVQHGHITKEGSRYLRTAMVRTATVACRVSSKWCVIHSHLALRCGRRAARVAVARRLLTVIYYMWKRDQPYQDNYGQKQPDALGS

SEQ ID NO: 439055 - protein, 384 aa, unidentified
MQASTVDTPTAFHCGTIFVAIELSQKSWLVTMHCPDKDKISRHKLEGGDHAGLLMLIERMRERAARTLGAVPAVVSCYEAGYDGFWLHRLLMAAGITNHVFDPASIAVDQRARRVKTDRIDGEKMLRTLMAYLRGEPRVVRIVRVPTPEQEDARRASRERGRLTKEQTAHTNRIKALLRLVGMAVGNPRRRDWLTWLVKQRDWQGQAVPPQIMAEIKREHARLMLVREQLDALAQAPADLTSAAAQMAQRSELLLRLKSLGPAFTATLTSEVFYKDFRNRREVASYFGLTPSPWQSGGIDRDQGISKAGNPRARCAAIEMAWLWLRHQPDSKLTQEYRRRTLNASKRIKRVAIVALARKLIVALWRYLTTGLVPEGAMLKTAEV

SEQ ID NO: 439056 - protein, 399 aa, unidentified
MIKDHESVDVFIGVDVGKTNHHAVALDKNGKKLLDKALPQEEAKLRAIIDSLAKHGTLLLVVDQPATIGALPVAVAQDAGILVGYLPGLAMRRIADLHPGEAKTDARDAYIIAEAARSIPHTLRSIAVADEQAAELSMLCGFDDDLAKQATAASNRIRGLLTQIHPALERAIGPHLDHPVMAELLRKYPTPEALRRTGQNRVAAFMTRLAPRAGKRWAEEIFAALDQQSVVVAGTGAAGVVLPQLAAQLAQLRTSRAEIFAQVETLVEAHPLHQLLTSLPAVGVRTAARIITEVVGKEFKTAGHLGSYSGLAPVTWRSGTSIRGDHSSRKGNKILKRAFFLSAFAALKDPVSREYYDRKRAEGKRHNQALIALARRRCDVLFAMLRDGVLYEAPQIKAA

SEQ ID NO: 439057 - protein, 414 aa, unidentified
MQRQVLSRQVASTAADLEHLLAAARRHSRGGEIHVVMEATGMAWLVPTEFFRSAECRVYRVKADKAADFRRYLSKHTKTDEVDAASMARMRFVEPDALEEVHLRDRNRFALKQLIKQREDFLEDAVRYKNRLKDLLDAYIPGLSGLSNRLVEKRKFRSVLEKLLNLPWVQTMGRKRFHRYVGRRDADLKEGDIDRIYDVCIDSLALHDEAHVDFDVLQGQTINYAEAVAFAEAKVDELTQKIEAAYRITDTDQVLKSIPGVGKLTAAYAETYLAPIERFPDEKSVDSWAGVIPLTSASGQVQRKGLRMSKAGPPALRRVLYLAADVARRDDPQLAAVYRREMVDKGNPHTKAVVACMRRLLHPIVRLMRDRKLYELRDPEGDPVDKHTARQMISTELHVPPEIRRRLTQRREAS

SEQ ID NO: 439058 - protein, 470 aa, unidentified
MAFVGIDWADMKHDFCIQAAGSDQHEFDTRDHSPEAIAKWAYSLQDRFGGPIAICLELAKGPLVCALQRFEFLVLFPVHPSTLAKYREAFVPSHAKDDPTDAEMALDILLRHPEKLQPLKLQSTAMRTLATLVEERRSLAGDVNRITNRLVSALKQYYPQVLDWFEHRDTLIFCGFLSRWRTLKHVKRARRSTLESFFHLHNVRRAYLVEERIQGIRAATALTEDESVIRPNQMVLQAKVEQLRALLQSIDHFDAEIDAVGKSLPDYDLFAALQGAGHILAPRLLVAFGEDRDRYTNAAQIQSYSGVAPVVERSGNKCWVHWRIACPTFLRQTFVEWVGSTIPRSFWAGAYYQQQRQKGCSHRVAVRALAFKWIRIIYRCWKTRTLYDESVYLKALKLRGSPLLANVSESAKNDLTECLRPRSGYSKLGEIGHTLRVCCNTSHKPFITESFRIAWISGYGNFLARRQAFP

SEQ ID NO: 439059 - protein, 387 aa, unidentified
MPQPNDLSRSLVALEQDITLIAVIEMSQSSWLVAGIVPGIERHPLKKLEPDEAALLRLLWRWRDEAAQKGRTIMRIVVAFEAGRDGFWLARWLRARGVEAYVIHSTSIAVSREHRRAKTDRLDTELLKRAFLGWLRSEQDHCSMAALPTLEEEDAKRPTREHETLVGERTRIVNRMKGTLARLGIRGFKPTLRKAPERLETLRTPESAALPPNTRAELQRDMARLHFVIDQLREIERTRLERLEQRPAEGQNEMVRLVARVVGVGIETADMLVHEVLSRNLRDRRAVARYAGLTGSPDESGSKRREKGLAKAGNARVRRGMIQLAWRFLLHQQNSALAQWYRARTAEARGGMRKTMIVALARKLLVALWSFVRTGEVPSGIVLRPIA

SEQ ID NO: 439060 - protein, 425 aa, unidentified
MHTKQYSKQLEKRKRIGDHTLVIGMDIGSEFNAACFMDKEGNVLGRYPTIYNSRKGFDYFQAMVMKTRRKYKLDDILIGMEPTGHYWRKIAFFAKEQGYDVRFVRTTAVKHQRELDESSSARSDIRDAHTIGNIVREGKYIDTVIEESVFRQLRTLAHARERILRYIVGSTHGLQAVLNDYFPELRKLFWSMKAKGLWTLLETYPFPEDVRHAGLAAVTALLSKGTGKKRHIQEQAAHIYQAAVESVGLTAITKADRARLTMYLEEIKRSDARRKLLEHEMTELLEEIPLAQYILSLPGMGKVGCAVFLGELGNPDYFKNPRQIIKFAGYDPKENDSGLRVGRKIISKKGRWLLRKCLFFMVLRLVQRSSFFKAYYEHKKKGCDRPLQKTEALCAVILKLIRVLFALMRDRRMFTEELPRCEKAA

SEQ ID NO: 439061 - protein, 326 aa, unidentified
MQGKEASEQETKVQSNVGIDISKCWLDAHVLPGNERLRVANDCAGIRRLKRWLSHYRIALVAIEATGKWHRHLHRSLVASAIPVAIVDPYRVRMFAKAQGILAKTDQLDARVLALFAAMMAPPVRPVAPQTMAELAELVVARGSAVEAQTALKNQFGTAESAFLKRQLDRRISRAGKDIAALDREILKRIKADASLARRYAVLTSIPSFGFAVAATLIACLAEIGSTTAKQIGMLAGLAPIADQSGDRQGIRVIWGGRPAVRRVLYLAALSASRFNADMKAFYKRLIDNGKPSKVALIAVARKLVVMANTLVSEDRTWQPRAPIQP

SEQ ID NO: 439062 - protein, 317 aa, unidentified
MCKFIGIDISKQTFDVSFLEDEKWQHQVLENKPLGFKKISKILNSEDWVVMEASGSYYLPLAEYLTEKGFKVSVVNPLVIKRFSQTNLYRAKTDKKDAKTIAEYAEKYELKKWNPESENAKKLRQLYTRIEMLRKQVHQNKRQLEAFSASGFLDKILKNEINSSVRFLENKIKKLENEMNRISLEEYSETMENLQSIPGVGKQTAMMMCLITNNFEKFEHYKQLIAFVGFSPRIYQSGKSVKGKGHICKMGKSQSRKLLYLCSWSAKRWNKTCKEMYQRLKEKGKPERVIKIAIANKLIKQIFAIGKSKEKYQPNFC

SEQ ID NO: 439063 - protein, 397 aa, unidentified
MIFMKGDFKMIFVGIDIAKTNHFASAIDSDGVVLLEPFEFFNDNDGFSMLYFKLSKFRKDSIIIGLESTAHYSNNLLFFLVSKGYNVCLINPIQTSCLRKNNIRKAKTDKVDTFTIAKVVALMKQPRFIKFYDIELLQLKSLGRFRQNLIKQRTRIKIQLTAHMDQAFPEFQYFFKSGLHQKATYALLKEAPSAKEIASMHLTHLKNLLTSNSKGHFKKDLALELRVLAQKSVGIYDRALSIKVIQSIKQIELLDSQICEIESEIKDIVSSLDSVIMTIPGISSINGGMILGEIGDIHRFSHPSKLLAFAGLDPSVYQSGNFKAKNTRMSKRGSKALRYALINSAHNVVRNNQTFKTYYDSKIAQGRSHYNALGHCAGKLVRIIYKMLTDDVEFNLD

SEQ ID NO: 439064 - protein, 416 aa, unidentified
MKSPTNQPFTAFVGIDWADKKHDVCVQPAGSEMREFSVIPHKVEMINDWAQSLIQRFGSPIAVAVELSKGPIVYALQKFDCFVIYPINPLTLAKYRQAFTPSRAKDDPTDAEFAVDILLRHPDRFRPLKPQSMEMRALATLVEQRRMMVDEKKRITNRLRTALKQYYPQVLDWFDHIDTPIFCDFIRQWPTLVQVKRARKNTLETFFHQHNMRFAQVLADRLDAIKTATPLTMDDAIIIPYRLQVQVLIEQLSVTLEGIKQFDQTTESIASRHPDFPLFDALPGAGPALAPRLLVAFGEQRDRYLNAADLQKYAGIAPVTERSGKKHWVHWRWQCPTFLRQTFTEWAAQTINKSFWAGQYYYQQRAKGCSYQAAVRSLAFKWIRIIFRCWQTGKPYNESTYLKALEHRGSPLLKQA

SEQ ID NO: 439065 - protein, 413 aa, unidentified
MKLFCGIDWAEDHHDVAVVDGDGLLVAKRRIDDSSEGFGELLGLLAEAGDTPADPIPVAIETSRGLLVAALRGSGRNVYAINPMAVARYRDRHSMARKKSDHVDAMTLANILRTDAHAHRTLPADSDLARAITVFARCPGRDLAAHRGNPRTACTPARVLPGFSQRIRRHRSHEPRHGGRTRDTRDRTDACAGCAIDQGPHRYRIAACGRQRRLEDTATRIQNALGAPQLRQPPLVEQAMGCQAGALLATLNTECVNADKLNESAAEAFRNHPDYAVITSFPGLGEATGARVLAEIGDDRGRFADARRLKSFAGAAPVTRASGRTISITHRHVKNNRLAAVGFVWAFAAIPRPGPIKDHYNRRRTHGDRHAAALRNVFNRLLGQLYHCLHTGHTYDASKAFPGSVHDAEPAAA

SEQ ID NO: 439066 - protein, 339 aa, unidentified
MKLYTGLDLHSSNSYLGIIDETGKRVYKQKLPNDRERIIAALNPYRNDIVGVVVESTYNWYWLVDLLMEAGYQAHLANPAAIKKYTGLKYADDQHDAFWLAEMLRLGILPEGYIYPKEDRPVRDLLRKRMHLVRLRTSLIVSLQNILTRNNGFKLKTSDVKALTEDRVAPYLAGNEDLAMAGKVSKESIDFLTRQIKKIEAVVENRIELKPPYAKLLSVFGIGKILGLTIMLETGPITRFPKVGNYVSYCRKVSSKWLSNDKVKGKGNKKSGNKYLAWAYSEAAEHARRSYTQARTYYNRKMQKTNFMAAHNALAHKLARASYYVMRDEVLFMPEKIFV

SEQ ID NO: 439067 - protein, 351 aa, unidentified
MQRFIGIDVHGQSCTLVVMGPSGRRLGEHVVETSAKALIERIRSIPGDRYVCMEEGTQSEWLYEVLESHVKQIVVTQPLKRAGSKSDAIDAWALADMLRRDALERTVFKSPKTSTALRQAARGYLVLRRDMVRAKCRLNALYRSRGHNPKAEIYDPDTRNSWLAKLPPAYRTLGELLSEQLDGLCQSHQAAESWLLKEAERIPVARRLATAPGIGPIRAALLVAIVVTPTRFRTSRQFWSYSGLAIVTRSSSDWVRDGRGWTRKLTAQTRGLNRNRQPELKAIFKGAATTVIQQMPNHPLHKDFQRMTDAGIKPNLAKLTLARRIAAATLAMWKHQEDYDPSKQTRAPQSQ

SEQ ID NO: 439068 - protein, 439 aa, unidentified
MRIPSSVPMPKEVPIEQEIVAYVGLDWADQQHVICWQAADSAAVQSAVVQQRPEELQAWVAELRQRFPQGLVAIALEQSRGAVIAALMHFDFLRLYPINPKSLARYREAFASSGAKDDPDDAALLLELLVKHRDRLTPWVPDDALSRELALRVEHRRQLVNLQTKLIQQLRSHLKVYFPQALDWVGELDSLQACDFLQRWPTLAAVQKARPSQLEKFYHQHHCRRPQLIQQRLEQIRQAQPLTQDTAIVPAYSQMVLALVAQLRALIPTLQQWQQQISQLFAQQPDAALFASFPTAGPVFAPRLQAAFGSRRDRFGSAAEVLQFSGVAPVTKRSGKSRQVQRRWARPKFLHQSFVEFTGLSIPHCCWARALYQQLRARGHRHWAAIRVVAYKWIRILFRCWQDRVPYDEQKYLKSLERRNPTLWAAIQQLPAQPSRKEV

SEQ ID NO: 439069 - protein, 355 aa, unidentified
MNSEKYIGLDVHQATISVAVLDHTGKLVMECVLETKAATILEFFAGLRGTLSVTFEEGTSAAWLYDLLKPHVARLVVCNPRKNALLKAGNKSDRIDARKLAELLRGSNLKSVYHGETGVRTLRELARSYITTTRDLTRVMSRLKAVYRSWAIPCAGRDVYYTRHRKEWLGKIKHAGVRRRAEHLYQHLDILKQLRQQVRRELLAESRKYQITSQLRQMPCIGPIRSALLVALIQTPHRFRTKRQLWAYSGLALETRISAEYCYVEGQLRRSKKLLSIRGLNKDHNHDLKGLFKAAAITASARPGPLQDFYQASLAKGIKPPMARLTLARKIAAITLTLWKKGEDFDAEKLKLQAA

SEQ ID NO: 439070 - protein, 365 aa, unidentified
MTIVAHTHPFVIGVDTHARTHALSILAAPTGQAVDDRQFPTTAAGIARAIEWVARRTGGDLAALWVVEGAATFGAQLAKAVAAKGYQVVEAARMSVKANRGQGKSDPLDAHRIAAAVLPLATDRLRHPRKDDGARAALRVLTAARDHMTSERTATVNALLALLRSVDLGIDARRPLAGSQVLEVSRWRARAEDVGAATARAEAVRLARRVVALDDDLSQNTRTTTSLLQHSPARVLLDMPGVGPVTAAVATAAWSHHGRLRDEAAFAALAEVNPIPASSGNTVRHRLNRGGDRRLNRALHMAVVVRMRWDPQTKAYVARRTAEGRTTKEIRRCLKRYLARQIYRALTAASRTPDPTPTPAPTCRT

SEQ ID NO: 439071 - protein, 402 aa, unidentified
MSDPQKRYVGLDVHKQYVMVGAVNAAHEVVLPPRKVSLVEFEGWAKKHLRSTDEVVLEATTNAWYLYDLLEPWVERVVVCHPPQVKLIAAALVKTDKKDTMTLARLLAVGMVPAVWVPPEHVRELRALISHRQRLISQQTRIKNRLHSLLHRHHLVPPGGRLFAAANRAWWLELSLSSPEKLRLRQDLILLDQLQPLISEVETELNRLSLAEPWAAQTPYLLQLPGIGLITAMTILSAIGDIKRFPSAKKLVGYAGLGAKVHSSGQTHRTGGITKQGRKELRHVLIEAAWTAVRYDQHWQEQFEHLAYRIGREKAIVAIARKLLVVIWHVLAAQVADRKAQPQQVARYFIHWGRQLRVKSTMGLKASEFARQMLDRVALGQELERVPYGCVTYCLPPSTLAQ

SEQ ID NO: 439072 - protein, 354 aa, unidentified
MLSVGLDLHKKYSQLEVIDEAGVRRAGARLPNELDQVAGFFRSLGEPCRVVLEAGWNWGSMYDWLERIENVVEVQLAHPYGVRAIAAAQVKTDRIDARMLGQLLRVGLIPQAYIPGRETRQLREAVRQRLFLVRVRTMLKNRIHALLDRHHVVPPPASDMFGKRGRNYLSKVELAGCAQDLLRQDLRLLELLNLEIRQAEALLAQTLKGDRRVDLLLTIPGLGRLLATVVALEIDRIERFARPPKLVAYAGLVPSTYSSGGKTSHGGLMKMSNKWLRWALVEAAWIAVRHDPYFRHQFALRCSHKGPKTAIIAVARRLAEVIWYVLTEDRPYQVRQPLEKRREYALTPAALRKD

SEQ ID NO: 439073 - protein, 322 aa, unidentified
MFVGIDVSKNTLDAALLKEEGKPRHKVFANSAAGHRQLLAWLIDNSAAAVHACLEATGTWADGVALALHEAGHQVSLVNPALIRAFGQSQLKRTKTDKADAQLIAHFCRMHQPPLWTPPAPEIRELQALVRRLQSLEEMRLMEENRLTSGVTSAEVQASLEEHIAYLQAQIDKTQRQIKDHIDGHPELKDKARLLDSIPGIGETTAALLLAELGDLTQFSNARQVAAFAGLVPRIRESGSSVRGRARLSKVGSSRLRKSLYFPAITALRFNPLIKALGVRLSAQGKSKMLIIGAAMRKLLHLAYGVLKSGKPFDPNFVPQTP

SEQ ID NO: 439074 - protein, 308 aa, unidentified
MGIDVAKATLDIVVRPSGERWQVGNDADGCAALTARLVALGPEVIVLEATGGYEAAPVAALAVAGLPVVVVNPRQVHDFAKASGQLAKTDAISAAVLAHFGAVMRPPVRPLPDGLTQELQHWLARRRQVVEMLTAEQNRLQTAPPPIRPTIKAHLGWLRRQLKSVERRLREQIQRSPVWREHEQLLVSVPGVGPVLATTLLAELPELGRLNRKEIAALVGVAPLNRDSGTLRGKRSVWGGRAPVRAVLYMAALVGTRRNPILRAFYGRLLAAGKPKKVALTACMRKLLTILNAIVRHRVAWKPADVCA

SEQ ID NO: 439075 - protein, 336 aa, unidentified
MQVTVAGLDISKQVFQLHGVSAEGKVALRKRLRRSQMAAFMAQLPPCLIGIEAGAGAHYWARVLQQSGHEVKLISPQYVKPYVKGNKNDSNDAEAICEAVSRPNMRFVAVKSVEQQDLQMLHRVRERCIKARTALANQIRGLLSEYGIVLPIGIHRLRQALPGLLDAEALTPLGREVFSQLYEQLVALDQQVKSCEQRITVWFKTNPTCQRLAQVEGSGPLTATAFVAAIANPAVFKNGRQVSAWLGLVPRQASTGGKTVLLGISKRGDCYLRSLLIHGARAVMRYAKQKDVERYRWVRQVMQRRGVNRATVALANKNARRLWALMRGPSEARHAA

SEQ ID NO: 439076 - protein, 375 aa, unidentified
MSNLSEAFVGLDTSKLRNSVAIAEGGRTGEVRFLGEIDNTPAAVRKLVKKLATKYDRLSFCYEAGPTGYGAYRQITGLGHDCIVAAPSLIPKKPGDRVKTNRRDAVTLAKLHRAGELTAVWVPDCGHEAMREVTRARETAMLDLRRKRQQVSAFLLRQGLHYAAEKKTWTKAHMDWLAGQKLEHVEQRIVFEEMMLAVREAQARLERLADAIRVAVPEWSLAEGVTALMAMRGMDLVAAATFLAEIGDLSRFQGPRELMAYLGLVPSEASTGDTIKRGPITKTGNRRARRMLVECSWSYRHPPRVGRTKQEKVAAAPQAVREIAWKAQCRLHNRYRSLIRRGKLKTVANTAVARELAGFLWAVNRAITKTGAAAG

SEQ ID NO: 439077 - protein, 403 aa, unidentified
MHQERTVRAAYSIFSPSTRSVVSWRRCRSGWTPIVSDGVDAPTQRHLRARMVVLEPLQGRASMEKVSIIGLDLAKSIIQVHAASVDGSVLFRRKISSKKLLAFLSGLDPCIVAMEACAGSHHWGREIAKFGHRVKLIAPIYVKPFVKRQKNDAADAEEICEAAMRPTMRFVAVKSEEKQAAATVFKVRDLLVRQKTQIINALRGLMAEFGITVPQGPSHVGILISHVEDDGSSLTEAARAPCLALVLTLRALVDKVRELDLEIGRRARQDDVAKRLMSILGIGPVIATALEALAPPAETFTRGRDFSAWMGLTPRQHSSGGKPRLGKTSKMGQRDLRRLLIIGASAVVRWASRRGALDGSWLSRMIGKKPPMLITVALANRMGRIAWALMTNGGRYEEQRLAA

SEQ ID NO: 439078 - protein, 343 aa, unidentified
MQIRSVGIDLGKTTFHLVALGASGKVLVKKKFTQKQLLACTANMQTSLIGLEACSGAHFLGRALKQQGHDVRLIAAQFVKPFVKSNKNDFVDAEAIAEAVERKNMRFVPIKTDDQLDLQAMHRIRDRLVSRRTAVINQIRAFLLERGMVFAQKPAKLKAAMADVLENADNTLTPMMRNLIGLLWDEWKTVEQQIDELTDKLEQIAESDAGCCRIRQIPGIGPIVATAIVAAIGNGAAFRKGRDFAAWLGLVPRQYSTGGKAKLLGISKRGNIYLRKVLIHGARAAAMRIKRDRFPIGAWMNALEARAPRNVLVVAMANKLARVAWAVLSTGEAYRPGQIVAAA

SEQ ID NO: 439079 - protein, 459 aa, unidentified
MSVGDDVMISVDPHKASNTLAVMDPATKTVIARHRFANSAIGYRRLREFAGGWTHRRWAVEGCHGAGRSLAQRLAGDGEIVLDVPAKLAARVRVYSQGHGRKSDADDAISIGLAALNSTRVAVVRRDDTLVSLRLLCDRRDELGALRTQAVCRLHRLLCELTPGGTHRGLRASRAEQLLAKLRPVDPVDVVRCQLAHQHLDDIRALDAKMTAVRAQIAALVDGTGTRLTELYGIGPVIAGRILAEVETIDRFPSKDHFASYDGTAPIDASSGEQVRHRLSRAGNRRLNHALHMMAVTQIRQPETIGRRYYERKRLEGKTPKEVMRCLKRRLSDLVYWQLVADRRATITQCGSATTPTRTRPTSTSATTPVPCTAPPRRPPHPTVSTGSSHSTGKTAASSASKSSTPAVGSPKTSSTKQKTRAEATRKPRTNSAAVPDRRPTSAAAAGVKAGAATRRARP

SEQ ID NO: 439080 - protein, 347 aa, unidentified
MNFYNNTHPYYCGIDLHARTLYVCIIDQDGNICVHKEIAADPEKLLKILEPFIGNIVVGVECMHCWYWVADYCEEIGVDFILGHALYMKAIHGGKAKNDRIDSFKIAKLMRGGNFPLAYTYPKKMRATRDLLRRRTKIVRHGANLKAHVSNTTSQYNLPPNKVNLKNVCAREQLRSAFPDPVVQRTVDLDMAILDAYAKELSKVEWFIGQQAKQHNPVHLQLLKTVHGIGVILSLTILYEIGNINRFDSVQNFASYSRLVKCKAESAGKIYGTQGNKIGNAHLKWAFSEAAVLHLRGNDKAKKYLVNLQKRMSKAKALSVMAHKLGRCVYFMLINETVFDENKFLKS

SEQ ID NO: 439081 - protein, 356 aa, unidentified
MSKYIGFDIDCKKTVACVVENGKKDIYQTLGPDVESMKGFLKEQKRAGHRVELAFEISGQAGFIYDSLAGCVDEIKVANPSKMTWIYRTAKKNDRIDARKMAVLMSIGELPTVYMPSREVRQWRETILHRKKIVCKVVQVKNRIRATLKSQGHIKPGSKGGWWKKSNRLWMREICEQSIGLCDLWYMHLCNLLDELELLESQLKRVTKYLDGYLAGQAGGGLLMSIPGVGPRTSEAVLAYTDKIERFGNYKQYCSYFGLTPKLDESGSLRRLGHISKQGPSVVRWVLCESSWKVIRHSKGLRAFYERVMGEQKGRKKIAIVAVARKLLSIMRAMMLTGELFNEELVNKIDKLTEAA

SEQ ID NO: 439082 - protein, 382 aa, unidentified
MDTAATCTFEYTLERVLYMAIELDNNRWKLGFTTGFGQRPRERDVPARGTAALQREIRAALRRFHLPDDCPVLSCYEAGREGFWLHRYLIHHGINSLIVDAGSMESRKRRRRAKTDRIDMEKLLRMLIRYHAGDEDIWSVIRIPSTGAEDRRHLHRDRWTLSSERNKHSNRIKGLLASQGISLSVNGDLPEKLGQVRTWNGSLLPPGLKDRLLREHERFQMVEQQMKAIEQEQRQAIRNPDHPSITMVRDLMRLKSIHIHTAWPLAMELFSWRQFQNSREIGALVGLEPVTHQSGEMSREKGLSKCGNARLRSLAVEFAWQWLIHQPDSELSLWYEERFGKGSSRVRKIGIVALARKLLIALWRYLETGEIPKGAVLKAVSV

SEQ ID NO: 439083 - protein, 388 aa, unidentified
MPRQLNDLSRSLVALEQDATLIAVIEMGQSSWLVAGIVPGIERQPLKKLAPDQHAPLQLLHRWQKEANEAGQVIKRITVAYEAGRDGFWLARWLRAREIEAYVIHPSSVPVSREHRRAKTDRLDTELLKRAFLGWLRGEPKHCSMAAIPTIADEDARRPSRERENLVKEATRLVNRMKANLARLGIRGFRPHLARAARQLQTLQTPEGAALPANTLAELRRDMDRLRFAKQQIKQIEAARIERLERESAEQVHAMVRLLGRVVGVGVETADMLVHEVFARRLRDRRAVARYAGLTGAPDESGTKRRERGLAKAGNARVRRGMIQLAWRHLLHQRDSALAQWYRARTADARSRTRKIMIVALARKLLIALWRLLTTGEAPAGLLIRPAA

SEQ ID NO: 439084 - protein, 317 aa, unidentified
MNTSKIQIPVNIGVDVGKANLDIALHPSGEFYSIPNSEAHIRRFVKILKGYSIERIVVEATGRYEHALVQACDQASLPIIVVNPTSVRRYAQAIGVLAKTDRIDAQIIAKYAATLKPDFKPIPDKTSQKIKDLLTRRSQLLEMSTMEKNRLQILPKTLHRSIKSLLRMLQNQIKTITEQIEQEVAKVDHWRIKAEILTSVPGVGKVLTYTLLSELPELGSLNRKEIAALVGVAPINRDSGKLNGKRRIRGGRHRVRTVMFMAMLSSIQCNPVFKRFYEHLKAQGKIPKVALIACMRKMIVVLNTMVKNQEPWRENMA

SEQ ID NO: 439085 - protein, 402 aa, unidentified
MNAVGIDVSKGKSMVAIMRPFGEIVSTPFEIKHTASDIHSLVELINSVEGESRIVMEHTGRYYEVLAHQLSEANLFVSAINPKLIKDFDNDSLRKVKSDKADAVKIARYALDKWQNLKQYNVMDELRNQLKTMNRQFGFYMKHKTAMKNNLIGILDQTYPGVNTYFDSPARSDGSQKWVDFASTYWHVDCVRKVSLNAFIDHYQNWCKRKKYNFSQSKAEEIYGKAKELVPVLPKNAITKLIIKQAVDQLNSASTTVESLRTLMNETASKLPEYPVVMAMKGVGTSLGSQLMAEIGDVSRFTHKSAITAFAGVDPGVNESGSYEQKSVPTSKRGSSDLRKTLFQVMDVLIKTHPQDDPVYQFLDKKRAQGKPYYVYMTAGANKFLRIYYGRVKEYLSSLPES

SEQ ID NO: 439086 - protein, 375 aa, unidentified
MHATVRSQGSVKESVLFVAFELAKRQWKLALSSGFGVTAMVRTVSAGDWAAVEAALAAARRRFALAATVPVVSCYEAGRDGFWIHRALAARGIANRVVDSSSIDVKRRARRMKTDRIDAIKLVQMLVRVWAGEAGVWSEVRVPTVAAEAARHVSRERTALTQERTRVVNQLRSWLATMGAALPATRAEGWWTTVRDWAGTALPEALQERLARAEARLRLIAEQIAALETAQRQAVRTAPATSAVRRLVQLKGIATTGATVLVDEGLIWRDFTNRRQLGGLLGFAPLKYESGETSRDQGVSRAGNDRLQATLVQLAWSWVHWQPHSGLTRWYVARFGTGKRARKVGIVALARKLFIALWRWATAGILPEGAVVKAA

SEQ ID NO: 439087 - protein, 425 aa, unidentified
MDVHKDIIVATVGITDPATLVTSYFQESFGTFNSELDRMCGWLASHNCSDTCMESTGKYWIPVFNILEKRGFNVCLTHPKYVKAIKGKKTDKKDSKWICDLYKLDMVKRSFIPPKPVRELREIARYYSKLVGMNSSESCRYQNCLTVSNLGIGSIFTDVNGKSAQRVMNAVLESESPNDPESLSDDDILKLVHKSCKKKDKLLDAIRGCRIEPDQRFKMSEVTEHKKELDRHIANCFAEMFKRALPYFDQFLHITEIPGISVLSAILIISEIGFDMTVWENAGQLCNWAGLVPGSNESASKKKSTRVTKAGQYLKPLLVQCALAAIKNPDGYFGIKYRRIMKRRGHKKAIIAIARMILRCIYNMILTGESFNPSDFEEVTNPKPRKPRNYTIESAIDFLKSSGADIDTIIASLKEPPRDAAPAAG

SEQ ID NO: 439088 - protein, 404 aa, unidentified
MNNVAGVDVSKGKSMVSVLRPFGEVVAKPFSVGHTGSELKELADYLKSLDGETRVVMEHTGRYYEPVARFLHEEGIFVSTVNPKLIKDYGNNTLRKVKTDKADARKIARYGLDNWVELRQHTPMDTIRMQLKTLNRQQSLYSKTKTMMKNNLIALLDQTYPGVNDLFDSPVREDGSQKWVDFATTFWHVDCVRSMDLAAFTERYRKWCKRHGYNFSQSRAIEIHTEAQELIAMLPKDALTKTMIRQAIDALNAVSTSLERLKAEMRTLAAQLPEYPVVMAMRGVGDSLGPQLMAELGDVTRFTHRNAITAFAGVDPGADQSGNHDAKSNRTSKSGPPELRKALFLVMDCLLKTQPQDDPVYRFMDKKRAEGKPYLVYMTAGANKFLRIYYGRIREYLVSLDNAD

SEQ ID NO: 439089 - protein, 342 aa, unidentified
MQITTIGLDIAKNVFQIHGIDAAEKVVVRKQLRRGQVLAFFKALAPCLVGMEACATAHYWARELTKLGHQVRLMPAKDVKAYVKRNKNDAADAEAICEAVRRPTMRFVQVKSAEQQSQLMLHRTRDLLIRQRTQVINALRAHLGELGITAAQGQAGLRELLAIIAGSADERLPAEAHASLIVLAAELQAMQTLIASIEKRIIAHHRLDEASKRLRSIPGIGLVGATAIAATITDPRAFRSGRDLAAWIGLVPRQDSTGGKQKLGPISKQGDRYLRRILVVGAHAVLKLARQKPEKYPWLTQLLARKPFKIVAVALANKMARIAWALLVKGGPYRARALVAAA

SEQ ID NO: 439090 - protein, 417 aa, unidentified
MDTIVSRVCGLDVHEASVVACVLIDGGKKRGSKKVRTFTAMRSDIIALRKWLLEEGVTQVVMEGTGIYWRPVYETLEDAFDVWVVNARHVKNVPGRKSDVIDAEWLAKLLSSGLLRKSFVPEMDIRELRDLTRYRRTLVQEQTTQKNRILKVIETAGIKLAAVASDAFGKSGMAMLRAIAEGTKTTDEIAELAQAALRRKLPALRLALDCSLRPHHQMMLRDQLARLDGLAAEIEKYERELEQRVQPYEQWLSLLCTIPGIQRTAAIEIFGEVGRDLASFPEPQNFAAWAGTAPGMSKTAGKNKSGRRRRGNPYLCSILVECALAATRKKGTYIQDKYRRLKARRPKLCALFAIANKLAHGVYRVIANNTPYRELGATYLDQRNGKRTARQLLKRLASLGLTRDELLTMLPATAPAA

SEQ ID NO: 439091 - protein, 364 aa, unidentified
MNEFTHIGLDVHKDTIAVAVLRPGTTDCDERVIPNTPEALRRLLAHYPDPSLLSTCYEAGPTGYDTHRLITSLGIACDVIAPSLIPKRSGVRVKTDRIDARNLARLHRAGELVAVRIPTPAEEAVRDLVRAREEIKSDRRIARQRIRSFLLRYGKRYPKAGARWSTRFEVWMRALRFEEPMSQAAFEHLVGAYFVRDSQLSAVDRQIEQLAMLEPLAGPVALLRAFRGIDTLTAVTILTETCDFRRFASASPYMAFTGLVPSEHSSGASRHQGSITKTGNVHIRRVLVEAAWAYRYAPAVRGKLKCRLEGQPPEVVAYSWAAQCRLHATYRKLAAKKGANKAVVAAARELSGFVWGAMTGNMGA

SEQ ID NO: 439092 - protein, 405 aa, unidentified
MWFAGVDWADTHHDVLVIDEASRQVGSCHVAHSVEGLRQLQDFLLSICGPERKEEMACIIETSHGLLIAALLEAGYPVYPVNPKTVDRHRRASGAKTDQIDAYLLAKTGRADFADLHRLTPESEKIAELKGLTRDQESLIQMQTRLVNQLTACLKAYYPVALDLTASLQQRSALLFLQTYPTLEAAQTASVEQIRQVLKSAGHTTASKVAPKLFAQLHQPSLRADAVITRTKSRLAVALIVQLLPLIEQIAAYDKEIEQLFLSHEDNGVFSSLPGAGKRLAPRLLAEIGDDPARYETAASLQALGGTSPVLFQSGNSSKPHRRLGCIKPLRNALHQFARPRTLQEEWALAYYERKRARCGKSHSVAVRALSNIWARIIFAMRKSHEPYDRTTFEKARHLHAPKAA

SEQ ID NO: 439093 - protein, 332 aa, unidentified
MYYCIGIDVSKATLNVHIAKNSQDLQIDNTLAAVKKLYTKLKKVYKKEIEELVFVYEPTGSYSELLRKFCADKSIRCFIINPKQFSNYVKALGVEVKNDEVDAKVLAQSIVLAKAHQIKIPVYDTDVEQIKELMSFYKFTCKQTAQLKGHLESLTSKDGDKFSIKELKHSIKASKEREKRIIEQVHQLIQSNAQYKKAYENITSIIGVGQIGGIALLHLFLKYPEANQRQITSLTGLNPVYRQSGSSLQSSHKISKSGSIFYRGALFMGVMTAIRYDENFKAFYDRLKANGKHTTQVQIAVMRKMILVAHSLYKNDTRYIKKETKMEDTPMD

SEQ ID NO: 439094 - protein, 322 aa, unidentified
MRDHNVLGIDVAKDNLVMFDSGRNEIISVANAEKAIRKSIKSYGWDQKNYLVALESTGDYSFLPMQIFVRAGFQVKLLNPIVTKKFIKATIRGKKTDVSDAKIIASVAKEEGQIITEKELAVTKKTLLRLENNLTHMRSNLKKMRNSLQSKAENGVRLKGAIKAVDALVKSMEKAKESIWKLSQEEEGDRQEEIISSHIGCGEKLSAIISAEAGDIRRFPSAKQFKAYAGIDPKVYQSGTKTVMGRMTKRGNSFLRQALFLAAFTASIHDPELKVYYQKKREEGKVHTHALCTVTRKLCERIFATVTQDRLYEPRYPQGGKT

SEQ ID NO: 439095 - protein, 342 aa, unidentified
MKDTIIGVDLAKRVFQLHGATMTGHVTFRKKLTREQFRRFMAERPSCLVVLEACGSASYWAREMAKLGHDAKLIAPQYVKPFVKRQKNDAADAEAIVIAARQPEMRFVSPKTEDQQARAMLFRGRERLVHQRTELVNALRAMLYEYGHVFPAGIGHLKRIEALIEDPTCDLPALITAECHDLLAQIAEKTDRIDAKTKALKELAAGTDTARRLQTMPGVGPLTALAVEAFAPDMAQFKRGRDFAAWLGLVPRQHSSGGKERLGRISKAGQTDIRRLLIIGAMTRIMGRARHKIPPDSWLGRMLARKPKMLVAIALANKMARQIWAILTKNEDYRDPVLATAA

SEQ ID NO: 439096 - protein, 383 aa, unidentified
MTYSAIKSSVSFLKQASNRNLGSRPIIKVLIVFRSVNGYIINCNKTNLMETVYFLGIDISKKKFDAAFTQDGSNMYELVVPNNATQIRVAFRELRKKFGFSYDQLIVCLEHTGIYCQPVLDFAVAHDIKVCLEPALQIKQSQGMVRGKSDRIDAKRIAAYAFKNRGQLKFWRPQRQVVQKLKALLVTRERLINARVQLQTPLTEGQEFVEESIRKAMVKCCQKALQGLACDIEKIDNEIHQILTQDQHLSSQMKWATSVPGIGKITGANLIVTTGEFERIIEAKKCACYAGIAPFEHSSGSSIRGKVRVSKMANMTMKKLLHLSAMAAIRHSEELRVFYARKVAEGKNKMSVINAVRNKLISRVFACVKNQRCYENIYQHALA

SEQ ID NO: 439097 - protein, 346 aa, unidentified
MMIIGCDFHPSWQQVAWFDSETGETGEQKLVHASGDARQFYERLTTPVLIGMEATGNSQWFIELVEDLGHVIWIGDAAQIRASYVRKQKTDKRDARHILKLVVEGRFPRLWAPDREQRDLRQLVLHRHNLVEIRSRVKNELQHLALNKGMQKKRTLWSQTGQKMLRELPLKPWAASRREDLLGLLGMLNQQVGRLDVAVQKAAEEHLQAKLLMTQPGVGPNTALAFVLTIGDVSRFRRGKQIASYLGLIPREESSGGRQKLGKISKQGNRMLRSLLVEAAQIAVRFDPGFRKQYLHRCHQKAKGVAKVAAARKLAVRLYWMLRTQVGYPEIVRIENSPRVPLVGAS

SEQ ID NO: 439098 - protein, 388 aa, unidentified
MFYYCGIDIAKHQHAVVLLDEHGQKTQPVFAVQNTRGGLDQLEQELAKLDGTVMVGLEATGHYWLSLYDELTRQGYAVVVINPLQVAAYRKSGVRKVKTDKTDAVWIADFLRIAHLPATSRDIPALLQLRELSRFRYWLSDQIGDCKRKLLTILDRVFPEYESLFSNVFIQSSRALLQEAVSAQEFASFDLNELTQLLHRSSHGRFGADKAEQLQQQAKESIGVGFLANAARMELHCLLAQIELLEEQQDQIEDALAHLMQQIPQFITTLPGIGLATGAALLAEIGDVSRFASEEKLIAYAGIDATVYQTGQFQASEAHMSKRGSPYLRQALWQAASMAIRYDEDLKAYYTRKRSEGKAHGVALGAVCRKLLVRIYVILKEQRPYVIR

SEQ ID NO: 439099 - protein, 356 aa, unidentified
MKKANQITFKEQRFFIGIDVHLKSWEVTIRNNNLALKTFSMNPSPGELAKHLKRNYPEGQYHSVYEAGFCGYWIHRQLVQLGIKNIVIHPADVPTSDKEKQNKTDRIDSRKLARELENKTLKSIYTPNEAHEQLRALRRLRYRQVQNLTRVKNRIKSHLYLNGIETPAHTECSHWSGNFIHWLESLEFSNPAGKDYLLICIEELKTCRSRIVKIVRLLRSYCRELGIAELIDFLRSVPGIGFVTAVTFYTEIMDIFRFRDLDKLCSYVGLVPTVHSSGEHQWHGRLTHRKNSYLRHMLVEAAWVAVRKDPAMLLAFNELAKRMSKQKAIIRIARKLLNRIRYVWLHQQLYITAVVE

SEQ ID NO: 439100 - protein, 400 aa, unidentified
MRAVFGIDVSKASSEVAILVNGEKVHGYTISNDALGFARLLGDLKTVHKPEIIFEATGVYSRRLQSFLDEHGYAYTRLNPLEAKKQLDSLRVRKTDQIDAEKLAQSQFVLNRKTTYVQEEIYQNLRDLSRFYQNLTEDIVRAKNRLHKALQVTFPELENILSTPSGEQYWNLVIAFPCKDFVLDLSKDELSESIRQSTSKRISDKRVAYLVEKLTALANQSYCAVKKTSPIMEEVRYYAKELLRLSEQRQTVLDQMVELAQPLPEYDILLSIPGIAETTATSIIGELGDIRRFQSANQINAFIGIDLRHYESGHFLAKEHITKRGNPYARKILFKCIHNIASASHTNPCHIADFYEKRKRQSQTTSTKPHTIASIHRLIRTMYYLITHNKLYDYRSTRNQ

SEQ ID NO: 439101 - protein, 386 aa, unidentified
MLYLAIDQHKHQLTINIRNEQGDVMQKGQISTNPADIDEFFVAFAKKARKHRGYMAIVEVCGFNDWLLEKLKKTQCDEIVVIQPEQSAVNKTDKRDADALGTLLWNNRRRLQGGQRPNGIRRIFPADPDDAQVRQLVNFRQHLVKQRTRIINKIKGIINKHNLSYDAPTENYATQKFKQWINTVLLPVVDCLEVNMNVEAWELYDKQILEVEAELAKHSEASKAKMSDVYRLKAIPGISAMGAITLLSRIGDIKRFRNPDSLANYFGLTPGCHNTGGKHCVGGITKRGNAIARQVLNFAVLHVVRKDAAMKVWYKKIKSKKGAKTARMAAMRRLATIIWHMLRWGKPYQFRYDLPQVVPRKDDLRSSKEVFGGICNRNHSQRRKRP

SEQ ID NO: 439102 - protein, 385 aa, unidentified
MSDHSEAFVAFDTSKLRNAVAIADGGRGDEPRFLGEIDNTPAATAKLVRKLAGKYERLTFCYEAGPTGYGLHRQVKSLGHECIVAAPSLIPKKPGDRVKTNRRDAVGLAKLLRSGDLTAVWVPDRRHEAMRDLTRARETAMLDLRAKRQQISAFLLRQGLHYPEDKRTWSKSHLNWLASQKFDIAEHRIVFEELMEAMRQAQGRLDRLEAAIRAAVPDWSLGKLVIALMAMRGLDMISASTIVTEVGDLSRFRTPRELMAYVGIVPSENSTGDKVKRGPITKTGNRRVRRMLVECAWSYQFPPRLSKDKQVKVDAVPQAVREIAWKAQSRLNQRYRALLRRGKLKNVAITAVAREFVGFIWAVAQAVGAAPAANNRTAPAPAPAR

SEQ ID NO: 439103 - protein, 374 aa, unidentified
MNEFSKYIGLDTHKESIAVAVSEGCGGKPRYYGEIANTPEAINRLVKALCPEGEMMAFCYEAGPCGYAIYRHITGLGHQCDVVAPSLIPKKPGDRIKTDRRDSENLSRLYRSGDLTPVWVPDQEQEAMRDLTRAREDMKAVERICKQRLTAFLLRYGCHYTAGKSRWTQAHWRWLETVKFAVPVQQIVFQEYVDAVRQSEARVAGLVKQMQSALADWQFAPVVNALMALRGVKLITAMTLMAELGDITRFDSPRQLMKFLGLVPSEYSSGDSRRQGGITKTGNGHARRVLVESAWCYRFPARKTAHLQRCAEQCSTEVQSIAWKAQKRLCGRYTHLLSRGKLKVQVCTAVARELVGFIWAIACEAMDQSMVSAR

SEQ ID NO: 439104 - protein, 405 aa, unidentified
MSLDVRFNRYAGIDVASQTHVVAITNATGDVLVKPTPFAEDAAGYEKLFAVLGDPSDILVVMEATGHYGRNLFAALNERGFAVAVVNPLRTHRFAEEDLRRAKTDSIDALGIARFGAQKRPPPTSPADEATDQMRQLVWLFDRFTQDYGGRRNQLHRQVDLGFPEFTRHVRTIESHRATTILAAFPTAAAFNESSYRKLAALRSEGKHRHRVGPELARTLIDSARISVGRHHGPAYRTAVHYICEDIAQLRTRLEELQAEIVRRVREHPIGVLLTTIDGLGPVGAARIIAAVGDPAQFRSGAALAAYVGAVPGTQRSGLVSPRSASLSPIGNARLRRSLYMTTLGAVRRNAWLRAYYERLRANGKLPKVALLAAMRKLLMAVYSVAKHRQPFVPRLPAKTEDPSK

SEQ ID NO: 439105 - protein, 355 aa, unidentified
MDRTKYIGMDVHQASISIAVRDVSGKLVIESLIETKAATILEFLQGLKGTLWVTFEEGTSAAWLYDLLKPHVVKVIVCDPRKNALLKTGNKNDRVDARKLSHLLHAGLLTPVYHGESGVRTLRELARSYLTLTKDLTRVMNRLKALYRSWAIPCVGEKVYSPRHRSAWLEQLSEAGVRRRAEQLYQQLDILLQIRREARRELLRESRKHPAHELLRQIPQLGPIRVALLIALVQTPHRFRTKRQLWAYCGLALQTRSSGEYRFTAGQLQHSNRLPALRGLNTNHNHDLKNVFKSAATHVSTSPDALGDFYRTLLAKGMKPAMARLTLARKMAAIVLTIWKKGERFDPGELKRQAA

SEQ ID NO: 439106 - protein, 441 aa, unidentified
MASLNKINPNSAGIDIGSSKIFIAIEDCEVKSFNTFTDDYLKAIVYLKEHNVTSVAMEATGVYWIALFEMLEASEIEVCLVNGRDVKNVPGRKSDVADCQWIQQLHSYGLLRPCFIPDEAIRQLRTYVRLRNDHISMASQHIQHMQKALDLMNIKLHNVISQIHGKSGMRVLNAIIKGECNPEALAALCEDSILKKKRAEVIASLKGNFRAEHIFALEQAVAAYQFYQQQILKCDKQIEALLEQFTEGKEVPPNIRKPKPIRHNPPKVKELHSKLMVITQGKDATTITGMNDKTLLEVIAATGLDLEKTWRTKKHFTSWMALCPNMHRSGKSNKKRKVKKHSTAGQIFLEAAMSIANSKYSALSSFYKRLQAKKGRRVALKATARKIAERYYDLMTKGIEYVEQGINLYEQKFKEQQLKRLYKQAKLFNLQLSPLTSGVCQ

SEQ ID NO: 439107 - protein, 441 aa, unidentified
MQQNPTPPTPTPTPTPTPEANAFERLSHYGGFDWAKHQHQLAVVDHAGAVRLELRFDNTAEGWALLREKLAPFPALGVAIETSCGPDVERLLDVGLAVFPLNPKAAERYRDRKRPAGAKDDPLDAWCFADALRTDGHAWRPLRPLDPATMELRLLCRDEIALIQQRTALANQVQAALHEYYPVALQSFDDWTSPLAWRFVLAFPTPADLAHAGKRKWEKFLHANRAWRPGTAERRLALFAKAAAFANPNAAVTAAKSMLASALAEQLLTLQRQIDRYRQRIEKLFAEHPDRDTFGSLPGAGDKIAPRLLAELGPDRQTFDSPEALQCYAGTAPVTRRSGKRHDVVIRRSCNMTLRATVHLWADLSRSTCVWAQAYYARKREQGMGHAAALRCLGQRWLKILWRMWRDRAAYDEARHTRDQVKHGSWVVKLLPDATPAASTH

SEQ ID NO: 439108 - protein, 393 aa, unidentified
MICVGVDVAKDKHDCFILSSEGEVLADVFTIPNNRDGFETLLQRIRSCTLPADKIKVGLEATGHYSYNILGFLLDKGLATYVINPLHTNLYRKSLSLRKTKTDRIDARTIAAMLMSDVDLKSYTDTAYHNEELKSLTRYRFDKVRQRAKLKQSVSRLVNILFPELETLVPTLHMASVYALLSELPGAQQVASVHLTHLKALLDDASKGRYDRNKAVEIREAARHSIGSKMPAKSLELRHTIQLIQELDKEIADVEAAIEEIMNAIQSPITTIPGMGLRMGAMILAEVGDFANFDSPDKILAYAGLSPSTYESGKLKATGTYAHMEKRGSRYLRYAIFNATKYVCIWDPTFAAYLAKKRAEGKHYNVAISHAAKKLVRVIYALQKSGQAYRVVT

SEQ ID NO: 439109 - protein, 341 aa, unidentified
MKNLFIGVDFSKEKVDVAIIFADGLTETAARMFNEFKTTVSGYKQLVKWVEQNSYGIDSSLWLFCGENTGDYSKGLCNFLYGKGYDMWLENAKSIKDASGLRRLKSDRADASMIAEYAMRNYDRAIMYEPLSESLAQLRELFLYRQMVIRHRCSFQVRRGEKKLTMEKSPVKTMISQSGRHIVSELNKEVEKIDKRIAELIKSDEELTEVFTIVTSVPGIGTQNAVCLMVYTDNFRRFNYDSRKIACYYGIAPFGKDSGTSVHSDPRVHYMANRQIKSMLTQAALAAVNFNPVIARYYMRLVERGKKKQVALNNVKNKLVHLVTAMARNRQLYTPEYKISA

SEQ ID NO: 439110 - protein, 372 aa, unidentified
MFNSIVYVGMDVHKKSYTLCCYTFVDDEVKYRQKIKADYRMILKYIEGVRKLYPKDSTFLCGYEAGCLGYSLYRELTDHDVDCKILAPTTMAITNNRRVKTDKRDAANIARCLALKTYSEVYVQSEEDNAIKDFIRMRDDQVKMLKSTKQQILAFTLRNGCKFEGGKTHWTIKHMQWLRMLKLDGIFQETLDEYLVTYEQLLDKIERLDRRIEELALGEKYEERVKKLTCFIGVKTHTALSFLVEIGDFQRFAKANNFSSFLGLTPGEDTSDERRNGLGITKAGNSHLRRLLTESAQGYTKGQIGYKSKALKARQRGNSPDVITYADKANERLRRKFYKLTLNNGVNRNKAKSAIARELACFMWGMMTGNIA

SEQ ID NO: 439111 - protein, 408 aa, unidentified
MLTPIVKRCAGLDVHKMVVVATVVLEQEDGSLREETRQFGTFRKHRRQMVRWLDGLGVELAVMESTGIFWKSIFACLEEAGIATYVVNARHVKKVPGRKTDVSDSQWLATLGRLGLLKPGFIPPKDLRELRLITRQRIKLRGMLAAETNRLHKVLDDAGIRLGGVVSDINGLSARALIGGLIEGKAPEEIVPYVHGRLKEKIPQLLEALDEPLSERHRFLLHSLEEHIGYLEKEMATLDHYLFAAMNPYKRQWEILQTIPGIDAISAAMLLVEIGIEMQSFGSAHRLASWAGMCPGNNESAGKQKGGRTRKGNRVVRQVLCEISNAASKSKSQFKGQYQGLVIRRGHKRAIIAVGHKVLRVVYAMLKSLQPYRDPEIDYTRLVVQRNAPRWLAALKRYGFLPAVGAAA

SEQ ID NO: 439112 - protein, 342 aa, unidentified
MKTFVGLDVSQKKTSICVIDHNGNKIRMVNVDTHPGVIADYLFSEGFDKSKVGLETGPLCVWLYHSLRNFGLDVDCIHARHVHAALSMQLNKTDQNDAFGIARLVLSGWYKPVHVKSLQCHQQRLILTSREKLVQLRVAVTNQIRGLLKTFGVVLPPGKNSVFERAVLESSPSLETVKPAVIMLLDTWEHLSGQIRKFNYMLEKLARKDPVCQILQSIPGVGVLTALSFKTSIDDPSRFRRVSDAGAFLGLTPKKYQSGEVDRNGGISKQGNRMTRTLIYEAASCLLTRYGTDTSLAIWANGLRRRMGYKKVIVALARKLTTLMLSMWKSETFYNERLKAAN

SEQ ID NO: 439113 - protein, 349 aa, unidentified
MASLPAVVRQVTVGVDSHKDVHVAAAVDQVGRVLGTTWVPTTTQGSAQLLRWATRLGQVQRFGIEGTGSFAAGLSRWLQQQGYQVVEVNRPNRQTRRRRGKSDPVDAEAAARAVLAGEATTTPKAANGTVEMLRVLRVARRSAIKARGQAANQLHSLLVTAPDPLRHQLGGLPLARLVQVAAAVRPGPLTDPQAATKFTLRELARRYQFLTAELERLDAQLAALAPKAAPRLLARRGVGAQVAGALLVVAGDNPGRLRSEAAFSMLCGSSPLEASSGKTVRHRLNRGGDREANNALWTIAMTRLSCDERTQRYLARRTAEGKSKREIIRCLKRYIAREIYRDITATVGS

SEQ ID NO: 439114 - protein, 348 aa, unidentified
MTGSPYPQGRVAGNPPWEVRLPQPARPSSPCPCFVGIDVAKARLDLAVRRADDPPTDARAAWSVPHDEAGIAQLVARLTPLAPTLVVREATGGLELPVAAALTVANVPVAIVNPRQVKAFARVVGQHAKTDALDAALLARFAETIQPPVWPLPDAAAQELSAVLARRRQVQGMLIAEGNRLGSALPVVRPRLERHIAFLGEELAEVEQELARQIRASPVWRERDALLRSVPGVGVVLATTLLAELPELGLLSHKAIGALVGVAPLNHDSGRQRGRRIIWGGRSRLRGVLYMAALVAVRCNPVIRAFAERLRAAGKPTKVVLTACMPKLLTILNAMLRHGEPWRTAPVG

SEQ ID NO: 439115 - protein, 341 aa, unidentified
MDIVVLGIDLGKNSCSLAGLDASGRVILRRRMRRSSVESFVNGLGRCIVAMEACCGAHHLGRVFVAQGHSVRLMSPEYVRPYVKAQKNDELDAEAIAEAATRPTMRFVAVKSQYQSDVQALHRARERLVSERTALINHLRALLLERGIVAPQGRRKLQEELAVFADEDGIEALSPRIRLLIEDLRSEWRALDERIAAFDAEFVRMAREDEAVRRLTTIPGIGTINATALAAAVGNARAFRRGRDMAAWLGLTPRQMTTGGKPRLLGISKRGNRYLRKNLIHGARAVLPYLVERETPLGRWARGLLARAHKNIVVVALANKLARIAWAVLARGRTYEAAAAA

SEQ ID NO: 439116 - protein, 349 aa, unidentified
MRFYTNNHAHYCGIDLHAKTMYLCILDRDGETLLHKDIKTRPDLFLEAIAPYREDLVVAVECMFTWYWLADLCREEGIEFVLGHALYMKAIHVAKAKNDRIDAFKIAKLLRGGNLPKAYVYPAEMRATRDLLRRRLHLVRRRANLLAHTQNTHHQYNLQVPAGRIAYKSNREGVAERFNDPDTRKSIEINFQLIESYDSIITELELHLVRRAKQHDPQAFHRLRSVPGIGKVLALTILYEIHDIGRFERVQDFLSYSRLVKCEHSSAGKRLGTGGAKIGNVHLKWAFSEAATFFLRKNPDAQRYLRRIAGRHGKSKALSILAAKRGRTVDFMLRKDHAFDMGRFLARHH

SEQ ID NO: 439117 - protein, 370 aa, unidentified
MRKDTSRNKQQIRSKKERETREGFEFYIGIDLGDKNSDVCVLDQSGEVSKEFRLRMKEADFRTYFASIPRSRVAIEAGGQSRWVAEVVEKCGHEVYVSNTRKVPYIHQSDDKDDPGDACKLAELLYFKPRLLHPVQHRSREAQVDLSWIRAREVLVKSRTQLINAVRGISKAFAERLEKCAAESVTAKLAGQIPEVIRGAVAPLLETIDHLNEQIRYYDEMEEHIARERYPKYRLLEQVSGVGVHTALSFMLTIGDPERFQKSRMVGSFLGMRPKKQESGESKPQLGITKAGDMYLRKTLVNCAHHILGPNRKDSDLRRFGQRICARGGKNAKKRAVIAVARKLAVLLHRLWITGEVYEPLRNSKQSKAA

SEQ ID NO: 439118 - protein, 321 aa, unidentified
MTISTTVGVDISKDKFDAARLGPEGKYKHKKFANDPEGFAAFLGWLASFGDEETHIGMEATGAYSLPLAEFLVGQGYAVSVVNPARIHAFAKASLGRAKTDKADAKLIAQFVREKQPALWTPPPHNIRELQALLRRVEHLLEMRQMEQNRLDTALPAVAGSIKTILESLDRELDATRERIRRHIDDDPDLRHRGDLLGSIPGIGEATLAHLLVALSDHYGFDNAKQAAAHAGLDPRIRESGKWVGKTRLSKSGDPLLRKALYMPALVAWRYNPTIRAFCERLKANGKNGKAIVCAAMRKLVHIAFGVLKSGKPFDPELNPA

SEQ ID NO: 439119 - protein, 359 aa, unidentified
MYFSGLDAHLRYVTVAVLDRLGGVALETTVPTREPDRLLAVLAPFRPLEVVVETCPFWPWLYDLLVPAGIGFHLAHAKALRAIATAPQKSDAVDARLLARMLLSGLIPEAYPRSADQRELLRLLRHRTALVRFRTRLAGRIHSQLHQQRLSLPREKLLRRATRAWLEATAWPRLTVEQQAIVTTHVELIDHLTPLIRALERRIAAAAAGDATAPLLATIPGIGPYRSLLLAAELVPISRFPRAEQLVSYAGLAPVTRSSGGHTHHGSIPPAANRWVRGALVSAIPSHVRYAPTSPVTVAYEQLKARLGWRVARVAAARKLARVVYVMLTRRTPWHGVPAAGDVRDEVQNSHVAPTTSFC

SEQ ID NO: 439120 - protein, 348 aa, unidentified
MIVGIDVHKRAHVAALLDERGGELGTLDFANSPEGMRRLRSWLVAHDAGEAVVGVESPAGYGRLLVASLETAGHQVLNVPAWRTHRERGRHGPGKTDPGDAIAVAQVVLRKRAELGPALEPELVRALALLELQRRRLVRDRTQAIQRLRADWNQVDPVAEARVVNLTRQRELRRLKRVSFGDGLVEQVAARCIRDLARDIEDLNQCIAALDTEIAQLLTEHGNPVADLHGAGPQIAAAVIAHAGDVRRFRNAAAFARFCGAAPIPCGSGQTAGRHRLHRGGNRQLNAALYRIAIVQARHHPPARAYLARKIAEGKTPREARRALKRHLANVIYRRLYAWAEATPALNT

SEQ ID NO: 439121 - protein, 429 aa, unidentified
MEEIDDTDLVVERVAALDLGKAGLDACVRVPHTHHPGRRMQELRSYGTTTAQLLELAAWLRHWHVQRVVMESTSTYWKGVYYLLEAEGFDCWLVNAREVKNVPGRAKTDRADAVWLAKVAERGMCRPSLVHPPDIRRLRDLTRYRRALVQDRTRERQRVEKLLEDAQIKISSVLSDLHGVTGRAMMDALINGQRDPHTLARLAKGSARKKTARLEEALRGFFTDHHAMILQMMLANSDRLSSQIAELDGRIQEAVSPFCAQSARLADVPGVDVMAAAELIAEVGVDMTRFPSAAHLVSWAKFCPQTHQSAGKSKSQGRGKGNPWLAGTLGRVVFANSRSETFLGARYRRLARRRGKQKAIVATGNSLLTVVYHLLLDADARFCDLGPGYYESRINKHRRARDLATQLQALTGQHIVIRDGKAVITDTAA

SEQ ID NO: 439122 - protein, 347 aa, unidentified
MNFYTQQHKHYCGIDLHARAMYVCILDQHGTKLVHKNLPTTPEAFLRVVAPYREDLVVAVECMFTWYWLADLCTKEGIPFVLGHALYMKAMHGGKAKNDKIDAHKSAVLLRGGMLPMAYVYPPEMRATRDLLRRRCHLVRKRAELLAHIQNTNSQYNLPEIGKKLAYKANREGVEEHFPDPSVRKTIEVDVSLINHYDQLLGEVELSITRTAKTHDVQTFSRLQSVPGIGQILALVILYEIQDIMRFPRVQDFVSYCRLVKCAKESGGKRIGTSGKKIGNVHLRWAFAEAAVLFLRHNQPGKAYFAKLEHKHGKAKALTVLGHKLARAVYYMLTREQPFDLHRFVSA

SEQ ID NO: 439123 - protein, 411 aa, unidentified
METVVERPGALDVHKAQVTACVRVPADGGGREQHVAEFQTTAAGLLTLRDWLAAHGVSQVTMEATGVFWKPVWAILEDEFELLLVNARHVKQVPGRKTDVKDAEWICQLAEAGLLKASFVPPKPIRALRNLTRYRKTQIQERSREANRLHKALEDTGIKLDCVASDILGKSGRAMLDALVAGTTDPEVLADLAKGRLRAKLPALREALEGRFDELHAVWIGAILAHLDFLDEQISSLTETIGEQIAPFEKAVELLCTIPGVQRRTAEVIVAEIGLDMSVFPTAKHLASWAGQCPGNDQSAGRRRSGPTRKGSKWLDWALEEAALAATRTNDAYLAAQYQRLRPRRGHKKALGAVKHSIICACWHMLTTGELYNDLGGDYFRKRDPERIAKRLITQLEALGHTVTLHEAVAA

SEQ ID NO: 439124 - protein, 347 aa, unidentified
MTIVEAPPGITGGVDTHLDTHVVAALDPLGRLVGTESFPADAAGFKALLAWLEQFGQVSRIGIEGTGSYGVGLARFLRRRGLEVVEVNRPNRQARRNHGKSDTLDAVEAARAAISGRASGAGKTKEGPVEAIRVLMVAKRSARHARVKAITQMRHLGFTAPDQLHCRLKGLTVTALVGEAAKLRPTRSADPLTAATKASLSSLAHRVQSLDAEVAELEEKIESLLIATAPDLLALFGVGPDTAATLLVAAGDNPERLHSEAAWAHMCGVSPVPADSGRSSGHLRHHKGGDRQANSALWRIVMVRIAHDPETRAYFERRVKEGRTKRDVIRILKRYVAREVYRHLPRG

SEQ ID NO: 439125 - protein, 364 aa, unidentified
MAVSGLSPKELTKEAPNIMLHVGLDLSRRRLDFDLLCEDGSRIERGAAPPDADGLRGLVRRVDVYQEPVCAAIESMNGARFVHDRLEELGWQVELADAQKVKGLAPLACKTDRIDAWVLAELSRRDLVPAIWLPSPTVRQERERARWRLHLVRHRTALKNRVHATLIAFGKPCPVSDLFGSRGRQLLARLDLPDPWAQTVSASLSLIEDLDVQITDCERELRVLGADHEYVPLLMSAPGIAWVLGYTIAAEIGDINRFASPTKLCGYTGLCPRVNQSGEHDHRGSITKNGPKYLRWALIEAALHAVCSPVYRERYKRTATRLGRQRGKKVARVDIARKLAEAIWYMLTRSQSFAPAGATTPLAA

SEQ ID NO: 439126 - protein, 347 aa, unidentified
MTTNSTMYVGLDYHQSSIQLCVMDASGKQLINRKCDNDLLALTRHLPAGVTVQASIEAMPGSADMAEALCKQPGWSVHLAHAQHVARMKRTREKTDRSDAYVLADLTRVGYVQKVWLPPQSVRELRRLISHRLQLVDRAKALKLRVGSLLRDHRVTLAGTRWSKPWLVALDHTVASLPADSAWIIGEQLDELAHLTKRIKAADARLKEVTAHDTLTQHLLAQAGVGLVTATALRAAIGRFDRFKTGKSLARYCGLSPRNASSGNRQNQGGLVDDANRRLRSLLIELAWRLIRYVPRWKVMACRLRGRGKASCLIAAAVANRWVRQLHHQMVEVIDDANVTSQVPATM

SEQ ID NO: 439127 - protein, 376 aa, unidentified
MKVTYQTCCGVDVHKSFLVATIVKTTGGIEPSYQKKRFSTFNNSILEFKQWLLDNHCHDVCMESTGKYWVPVFNLLEDKINVVIANPKWVKAVKGNKDDTKDSKWIGDLFRLGLVKGSYIPCKKVRILREYTRYRYKLVSCRSSEKNRYQNALTVCNVALDSIVSDIFGKSSTSIIDYLLEQSGTSINHEEIASKLLRSLKSKEDAVIESVEGYQMTDAQKYRMRLVRAHMDYITAEINDVDKMIENMISSNPDFENAVQFLCTIPGVKRDSAITIISEIGTDMSQFSSSKRLCCWAGLTPGSNESAGKKKSVRITRAGVYLKPALVQCAHAAVKSDKSPYYKKKYESLVKRRGKKRAIIAIARMILSAISYAVYW

SEQ ID NO: 439128 - protein, 347 aa, unidentified
MGHYAGIDVSLECSSVCVVDASGKIVREGKVASEPVTLITWLGSLGVNLERIGLEAGPLSQWLYGALRETGPAVELLETRHVKTALSTMPVKTDRNDARGIAQLMRLGWFRPVHCKSMAAQEVRALLTARKLVQSKLYDIEMSLRGILRGFGLKVGPTTSQSFAARINHLVDGQTSLEAVAAALLSLHAVALREFKSLEKSVRQISRADARVRLLMSTPGVGPLVALTYVAAIDDPARFTSSKSVGAHFGLTPKKYQSGETDVSGRISKMGDGSVRTALYEAAHVILTRPIKGGALKSWAMKLARRAGMMKAKVALARKLAVVLHRMWVDAIKFDADKASGCVRVAT

SEQ ID NO: 439129 - protein, 344 aa, unidentified
MSTIKVLGIDLGKSSFHVIGRDYSDNQIIRKKFSRTALIQFLHQVQPCTIAFEACGGAHWLGRQCESMGHKVRLIPPQYVKPFVKSNKNDFIDAEAICEASTRPNMRFVSVKSEEAQVISAIHKARHGYIKDRTACMSRIGALLLEFGIALPTGHSVMKQLFNWLAQQRQELPGLLMQELAELHDYYLFLNESIEKQDKKLKQLVESNPIGQLLKTIPGIGDMTASLCIANIGSATDFKSGRNMAAWLGLVPAQYTTGGKPKLLGISKRGNKELRTLFIHAARAVMSRPDKTGKIYGDWLINLRATKPFNVVTVALANKLVRIAWAVMKTKQAFNSKALAPGLQ

SEQ ID NO: 439130 - protein, 445 aa, unidentified
MIEGIRNPIKTKQEARGMQIIQERIKRVTDTTIIVGIDIAKEIHWARITDYRGVDLVKPFKFHNSMDGFENLLSKVDKIQEKHKCDQVMIGMEPSGHYWRALGWHLKLHDSKPVLVGVNPYHVKQTKELTDNSQTKSDPKDALVIAHLIKNGNYFDTYLPENEYAELRQLNSERQRIMKQITRSNNQLIALIDEYFPEYSTVWSNVTCQTSLALLKTYTFPSDIISAPREKLLIDIKAASRGTEGVKLMGEMINAARRSVGVTAGQRVVRMRMINLIEDMAHFEKTKEAVEIELEAVMKTLELGVIMQSMMGIGPIISAAFLGEVGDISRFDNWKQVRSLAGLNLVENSSGQHKGDTKVSKRGRPYLRHMLYMAGDCGCRCNPEIHSFYRYLRDRKNNPLNSNQAIVATGLKIMRILFHIVKTGEQYDPNKALGTVRLQQIASLG

SEQ ID NO: 439131 - protein, 341 aa, unidentified
MGQVSTIGLDIAKHVFQAHGADASGHVVFRKKITRAKLIEFMASQPPCLVALEACGGAHYWAREIAQLGHTVRLIPPAYVKPFVKRHKNDAADAEAICEAAQRPNMRYVAVKDEEQQAKTVVFRARDLLVQQRTQVINALRGHLTEYGCIVPKGPAHVARLIAWIEDPASQLPESARAVFKVLIDSLKVVDTQIAGLDAEIARRSREDPIARRLMTIPGIGPITATAITALAPPPETFRKGRDFAAWLGLTPLQKSTGGKQRLGAISKMGERTLRRLLIIGSSAVVHQACKRGAPAGSWLAQMLARKPRMLVTVALANKIARVVWALLMKGEVYRAPVAAA

SEQ ID NO: 439132 - protein, 363 aa, unidentified
MDKLTHIGLDVHKESIAVATLRPGEVTCDERVIPNTPEAIRKLLTRCDPSLVRTCYEAGPTGYDTHRLISSLGIACDVIAPSMIPKRSGVRVKTDRSDARHLARMHRAGELTAIRIPTPAEEAVRDLVRAREEIKADRRVARQRIHAFLLRYGKRYPVPRARWSFRFDVWMRAQKFPEPAAQAAFDHLVGAQSVRDSQLSAVTRQIEELAALEPLASGVAILRGFRGIDTLTAVTILVETCDFRRFPEAGAYMAFTGLVPSEHSSGTTRRQGSITKTGNSHIRRVLIEAAWAYRHPPAVRGKHKGRLEGLTPEVVAYSWAAQCRLHATYRKLAVRKGPNKAVVAVARELSGFVWGVMTGNMGS

SEQ ID NO: 439133 - protein, 408 aa, unidentified
MNPLYVGIDVSSKSNVVYFMLPDGSKHCNFSVANSHTGSSQLVKRILSALTSHSLDTVLIGLEATSVYGDNLVYFLREDATLAPFNRKIHVLNPKQVKKFHDTYNDLPKNDYVDSFVIADCLRFGRINKEVYMGDYRYKALQNLTRARFFAVQNLVKEKQRFMNVLFKKYSTMTQEKVFSDAFSTTALAVYDEFESAEALANMDLHELTDFIIEKGKNRFPDPDAVAKAIQKAARSSYRLPKTVNDSVNQVLSISITSMKALESQIKEFDKAIKALMELLPNVLISIPGIGPVYSAGIMAEIGDINRFDNQASLAKYAGLAWKQHQSGGFEAEVTRLIPSGNRFLKYYLCEAAFSLVRCDKEYSDFYHLKYKEVNRYQHKRALALTARKFVRLVFRLLKDNRLYTSAE

SEQ ID NO: 439134 - protein, 366 aa, unidentified
MEKGTTFVALDDSKRKLVVAILRPGPSEPEQREPPKEPHLIRRLFQRLAREGRVRTCYEAGVSGYDLYRQIVACGVECAVIAPALTPRRPGQRIKTDRRDAAKLVRLFRAGELTPIHVPNEAEEAVRDLVRCREDVRRDVLRWRHRLLKFLDRHGRLYVTGKNWSQRHWTWIRAQHFDLPVLERTFEATLFALEQALARRAALDREVAALAESEPYRTPVGWLRCFRGIDTLSAMILIAEIVDFQRFRQPRALMAYLGLVPSEYSSGDTQRRGAITKTGNTHARRALVEAAWHYRHRPSVAGALRHRIEGQPPAVVSHAWRAQQRLHRRYRHLVGHGKRPPIAVVAVARELVGFLWAAMTQPAVAA

SEQ ID NO: 439135 - protein, 357 aa, unidentified
MVVVGADVHKRTHTFVVVDAVGKKLGHKTVKADGSGHDQAIRWVQAEFAEAIAADREGLRWGIEDCRHLSARLEIDLLDAGQAVVRVPAKLMAQTRSSARTRGKSDPIDALAVARAVLREPDLPVASHDEASRELKLLVDRRDDLVKERTAMMNRFRWHLHRIDPTVDPAPKSLKQAKTRKRLTALLAPLAGIDARLARDVLGDIDRITPRINDLEKEITALVTVQAPALIELRGCGALTAAKIVGETAGIARFSHEAKYAMHAGVAPIPVWSGRTEGRVRMCKAGNRQLNAALHRIAVTQLQRPGPGRTYYEKRLAAGDSTTEALRCLKRRLARVVFQTLKNNPSTTAQACLPTAA

SEQ ID NO: 439136 - protein, 413 aa, unidentified
MRVMIERCCGLDVHQETVVACLLIGAPGVRPTKEVRTFRTMTRELEALRDWLKAAGVTHVGVESTGVYWRPVYAVLEGHFELIVGNARHIRNVPGRKTDVKDAEWIADLVRHGLIAKSFVPARPLRELRELLRYRRKLVESQSAERNRLLKLLETANIKLASVASDVFGVSGRAMLKMLSEGNATAEEIAGLAKGQLRRKHDDLVLALEGRVEEHHRFLLAIQLHRLEAAEHDIEALDSRIAERLEPYRTQHALLMQIPGVDWVVGAVLIAEIGIDMSVFLSAYHLASWAGVCPGNHESAGRQKSGRARKGNVHLRTILVGAATSASRTKGSYLKDKYHRLKARRGALRAALAIAHKILVAAYHMLAKGLEYRDLGEAYLDQLHQTRTAANLKRRLERLGYTVALQLREATTA

SEQ ID NO: 439137 - protein, 357 aa, unidentified
MGKVTGNLARVTRIGLDLAKTVFQVHGVGAEGEVVIARKLRRGTMLEFFGRLAPCVVAMEACGSAHHWGRQLVALGHEVKLIPPAHVKPYVRRNKTDAADAAAICEAAMRPGQRFVALRSIDNQAAVMRHRIREQLVGQRTALLNALRGHLSEIGVVTAQGAQHAYRLKRMLADGADENGEIVIPEHVRVALAPLAAQIDALDQAIAAIDDKLIETVKADEKARRLMTIPGVGPVIATAVVATVGEVSSFASGREFAAFLGLTPRQHSSGGKERLGRITKMGDRYLRKLLVVGATTVLHHAIGHNDSLRCWARQTLERKGGRAGFKLTAVALANKLARIVFAVLRSGEVYDDRPVAA

SEQ ID NO: 439138 - protein, 389 aa, unidentified
MLFCGIDVAKHKHVALVLDEKGTLVKPAFTFTNDRQGCDALLGVLANVGRPVTVGMEATGHYWLALYDQLTGQKYPTIVLNPLQIAAYRRSGIRKVKNDRVDAFWIADYVRLANPAPTTQDIPLLLQMRELSRFRFGLTQQIGDCKRRILAVLDRVFPEYETLFSSVFLKSSRGLLKEAVTADELASFDLSELSEILHTNSRGRFGMEKATAIQAAAQCSVGVSFLADAVRIKMRCLLELIDLLEQQRDQVDEELATLMAQIPQHITSIPGIGPVTGAAILAEIGDVNRFERVEQLVAYAGIDPSVYQSGQFKASQAHMSKRGSPYLRHALWLAAGMAIQYEPALRTYYQTKRAAGKAHGTVLGAVCRKLLARIFIILKEQRPYIVRDC

SEQ ID NO: 439139 - protein, 438 aa, unidentified
MKVMYERVAGIDVRKDIIKVAVRSPGDKPWARKTEILTFRTFYGVLRAMARELRRRGVTHVVMEASGVYTEPVYYALCEEDFTEVAVASPAHAKALKGHKTDAKDCVRLAELFECGLLQGSYIPAAGLKEMRDLSRYRMKTVQARTPEIQRLAKALESAGIKLGSVASEITGKGPVAMIEALISGERRGAVMADLARGRARTAGKLADLSMALEGRFTDHHALMCRLHLDRITALDAAVADLEARIAATAADWQREIGLLKTIPGFGDIVAWAWIAEIGPAPHQWFASHHKLASWVSLAPGNNVSAGKRKYGRAGDAGTYIKPMLIQAAWAATQVRGRLQARYNRLVRRMGGPKNPAAKKKAIVAIAHTLLKIAYTVLKTGTGYQEPGAGFYTRRESPGHRQAWLERQIQKLHPGCTVTITISPSPDPAPEAALPPGA

SEQ ID NO: 439140 - protein, 356 aa, unidentified
MTSTIKYIGMDVHKESISVAVRNAAGKIVMECVIETKANTILQFFDGLRGEVQVTFEEGTWAAWLHDLLKPHVGKLVVCDPRRNALLLDGNQNDRVDARKLSDLLYMNKLNAVYHADHGLRTLKELVRSYLTITRDLGRVMTRVKAIYRSWAIPCSGKQVYGSRHRAEWLGKINEPGVRRRAEFYYQQLDTLRSLRQTVRRELLGESKKHKAWKQLCQIPSIGPIRAAVLLGILQTPHRFRTKRQLWTYSGLGIEVHSSADHETVKGQLQRKKKHVEIRGLNENCNHDLKNLFKGAAVVASTKPGPFESFYAALVAKGIRPEMARLTLARKIATIVLLVWKKGVCFDANHLKPQTA

SEQ ID NO: 439141 - protein, 315 aa, unidentified
MGQTTAIVGCDVSKLWVDACVVQKSGRTTSRLSNKPESLKRWACALPQASQVGMESTGPYHLALAQALIEAGHTVYVINPRWVHAYARSTGQRGKTDRSDAALIARYVQSEAAYLHAFELPSGEQARLRYLLLRRQELVKLRSATRQSFGEEAADVITGFNRLLRKVEREVRQLVEAQAVWREHAQQLRQIPGLGPMVSAHLVQVLTRIPFARADAFIAHTGTDPRANDSGLKRGRRRISHHRDSALRQMLFMAAMAAIKQPEWRKLYERYRSRGLPSTGALVACARKLARIAWHMFKNPDADYDPSKVTSTIPA

SEQ ID NO: 439142 - protein, 346 aa, unidentified
MYSIGIDAHKRYSQITIMQEDGKIVNRCKVNNDRKSIKRALSPYAQDGSKAVLESGWNWGLIYDMVSDCDLEVKIAHPLKVKAIAEAKIKTDKISADILAHLLRADLIPECYVRGKSSQRIQQVLRQRMFLVRLQTMVKNKIHNLIDRQEEAREPAQSFTDLFGVKGIQFLRSVELPLLERKLLDGQLELLEELRTRISSVESILAQLKENDEIVERLKTIPGIGECFALLIRHEIDKIERFPTSNKLCAYAGLVPSTYSSGGKTYHGRIIKQGNKYLRWALIEAVIPAIRKDAQISSYYYLMKAKKGSNSAKVATARRLLKIVYQVWKENRFYRTKTSRTALLTS

SEQ ID NO: 439143 - protein, 401 aa, unidentified
MVSDFRKGRYNLMKIFVGIDIAKLNHFAAAISSDGEILIEPFKFTNDADGFQLLVSKLESFDKNSIIIGLESTAHYGDNLVRYLVAEFYQVCVLNPIKTCQMRKNNVRKTKTDKVDTFVITKTLMMQDDLRFITFFDLDMMDLKALGRFRQKTIKQRTRLKIQLTTYVDQVFPEIQYFFKSGLHQNAVYALLKEAPSPKEIASMHMTHLANLLKVNSHGHFTKEQAKELRVLAQKSVGANDSAISIQITQTIQQIELLDSQLEKIEAEMTDIMKFNDSVIMTIPGIGYINGGMILGEIGDIHRFSNPNKLLAFAGLDPSVYQSGNFQAKTTRMSKRGSRVLRYALVNAAWNVVRNNATFKAYYDAKRSEGRSHYNALGHCAGKLVRVIWKMLTDEVEFNLE

SEQ ID NO: 439144 - protein, 343 aa, unidentified
MTKISTIGLDIAKNVFQLHGIDASGAVVMRRQLRRAAVERFFAKLPACLVGIEACGSAHHWARVISRYGHEVRLMPPGYVKPYVKRNKNDGRDAEGVCEAVSRPTMRFVAVKSIEQQATLAVHSTRALLVRQRTMAANALRAALGELGIVAAQGYEGLRELMAKLEAPSEQIPEMMRGALLVLARHWQALDADERVLEQQIAKAARNDRDARRLMEVPGVGPIIASTVLAKVADAKLFRSGRDFAAWVGLTGKDHGTGGKHRPGRISKQGDRVLRALLISGASAHLRQQQRRGVTDPWLRDLLARRPYKVAMVAFAAKTARIIWAMLVKGEPYRDPANAPAAA

SEQ ID NO: 439145 - protein, 322 aa, unidentified
MNENTNYFGIDISKDVFDVTGSDGLSHQFSNDNSGFKSFIKLTTPNSQCVMESTGVYHLRLAYYLVEHKVKVSVENPLSVKRFIQMRLSKIKTDKSDSKMIYDYAVFNKPGLWTGQTKSQIECSHLLSLSNLYTKEIIVLKNKLHSEKAQGSPVSRVVRSINRSIDYYKKEIASLELMVLKIVKEDYQDLHSRVKSIPGLGAKASALLIVLTDGFERFNKASELCSFAGLTPIIRESGSSIRSRPRISKMGNRRLRKILFICSFSASKHNRACRELYNRIVAKGKSKKLALVAVCNKLLKQAFAIAKSHLWYDENYRSVPVK

SEQ ID NO: 439146 - protein, 369 aa, unidentified
MPHVTSIGLDVHARSVAAAAFNPFTGEVVHRDFGTDAAEIAEWALGFEEPRACYESGPTGFHMARELRALGLDCAVAAVSKMQRPAADARRKNDRRDAEFIARMLATHNIVEVPLPDAAVEAARDLDRALDDATAEYRRARQRLNMFLIRLGHVWDERNADGARKGSWTRAHWRWISGIRLEGPQRDVLEYYVTAARCAESDRRQLEKKVLALARTDRWRPAVEALSCIKGIDTLTAFRLAAEAGSFTRFRTAPAFASWCGLVPSERSSGETERRGGITKTGNRLARTALVESAWHYLTCTPRPKAPAPGADVPAAIRARADACTARLCRRREALAAAGKSSCKANAAVARELACWVWEIGCRAEGTLG

SEQ ID NO: 439147 - protein, 412 aa, unidentified
MEVLHPRCAGMDVSKKDVKVCVRLASPGRKTVQDTTTWSSMSGDILRLRDYLIAEQVTCVVMEATGDYWKPFYYLLEDAPFEVMLVNAHDAKNLPGRKTDVSDAAWLAQLAAHGLLRASFVPPEPIRRLRDLTRTRTAITRERGREIQRLEKVLEDAGIKLSVVVSDINGVSSRFMLQSLVKGERDPAVLAELSVKQLRRKIPALTQALQGRFTDHHAFLVELHLDFITEHTTRIDALTERIEKVMAPFQAKRDLICTIPGISTTTADVIIAETGGQMAQFPTPGHLASWAGVCPGQHQSAGRVKNVKTRPGNRHLKGALGATALSIASHKGTFLNAKYRRLVRSRGKPKAIVALEHTLLTVVWIMLTDNVVYDEPGPDYHQQRHPERTKNRAIYDLHKLGYDVTITPHGAA

SEQ ID NO: 439148 - protein, 316 aa, unidentified
MVGIDVASAHVDVAAIGAALPAALSHIGNDADGHSALADGLARLKPELVLMEATGGYEAALACALQAAGLRVAVVNPRMARDFARAMQRLAKTDRIDAATLAEFAGVLARRPDCERFIRPLREPEQQDLAALVTRRRQLVSMQLSERQRLRLARPVARPSIEALLEAIARQLDDVEAEMARHVEQHYAQMTKLLQSVAGIGRVAAATLIAELPELGRLNRRQICALVGVAPYAKDSGASRGRRRIGGGRFEVRRALYMATLAATRYNAPIRAFYQRLVAAGKLKKVALIACMRKLITHLNAIARDHLKDQDRPTIA

SEQ ID NO: 439149 - protein, 338 aa, unidentified
MNIVFLGIDLAKNVFQLCGLNQAGKPVYTKRTGRKELLQTQANIPACLIGIEASTGAFYWQREFEKLGHKVKVISPQYVKPFVRGQKNDGNDAQAIAVALMQPTMQFVPPKSPEQQDIQALHRARQRIVNHRTATVCQIRGLLLDRGIPIGSAVSRARRAIPLILEDAENGLSSRMRRTIAELYDLFNDLERRIHFFDKEIETVFRQSEACQRIAKVKGIGPKTATAVVAAIGKGTEFKNGRHFAAWLGLVPRQHSSGDRQVLMNMTKKGDKHLRTLFIHGARAVVRVATNNNDGHMNQWVNQLKERRGFNKTTVAVANKNARIIWSMLRNETEYQVV

SEQ ID NO: 439150 - protein, 370 aa, unidentified
MKISVGVDLHKTQFTVCCLSEDRGIQELGMYPTTDRGYRTFIVKVSGWKEEGYEVTAAVESTGNTRYFRNRLSREGIDVTIVNTLKFKVVNESVKKTDKHDARTLAEFLEKDMLPESILCSQESEDIRRILKARSVLVKALVSLKNQVHGLLLGYGIESRRGQLQSKKERQRILTGLADHRSYGNAARAVKPLLGTIDQIASEVKEIERVLCDLVSKDDDVALLQTIPGVGLITAATIRAHTDDINRYESAKKYAAHAGLVPWVQNSNKTIRHGHITRRGPVELRTAFVQMVMGMLRLQNKTDGYRLMRKYRTMKENKGTGKSVIATARKMSTIVYAILKKREPFNPSRMLPDPQYVQMSTVARHYALAV

SEQ ID NO: 439151 - protein, 353 aa, unidentified
MIHLPEEREVILGVDTHLDVHVAVLIDVVGRIVATTSVPTTALGYEQLIEWARGFGRLTRAGIEGTGTYGAALARRMQAHGVQVLEINRPDRSRRRLRGKSDPTDAENAARAVLAGEANAIPKAQSGLVEAMRAVSMARRSAVKAKTQAINQLRALLVTAPESIRATLWKVKPEQCVARCARLQSLGDTPLLKALTSTLRLLARRWMSLAKELHQLDAALEELTKRAGRRLLTRFGVGPQTAATLLVTAGDNPNRLRSEAALAALCGASPLEASSGKTTRHRLNRGGDRAAHNALWTISMVRMRSDPRTRAYVTRRTAEGLSTKEIQRCLKRYIVRELYPLILADLAESIRKT

SEQ ID NO: 439152 - protein, 343 aa, unidentified
MVHYIGLDVSLKQTSICVVNQLGSVVREGVVDSEPEAIAAFVKSKAPRVVRIGLETGPTATWLWTELKRLGLPVICIDARHAKAVLKMQINKSDRNDAAGIARIMQTGWFKEVRVKDLDSHSVRALLASRALLVKIKRDLENQIRGLLKNLGLVIGRAKFNGFAVRAEELIEDRPELIAVVGPLLKARKAIEQQTDDLDRQVLKLARHDGQVRKFMTVPGVGPITALCFKATIDDPTRFKRSRSVGAYIGLTTRRHASGEIDWTGRISKCGDAMLRSYLFEAAGVLLTRVPKWSALKSWGMRLAKRNGLRKAKVAVARKFAVILHRMWIDGTEFNWSKKEVAA

SEQ ID NO: 439153 - protein, 363 aa, unidentified
MVEIQSITPPLRPLPGTRHAHLYRIPAERPILSLDVSKDQLVTTYNDRGPQPRQRFTVPNTPAGIRKLLARTPTECCWVLEPTGRYSNLAVDQARSAGRDVLLAEPRRTKAFLQSSHVRAKNDPLDSDGINEYAEARPLPLYPRPTPTLEQTQQLLSARRGLSQSLSRLRQQSRELPLAAAHLAPACEQLQQQLVAIDKQLQALVDAPEHAAELGAAQRLDAVPGIGTVTAAAVNACLQRCVFSHPDQFVAYVGLDITVRESGKKKGKREISQRGDAELRRLLYLAAQSNLRCKQSPFKDQYAREKAKGLTHTGAVCAVARKLAKVCWSLVKHGGEYDAQRVGVQLTRAGAPCAAETEASGSG

SEQ ID NO: 439154 - protein, 416 aa, unidentified
MNAVGIDVSSRKSTVAVLRPLGEVVCLPFDVTHDIAGLASLAEKLKAIDGETRVVMEHTGRYYEAVAKALHEAGFFVCAVNPLLIKEYGANSLRRVKTDKADAVKIARYALDNWADLRDFTPMDAIRYDLKTLNRQFQLASKQRTASANNLIALLEQSFPGIRKCFDSPVRSDGTQKWVDFAHSFWHVDCVRKQPFAAFCERYRKWCKRHAYLFKLSNAEEVYALAKRAVVLTPKAKVVKVLVQEAANQLISISRSVEVYRAEMDRLAAMLPEYPVVMAMYGVGKSYGPQLMAEIGDVRRFERKQALVAFAGIDPMPNQSGDKNVRSNKSSKRGSPYLRKTLFNVIRTYLQCAPQDEPVFQFLNRKRAEGKPFYVYMLAAANKFLRRYYAKLRDYFASLDTLQPVAPIPTILKATL

SEQ ID NO: 439155 - protein, 366 aa, unidentified
MKKVSTVGANQIRNVSQQNLTIGLDLGDRSSWYCVLDEAGTVVLEQKLSTTPKAMKEVFGGMPRSRIALETGMHSPWVSRLLSELGHEVIVAHARNVRLIGESRRKDDRLDAQTLARLARIDPQLLCPVKHRSAKAQADLSVIRARAGLVRARTALINTARGLTKSYGERLRSCNPRNMNPEKAEGLSPQLQAALEPLLAAIESLSERIREYNQRIEHVAQESYPQVALLKQVKGVGTLIALTFLLTLEDPHRFRKSRDVGCYLGLQPGRRNSGQSEPQMHISKEGDPYLRTLLVQGAQHILGPFGADCDLRRWGLKLAERGGRNGKKRAIIATARKLAVLLHRLWVSGEVYEPLRNTGLAMPAAA

SEQ ID NO: 439156 - protein, 517 aa, unidentified
MQRGQHEGFSLLRAICSLNCPAKKNAPAGYELEPLIREIFRAVVRADRARFESSRRILWLMSDHLNDSTIRISDDQSNAASSLWPKNSLTTMDSIPPELGTQNPTYAFSVGIDWADQYHAVYQRRWADGQAQQFQISADPASVQAWLAALKAQLGPQERVLMGFEQSRGALFEILRTHSEWIDLYPLNPLTVSRYREALFTSGAKDDPLDGQLIEELVYHHRDRLRPDLPLEPALRKLQLLCQQRRKAVDAATACKNELTSTLKVYYPLVLHLHEELDCTLTLHFLKRWPTFAQLKKAKPATLRRFYYLHHSRSQNLIEQRLASIAAAKAVTDDPALIEPMVLTVQRLVGQLLQLQGSVAAFDKAIQELFLHHPAHAIFESLPGAGPQLAPRLLVAFGCQPQADCSQMHKKSGICPVLDRSGQRHQVRRRRCRNKFLCQTFFEFAGCSIPHSAWAKAFYGQLRARGKSHNVAVRALAFKWIRIIAALWRDQTPYDEARYLKALQTRQSPLRKIIPFA

SEQ ID NO: 439157 - protein, 368 aa, unidentified
MNTDKYVGLDVHKDTTVVAVAEGGREGECRIYGTISSDLHALEKVLRKLGGAGVRLQVVYEAGPTGYVIARRLAQLQIDCIVVAPSRTPQPKGQRQKTDRRDALMLARLHRAGELTGIHIPDAVDESIRDLTRARADAVHDLTRAKQRLKSFLLRQGYRYTGKANWSEAHQRYLRELVLPLPALKAVLEEYLLTITQRMQQVDRLDDLIAAQVPQWRMYPAVQALMGLRGVQLNAAAVLVAELGDVHRFRHPRHLMAFLGLVPQEHTTGDSRKLGSITKTGNAHARWILAEIVQHAFLPPKVSSHLALRQQGLPASYRELSWKMQTRLHQRGRHLLGRGVMKPKVTIALARELCGFVWALLRQVPTPN

SEQ ID NO: 439158 - protein, 335 aa, unidentified
MEPTTIAIDLAKRVFQIHFVDPDGTIHSKVLKRAQMLPFFANRPASRVVMEACGSAHHWARVLARLGHDVRLIAAQFVRPFVKSNKNDAADAAAIWEAAQRPGMRFVAVKTEDQQAMLAMHRIRQQLVRIRVMQINQLRGLLYEFGVVLPQGRRASIDAAKAALASLADELPAMLVDSLQDQFSRLRALDEQIARIEQRILDWRRNDDACRRISEISGVGVLTATAAVSVIGQARTFRSGREFAAYLGLVPRQNGSGGKIKLGGISKRGDVYLRTLLIHGARSVISSSKHLPERLRQMLSRRPTNVVAVALANKIARTIWALLAYGRTYEAAPSQ

SEQ ID NO: 439159 - protein, 473 aa, unidentified
MRTIGIDLGVTGEHKAVIADEGGRFVSPVLKFKTEPQALVRLLAEAQRNTPDGQVQAVMEPTGMAWFPVAVFLIRQGVRVYLVNSQRVADLRRYFKKHAKSDRVDCRVLAKLPLVSNEELHPLQLASEVGLACQRGCKELDRLGKLHTAIQNRLIALDRFAWPGLESAVFAEPFSPAARWFREHWYHPGRVVHAGAEQIRQAWVQSGLDPQDAGHWADYLVSLAERVLALYGWEGAFLDYELLQAEVQREQALLDFVAAQRQSVQKTVHRLYRQLHPSRNLETIPGVGEDGAAAFASSIGNPQRFDSLRAHRGWSGMVPYSKQSAASQVEGLKLTQAGPRLIRKFAYLDAEVARLHDPQLAALYYDQMVNKGKHHRQAICACATHLLDRILLILREDRPYQLRDVDGTPVSKAQAQTIIAQRYTVPAEVRQRNNKRKRRQRAEQQAEKREEGKLRSRNGVVATPQASLVRGKP

SEQ ID NO: 439160 - protein, 611 aa, unidentified
MIAVETIAIADAKALCRTYHYSNIFPPHCCLALGFYDAQGLGGAAIWGWGVRPKHTIQRLFPSLDTPDYWELCRLCCREELPRNTESQLLSGCVEWFRKNQPDKQVLFTWADGIRGKPGYIYQAANWLYGGFINTEIYLTDDGEPVHPRLLNSRFGSRGKAVWRGLNLRRVRGRQFRYCTFLCGHRRRKQLLRESTVRWTSRYPKHDDLIWKIDAGEGSRETRNLPRNYASQDCQSKERWANICPNEMLVTVTTQKLFKSLVWRHSMRILAIDLGKNNSVACDYEHPSGEHTFTKLKTNPQEMHDLLVEKQPDRVVFEAGPAAGWIGDLCHKLGFSVDVANVNHEGWRWKNVKKKNDREYALNLAKLAAMNQLPTVHLPSPQVREHRSFISYRHKLVSRRTAIKNNIRTILDRQGLKLAWGTAGWNQKSLAWLQSLAAPLKSVPIEECWRGMLWMELEALAAIEEAVKKVDAKLNALAKKNEKIMLLESTDGIGLRLAEAIVAFIDDPHRFKNGKQVGAYAGLAPRQYQSGTMDRQGRISGQGNRLLRMLLVEVSWMTIRWNDWAKQTFERICRGSRSRRKIAITAVARQLLVRCWAMMRDNTRWRAEVAV

SEQ ID NO: 439161 - protein, 438 aa, unidentified
MSNKVIFNLDELFISVGIDVGADFSWMSIALPNQQFVGKPFKILHNSIDSLTTAVSKIKEAEELYSLESRIFLESTGIYHYPLFCYLRDKGFNCSVINPIITKNSTNINIRKVHNDRFDSKKAALVGLKPDLKVSLMPSDLALNCRNLCREYYDLMDNRSAYVNKLQGELRMAFPQYLGIFSNVTINTSLTLLETYTSPSAFLEADKQEIIDIIKSTARFGLTYAQNKYNAIIQAATDANQFGCIIDSNIKRIRLYISFIRKYDEEINSILESLHELVDANEDTDFVKQIHLIKTFKGAGFLSAVSIMGEIGDFSAFSKPKQLFAYFGLDPAVKQSGKFEGTKVQMSKRGSAIARRVIHTLTLQSISISRNGEAKNPVLREYYLKKCDSKPKLVAMGAVSHKVCNMIFAILRDNKPFKIIAPQEHIKQYNAAKCDMTA

SEQ ID NO: 439162 - protein, 425 aa, unidentified
MTERLVGIDVALREHRIAVLDRDGEAVGPSFTVAASPDGVATLLRTLAARDATAAQTLIGLEASGHLWENLEAALVGAGYRVLVLNPLQTRRYRDVVRRKAQTDDIDAHVIAGLLRSGAAQASYVPDEQIQSLRELARLRARLMADRQDYQRQLVAQLDVVLPEHRAVLGDLLTARARGILAQFPTAQHLATANPRAIRRAAADAGARGFSLDDATGVRDSARRSFYRGKAAAARAHVVRTLVSQLERLTSAIDEVDHAATSLLPPSAPGTGPSDAELLQTIPGIGSQTVATLIGELGTLTRFTDARALVAYVGFYPVINQSGDRAATPRLARVGSRIARHSLYLAAVNAVRRSAEWRTIYLRKKAQGKTAKQALIVVAVKLLHAVYAMLKHRQPYNPSRLLVAPATIGSCHLMGCLGRDGWWGV

SEQ ID NO: 439163 - protein, 337 aa, unidentified
MNEIIRIGIDLSKRVFQVHGVNGAEQTVLRRTLRRDQMERFFAALPATLIGMEACGSAHHWARVLQGLGHEVRLLPPQYVKPYVKRGKNDAADAEAICEALSRPSMRFVPVRSRDNQAELMLHTTRDLLLKQKTMLINAIRGHAAEFGVTGAKGSDSISALQQRIATTEAVPELAREILARLFEQIRSLGQQALELERKLKAWHRGHEGSRRLTTIPGIGPINATALTMKVSDPRVFRSARHFAAWLGLTPKDHSTAGRQRLGVITRAGDETLRRLLVNGAMAVIKYAKPGRASPWLLNLLARKPKKVVAIALANKMARIAWVLMTRGEVYRPSLSA

SEQ ID NO: 439164 - protein, 320 aa, unidentified
MQSVCGIDVSKDRLDIMVLPEQQYFSVRNDAAGWAELVERLRGLSISAIGLEASGGYERGAMRALLAAGMPARQVNPFKLRQFARASGVLAKNDPLDARMIASFVAIMPTQPAQLRAPAVERLAEMLAVRRQLSAEKVAAENASRLLEDTMLQRLSRRRIRRLAADIDMLDRHLAEIVGADTALAHRYQLLTSMPGVGPVLAYTLIALLPELGRMSRKQVAALVGVAPYAFESGRFKGRRCIWGGRAPVRNALYMGAMSASNWNPPLRAFHDRLKAAGKLPKIVIVAVMRKMITALNAMVRDDVVWADHLSGRHSVPTAR

SEQ ID NO: 439165 - protein, 387 aa, unidentified
MPQPNDMSRSLITLEQDSTLIAVIEMGQSSWLVAGIVPGIERQPLKKLAADQDGLLQLLHRWRKEAAQAGHPIKRIAVAYEAGRDGFWLARWLRAREIEAYVIHPSSVPVSREHRRAKTDRLDTELLKRAFLGWLRGEPKHCSMAAIPTVEDEDARRPSRERESLVGECTRIVNRVKANLARLGIRGFRPRLAHAPKRLETLRTPEGTAVPANTLAELQRDMAHLRFVKQQIKEIETARAKRLEQASEGGRDAMVRLLARVVGIGIETADMLVQEVFSRKLRDRKAVARYAGLTGAPDESGQKRRERGLAKAGNARVRHAMIELAWGHLLHQKDSALAEWYQKRTVDARGGTRKTMIVALARKLLIALWRLVTTGEAPAGLLLRPAA

SEQ ID NO: 439166 - protein, 403 aa, unidentified
MSQSSTLFIGMDVHKETIAVAYIAQDHGAEVTYLGTIGTRQCDIDQLIRKMPSKATHLIFIYEAGPCGSWLYRYLTKKGYDCWVVAPSRIPKKAGDRVNTDRRDAVQRARLARSGDLTAVDVPKVEDEAIRDLSRAREDTLSDLKDAKGRLKAFLLRHDSRYTGRANWRLAHLRWLSEVVWPTPAQHIVFQEYVRAVTEHTERLQRLEQELQEHVHAWRLHPVVEALQARRGVQFTVAVTMVAEIGDLTRCDTPRELMKFLGLIPSEYASGERRQQGSITTAGNTHARRALVEGAWAYRDPAKVSRHLQRRLEQPPKMIQDISWKAQVRLCKRYRQLVARGKHANIVTVAIARELAGCMWAIAREVPVTPSDEKIERIHPSTQKVPNVHRQRRSPGVVSPSAA

SEQ ID NO: 439167 - protein, 473 aa, unidentified
MTVVGLDVHKRVVEAVVLRAEDGRILHRERFACTREELVRFATKRLGPKARVALEATTNTWSIVELLRPYTGELVVSNPMRTRAIAEAKVKTDKVDALVLAQLLRADFLPRVWQPDGMTQARRRLTARRASLVSDRTRVKNRIHAVLHQRLMEPPVSDLFGTKGMRWLQTLELDAAGRLAIDSELRLLRQIEIEMKAVDEALAVDGYDDPRVRLLMTLPGVDVAVAQTLLATLGDIQRFKDPDAAASYMGLVPSTRQSAEHCYHGPITKQGKGQARWMLVQAAQHLSAHPGPLGVFFRRLAKKKNRNVAVVATARKLVTIAWHMLKNNEPYRYAIPRSTETKLSRMRVKATGERRRTGPPTGQPRPTAYGSGVRTRTVPALDTIYEREGLPPIAPLSDGELRMLRQQKVLKHVAQTSRPQRLPRRAAAAEPPEAAGAAASSQRSVQPASARQAPAAPRRAKSTQTPAPGRRST

SEQ ID NO: 439168 - protein, 346 aa, unidentified
MKKSTTIAIDLAKNSFQICKLVRDQVASEKALNNQKLKSWLQKQPSSHVVMEACGSAHHWGRFCQNLGHDVSIIAPKNVTPFRANQKTDKNDALAIAIAARQPNVHSVGVKTIDAQALQSIERVRQHLNDLIVATSNMVRGLILEFGIAIPKGVSAFNKTIPQILENGDSELPDILRPYLHHMYNLHQGLSEQKVQIEKELSYYINRHSECKKLLELEGIGPINALGLYLALGHTGRNFKNGREASACIGLTPKQYSTGGITTMLGISKKVANKRLRANLIQGALSVVRLLQYREPKNGKETWLKALIVRAGLRRAAVALANKSIRTAWSMLKHDTQYSTSFKHAA

SEQ ID NO: 439169 - protein, 342 aa, unidentified
MTIMMLGIDLGKNSCSVAGLDAAGKVVLLRRMQPKTIVSFASKLPACVIAMEACCGAHHLGRLLANLGHEVRLMSPEYVRPYVKANKNDERDAEAIAEAATRPTMRFVELKSQEQLDVQSLHRVRSRLVSSRTNLTNQLRAILLERGMTIAQGRRKLEHVVDMRLADPNFMANTRIRRLVAEMREEWSDLDRRIEALDREFIELARDNEAAHRLVSIPGIGVLNATALVAAIGDGTTFARARDLGAWLGLVPRQHTTGGKPRLLGISKRGNKYLRTLLIHGARAALPSLAQSQTRLGAWLRSLLARRHRNTVVVALANKLARIAWAALRYGVTFEVTKPAAA

SEQ ID NO: 439170 - protein, 313 aa, unidentified
MSKTFVGIDVSSQWFDVAVTPGRSCWRVDYTPQAVAGFVRQLLTLNVALVVVEACGRLERPLARALDEARIPVAVVNPRHIRDFAKSIGQLAKTDTLDARVLALYAATINPQPRPLPHVEEEFLQSLLARRRQLVGMLSAEKNRLRTSVPELRPGIERHLTWLQSEIDALSSEIAQRQEEHPLWRERKRILERVPGVGTTTSAMLTAYLPELGHLDRKKIAALVGVAPFNRDSGQRTGPRSIWGGRREVRAALYMCTMASIRWNPVIRDFYAQLRGRGKRPKVALVACMRKILVTLNAMVRDGTEWHPQPASP

SEQ ID NO: 439171 - protein, 344 aa, unidentified
MNNLSRVGVDLAKNIFQLHGIDRTETTIWCRRLKRDNWIKVLLNKVEPGCKIGMEACTGAHHWARLLQAKGFHVKLIAPQFVKPYVKSNKNDANDAEAICEAMSRPGMRFVTVKTIEQQNIQAVHRIRSELVGQRTAKGNQIRGLVAEYGLVASQRMNHLRAAIPAWLEDAENGLSGRFRRLLDGLWGDLKRLDKRVAEMDKEIALIAQHDPVAKRLQQLRGVGPMIATALIASVGDGKQFANGRQMAASLGLTPKQHSSGGKDRLLGISKRGDAYLRSLLIHGARSVIYAAREKEDRLSQWVMSIASRRHPNVAAVALANKTARMAWAMLRHDTDYHPELAAA

SEQ ID NO: 439172 - protein, 430 aa, unidentified
MKSNTQNAKIEAITEKTLVLGIDVGSEMHYARAFDYRGIEYSKKPFKFSNTEAGFVTFKEWILNLKERHEKDKVVPGMEPTGHYWFNLGKFLQDNEMKPVLVNPHHVKKSKELDDNNPTKNDRKDPKVIAGLVREGRYMIPYLPDGVYADLRTASNIRFQLQAELTRIQNRISRWFNIYFPEYKTVYGKPDAKSGMLILKAAPLPEDILTLGIDGVNQIWRDEKLRAVGKARAKTLIEAAEHSVGSKEGAVSARMEIRMLLEDYESRNTRLQEVMVLIEELIRKIPMAEKLLEIKGVGIRTVSGFLAEVGDISRFNNPKELQKLAGLALVENSLGKHKGETTISRRGRKRLIYLLFEVAMSLVSKNQEFRELHNYYTTRRLNPLKKMQSLMAIAAKLIRVFYAMLTKGVDYDPKKMVSDIKKPAVYLQAA

SEQ ID NO: 439173 - protein, 420 aa, unidentified
MTPAIQNQESTAMNLESHPYWGNASASEISGNLTRIFKKMKPFPQVLPSPRAFCSIDLGEHTWVAAYLGASGKVGFRNFTGDGKRFAFVEWLREKSGKDGISDLRDVVVCFEIGRCGVWPMRFLNSAGIPCVIMSPDVISENSRKAKNDRLDAQRLAERLRRFFHRELECNHVYVPVPDEIIEARSSERLREVIVKQKTRAAASFKSLLATYTEVPSGLDLTRVVVSRLSDCLGNPLPPNAVRTLEYHLECHRECCEKIKALDKEARLELNAARRQMARGVPMRENDRIMAKLNSLLCIGLQTSRCLARELFWKTFRNVRQVGSAVGLVDVPDSSGTVSRSGGISRCANGRLRKIAIELAWQWVRRQPGSELARWFSRRAHVSKSMKKKSIVAVARKLVVALWKYIQFDIAPGGARLRTA

SEQ ID NO: 439174 - protein, 334 aa, unidentified
MKQVNQVGVDVDSEALVSMMRRGGQRLPLARFANSAGGHKKFIRWATKGARPVRVCLEATGIYSLEFALALHHAKNVEVMVVNPRAMKDFGRASMQRAKTDAVDAGVILDYLERMPFTEWQRPTPEILELQAINRRIDQLHTELTREKNRRHASEFAGASADAIAHDIEVNIHHLERRIARMQDSGLQRVRGVPALAAKLAHLVSAKGIGEASAMRILAELLVLPDDLAAPRWVAHAGLDPRPYESGTSVHPPRRISKVGNSHLRAALYMPALVAIRHEPNVKAFYDKLIAAGKKPLQAVVAVMRKLLHAIWGMLKHDQDFDGNKFFKLTAKTA

SEQ ID NO: 439175 - protein, 429 aa, unidentified
MTNQPIAGFDVSKRFSDMCILGPDNKVFVRMRVHHNVSDFRKACGLLKSAEKEFAMIPTIIMEATGHYHRLLFHFLKNAGYEVIVVNPIQTDSIKNISVRKVKNDKIDAYRIAILYRLKELKPTNMPVEAILDIRNLCRQYYDISDDCTAYLNKLIAIMDELFPRFNDVFGSIASKTVLEILSSYPTPEDILNAPKDKLVEIISKTGRKGLKWALDKYNKLIDIANEVKPLFIKHSSSSILVNTTITFIKTFQNHLKLIEDEIHKIIADNPDYVGKAVELLDSIPGIDTITAAAILGEIGDFSAFNSPKQLVAFFGIDPSQKESGQSKSTDNKMSKRGSRILRRVLYTTAMANVRKKRNKELFNPVLLEYYNQKLVSKPKKVALVAVMHKLVYIIFAVLRDQKPFVLRTPEEHKKLLALKASKHQRETA

SEQ ID NO: 439176 - protein, 315 aa, unidentified
MTKQLCAVNVGVDVGKGQLDLYLLERDRALTVPNEEHAILTLIRVLGRYRIERIVIEATGRLEQPFVRAALAAGLPVIVVSPLKVRRFADAIGQLAKTDAIDARLIAQFAAAVKPIARRPSDANAQAIKDLVVRRRQLTSLRTMEKNRRHVMPQELKSGIDRIIKTLNRELKRLEQLIEYAVDQHAASRHKRELLTSMPGIGNSVATTLIGDLPELGSLNRREIASLTGVAPFNRDSGKLHGKRRIRGGRAHSRTALYLSAMVATRFNPDIKRFYDRLVSAGKHKKVALTACIRKIVTALNAMIRDNSPWQPAMT

SEQ ID NO: 439177 - protein, 314 aa, unidentified
MSTAMYVGLDVAKAHIDGAVRPSGDVHRVPHDDAGLTTLVTEVRALAPTLVVLEATGGYETDVASVLALAGIPVAIVNPRQVRDFAKALGRLAKTDAIDARVLALFAERVRPAARPLPDAAQQALVAMVARRRQLVDMLTAERNRLPLAHGAVRRDLREHIHWLERRLRDSDRDLAAMMRDSPLWRAQDNLLRSVPGIGPVTAAVLIAELPELGRLSRREVAALVGVAPLNRDSGTRRGPRTTWGGRATVRAPLYMATLVATRCNPVLRAFYRRLRTAGKPPRVALVAAMRKLLTILNAIVKTQRPWQPVALDL

SEQ ID NO: 439178 - protein, 409 aa, unidentified
MRLFVGLDVSSFDMKVCFLNGEGEKLDSFSVSNDLPGAQVLKERLLQCTTNQEVETLKIGLESTSVYSFHPSMFLHHDEDLKRFGTKVFLLNPKQVANFKKSYSDMNKTDEIDAFVIADYLRFGRNQMSIVKESQYVALQQLTRARYQLVRMLTKEKQHFLQHLSYKCNTFSQEVDSSIFGNAMMELFLEKFSLEELADMPLEELAEFLQEKSKNRFGDPKCVASTIQKAVRTSYRLDKVVEDSIDILLGTSIEIIRTYQKQIKELEKSIKRIMAGLTQTLESIPGIGPIYAAGIIAEIGQIERFDDETKIAKYAGLYWRTYQSGRFTAENTSLSRNGNHYLRYYLVEAANSVRKHVLEYQEYYAKKYNEVPKHQHKRALVLTARKFVRLVDALLRNHQLFTPERCVKV

SEQ ID NO: 439179 - protein, 339 aa, unidentified
MSKLFKNFVGIDISKSWFDITLINQQLVAKPLHQQFAQTATGYSQLSDWLQLHQVAINQETLFCLEYTGIYNTGLVNFLVHNAAAIWVEMPLSIKKAGGLERGTDDRSASCKIAWYALRYHDQAKLWKPADTSIEKIKHLIAQRERIVNTIKLLTIPAQELIECGCSQEGKMVIKLQQPVIKALQKTKLQIESLINKTIKQDEQLNHTIELVQSVNGIGKVTATALLVYTKGFTAFTNAKELACYCGVVPFNKTSGSSVRYKPSVSPFANMKLKKLLHLCAMSALQNDPEMKAYFERKLLEGKNKMSIINAIRNKLIHRVFAVVRDGRYYEDNYIRTCA

SEQ ID NO: 439180 - protein, 321 aa, unidentified
MLFIGCDVSKRTLDVSFQQNARSRRFSNTRGGFADLVRWIEKHGDGTACVILEATCVYHLPVSEYLAEHGVQVLVANPARAHSFASAQGLRNKNDKLDADTLGRFGRSLDLARVHLYQPNKKIINQLKALLKRYTQVEKDLQRERNRLEKCTFIPDSDLSARSIERQVAHLEAERDLLQVEIRKLIHSDERLKHDDQLLRSITGIGPTTAPWLLMLLHENRFSSARQLAAFLGLTPRHRSSGTKVQRGQIPNDCDRRLRARFYYPAVTAQTHDPNFRALHQRLISNGRTQKQALTAVMRKLVHVAFGVIKHQTEYNPEMAS

SEQ ID NO: 439181 - protein, 366 aa, unidentified
MKKISTVQALSNEIFKEQRLTIGLDLGDRWSFYCILDEVGKIILEQKVPTTTEGMKQTFVKVPRSLVALETGTHSPWVSRLLTELGHEVIVAHAQKVELITKSNRKDDRHDARTLARLARIDPQLLSPVKHRSAKAQIHLTEIRARAELVSARTALVNAARGSVKSYGERLPKCGTQQVSRKLAAGLSTELRDVLEPLFREIESLNERIQEYDQRMEKIAKELYPEVSLLQQVKGVGTQIALTYVLTIEDPHRFAKSREVGCFLGLKPGRRNSGESEPQKKISKEGARYLRTMMVQGAHYILGPFGEDSDLRRWGLKLAERGGKNAKKRAVVAVARKLAVLLHRLWVSGEVYEPLRNSQKAMRAVA

SEQ ID NO: 439182 - protein, 363 aa, unidentified
MMTSPVAGIDPHQDSFTVGIVTPNGVELAHATFPNSAIGFVEAIELLTTNGVRQVGVEGSASWGAHVAIALVGAGFDAREVPPQRSARKRQARRLDKTDVVDSVAVARALLAEPTLGPVQALEVYDPFVAKIEAVLEHRRMLVDVRTLALHHIQDQIAKLPTEIRDQLCATGKIESRLRRLEQLDIAEVSTLAGRYRLSWLTAFIDRDRQARREIRQLERDLDELLDEHGTTLRDEPGIGPIAAATLVVEVGDPHRFARESKFARWCGTGAVALSSGEGTGEPVKHRLDFGGNRRINSVLYIASVTQQRDLDEARRYIDRKVSEGKTRREARRAHKRHLANRVIRRMWSDEQQRLNRQLQPAA

SEQ ID NO: 439183 - protein, 434 aa, unidentified
MEEVTDEPLYRDRVCGIDIGKAEMYATIRVPSDTNPARRMSETRSFATTRRGVLALADWLRSWQVPAVVMEATSTYWMGPFFRLEAEGLECVLADARQVKNLPGRPKRDPSDSSWLAQCFERGAVRPCFVATAEFRIIRLHTRYRRDLIEDRTREKNRTEKLLESAAIKLSSVVSDLHGVTGRDIMDHLIAGRRDPKVLAQLARARARRKITDLEHALEGAEFFTDHHARLLKTMLERIDQIDAQISGLTAVIEELLAPYEEQLQQAESMPGWGRRSAEDAVAETGADMSKFRTGGHLSSWAGRTPLDHQSGKRNGRARHKKGNKYLGAITGETAVAAGKTQTREGARYRKLARSRGKNKACVAVGNTQLKVYHKLLSNPGMRYQDLGPDYYERRAQTRRKIAYHVRELEELGLEVTLCRPSPAQDDPEPTQAA

SEQ ID NO: 439184 - protein, 418 aa, unidentified
MDVMVERCAGLDVHRDNVVATARVPGQGRRRWDQQTQTFKTTLPGLAELAGWLADAGVTLVGMEATGVYWKTVFQALEDRFECWLLNAYHLRNVPGRKTDVKDSEWICQLVQHGLVRPSFVPPPEIRRLRDLTRLRAAQSNERTRTIQRLEKVLQDAGIKLSSVASTSYSKSARAMLEALLSGVSDPDQLAELSKGKMRAKIPQLREALLSRFTIEHHGVMVAQLLAHIDTLDTELQHLTERIELVLAPHAHIVELLSTIPGVQERAAQVLIAECGLDMSVFPTVGHFASWAGACPGHHQSAGRRKSGRTRPGPGWLTSQLTECARAAVRTKDTYLASHFAQLRGRRGEPKAIGAIRHDLLVAYFHIVRDQVPYRDLGPDWQRKRYSVEHRARRLQRQLEALGYAVTLEQADTAEQAA

SEQ ID NO: 439185 - protein, 351 aa, unidentified
MVYQNYWVGLDAGHLETAVCLVDADGQIIFEGICETKSGPIRDILRRHGVEAVQRVTIEAGNGTQMVRELMSFGFPVQVVDVRKSSKFLAIRRQKTDVHDARGLAELGRIARTMGSSVYLKPLEHQNIRSLMNVRRTLLKNRTRTDAVIQSIIRLHGGDIKLLTGQGALLAEVKNQTRLMKREGLEIGIDLYPIVEIAEALRVQISVLDRQLRDLASSIPACSNFMTVPGVGTIVALSFYSAIGDPYRFKHNRDVGAYLGLTPTLHQSGITSRRGRISRHGNKLTRMHLITAATVILCRIETESHLRAWGLRLARRIGILKARVAVARKLAVIMLNMWKSGLAFRSYGSSS

SEQ ID NO: 439186 - protein, 530 aa, unidentified
MTSMTTTAAAVIGGVDTHADTHYAAALDQVGRLLGTRQFAADAAGYRQLLGWLESFGSVQRVGVEGTGCYGAGLTRFLRGRDVTVVEVNRPDRRARRLRGKSDPLDAEIAARRAMAAYDTAVPKDTATAVESIRVLRLARDGAVKARTAALNQLKDLITTAPDQLRSSLRGKTLRKVAAEAARFRPDMTRLANPVQATKTALRSVGARVVALNGEVAALDRQLGALVGATAPRTMALFAVSTQHAAQLLVTAGGNPHRLRSEAAFAALCAANPIPASSGKTTRHRLNPAGDRDANATLHMIAVLRMRWDPATRDYVTRRTEDGLSKREIIRCLKRYIARQAYHAVTADLAEPATCDDTPKLARVSSEPVELIALDEPAQGLISARRNGEPTFTHQAALPRPAREPPTRTPAMGQSALTGSLPTQLTFRYTDPLTIYRTIARHSSSASSLRAHSFAQMPRCPCVPYPAARCARIISRCPRGNGWSTQRRRYSSSPYSSSTACAPSAIATAIARRGCLVSKMTTPLSSGSRE

SEQ ID NO: 439187 - protein, 329 aa, unidentified
MNYVGMDVHKHFTYAVIKDSQGNRLAEDKFTNDSVNFELFLEPYKPEETKIVMESTGVWEYIYEILEAMNYEVKLANPVKTKAIAYAKVKTDAVDASTLADLLRANLVAESYIPAKEIRKLREITRLRKMAAKQRIQTENRLHALLTKRGIFLPKKTLCKKSFEFLTELNDPSISEYLDLIELQRQKENSVEKRIEALAENNIEAKILMSFPGIGPIRAMEILAEVGDITRFPTADKLCSYAGLVPSIKQSGSSLRFGRLMKQASKSLKHVFVQTAWALTRTKESNSFQEFYKKLAKKKGKQKAICAAARKVCCTIHAMLRKKEEFRYS

SEQ ID NO: 439188 - protein, 338 aa, unidentified
MTVVTVGIDLAKNVFAVHGVNAAGKAILVKPLVRRAKLLELIATLPACLIGMEACSGAHYWAREFQKMGHTVRIMVPQLVSPYRMGGRHGKNDAADAAAICEAVARPNMRFVPVKSIEQQGQLFVHRAHQSYVSERTTLINRIRGLLSELGIVLPQAFKAFLSGVAQVLEDLPGYCNQVIGDLLNELFHIEEKIKNSEKLIPQLARDNSAAQLLMQFRGVGPMTATAIVASIGNGHDFRNGCQFSAWLGLTPRQQSSGGKARLGRITKAGDSYLRTLLVLGAKSVLLGAAKNDDPVSKWALQLKERQGYGRALVAIVAKNARMCWAMLHLKDEFRFPS

SEQ ID NO: 439189 - protein, 360 aa, unidentified
MKQHKYVALDVDSANIVAGVFDSQGRLLMQTHLRTEAKVIQEFFKMLTGTVHVTFEEGAQAAWLYELIAPLVAEVVVCNPRENKLLKAGNKSDQIDIGKLGRLLRLGELKPVYKGVQSNQGLKHLVHSYEELVADTTRSKNRLKALYRGRGISCKGEGIYGREQRERWLAKLETKEMCTRAKSLFSQLDSLEQLTSQAAKTMCNVARRHAAYKWLSSVPGIGSIRTAQILATAITPLRFRGKRQFWPYCGLAVVTRTSSDYEWVDGEVRRKRKVIQTRGLNQNCNRRLKGVFKGAAASAVQQHAEVKEYYEGLCANGMRPEMAQLTVARKLAAIVLSLWKKGELYDPGRLKQAAPGAGRQ

SEQ ID NO: 439190 - protein, 329 aa, unidentified
MSGQLEHKTFSQLPDTQSLHRYLTRNFPGATYHSVYESGYCGYWIHRELLSHQINNIVVNAADVPTTGKEKTNKTDKRDSRKLARSLSKSQLEGIHIPTRKTQEDRSLLRTRYAIRKNLSKEKVRIKSMLNFYGIEHPQVFEKSTTHWSKRYLEWLKNIPMEYESGKSSLDLLIKGVEELRKLLLETNRKIRQLSCHRDYKENFELIDSIPGIGLVIGMTLLTEIEDIQRFNNIDQFASYVGLVPTCHSTSEKEQNGEITFRSNGLMREMLVESAWTISAKDPAMNLAFIKLCKRMEPNKAIIRIARKLLNRIYFVLKNKQKYVCCIAK

SEQ ID NO: 439191 - protein, 352 aa, unidentified
MMIIGCDFHPRFQQISFLLEGTGECGQRRLMHTAEAETYYRSLGGAKMRIGMEATGSYGWFRRLMSELGHELLVGDATQIRASNPRKQKTDKRDAEHILRLLVEDRFPSIWQPPAENEQLRQLLLHRSRLVRLRTRVTNQLDGMAKNEGLCVAGGWSGKRRKEIEALPLPGWYGERRQDLLALLDRIEERVAPLNQAVSQAAADNAEACLLMTHPGVGPVVSLAYVLTIGNWQRFARGKQVGSYLGLIPAEDSSSDKRRLGHISKQGNTLLRWLLVEAAATAQRYDPSWHRQYLRLSMEKHHGVAKVAIAHKLAVRLYWMLRSGEDYQHVRERGSHARQSECPGGRQKRPIE

SEQ ID NO: 439192 - protein, 325 aa, unidentified
MNEGTKFFGVDVSMETFDVSTPDQKHVQFSNNQEGYNKLLKLMGSGSHCVMEATGAYHQKLAFWLFSHEIKVSVVNPIVIKRFAQMRLRLAKTDKADARMIRQYAEAENPEVWIPPQEYITEAFEINGLITLLIRQRTALKNKLHSVNHKEGGFSMIMKVIEKQIKNLDQEIRQLETSMEKLIQEHEREMLTTLCSIPGIGKKTAMFLIVITDGFRSFENSKQLCAYLGLAPTIKVSGKSVRGQSRISKTGNSTIRNLLFMCSFTACERNKACRELYTRMVNKGKSKKVGLIAVANKLLKQSLAIAKSGIPYNEAHYSMRPICVQ

SEQ ID NO: 439193 - protein, 353 aa, unidentified
MSIVAEHYEIVIAADTHAATHTLALVNAVNGAVDSQEVFPNTPAGLDRACRWITRMAVGKSTLVVVEGIGSYGAGLADRVADAGLLVVEPSAMPAAQRRGIGKTDGLDAVRIARSVLGVETSRLRFPRSTGPRVALRVLAVAREQMVAERTRVINALTALLRTVDLGVDTRKPLAHSQFKVIVAWRNRNEDPVTGICRQEAIRLAKRITDLDAELADNRKRLDVTVADVAPELCELPGVGSVVAASVLTAWSHPGRVRSEAAFAALAGTCPIPASSGNTVRHRLNRGGDRRLNRALTTIVIVRMRIHAPTRAYVARRRAEGRTTKEIMRSLKRYITRQLYRTLAAAHPRAVAT

SEQ ID NO: 439194 - protein, 403 aa, unidentified
MRATCGIDWASDWHDVHISDEHGQLLVAEQFSHDETGINALIGLLLAHRVECCAIERPDGLLVGRLLAAGIVVLAIHPNQVKAARERYRAAAGKNDRFDAFVLCELARTDRHRFPVLAPSSDETLALKALVRTREDLVDARIALANQLRAQLQAFWPGAERIFADVDSPIGLAFLERYPSPTDTRGLGEKRLESFLARHAYCGRRAPTELLARLRSAPGAVVGELEQDARRSAVIGLVAALRPIVEQISQLTSQIAGATKAHPDGAIFLAFFRDAKSVVTAAGLLAEIGDNRARYPTNDSLAADAGQAPVTIQSGKRSNATFRWACDKRLRKHMSVLADSTRHWHPWARDVYQRARARGASHPHAIRILGRAWSRVLWRCWQDHTPYDPTQHRKLQQLLTTQG

SEQ ID NO: 439195 - protein, 318 aa, unidentified
MTNLEMAEYVGVDVSKARLDIAVEATGECWSVANDEAGVSDLIDRLSQMALGRVVVEATGGQERLLVCRLSDAGLPVSLVNPKQTRHFARGLGRRAKTDRIDALVLACFGRVTQPILYVSLSEQAEELSALVERRQQLVESLTAEKNRLGTARPAARPSLEAHIRWLEQEIESLRRQIEALLQQTADLKSKSEILQSTPGVGLITSVTFLAALPELGHLNRKQAAALVGVAPFNHDSGATHGARYCSGGRAAVRTALYMATLSAIRCNPLIRDFYIRLKDRGKPSKVALVACMRKLLTILNAMIRDCIPWMPQKVATP

SEQ ID NO: 439196 - protein, 343 aa, unidentified
MQTITTIGFDIAKSVFQVHGVDAGGQVLIRRQLKRRQVLAFFEKLPPCLIGIEACASAHHWSRELQALGHTVRLMPPAYVKPYVKRQKNDMADAEAICEAVARANMRFVPTKTPEQQSCLMLHRTRHLFIRQQTALINSIRAHLAEFGIVAPVGRKGVTELLRGVADPNDKRVSEVARVCLAALGSQLLALKQQILEFDRMILAWHRSNQTSKRLHYIPGVGPMLATALVASVADPSTFRSARNFSAWIGLVPKQHSSGGKERLGSISKQGDRYLRSLFVAGALAVIRYAKIHGAGHRPWLTALLARKPTKVAAVALANKIARMAWVMMARGERYKEPIALAR

SEQ ID NO: 439197 - protein, 297 aa, unidentified
MTRRCFGLDVHREFAQVAIWQDGVVRHAGQIVATPEGLRLFADSLAPSDEVAIEATCNTHAIAKLLEGRVARVVVSNPQKTRAIAEAKVKTDKVDAEVLAQLSAADYLPGVWLADDHTHALRRQVARRAHIVRQRTRLKNQVHSILHRNLVPRCPAADLFGHKGRAWLAEQPLPPDEHRAVGALLRQLDFHAEELRVIDAELGRAGLASAEVKRLMTIPGVDATVALSIVAAVGDFGRFPSPEKLVSYLGLNPRGRQSGGQPPRTGASPSRAAPTRAGCSSRPPGRRPRRRAAARVL

SEQ ID NO: 439198 - protein, 406 aa, unidentified
MVEKFCGIDVHKETLVATILDGQSEEKQTQKFQNTLPDIENLKQWLTQTQCQTVVMESTGIFWVTLYLTLEEAKLNVMLANAHRVKGIAGRKTDQSDSEWLAYLARAKLIKPSYVPTKQLRDLRLLTRLRTKYTQNKTQYKNRCQAILSRVNIPISTKISDVFGKAGSELLEGLMAGKSVVNILDTTQNKWLIAHRDEILEVTMGTLSATDVFMLEQLTDMIAHLNTRIAAVDLRIEGLLVEADLRIVSSVPGVGRTTAASILAELGDVTRFENSKQVSAWAGLAPSVYQSAGVTILGHITKHGSRWLRRSLVEAAHAAVKVKNSVFRRMYFRVAQRRGKKSAVVAVARKLLTIIWHLLVNGELYVEEGFSKKPLKRRSDGLLDELSLDGMVEVLRKAGYTVSSAG

SEQ ID NO: 439199 - protein, 333 aa, unidentified
MKNELIKEFVGIDVSKLTLDVHLHVKNLHCVFSNDSKGHLSMFSWIRKQCRKNEELLFCFEHTGIYSLELAVFLKKNDQVIYIVSGLAIKRSMGLKRGKSDKTDAKEIAKYIFQNHYALKPTELASDAIQELQMHISFRSNLVKKLASFKMHRKEFGKINESKGYDQIEQVTAEIMTALKKGIKEVEKQIQEIIYSDEALKNTFENISSIKGVGPILAATMIVITRNFTSFETSRQLACYAGIAPFEHSSGTSYRGKNRISNLGNKDLKSLLTMAAISSITHNPELKIYYQRRISEGKSKMSTINAVRNKLVSRIFACANRNSKYVEIYKFAA

SEQ ID NO: 439200 - protein, 421 aa, unidentified
MPNIEIGVDSMVKENFIYVGIDLHKETHTAVMIDCYNQKLGEITFPNRPADFPKLVTKVKKCNTDGKEVVYGLENAYGYGRALAVWLIDKGYLVKDVNTAISHRQAKHRGAMYRKSDSDDAKAIALATLNMLDKLPDACPNDAYWSLGQLVHRRDNIMKQRTRLVNQLHEQLCIAYPSYKQFFNDISRPTALYFWEHYPSRKYLKGKSVEDLRAELVPVSHNKCSTKTCEKILDAVASDKVKNNAYQDARDMVTLSIVSDLQHYDSQLAEVDKMLEQMYKMLGCTLTTIPGVNVITAVKILAEIGDIKRFANANKLAQFAGIAPLHLSSSGKGKDVATKQGNRRLQATIYFLAIQMVQLSSKGTPRNSVVRAYYEKRKAEGKTSQQALICISRRLISIIYGMLKHGTEYRMPVVESAGENR

SEQ ID NO: 439201 - protein, 350 aa, unidentified
MDITTIGVDLAKRIFAVHGVDRQGKTVLKKTLRRDQIIPFFTKLSSCTVAMEACGSAHYWARKLRSLHHQVKLIAPQFVKPYVKGNKHDAADAAAICEAASRPSMRFVAIKSEASQAVLALHRVRSGFVKARTAQANQLRGLLAEFGFTAPLGVNALIDEVKQVMSDESNGLPFLMRGLTQRLLSHLLVLDRQVQEIDLQLRTIAKDSEVCRRLEEVPGIGPITSTALVASVADCVQQFKNGRQLAAFLGLVPKQCSSGGKERLQGISKRGDVYLRQLLIHGARAVLGHTLRKPDRAGSWLSRLAIRRNTNVAAIAQANKMARVIWAMLTRNEGFRSDIAVVPTGNIGPA

SEQ ID NO: 439202 - protein, 400 aa, unidentified
MIAVGIDVSKYKSTVAIISNTGEILLPPKVYTHTYSALLSLVSLLKKQNDDIRIVMEATGHYHYPILKLLLGHHFFVSVVNPYIIKKYNDNNLRKVKTDKQDAIRLAFYALEKSYCLNAYVPAGEKYADLKFLYQQYTQRIHIIQKEKINLCHLLEESMPGLYDMLSTSVRNPSKNLLYSFVKRFKSFNRIKRMGKERFLNSYFKMAAEIGSRRRKNYALDIYEMAKDCIATGSTEPYSTMAQEECLRSLILAEEAANRLCEQMNSIANTLPEYPLVRSMYGVGDKIAPQLIALIGDIRKFKSGKALNAYVGNDAPPYQSGQFESKNRHISKRGSTELRKVCFEIMCCIKVHKSPEDPIYKFMQKKESEGKAKKVAIMAGINKFLRIYYARVSEVYQKAL

SEQ ID NO: 439203 - protein, 347 aa, unidentified
MNFYHSTHRHYCGIDLHARSLYVCILDQQGEVLLHKEIKARPEPLLALLEPFRDDLVVGVECMHCWYWISDLCEEHGIHFILGHALYMKAIHGGKTKNDRIDSFKIAMLIKGGNFPLAYVYPKKMRATRDLLRRRTRIVQHGAMLKAHVVNTTSQYNLPPNKVNLKNVGAREQVRATFVDRDVQHNIDLDLAIIECYHRELSRLEEHLERQAKQHDPASLSVLRTIPGVGRILALTMLYEIGDIQRFESVQKFASYARLIKCKAESAGKVYGTQGNKIGNAHLKWAFSEAAVLYLRGNDKAQRYLQKLQKRMNKPKALSTLAHKLGRAAYFMLKHQRVFDEQRFLKS

SEQ ID NO: 439204 - protein, 394 aa, unidentified
MACLLIGAPGEQPTKEVRTFRTMTRDLEALRDWLLEAGVTHVGMESTGVYWRPVYAVLEEHFDLIVGNARHIRNVPGRKTDVKDAEWIADLVRHGLIAKSFVPPKPLRELRELLRYRRKLTESQAAERNRLQKLLETANIKLASVASDVFGVSGRAMLRALIAGEASPEAMADLARGTLRRKRDDLVLALDGRLEEHHRFLLAMQLRRLEAIEADIETLDRRIGERLEPYSAAHALLMQIPGVDWVVAAVLIAEIGVDMSVFISVYHLSAWAGVCPGNHESAGRQRSGRARKGNIQLRTILVSAAISASRTKGTYLKDKFHRLKARRGGLRAALAIAHKILVSAYHMLAKNLPYRDLGEAYLDQIGQTRTVANLKRRLERLGYKVTLEPNAQPT

SEQ ID NO: 439205 - protein, 504 aa, unidentified
MKNAKAPQSAKSIYRNQNPLLQAIFDRAGDPRRVLCVALDYAKAKHMALFCDGHGEILRKAFAVENTTAGVAFLVEQISATARRRKIAKCNIFLGGEDAPSYVANFTEALRVRQYLVLRVNAAEAAENRESHQASTDELDLLGIAKTLLSRRATSTGPVRAAKTPKQSTSNDVYFEMREITRHRRALVRQQTASSNRIHALADQLFPGYLVATKSGLTPFCQASMALMKERFCAPEIARRRPQTLSSFLARYGVRQSAEVAAQLIALAKNALPPVSTHVAGLQRALSAAVDLRECQERNAKALREHAATLLASTPYCVLTSIQGIGFTLASGLAGELGPPQSLRPLDSLCAFAGIVPRTYQSGGPDQPANQGHTAPRCNRILKDWTVQSAQKILLYGPPELKDRITRWNLNGQHGIFAGARHYLRLARSLVLNQTPYLDPMARSLIASPEDLAGATLQTWEILLRKWRTIPGGLSLLADESCPLGLWRRVVMESRSIELPLRPT

SEQ ID NO: 439206 - protein, 321 aa, unidentified
MEEVKRFVGIDVAKVALDVFIGSAGGAFSVANDEVGIRELLRQMKPADFVIVEATGGLETPVASALAAAGIAVAIVNPRQVRDFARATGRLAKTDRLDAEVLARFGEAVRPEARPLADEQAQALEALVTRRRQLVEMLTAEKNRRARAPKVLHRSIDEHIRWLEKRLSEFDDELGELIRTTPLWRERDELLRSVPGVGKVLSSTLLAQLPELGMLNRKQIAALAGLAPFNRDSGNMRGSRSIWGGRAQVRRVLYMATVAGVRSNPTIRTFYLRLRTACMRKFLVILNAMLHNKTRWQTPAPTFLTSSLSPLLGAVCEHGCC

SEQ ID NO: 439207 - protein, 428 aa, unidentified
MDEVNRNRLEEFRQLRQEIRQSEEYLIIGIDIAKDRHHAFFGTATGKTLLRRLVFSNDGEGFRKLLEQAEALRVRHDLKKVIYGMEPTGNYHKPLGEYLIHMGRTVVLVSGVTVKHNRESLDGRWDKHDDKDSANVADLISQGKYLYYEYPTAELRGLRGLLSLKRRLKRQEQSYRVRIRNHLIAQYFPEMDSDYGRSEAQGLAIVRWCFPISQITEIDVDPFIERVTSRRVNMEKRRRLEALWEKAGESIGCDEVPGVEHEAKVMVEGLRQIREMIKETEERIEELCKQFPEYPCLLTIPGFGPDVSAKVLGAIGDPDRFQNGKQVLKQAGLDLSANRSGKNSAQAIPQISKRGKADLRYALYQAAFIASTKNQDFMRYYTSKLRGREKEKGIHTKMLIKLSAKMLLIAWTIMRKKETFNPTYLKAE

SEQ ID NO: 439208 - protein, 367 aa, unidentified
MEKSITFVGLDVHKETISVALAEGGERGEARVYGEIANRPDALRKLMSRLEHDSHELHFCYEAGPCGYGIQRQLTDSGHDCVVVAPALIPKRPGDRIKTNRRDALKLSRLHRAGELTSVWVPDPAHEAMRDLVRARLAAVRALRHARQQLSGFLLRQGRHYSRKAWGPMHRRWLAGLRFEQAAHHVVLEDMIATVEAATERRDRLTREIETRLDDWSLAPVVRALQALRGMALVSAATVVAELGDLTRFANPRQLMAYLGLVPSEHSSGDRRRQGGITKAGNNTARRMLIEASWSYRFPPRVSRDLLLRQEGLPKPIRETAWKAQLRLCRRYRRLANTGKPANVVTTAIARELAGFIWAIAQQTQTN

SEQ ID NO: 439209 - protein, 389 aa, unidentified
MLLDHPSDEPAAIRTQFGAIFVSLELSRSNWLVTSLSPGKGEKMSKHNVAAGDIAGLLQLFAELKRRAQARTGQDYPIITIQEAGLDGFWLHRVLQQEGIESHVVDPASIATPRRRRRAKTDRLDGEMLLRALLAYKRGEPRVCAMVVAPSPEEEDRRRICRERATLIAERIAHVNRIKGLLSAQGISDYAPLRRDRRARLAALRTGDGRELPAHLRAQIGRELDRIELLLEQIKAVEADQDALVGAAEDKAGKGAVPAPVAMLLALKGMGANFAAVLWSEAFYRQFANRRQVGAYAGLAATPWQSGGIRHEQGVSKAGNPRLRTKMIQLAWLWIRHQPQSELTRWFKARSQQGRKSAIVALARKLLVALWKYVTAGVVIEGAVMKRAA

SEQ ID NO: 439210 - protein, 349 aa, unidentified
MVADEVDYVLGVDTHRDKHMLAAVTAPTGAVVAGVEVSADARGYRATLRFAARYAPGRRVWAIEGSGSYGAGLARYLAERGETVLEVSRTPKGERRLRGKDDVLDAVRTARAALASRTLTLPRAGQRREALRLLLLARRSAVDVRREALGQLRAVIVTAPDELRKELRELPVGKLLDRCRRLRQTRRASADELATRLVLRSLALRIAAATSEAEQLERELLGHVRALAPALLDEAGVGPVVAAQLIVAWSHCDRLRSEACFARLAGVAPVPASSGQTQRHRLSRGGDRQLNRALHTIALHRRQHDPATRDYIARRIAEGKSKRDATRLLKRYLARHLYRLLEQQQPQMT

SEQ ID NO: 439211 - protein, 395 aa, unidentified
MKHILSFDIAKGKSVYCFIDELRNVIIDASLIEHKKDEFDNLFNLIKDYPNLIVIMESTSVYHLPVETYFRSKGVDTVVINPKLVKQFKDTLNKSKTDKLDCFKIARCFLGTIDNFYQKQDEYFMYSPLARQYWSLIEGQTRLKNRYRQLIDIVFPEFALIFNDLYDDLALNFIHDFPHPVLFVNRRIDYLMNYLKEKNGTTQAYRFKNKVLKMKELASNSLYFVAFDSYQVQNLIQVIEMIQYHKSEINKIKKQLINDMKDKELFKIINSIPGFGEFSTALFLAEVGDITRFDDKYQFISFIGIDSVTSQSGVSAYHGPISKTGCKFGRTILFNIVTTILQISAHTDKTNPIYLFFRKKQSEGKHHYKCIIACETKLCKIIYKLCSSNCLYENK

SEQ ID NO: 439212 - protein, 463 aa, unidentified
MSSPLILTFDVSKGYGDFVLMNIGKHVLEDRFRLDDNAEGHRLLKQQMRAWKKQYKADRIIYVAESSGGYEDNWLRVAQDKLVSEFVEAYRLNAKIIYHEYEAQRRKSIDDGVSALTIAEHVAKNLENFAPKAFKEDPEYKAARSLVRHLVSLENDCTGHKNALLKILYQYLPSVEACKAAGWANYFLDMLIFYGSRKSIQLAAAKGFKRLSRVPKGKAEEIAEALKNGIDVQDTPDFVVATIQSKARQIKYLKEEIKTLEKMLCSSAPVDTGQVDLLCSLKGMGRVTATTLLLFIEDFNRFDDAAHISSFFGVQPRIKKSGDGAYKPKMSKQGNGLVRRELYLLAFRCLDNDSYLRSIYAKHRQKGKSHDSALGVLMHKLIRMIYGMLKNNSPYDPGVDQLNQQETKSPEANLEPVKEDPARRFQSEGLNAPLSRRQKKKRQEIQKSYELQATAGDAKAESS

SEQ ID NO: 439213 - protein, 352 aa, unidentified
MTVTIVETCVQARAITGGVDTHADVHVAAALDPVGGLLGVQEFPATPAGYGRLLGWLGGFGTVCLVGVEGTGRYGAGLARHIAAAGVRVVEVDRADRQDRRRAGKSDPLDAVSAARAALSGRAAGAPKGRDGAVEAIRALMVAKRTARAERVQTINQARALVLTGPDDIRARFAKHATDALVAELAALRPRPGSMVRYHTLLSLRELGRRAQFLDQQLGRLDELIVPLVTARAPGLLARYGIGPHTAAMLLIAAGDHPERLRSEAAWAHLCAAAPIPASSGKVNRHRLNPHGDRQANHALWQIVITRMSSHPPTRAYVARRSKEGLSKKEIIRCLKRYVAREVYPHLRPGTG

SEQ ID NO: 439214 - protein, 360 aa, unidentified
MQTQSTELNFEGQNLFVGIDVHLKSWTVSIFTEKLFHKTFTQPASAETLFNYLKRNFPGGVYHSVYEAGFSGFWTHYRLKEMGMQSIVVNAADVPTSQKEHLLKDDPTDSRKLARSLRSGDLKAIYVPDPSTLGDRSLVRMRATLVKDMIRFKLRIKSFLYFYGITYPQEFEKSGTHWSKRFMKWLNEGVSLQNESGNQAFKILLQEAEQQRKLLLEVTRKIRLLSRNEKYLNNIALLRTIPGIGFITSITFLTEIEKIERFEDADHFAGFVGLIPNRHSSGENDKNGEMTFRGSEALRKMLIESSWMAARFDPALNMSYHSYVRRMEPNKAVIRIARKVLNRMYFVLKNKKEYVSGVVK

SEQ ID NO: 439215 - protein, 452 aa, unidentified
MEEQEISMEIVNPHAAGIDVGSRSHWVAVGQRDQDIREFGVFNQDLFGMAEWLKEKNVRTVAMESTGTYWQNLYAVLISKGFYVILCNGKFTKNIKGKKTDVKDCQWIQKLHSLGLLSSSFLPDGKTEQLRTYCRHRANLLHSAASTSKKMQKYLRLLNLRLDVVVKDVCGLTGLAIIRAICQGETNSQKLAMLRHANCRKSEAEIAAALQSNGRKDYLFALQQELDTYDHLQKKIAECDVMIDQMLNEIIDNDENKKQHYIEPKTYKRINKNTPKDIDLNLKSYQMFEGSDLLAIEGMSYSTVLALMSEVGIEGIRRFSSAKQFASWLRLAPNNKVSGGKILSSKVPKGSNRLKIALRNAANAIGNLKDSTPLRDFFQRINFRKGRVSAISATARKLAVIIWNVVVKGIPYQNPEGYLFLDQKRKLGIVKRIQKQIDKFALTNEDLQFANK

SEQ ID NO: 439216 - protein, 398 aa, unidentified
MVCVGIDVAKDKHDCCILDSDGTVRADCFTIPNNMDGFKQLLQTIRDCTKKSDKIKVGLEATGHYSYNILGFLLDNGLPTYVINPLHTNLYRKSLSLRKTKTDRVDARTIATMLLSDVDLKSYTDIAYHNEDLKSLTRYRFDKVQERAKLKQSVSRLATILFPELEQLVSSIHGTSIYALLGEYPGAKQISEVHLTKLTNLLTTASKGRYGKEKAIQIREAARTSIGSVMPAKSLELKHTIKLIQELASEINEIEDSIQKIIDELNPPILSIPGMGVNSAAVILAEIGDFSNFSSPDKILAYAGCSPSTYQSGKLTNCYAHMEKRGSRYLRHALYNATKYVCYWNPVFAEYLAKKRAEGKHYNVALSHAMKKLVRLIYALQKSGKHILQLPDFLLSLS

SEQ ID NO: 439217 - protein, 406 aa, unidentified
MKPTYFLGIDAAKHKMRATLSDRSEHVLFEKDLSVEATGLRQLLAAIKRQVNDPEQLLVLIEATGLLHLNWSAALTKAGYAVAVINPLIARRLYTLQNSIRDNKSDPIDARGLCTIGLLHGEKLLAHYRFSLRPEQFTLQRAQSVRKALRSALTNLKKTYQSLMDLSFPELGGLLQLDGVGIRQLLIQAPTPAAIASKRLSTLEKNWMVRPKAAALKALAADSMADPDLAAASGPALVALLEAVAAMEARLHALDQQIAKLACTSVDPQTKALIETIPGFGPVNAAKTLAWLPTEILHSGSNRKVAARLQAFMGNDPRLRQSGQWKGHTKMSKRGVEMLRTAFFQSAFSAAHNDPELRTYYQCKRAQGKTHEVALSHLMRILTRRLVAVLRSGKPYQSHYNLKNAA

SEQ ID NO: 439218 - protein, 451 aa, unidentified
MSGTKKVRRKRDISPTHPNAAAVDIGATLHVAAVGPDQDPEPVRSFGTFTGDLHRLADWFQQCGVRTVAMESTGVYWIPAFEILDQRGFEVILVNARDAKHVPGRKTDISDAQWLQRLHEYGLLRASFRLKGEVAVLRGYLRQRERLLDYAGSHIQHMQKALTQMNLQLHHVVTDITGTTGMAIIRAIVAGERDPAVLAAHRDPRCHASTETIRQALVGNDREEHIFALTQALELYDVYQAKMALCDVRIEAVLKRLRKASSSPAGKPPPVRTPKKQANAMAFDVRAALHGLLGCDVTQIHGLGPYLALKLVGECGTNLSAWPNAKHFTSWLCLAPSNKISGGKVLSSRTRRSGSRAAALLRLAAVAVGRTETALGAFYRRLSARVGKAKAVTATARKIAVLFYNTLRYGMEYSDPGASHYEERYRRRVLTNLERRAKSLGYVLQEASAPV

SEQ ID NO: 439219 - protein, 414 aa, unidentified
MTEEEIISWFAGVDWGSERHQVCLLDARGTTVGEREFPHSGEGLAELGDWLLSMASAASTVAVAIEVPHGPVVDALIDRGFVVYAINPKQLDRLRDRFSVAGAKDDRRDAYVQADSLRTDRRLFRRLQVADPRLIELRAWSRLAEELRAERVRLSNRVRHQLWRYYPQMLKLTDDLGAPWFLELWAIASTPAKAGRLRKSTVERLLKQHRIRRMDAETVLRILREPAIKVAEGVAEAASIHMRSLVARLRIVNRELREAERKLDELCTTIGEIEQTSGEGLQRRDVAILRSMPGIGRINLGTLLSEASGPLSRRDYVGLRTLSGAAPVTKRSGKSLIVVRRYAAHVRLRDTVYHWARVATQRDPKCRARYTALRKRGHSHGRALRGVADRLLALACVLLQRQTLFDPYFGGSTA

SEQ ID NO: 439220 - protein, 367 aa, unidentified
MNYKLKAAPTAVSKEQNSQKEPKANRIAIGVDTHLKSYQAARKIDKGAVGVAQTFRSKEALLLYLEKQREQSKEVVVLYEAGPLGYTLYRELKAKDIECLVCAPRSGEQKRKRRKNNAIDARSLTSELSNYLNGNEQALQLVRVPSEAQEQARVESRQHDALVQERKRIGAIGNALLLSQGYGSWSNWWRPKAFERLSRVVAGWVLKQLQRWVKVLGELDQQIQQAKVELSQQWKGPRPKGMGAPSLAQLNAEVLDYNLYSSGRKIGCLAGMVPSEWSTGNSQRLGSITKVGVPAIRRILTEMVWRMILFQPEYKAVQKWREVLEGSNRGLKKKAVVAIGRQLMVDIWRLQTGRISAQALGLIMIEA

SEQ ID NO: 439221 - protein, 462 aa, unidentified
MPRRKLKTQPRRTNPQPVFRDSTPTLQVQNPHAAGIDVHSDNHVVCVGPGQVRTFGAYTADLHAIADYLRQAGVTTVAMESTGVYWIPLFEHLEAQGFACHLIEPGQLHGCGARPKTDVLDCQWMQRLHTYGLLKASFRPPESVRALRAYHRQRQMVIRHAAAHVQHMQKALEQMNVKLTEVLSDITGLSGLRIIRAILAGERDAHALAGLASPKCAKTRDEFALALQGLWQPEHLFELQQAHDLFETYQRLVDECDRQIEAELAKQPSRAGDKPVPRKPRRCGRKKNDLRFAASGPLFRALGVDLTEVEGIDVGTALVILAEVGVDVSRFPTEKHFASWLGLCPNTARSNLREKRRSPRPGASRLKQALRMCAQAVGRTMTPLGLFYRRIKSRIGGMGACTATAHKLARLVYRMLKYGRDYVKQGMDEYAAKMRANAERGLRKKAAALGFELTPRPSAATT

SEQ ID NO: 439222 - protein, 346 aa, unidentified
MKKIFIGIDFSKEKFDATLIQAEGLKECAPDVHEVFDNKTSGYRRLVKWVKAHAEGFTADMWIFCGENTGGYSIALCNYLYASGYDMWLECAYNIKHSVGIQRVKNDKADSHAIAEYAMRNYDKMIPYKPQSSSLNALREVFLYRHSLVKQKVALQVRRQEKRLTQESSDIKTFMSFTSKHLLTEVNKAIAKCDQKIKEIIASDDELREVFDIVTSMPGIGVQNATCLMVYTDNFQKFDYDSRKIGCYYGIAPFGRQSGSSINGKPRVSPFANRMIKSLLSQAALAAIKTDIDIYNYYQRLTQRGKHPLLIHNNIKNKMLHRLVAMVRNKQKYNPDHIYRNAKEAA

SEQ ID NO: 439223 - protein, 339 aa, unidentified
MTVKTVGLDLAKDVFQVHGISESGRVIFNKAIKRAKLLAFFEALPPCMVGIEACGSAHHWGRTLRKFGHDVRLMPANYVKPYVKRGKTDAVDAEAICEAVRRPTMRFVEIKTEDQQAILSIHRTRDLAVRQRTQLANMIRSLLREFGHILPIGIEAVTAFAKRHLDGDHPDMPEIANGMLGIQCYQFIGLNERVEGYSKMIEQHALLNADARRLMRMPGIGPITASAIVATIGDAKQFRTGRDLAAWLGLTPLNKSSGGKERLGKITKAGDRYIRKLLVVGMTSRAVMAKRSPEKVDLWTAKIIAEKPFRLATVAMANKAARSIWAMLTKKQEYRQPAF

SEQ ID NO: 439224 - protein, 467 aa, unidentified
MARKRKKVNKKDNKRSFRSLRTIEPNAAGIDLGSREHWVAGPSRDDDNPNVERFGTTTPELVRLADWLKEQGVVTVAMESTGVYWIPLFEILDNRGFKVVLANARQIRNVPGRKTDMLDCQWLQLLHACGLLRGSFRPSDDICRLRALIRERNTMVDQRSDWVRRMQKYLDQMNVCVHHAVSDITGVTGMAIIRAIVNGERDPHALAALRDPRCRKSEDQIAEELTGNWRSEHLFNLRQALKMYDQLCAVIADYDTEILAYIATLHPKDSGNTSVPPPTSKTKARNLAKRGQEPLRQALYRLSSCDLTSIDGIGTDTAAVITSELGLDFIGFPDENHFVSYLRLAPNLSISAGKKVPSKFKASTCTRVSTALRMAALTLRNTKTALGAYYRRVAWRKGASVAVFATARKLAQLVYRLVRYGQAYVDTGAQAYEARYNQRRLKFYTKALNSMGYNVEPSAGKEAALSC

SEQ ID NO: 439225 - protein, 403 aa, unidentified
MSEGKIVVGVDLHPDSFAAALVSGSSISRMKLLRRFTKVDSSQWKTWLKKNVPLGSIVVMEASGNSFEFAEIAENYGCKAIVLNSVSAGRIGKAYCKNDPKDALRAAKIYLCGLAEHVWCPDEGTRIRREVIAGHEHSKKDFTRASNRIKSFLNGHGVRLPKGSHLRKDKTRQWILSTYKWNSEQRFIIQNLFDNYDHASTQRQKYHQEIGQAVLNTPGMGQLMHLCGIRLLTAYSLIASIGDIGRFDSPKKLVAYLGLAPSVRESGEKSVNGRLQKGGRKQTKSILMQAAQSILKSKNESGKHLREWGIRLTMRKTKNIAVAGIARKLAVAVWYMLKGFIPEIIEAENELKKKMKKVAEELRLGFIQKLGYQKVCHFVDEYTLILLSYSNTIKMNHAFSQKE

SEQ ID NO: 439226 - protein, 274 aa, unidentified
MNYVGVDYHKKYSYMVVKNEDGRVEGRGTVNNTKEEIQQFLEPYRPGIAVVEATRNWGLIYDWLDEVLDDVTLAHPLKVKAIAEARIKTDKISADILADLLRADLLPKAYAPSKQTRDIKNILRQRMFFVRIQTMVKNRIYDILDRHPEVLSQVPEASDLFGAAGMQWLSQTTLSGEDNMLLSSELRLLKYLKEEITQSNSIVKKLAKKDARARLLQSIPGIGPFFSVLILYEIDDISRFRDEKKLCAYAGIVPSTHASGGKMFHGRITKTGNK

SEQ ID NO: 439227 - protein, 343 aa, unidentified
MQAITTIGLDIAKSVFQVHAVDAAGQVIIRRQLKRRSVLAFFQNLPPCLVGIEACASSHHWSREIKALGHTVRLMPPAYVKPYVKRQKNDATDAEAICEAVARANMRFVPTKTPEQQSCLMLHRTRHLFIRQQTAVINAIRAHLAELGIIAPVGRKGVEELLDVVADRSDKRVPEVARACIAALGAQLRRLKEQILEFDRMIMAWHRSNETSKRLDAIPGVGPILATALVAGVADPKAFRSGRNFSAWIGLVPKQHSSGGKDKLGSISKQGDRYLRGLFVAGALAVIRYAKIHGTKHRPWLTALLARRPVKVAAIALANKIARMAWAMMARGERYRQPVALAA

SEQ ID NO: 439228 - protein, 398 aa, unidentified
MFIGWDWASTAHDVTVIDDAGAVVDRWAPPHTEAGFGQTLARLARYGRPDELPVAIERPSGLVVDRLLAAGHPVVPVHATAFHAARPRWGAAGAKSDPGDSYKLADYLRTDGHRLRRLQPLDDATRELQALVRLRDDHVKAKVAASNQLGALLDAHWPGAKQVFSRLASDIALAFLEAYPTPQAAARLGEARLAAFCRRHSYRGGRSPAELLARLRAAPTPPLGLTPETLAELILAQVRLLGTLLATIADLDRALGAGLLGHAKAKLLAPMPRIGEVNLAQIIAEVGPVLDRAATVEQLVAECGAAPVTRASGKTKTVAFRWAANRQARTALHTFADNSRHASPWAAKLYADARRRGKHHSHAIRILARAWLRVMWACWHTDTVYDPAKHRAEQRLAA

SEQ ID NO: 439229 - protein, 361 aa, unidentified
MFTERTSVGLDVHARSVVAAAIDGVTGEVFRARLTPNNEQVVGWVRSLPGASVATYEAGPTGFGLARAMAAAQIRCVVAAPSRIRRSAGDRVKTDARDAMLLARLLRMDEIVAVTVPSVEQEDARDLVRAREDVRGDLMRSRHRVSKLLLRQGIVYCGGHAWTGAHLVWLRAQHFDTPGLALAFDAEYEAVLAAEARRDRLDEAIAAMAADSQFTPVVHRLGCLRGISTLTSFGLAVEIGDWDRLTGASIGAYVGLVPTESSSGQSRSQGSITKTGNTHARRLLVEAAWHHHKAYRTPGATMRARWELAPAAARARGHAGNRRLHERWLRFTERKKRPVVANVAIARELAGWCWSLAVMDP

SEQ ID NO: 439230 - protein, 338 aa, unidentified
MALYCGIDLHSNNSYVAVLDEERRDVECRRLRNELPAVLGFLEHYKEDIEAIGVESTYNWYWLVDGLMRAGFDVRLMNPTKATAHRGLKYTDDKHDARWIASLLALGILPEGHIMPVEERGLRDLLRRRLYLVHKRTAHLLSLKGIFARSTGKQVSAEDIQKWDCEEIREVIGDPLVVESITVMLPVVRVLTTQIKVVEKRALEIGRLRNEFDLLQTAPGIGKVLSLTIMCETGDIRRFAGVGNYASYCRCVPSDRMSNFKRKGSGNRKNGNKYLSWAYSEAAHHAIRFEPLAKRYYDRKRARSHLMVASRALANKMARACYYVLRDQVPFDPARAFC

SEQ ID NO: 439231 - protein, 408 aa, unidentified
MRRVIGMDIHRTFGEVVIWEDGKLRHAGRVDMTRTALEGFGKSLRVTDEVVIEATGNCMAVSRVLSPFVARVVIANPLQVKAIAHAHVKTDKVDAGTLASLYAAGYLPEIWTPDAVTERKRRLVARRYQLVRHRTRIKNEVHAILHAHLIPPCPHADLFSKVGRAWLERQPVPDDERVAIERHVRELDRMGEDLAALDQEIAGAALDDASVARLITITGVNLTVATGLVAAIGDIRRFSSPQKLVSYFGLNPRVRQSGLGAAHHGRISKSGRSHARAMLVEAAWAAAKAPGPLHAFFVRIRAKRGHQIAAVAPARKLTILCWHLLTKETDYRWVRPALVATKRRAMELRSGQPQKKGNTPGPAHAYNVKALRDQKMDVARHAEQAYEHFVAQWKTRPKVRGRSKSEGL

SEQ ID NO: 439232 - protein, 339 aa, unidentified
MKREEFECIGVDVSKKTLDVALYRGKVDWNEGHIKVSNNESGYKELKKWLRLKNAEKSRLRICMEATGLYTHDFRSWLEKEGITYYVVDPKRMHHFAPPLSIKGIRQTKTDKADAFRIAIYCSLFHDSMEPSRLPSAAYFKLKRLLAERRQYVKQSVLYKQQLSDISIYDTVSSRMRKEKEVENLKDDIRQTDKEMKSIIDSDPAIKRNYDLLTSIIGVGIVVAVTTIVLTENFTTFTNPRKYASYIAIAPFPHESGTSVRGATRVSKQGFRQAKADLSVSVLNAITHDTELKEYWQRKKAEGKHTGVILNAIKFKIVLRMFAVVKRGKAYVNTKGYKG

SEQ ID NO: 439233 - protein, 420 aa, unidentified
MTSVNERTILNIVNPICCGLDVHKESVTACILFNDAKGKERTIIKEFSTFTDSLFELRDWLLDNDCPIVAMESTGVYWHPVHNILEGYVSVILVNARDIKNVPGRKTDIKDSEWLAGLLRHGLLRSSFIPPKYVREWRDLTRLRRNYVNSVSDFKKRVQKLLESSNIKIDSVVSDIFGVTGRNLLTLLASGHTNITMTDIENCVRGKLKCKQQELYRSIKGFFTEHHGFMLNTLLSTIETLENKIASLEQKIAESMSGYKELLERIKEVPGISDFSAMDIIAELGTTLDAFENEAALVSWCGLCPGNNESAGKRQKGKNRTRKNQLKPVMVEVGWAASRTKNTYYHDKYQQLRTRLGHNKAVVAIAHRIMKGLYHIIKNGVSYKDLGMDYLDKKTKTSKLYRLQKQAESLGFKMIPISEI

SEQ ID NO: 439234 - protein, 408 aa, unidentified
MEAIVERSCGLDVHQATVVACLMTGPPDGRAKKTTRTFGTTTAELEALRDWLVAERCTHVGMESSGVYWMPVFAILEGHFELIVGNAVHMKNVPGRKTDVKDAEWIADLVRHGLIRKSFVPPKWQRALRDLMRYRRKLVESETSERNRLMKLLETCNIKLSSVASDVFGVSGRAMLRALIEGKATAAEMAQLARGALRKKTDRLELALRGQLEEHHRFMLRLQLERVERIEADIEILDERIDAALDPHRDALNRLVGIPGVDRVVAATIIAELGTDMSVFPSPRHAAAWAGVCPGNNESAGKRGGQIRRRGNVHLSTALVQAAMCASRKKGSYLKERFWRLKARRGQKRAAMAVAHSILLAVYEMLRAPQDYRDLGADYLDRVAKRSTEKRLVRRLQALGYKVTLAAA

SEQ ID NO: 439235 - protein, 343 aa, unidentified
MGTFVGLDVSLKETSVCILDQDGTRVFEGKVASEPAAIAWLIRKRASDPARVGLESGPTSVWLTHALAAEGMPVVCLDARHAQAVLSVRPNKTDRGDARGLAEMVRVGWFKAVQVKSLASHERKTLLIVRHQLVDMRVRIDNQLRGILKTFGLVIGQCSRGQIGQRAQKLSEGRPGIDSIVASMVAVRDSLLEQIAVCDRAIRRLVKKDEAAQRLMTVPGVGPVVALAYISVIDDPQRFHHSRDVGAYLGLTSKRYQSGEVDQTGRISKCGDGFARTCLYEAAGVLLTRVDRWSPLKAWGVRLMKKIGATKAKVAVARKLAVILHRIWIDGTDFRWTKEAAAV

SEQ ID NO: 439236 - protein, 421 aa, unidentified
MSSIENEITKTRNHSRQRGNMMRTVFGIDVSKASSEVAIVINGEKIHGYTMPNDAIGFTRLLDDLKTVQKPEIIFEARGVYSRRLQAFLEENGYAYTQLNPLEAKKQLDSLRVRKTDKIDAETLAISQFVLNRKPTYIQEEVYQELRDLSRFYQNLTEDIVRTKNRLHKVLQVTFPEMENILSTPTREQYWNLVMTFPYKDFVLELSKDELLEGIRQSTSKRISNKRVAYLAQKLAALANQSYCAVKKNSPILEEVRYYAKELLRLSEQRQAVLEQMVELAQPLPEYEILLSIPGIAETTATSMIGELGDIRRFQSANQINAFIGIDLRHYESGNFLAKEHITKRGNPYARKILFKCIHNIAAASHTNPCHIEDFYEKRKRQSQTTSTKPHTIASIHRLIRTMYYLITHNKLYDYTSTQNR

SEQ ID NO: 439237 - protein, 337 aa, unidentified
MKRQYVGIDLHRRTSTIYRMSPNGKLLGCVRVPSQPFELAEAMKDAGEAPEVVLESTYGWYWAADLLKELGANVHLAHPLGNNWGARRVKNDERDAEDLAAMLRLGRLAEGWIAPPEVRELRELVRYRFRLVHHRTSTKNQIHGVMAKNGILPARREMWGPGGEAQLDSLDLPMAYTIRMESLRDLLEIYDREIDQIDRHLYRQLKDDPGYKAITKLNGVGRVLGAIFVAEIGDVARFDHPRKLCCWAGLTPRHRESDAKVQRGPITRQGSPLVRWAAIEAVVKGRGGKKLQADYHRIEEHAGRFKARVAVARKLLTLVYYGLRDGEIRSLEAGEAA

SEQ ID NO: 439238 - protein, 342 aa, unidentified
MDIDILGIDLAKRVFQLHGADRDGVAKYGAKVMRTELLATVRKLAPRIVGMEACSSAHYWGRRFKELGIEVRLISPQYVSPFVKTNKNDANDAAAIVEAASRPTMRFETVKSVEQQDMRAVHRVRELLVHQRTALINQVRGLLGERGVIIAQTPAAFKRAMPTVLAQCEGDMTNTFQAILIELLEQLRVLEERIARTNQWIAAFTKNSALCQKIQAIDGVGPITATAMVAAVGDAKEFKNGRHLSAWLGLVPRQYSSGGKSRLQGISKRGDTYLRTLLIHGARIVLRYAIGKADARSRWLQDLIARRGYNRAAVALANKNARVIQVLLSHTDSYRLPDGLAG

SEQ ID NO: 439239 - protein, 350 aa, unidentified
MKNSITIGMDLGDKKHTVCVLGAEGDVIDRREISNTRQGIERLMSKYAEALVVMESGTHSPWISRFMEAGGCRVLVGNPRKLRAIWARTNKSDATDAEMLARIGRLDPNLLYPIHHRSEQAQRDLAQIKGRDVLVQSRSALINHVRCIAKSLGERMPSSSTDAFPRRARASLSEELEGVVAPILAAIEELSLQIKAYDERIVALSVAGYPEAERLQQVPGVGPITSLAFVLTIEEPGRFQKSRSVGAFMGMTSRRDQSGETDRQLRITKAGDRYVRQLLVSSAHYILGPFGPECDLRRFGMKLMKRGGKNAKRRAVVAVARKLAVLLHRLWVTGATYDPDYNRRSERQAA

SEQ ID NO: 439240 - protein, 377 aa, unidentified
MKSIKFVGLDVHAETIAVAVAEQGGELRSLGVIPNREEPIRKLVKKLGPVEQLRFCYEAGPTGYVVYWQLTKLGAKCEVVAPTLVPVKSGERVKTDRRDALKLARNYRAGELTAVWVPGAAHEALRDLVRAREAAKKDQLRAKHRLGKFLLRHGRRPPTGMKSWTLKYLSWVKQEVHFEQPAQEATLLDYLHEVEHAEARIARLELAVEEAVKSTPPEMKAVIEGLQALRGIAEVAAVTIVAELGEISRFSRARQLMGYGGIVACEHSSGESNWRGGITKTGNAHLRRVVVEAAWGYRHRPNVGVALRKRQELVSEEVREIAWKAQHRLYTRYRKLMARGKDKGKVITAIGRELLGFIWAIGVKIEAAQKVRERRAA

SEQ ID NO: 439241 - protein, 387 aa, unidentified
MNKSNRVIGLDVHPDSFTGAVLLKGKDAASARVVSTSRRVELPELEKWVARHTGEQDVLVLEASGNAFAVAERLRVLQRQVVILDSHRAGKVGKAYCANDRVDAIKIARIYLTALSPVVWQPDAKTRERREIFSAYQAVVKEATRLKQQLRSMLNEHCVRLESGFRLSHPSAINRLLKLREWTPVRAMLLEQLHRGLVSAQARRTRLRRYMAQEVLDEPELLRLTRLCGISLITLYGLSASIGDIKRFSNSRKLSAYFGLNPSVEQTGNWEGEGALKRHGRGALRALLVQSAKKLLRVNNPLQKWGLAVATRRGRNKAAVAVARKLCVAVWHVMQGHVIGAIERMTTLHTKLHKLATELGLNTIKSQGYETKEAFVQKKLFVLRSYA

SEQ ID NO: 439242 - protein, 424 aa, unidentified
MDKTNISTAGMGTAFGIDSHSRTTTICALVLETGEMQVRTFRGNPYAEMKAWMAQERFPKPAIGVYEAGCTGFVPARLLSTEDVEVVPIATSKMPTSADSRTRKNDRNDSMRLARHARAGELSRVWVPTEEVEGLRDAVHALEDLKQQQTSARQRVLALLCRHGIVWEERAPGGKMKKPWGGDFWKWLRAIDLGNPGSQAALLACIRAAESADEQYAAMFERVHSLASSCTLAPAIEALQCLKGVGFICAFAFCAGMGDFSRFCSGRKVTSWLGFAPSESSSADSRRLGGISRCGSRLLRTMLTECAWSAVRSRPASSKRCPASVDPHIRERARLLSERLCTRRRLLLERGVAPCKANAAAAAELGRFMLFLGQEAQERASAAAAQGAAGILHPLPLPSDAYSPDHECRCARALRARDPGGRDA

SEQ ID NO: 439243 - protein, 437 aa, unidentified
MKCFVGLDVSSTKLDVCIMLSDTTTPFTASLTNDLVGASEIKKQILELNDSYSFERIVIGMEATSLYSFHPAMFFHEDSDLKALKVEVMVEQPNKIKKYREAFEENKNDTLDAFYIADYFRIERFSPAFLKEEKYMALQHLTRTRLQLIEQLTKTKQHFIENIYYKCNTLSTEIKNENLSTNLWSSTIISLMTEDYSLDELATIALEDLAEFLQKLGRGRFKAPEKLAKAIQAAIRGSYRLSKLQQDSVNVILGLLAREIRNLEQMIKDIDKAIEDMVEVIPEYQCLTSVPGVGKVYAAGIIAEIGQIERFKDHPQVAKYAGLNWKQYQSGNTNSQNTELVKRGNRYLRYYLVEAANSVRRHDSEYQTFYMKKYQEVPKHQHKRAIVLTARNLCVWWMRYYATANSIRHQGGLWKISDYRHKSLDKLAKKAFFARCF

SEQ ID NO: 439244 - protein, 349 aa, unidentified
MIVIGADVHKRSHTFVAVDDVGRKLGSTVVPTTTAGHLQALRWAHDKFGHELLWAIEDCRNMSARLERDLLGAHQKVVRVTPRLMAEHRRTGRERGKSDPIDALAVARAAAREPDLPVASHDDVSYEAKALVDYRETLVRERTSKINRVLWRMHQLDPEYHIPRGGLTLNKHQNNLAVWLVDRPGIDARLARTEVAAIIALTAEIKQVTREITTLVRDTVPTLLAMPGCAELTAAKLLGESAGITRFGTEAQFARHAGVAPVPVWSANPGRHRLTRSGNRQLNAALHRIALTQARMPESLGHTYYQRKRDEGKTKRDAMRCLKRRLARVVYNNLTLDHHNRTTPQHEAA

SEQ ID NO: 439245 - protein, 348 aa, unidentified
MALTIVETRAVTGGVDTHADVHVAAALDPVGGLLGVEEFPATPAGYARLLGWLGGFGTVCLVGIEGTGSYGAGLSRHVTGAGVRVVEVDRSDRQDRRRQGKSDPLDAVSAARAAQSGRARGAPKGRDGTVEAVRALMVAERSARSGRTQTINQARALVLTGPADLRTRFARHTVAALVAETAALRPRPGDVVGYATRVALRELGRRAEFLDSQLGRLDELIVPLVAGHAPALLALYGIGPDTAALLLIAAGDHPERLRSEAAWAHLCAAAPIPASSGKVTRHRLNPGGDREANHALWRIVITRMSSHPPTRAYVDRRSKEGLSKKEIIRCLKRYVAREVYPCLRPPAG

SEQ ID NO: 439246 - protein, 388 aa, unidentified
MRQSTSVQLNRLFVGMDIHKDNHAAVAVNCFGLPLLEQELGNEIRDFNNLIARVQTIAKERQLNPVFGLEDTAGSGELLARYLFNQGYEVKTINPVLVKRERDYETHPEKSDLADALGVAKVLIQRIDSVPDYNISETTEVSRDIRALTKDRETIVLEQTRLKNQLHALLHHSFGSMYKSLFRDVFAKKALLFWHNFPSAQILKSSRKRNTAKPDWITRRSADELPHASETQANQIRRKVKRLLAIREELNEIEKELDGLLGQTGQKLDTLPGCGPTLSAVVLAEIKDINRFSSPAKLAKYAGCAPRKLESGKRRRHVKTRSGNRRLNKALYQIALTQISNQGILKAKAYFQKKVNEGKSKKHALTCLKRQIVDIIWSMLKEKRAYYS

SEQ ID NO: 439247 - protein, 407 aa, unidentified
MEVLYPRCGGLDVHKDSVVARVRCVSAPPADETRTFPTTTGALIELQEWLSAHAVTHVAMEATGIYWKPVWHLLEGHFELVLANAQHIRNVPGRKTDVNDAAWIADLLAHGLIRSSFVPPEPIQELRDLTRTRKQLVREISQHSSRIQKVLEDANLKVGSVLSDVLGKSGRAILNALIAGQTDPQKLADLARGTARKKRAELMEALHGRIRDHHRRLLKVHLELVMALEHALSEVDAAVGKNLAPIQDSARLLMTIPGVSEVTAHVIVAEIGVDMARFPSDAHLVSWATFCPRNDESAGKRRSTRVRKGARWLKTALVTAAWAAVRVKGSYLQSQFLRLKVRRGAKKAILAVAASMLTACYHMLKNGVAYRDLGAHHFTRRDRSKAILRLVRRLNDLGCEVQLSEAA

SEQ ID NO: 439248 - protein, 341 aa, unidentified
MEKATIIGIDLAKRVFQVHAASKDGRPVLRKKVSRAQLLGLLAKQPPTIVAMEACATAHEWGRAISGLGHDVRLVPPIYVKPFVRRQKNDAADAEAIAEAASRPTMRFVALKTEEQQARSMIFRTRDLLVRQRTQLVNALRGHLAEHGIVAAQGLAQVKVLATALRDTGSLHPLVRELGQRYLDHIARLDVEIAELDKRLRRHSKDDETAKRLQSMPGMGPITAAAIEAFAPPMATFKRGRDFAAWLGLVPRQHTTGGKPRLGRTSKMGQRDIRRLLIIGAMTVVRWAVRKGAATGSWLARMLAKKPRLVVAIALANKMARSVWAMLSKGEEYRGSALAPA

SEQ ID NO: 439249 - protein, 376 aa, unidentified
MRTIGAETPNTEVAVILGVDTHLDFHVAVAVDHLGRRLGESSVPTSVKGYERLLRWAEGFGPLRCAAVEGTSSYGAGFTRHLKARGIEVLEVERPKHRRRSSRRNLQKSDASDAERAARAVLAGEASGVPKSADGRVEMIRALRAARRSAMKARTQAANQLQGLRVTAPEQLRHRLRGLSTKELVSVAARFRLAGDPSDVPAATKFALRSVARRYEALSAEIAELDAHLGRLVAQVAPELVSLPGIGTDNAATLLIVAGDNPQRLGSEASFANLCGVSPVEASSGKVVRHRLNRGGNREANRALYMICLARMRRDPRTQEYVARRTAEGKSKREVIRCLKRYLAREVYRVLISCGARSSPTGPRDEAHIDARSYAA

SEQ ID NO: 439250 - protein, 342 aa, unidentified
MQHVAIDLGGKESWICVRSETGEILEERPHRTASLPQYLRRQPPSRVVVESCSEAFHVADAALESQHQVRVVPATLVRSLGVGSRRTKTDQRDARILSEVSCRIDLPSVHVPTNQARERRSLCAVREQLVTSRTGLVNAVRGWSRQHGVCIPTGTMARFPDRARAAALQTPDGLPEFVGRILLVIEVMNAQIAAADDELQRLAKSDPICQRLMTVPGVGAMTALRFVAAIDDPTRFAHAHSVSAYLGLTPGEHSSSKHKQRTGITKAGPAPVRRVLVLAAWQFQRCRPLDPLVQWTKGIAERRGKFVATVALARKLSGILYAIWRDDSRYEPQHQPRRQREQ

SEQ ID NO: 439251 - protein, 342 aa, unidentified
MEELYYIGLDLHKKIIAYCIKTTNGVTVSQGTVAATRSALLKWIESLPKPWVAAMEATLFTGWVYDFLKPHAKELFVAYPAMLKAITAAKKKNDRADAEKICDLLRVDLLPLCYMAPAEMRELRRVLRYRNFIVRMATTVKNKMSGLLMEVGAEYSKKRLHGRSYFGNLLETVEDVPSSVKELLKLSRAGLEMFAAVQKKLLAALRENKLIRDRVRRLMTIPGIGEVTALTWVLEMGDPQRFSARQAVSYCGLCSAQRESAGKEIRGPISKKRNKHLQSVLIEAAKLAPHWNLQLALVHERELKKGNRNRATLAVARKLVTYMLAVDKTGIDFVIAHEADAA

SEQ ID NO: 439252 - protein, 385 aa, unidentified
MFQCSGSSQAAVDYNSTIIGAIELSEKKWVLAVQLPEVGRHSRHALDVCGDGLVSFIERLKAKCASAGRKIARVILTHEAGRDGFWLARFLARRGIEVHVMQPSSLPVDRRARRAKTDMIDVEMLLRTLMAWLRGEPRVCSMVPIPSEADEEARRANREREDLTRERRSIVNKIDGILATLGIKGYKALRRGRREQMNCVRQPDGEPIPSQAKARIERLLDRLELVMKLIEQVESERDAVLKKDAPADEAERMIRSLTALRSIGPDTATLLVREAFVRRFRNRRALGGYVGLGGTPFSSGGSEREQGIGKDGNRRVRAAMVELAWTWLRWQPESALSVWFRARAGAMGGRIRKTMIVALARKLLVALWRYVNDGVVPNGARLKAA

SEQ ID NO: 439253 - protein, 407 aa, unidentified
MSITCGIDWAEAHHDVAVLDDTGKVLERRRIDTGVPGFGQLTAMLQEHAEDPTEVPVAIETDKNLIVVALQAAGLTIYPINPRAVARYRERHGQSGKKSDPGDAFVLADILRHDRHQHRALPEITDQGRAIKALARQHQEATWALHQTISRLRSVLLEFYPQALQAFPNLKHKAALTILAAAPTPALSQKLTARKVVALLHRCGRRNDPGLVEQILTALKTPALRQSAPVEAALGQTTTGLLAIIVAMQSAVEQLETALTAEFDRHPLAPVLRSAPGLGPILAARVLAEVGDDRSRFTTAGGLRAFAGTAPVTRASGRSRQVKARLVRNKRLGDACHWWAFAMLTKSPGAREHYDRRRAAGDHHNAALRNLANKLIGRLWWCLQNNEPWDEATAWNLQTANVPGAAC

SEQ ID NO: 439254 - protein, 404 aa, unidentified
MWYVGLDWADTHHDVEVLDEGGKRVGTRRFAHSHEGLHELQAFLLGIAAAPDQLACIVETTHGLLITFLLEAGFPVYPVNPKLANQLRKVAGAKTDRIDAHLLAKLGRLDLTELRRLEPDSATVQELKTLTRDQDALIQTQTRLVNQLTACLKEYYPAALQLFAKLQQRSALLFLQAYPTPESAQAASLEELTATLRTGKHTNPTGVAPKIFEELHRPQLVANEVIVRAKSRLMLSLVKQLLVVIEEIKSYDEAIRPLFLSHDDQDLWSSLPRAGKRLAPRLLAEWGEDRSRYTDAASVQALAGTAPVPFESGNYAKAHKRFACAKPLRNALHQFAWQSTRQEAWARDYYQRKRAQGKTHSMAVRCLANVWVRIIYRMWVNKTSYQTAIFEAAKQAHAPRQHAA

SEQ ID NO: 439255 - protein, 324 aa, unidentified
MAFYLGFDVCKSKLDVSLVNEQGIEQWYDIVPNSAEDIASFLLTVQGNYPDDEVISVVESTATYHYNLLEATSALMLPCRLLNPIVTKQQIKSTIRGKKTDRTDALIIARLGLRGEGRLYTFEPYMAAKALVRSMQKLGQLEGTLSRHSSHLTTQVRVRPSETATELLVGVRSSIVDARKQLYRELTTSTQGETYDLLQSIPGVGPYIAASLIGELQTMERFEKAGRLVAYAGLDLRVKQSGHTLNSTGHLTKRGSSYLRRSLFIAANVARQHDPYFRSLYDKKRNEGKSYTTATIAVARKLLLIVRAVWLSKKAYDVEVAMRG

SEQ ID NO: 439256 - protein, 393 aa, unidentified
MICVGIDVAKDKHDCFILSSEGEILADVFTIPNNAEGFDTLLHTIRRCARPEDKIKVGLEATGHYSYNILGFLLNKGLPTFVINPLHTNLYRKSLSLRKTKTDRVDARTIAAMLMSDVDLKSYTDTAYHNEELKSLTRYRFDKVCERAKLKQSVSRLVTILFPELEKLVPTLHMASVYALLSEFPGAKQVAGAHLTHLKAVLYDASRGRYGRDMATTLREAARCSVGSVMPAKSLELQHTIRLIRELDAEIEDIETAIQSMMDEIQSPITTIPGIGVRMGAMILAEIGDFSRFDSPDKILAYAGMSPSTYQSGQLSLSGTYSHMEKRGSRYLRYALYNATKYVCLWNPTFAAYLAKKRAEGKHYNVALSHAAKKLVRLIYAIEKSQKPYCSAA

SEQ ID NO: 439257 - protein, 347 aa, unidentified
MPFYTKQHNAYCGIDLHARSMYVCILNQAGDILVHRHMKASPETFLKTLTPYREDIVVAVECVFTWYWLADLCAREGIPFVLGHALYMTAIHGGKAKNDKIDAHKIAVLLRGGMLPQAYVYPAKMRATRDLLRRRMYLTRKRAELLAHIQNTNSQYNLPEIGKKLAYKANRDGVAERFPEPAVQKSMEVDLALLGYYDPLLNDLEAHIVKAAKQHDANTLYLLQTVPGIGKILSLVLLYEIHEIQRFPSIQDFVSYCRLVKCAKESAGKRDGTAGTKIGNAYLKWAFSEAAVLFLRENPEGQKYLTKLEKKHGTGKALTVLAQKLARAVYYMLKRGTAFDMATFLHG

SEQ ID NO: 439258 - protein, 311 aa, unidentified
MAAPRSLGLDVAKATVELASEPAGLTGQFATDAAGLRALVAQCQAEPVTLIVLEATGGYEAPVAAALATAGLPVAIVNPRHVRAFAQALGRLAKTDRLDAQVLALFAAHIRPTPRPLPDEATQELEALLARRRQLLEMLHAERQRLPRARGREVRRNLRTHIRWLEQSVIDADAGLETLIQASPLWRVQDALLQSVPGVGPTLARTLLGLVPELGHLDRHQIAALVGVAPLARDSGTLRGRRTCWGGRPAVRSVLYMAALTAARYNPVLRTFYQRLRTAGKPAKVALTAVARKLVVLLNAMLRDQRPWRYA

SEQ ID NO: 439259 - protein, 326 aa, unidentified
MNVKTIGIDLAKNVFQIHGVDEHGKRLFNKQLRRAQMASFFANIPPCLIGMEACASAHFWANKLISMGHNVKLMAPQFVKPYVKTNKHDAADAEAICEAVTRPNMRFVPVKTAEQQAVLALHRSRQSFIKQRTAQANQIRGLLAEFGIVVPRGIQQLQRRLPELVEDADNPLPVLFRTQLSLLQHHMAYLFDVIATLDKQIEQCYRQNALCQRIGKIPGIGPVTASALIATIGKANNFENGRQLAAWLGLVPRQHSSGGKQVLLGISKRGDTYLAKFAQRAKNVKLALNSKITHLNSRSQSALASNILVQHIEQPMHRYLFLRLMD

SEQ ID NO: 439260 - protein, 314 aa, unidentified
METSAQPVFVGIDVSKNKLDVALWPSGEGFAVERNANGLNSLCAKLAALNPVTIALEATGGFETVVAAALAAASLPVAVVNPAQVRAFAQALGQRAKTDPLDAAVIARFAEAARPAIRPLADAETQLLADLIARRRQIVDMIVAEKQRLGRAPAKRLKKSIERLLKALEKELSNLNGDIDAAVRASPLWRANEELLTSVPGVGPTTARTLIAELPELGTLTRKEIAALAGLCPFTRQSGQWRGKSFIQGGRASVRAALFMAAMVAARFNPILKTFYDRLAAAGKPKKAALIAVARKLLTILNAILRDQKPWQIA

SEQ ID NO: 439261 - protein, 327 aa, unidentified
MDTQVRQKVVGIDVSKGTLAACHMREGKTQHLETDNNKVGFKKLVKCCGTESLYVMEATGVYYLQLAYYLVEHGARVVVVNPVIIKRYIQMHLGKGKSDRKDAQWIMRYGQQTEVKQWQPEEQVIVECRQLEQVIEQLIKQKTMVINSLEALQLQPVGSGLAVKSLKQTLKMLEKQVKHIEDELIASLEKAFNKEMELLSSIPGIGRKTAGMLLLFAGGFKNMNNYRQLIAKAGLSPREYTSGTSIRGKVRITKMGGGLIRGKLFMCSFSAKKSNAACKALYDRLVAKGKNGKLALIAVCNKLLKQAFAIVKSGTSYQAEFANTSAK

SEQ ID NO: 439262 - protein, 412 aa, unidentified
MLFVGDDWAEDHHDVEVVGEDGRRLAARRLPEGPGGIAALHALIARFVPEGWAELDPLAAAARVKVGIETDRGPWVAALSAAGYEVFAINPMSVSRYRDRHSTSGAKSDAGDAHVLAEIVRLDRAHHRPVAVDSTLSQAMKLVARSHQSLIWERTRHVLRLRSTLREYFPAALVAFEDLDSSEALELLAAAPDPDRAARLSKARIAAALRRAHRRKVAERAEIIYSTLRDAALRQPDAIQAAFAVITASEVRLISVLTGEIDSLGEVVAEHFGRHRDADIYASQPGLGVTLGARILGEFGDAPGRYVDARARRNYAGTSPITKASGTKRVVLARYARNRRLSDAVRQWALGSLRGSSGARTYYDAMRDRKIGHEAALRQLGNRLVGILHGWLKTHTLYDETIAWAHWNTLAA

SEQ ID NO: 439263 - protein, 340 aa, unidentified
MGEQYVGIDLHRRRSVIVRMTPQGEVLETIRIDNDPVALSLELAKAGPDPEVVLEATYGWYWAADLLQACGARVHLAHPLGVKMFGYQRVKTDARDSTNLAELLRMHRLPEAWLAPPLVRELRELVRYRAKLVALRSGLKAQVHAVLAKEGVRVPMSDLFGVGGTRLLDQLRLARAYALRIASLRSLITAYDQEIAMLGREISTALAGDVGYLAIQTIPGVGPVLAAVFVAEIGDVGRFAGAPPLCSWAGLTPRHRESDTTVRRGPITKQGPRLVRWAAVEAVQRLPGGSKQATDFHRIADRRGIGIGRVAAARKLLTLVYYGLRDGQVRCLAPTSKKAG

SEQ ID NO: 439264 - protein, 438 aa, unidentified
MSPAAVVLTHRLTDCGPEPDLSFAPLRGSLAFTRRRCDLIGACASRHPSLSCPLTRLVCAALPPVKEQDDSTTMTHLETAPQPRCQLRLVTGGVDTHKDTHTAAALDATGRLLGHQQFPATPTGHTALLEWLRCHGEPDRVGVEGTGVYGANLAEYLQTVGVQVIEVDRPDRKSRRWQGKSDPVDAEAAARAAQSGRATGTPKLRGGPVDALRALRVARRSAIAQRADTQRQIKALIVALIVTAPATLRTELHSLADRPLIIHCARRRPDRTHAGDPATATIIALRSLARRHQQLTDEITDLDTLITPLVTAINPALAGLNGVGADVAGQLLVTAGDNPHRLRSEAAFAMLCGAAPLPASSGRTHRHRLNRGGDRQANAALYRIVLCRLRWDPRAKAYAARRTTEGMSKPEIIRCLKRYIAREIYIALLHPQDQQDGP

SEQ ID NO: 439265 - protein, 430 aa, unidentified
MNDSDGIRLQEFCQFKKVIRGSTDYLIVGLDIAKERHNAFFGTATGRTLHKGMFFDNTYEGFQKLLIQTDALKVQYGLRKVVFGLEPTANYHKPLGEYLIKGGHSVVLVSAAATSKNRELMDGRWDKHDTKDAANVADLIAQGKCLYYDCPGEDLRSLRGLLSLKKRLKKEEHGLRVRIRNQLLAQYFPEMDQHFGSVASLNVVQRCLDPSLISIMEYDEFCRTVAPGKVNMAQQRRLTQIWRAAKQSIGCIVGEAVSVEAQIMVMGLQRVRETIKTVEDKIEDICLKFPEYSFLLMIPGFGPDVSAKVLAAIGDPARFTSGKQVLKMAGFDLCASRSGKTSNSATPVISKHGKSDLRYALYQAAIISSLNYKEFIVYHTNKIRGREREKGIGTKMRVKLAAKLLIIAWTLMKKKEPFDPKYLNLGDSKV

SEQ ID NO: 439266 - protein, 338 aa, unidentified
MDLPVLGIDVGKFEFHCALNVKGQVHTNHFPHSAGGFERLRRWLANRRVSRVHACMESTGGWSEELAADLHAHGHVVSIVNPLAIKSFGQSELSRTKTDKADAALIARFCITMHPAPWEPPSALHQRLRRLARRRVALDEMRVQESNRLGAPGSSDVRSSIEATISFLDRQIDEIDAQIRSLIDDDLTLRGKRELLMSIPGIGERLAVTILGELPNLSEFRSAKAVSSFTGLCPREFRSGKSVSTSWLSKAGNAHLRRMLYMPAVAAIRCNPILKNFADRLRSSGKHGKQIVAAVMRRLLVLAYGVLKSERPFDPDIGCGRRHRHHNVSSRRRLALDV

SEQ ID NO: 439267 - protein, 355 aa, unidentified
MVSPILAQWTTLSEDFVLLGAIMDTVSLIGIDLGKHCFHLHAQDGSGRMVLRKKLTRNQMFTLLSNFPSCTVVMEACASAHFWARKLQTLGHTVRLMAPQFVKPYVKTNKNDVADAEAICEAVARPNMRFVPIKNVDQQAVLALHRARQGFVRACTAQANQIRGLLGEFGLVMPRGITSIAQHVPQLIEDASNELPGSFRLLIQRLTDHLKELDRQVAEIETQIKAWHHASDASRRLAEIPGIGPITASALVASIGDGKCFSNARQLAAWLGLVPRQHSSGGKPTLLGISKHGDTYLRTLMVHGARAVVRYCANKDDAFSGWLHRLLTRRHKNVAGASMYVGGDRSDYLTAPIPI

SEQ ID NO: 439268 - protein, 379 aa, unidentified
MQTITLHIGLDVHKDSITIAIADPGLKGELRLFGTITNDLQALEKALNRIRKAHPGAILELAYEAGPCGFGIARRLKQLKVSCLVAAPSLIPKQPGSPFKTDKRDARALARLLRAGELTAVYIPEPTDEAIRDLCRARTDAVDDLRRCRHRLKGFLLRHGFRYQGKANWSQPHMRYLRELVLPHPAMKTILEEYLQGIDAAHARVLRIEASMLTLLETWRLKPAVEALMAFRGFQLVASMITVSELGDIHRFAHPRQLMTYLGLVPTESSSGSRQRLGSISRCGNSHQRWLLTECAEHYALPPKISKELSRRQEGQSEAIRALSWKAQNRLHTRFTRLLGRRLQRNKAKIALARELCGFVWAALRTQSCYQQSGNATAK

SEQ ID NO: 439269 - protein, 357 aa, unidentified
MEVTTIGLDIAKNVFQVHGVDDGGGVVIRRQLRRSRVLAFFEKLPPCLVGIEACATAHHWAREIAALGHEVKLMPAKYVKAYVKRNKNDAADAEAICEAVSRPTMRFVPVKTTEQQALLMLHRTRKLLVRQRIRLVNAMRAHLAEFGIVAGVGRNGVDRLLKLIEAGDTRLPAPARDCLLALRDQLALARQQIIEADRRILAYHRENELSRRLEEIPGVGPLIATALVASVPDPHAFKSARDLPAWIGLVPKQSSTGGKERLGHISKAGNRYLRSLLMIGAFSLIKRAKLGKGRHRPWLLELMARRPIKVAAIALANKIARIAWALMTRRTRYREPDVKLTPQAASGRERPRRWKGQ

SEQ ID NO: 439270 - protein, 342 aa, unidentified
MEIATLGIDLSKTTFHILGLNLRGEIVLRRKFSCKQLLLFTANKQSILIGMEACGGAHFLGRALREQGHEVRLMPAQYVKPYVKTNKNDYLDAEAIAEAVQRPTMRFVPIKTDEQLDLQALHRVRDRWVARRTAVMNQMRGFLLERGMTVRKGPSYLVVQLQEILREGGTFFSARLRELLQELKQEWEELDRRIEQANDELQRIAREDDACHCLMEVPGFGPLVSTALVAAIGDGSTFHKGRDLSAWIRLVPRQHSTGGKTKLLGISKRGNPYLRRMFLHGARSVVAQVERNPSALSTWLADLAGRTHRNVVVVALANKMARIAWAILSKGIRYRAPELIVA

SEQ ID NO: 439271 - protein, 428 aa, unidentified
MDEVNRNRLEEFRQLRQEIRHSEEYLIVGIDIAKDQHHAFFGTATGKTLLRRLVFGNDHEGFRKLLDQAEALRVAHGLKKVVYGMEPTANYHKPLGEYLINLGRTVVLVSGVTVKRNRESLDGRWDKHDVKDSANVADLISQGKCLYYESPSAQLRGLRGLLSLKRRLKKQEHGYKVRIRNHLIAQYFPEMDRDYERLGAAGLSIVRWCFPTSQITALDMEPFIERVTSRRIRMETRKRLEAIWETAGKSIGCDAVPGVDHEAKVMVEGLRQIREAIKETEQRIQELCERFPEYPYVLTIPGFGPDVSAKVLGAIGDPDRFQNGKQVLKMSGLDLSADRSGKDSDKAIPEISKRGKADLRYALYQAALIASHKNRDVMIYYTNKIRGREREKGIHNKMRVKLAAKLLVIAWTLMKKKEKFDPTYLNIG

SEQ ID NO: 439272 - protein, 343 aa, unidentified
MSKISILAIDLAKHSFQVCATTADGVIIYNRKYSRGKLSQLLSEHPKCLVAMEACATSHWWGRFAQEAGHDVRLIPPIYVKPFVKRSAKNDANDAAAIATAVRQPGMRFVKVKSQEQQTHAMLFRTHQTLTRQRATLITTLRGHFAEHGIIVAKGDAALLAFEDTMEAQESVMPDLVRETARLYYYHMDQLAQTISSLERQMAAAAKENRDIKRLRTMPGVGPITAAAFLAFAPPMESFKRGRDFAAWLGLVPKQLSTGGKTRLGRISKMGQSDLRRLLITGATVCIRWARWKGVKPDSWLGRLLERKQGTLAAVALANKMARILWAMVTKKQDYRGGLVEYA

SEQ ID NO: 439273 - protein, 359 aa, unidentified
MDTIVAHTHPFVIGVDTHARTHTYAVLTAAGQHLGTETFPNAAAGRSRAINWAGRRSGGVTDALWVIEGAGSYGAQLARNVADTGYRVVEAARMGRTGRRGIGKSDPLDARRIAAAVLSLPVNQLRTPRQDEGVRAAAQILLTARDGLAAERTRAVNALTALLRIIDLGIDARRPLGARKIAEVARWRTREEALAATTARTEAIRLAKRILELDTELGQNMTRISDLVAASPAAELLEKTGIGPVTAARTLVAWSHPGRVKSEAAFAAIAGVNPIPASSGNTTRHRLNRGGDRQLNRALNIIAMVRMVHDPGTHDYVERRRAEGKTDREIRRILKRYLARSIYRHLNTASATKLGVDEI

SEQ ID NO: 439274 - protein, 355 aa, unidentified
MPWDIKPATKHKASLPSSKQPEQLAGDHLDPAFCKNGKGENTMEKNLFVGIDVSKDTLDVGIIPTEEVKRFTNDDNGCRELASWLSGSPPNLIVLESTGGLEMQAAGVLSSAGLPVVIVNPRQVRNFARALGKLAKTDAIDALVIARFAQAVQPKVRPLKDDQTLELKALVTRRKQLNDMLVAEQNRLKGSHHRVKKSVTATISWLKNQIEDTDKDISDSISNNDIWRDKEEILTSVKGVGPVLSASLLCLLPELGTLCRKKISALVGVCPYNRDSGQYKGKRSISGGRADIRCVLYMATLSATRYNPIIKAFFERLKAAGKPPKVALVACMRKLLTTLNAMLKTNQKWNPAVAS

SEQ ID NO: 439275 - protein, 427 aa, unidentified
MPYKIAGIDVHKRMLHVVVSDVQVDGEYDFTRRVFGSLPEALRSLTAWLVEQQVEEVVMESTAQYWKPVWGALERYWKPISQTREGALATSGTLHLALALSNRGRRGRKKDFRDAERLVKRLVAHELTLSFVPDVEQRLWRTVVPTKYQLTRNRVQLQNRLEALLEEAHIKLSSLVSDLLGASARRMLEAIAGGETNRETLAALADRGLRATQEQLQDALGVCQELNPVYRRLIKMVLDEVASIDKRIDQLNQEMASLLRPHEDQVKRLAEVPGLGVDSAQQIIAEVGATAATFPSEKHLSSWVGACPGDEESAEVNYSRRSPQGNRHMRRILNQAANAAAKHKGSIFQILYGRYVPRLGHNQTIGIIAHKLCRLVWKILHRRIRYEERGPEVSKASKQKRTRKMIRQLRRLGYRIEPSPSQSAITA

SEQ ID NO: 439276 - protein, 456 aa, unidentified
MKNFYLGADVSKGYCDFMLLDAKKRRIEEDFQLDDTFDGHQKLYHILSALCDQHPDAQIYAAVESTGGYENNWLDALVKFQSSLPLKTARLNPCGVHHNSKAGLERNITDAISAENVAKYIIEHPENVSYQQQDPLAALKKQWSFVKMLSKQKTQLLNQLESNLYAANPEILDYCKNGVSNWLLSVLARFPTAAKLAKARKSSLSSIAYVSDQKAIELIRTAKKSVASATDKITAQIIKATVGQIQQLAKAIEVQEKILAQSCSIPQVRLLKTFVGISDISAIGLILEIGSVERFATAKKLASFFGLHPIYKKSGDGTWGFHMSKKGRVVPRQILYMVAMVAVQRNPLIAEIYFKHTAEGMKKKAALGLCMHKICRIIYGMLKHNMAFDPHVDRKNSKKTAQGKTKIRKDKTRRYQSFDAKAPISARQNKKRKERKQSQSVDNAQCGIIEAPVPSS

SEQ ID NO: 439277 - protein, 341 aa, unidentified
MEKVGIIGLDIAKNTFHAHGAATDGSVVFRKTLSRGRVLEFLAGLDCCTVAMEACAGAHHWGREILALGHDVRLIPPQYVKPYVKRQKNDAADAEAIAEAASRPSMRFVAVKEAEQQGRAMVLKTRDLLTGQRTQTINALRGHMAEHGLVAPKGPQHLSRLRDILNGAADALPVTVVALCELLLAQIDNLSRQIDGLTAKVRKIAAEDDVVRRLMTIPGVGPVSAVALATLAPPEESFAKGRDFSAWLGLVPRQHSTGGKTRLGRTSKMGQRDIRRLLIIGAMSVIRVAVRRGGAPEGSWLARMLAKKPRMLVPVALANKMARTAWALIAHGGIYRDPAYG

SEQ ID NO: 439278 - protein, 461 aa, unidentified
MKKANRSTPHQVPREEERLFEGLDTLEPNAAGIDIGSQTHYVSVPEDRDTPSVRTFGCTTPDLQQMAVWLKQCRIRSIVLESTSVYWIPVYQVLQDAGFQVSLVDARHARNVPGRKSDVWDACWLRKLHTFGLLRGCFLPPADIVELRTYWRHRQSLVEGCAQQIQRQQKALEQMNLQIHKVLSDISGVTGRRIIEAILAGERDPKKLLTLKHPFCKHSDAQILAALTGHYRAEHLFTLQQALAAYDFFQAQIAQCDAQIQTCLARFEDKAPPTDPPAKPPARRKNQPHFDLAAELRRISGVDLTRIEGIQASTAQTLLSEVGTDLSAFASEKHFASWLGLCPNHRITGGKVQSRKTRPVCNRVAKALRIAAQSLHHSKSALGAFYRRILARSGPSKAVTATAHKLARIIYRLLRYGEAYVAQGESAYEQQHRERSLRSLQKRAAEMGYTLAPAGGTPNVS

SEQ ID NO: 439279 - protein, 385 aa, unidentified
MTSTNTRFRIIPAQFDLFAGLDVDKKSMATTFSDHATLFKSLRLPHSATHLLNYVDKHFTGKRIAFVYEAGPTGFGLHDQLVARNHTCLVVAPSMVPTAPGKRVKTNRLDSRNLSLRLRGGELNGIHVPGRCYRELRHLVQLRDTQVRQLTATKCRIKALLLYEGIEFPDCNGRWNAPAIDGLYRLSCSSEVRFKLDHLIGTLYFHFHSAATVQKRIRQFCKNEPELHQSITLLTTLPGLGWITAAHAVARLGDWRELKNVRQIAGFLGLVSSEHSTGEKENRGPITRSGDSRLRNKLIQCAWVAIHKDPELRSFYRSVYQRQPKKVAARKAIVAVARKLTTRMCVVLKEQRPYIIRPEISVAPLTAEETVGPRERLDAAQNEQL

SEQ ID NO: 439280 - protein, 447 aa, unidentified
MRFIGLDVHRDFCEVAICEEGRVRSGPRIPTSPETLARFAQTLGPGDEVALECTGNALAIARMLEPHVARVVIAHAKAVRAISWAKVKNDRIDARTLATLLATGFLPGVWTPDERTRLLRRLVGRRAQLLKHRTSAKNAILATLQRNLVGRAPATDVFGRRGRTWLSSVELPRDEQDTVEACLRQIDFLDAEISRLDQALASEVVDSPEERRLMTIPGVNVTTAATFLSAIGDIDRFPTPRHLASYLGLTPRVRQSGIAEPRLGHISKEGSARARHVLVEAAWAALKTPGPMRAFGERVAARRGRNVAAVAVARKLAVLCWHLLSTENDYAFARPSLTAAKLRRMELVAGAESRRGWRGPGATFASKDQHARERAIVIQAETAYRRLVADRTGRRRGAGAITGARISSALQGQAARQDQAPGPALQLEAARTLFHPAKEVAAGPDNT

SEQ ID NO: 439281 - protein, 429 aa, unidentified
MDHAASLRNTIVAWIGLDWADQKHDICLQASGSAAIKHLVVEHQPEALHSWVADLRRQFPQGPIAVALEQSRGSLFYALMHYEFLQLYPIPPKALADYRKALYPSGGKDDPTDAQLLLEFLRKHPERFRPWVADDVQTRQLSLLNEHRRQLVDDRTALTNRLTTLLKGYFPEALRWAEDLRTPLAWDFLAQFPSLERAQQASRLNVLKVYRAHTRRPPEQLEALCDEIRTARPLTTDRAIIDSSVLMVEILVEQLRVLGAGIERVEHQLADVFATHPDRAIFQSFPGAGKALAPRLLAAWGSDRQRFQDAANMQCFAGPAPVTVRSGKSKWIHRRFACPTFVCQTFHEFAAQSRLKSPWAKAYYQQMRSKGADHHPAVRALAFKWIRIMFRCWQDRTPYDETRYQQALARRGSPLSKSVGRLATSTAAG

SEQ ID NO: 439282 - protein, 340 aa, unidentified
MNTMTLLGIDIGKHSFHLHGQDAKGHQVLRKKTNRGQLLSTLAQLPACTVVTESCGGAHWLARQIRALGHEVKLIAPQYVKPFVKGNKNDFIDAEAICEAASRPAMRFCSIKTAEQQTLSALHRVRDSLIGHRTVATNQIHGFLLEFGISLPIGVAALHRVPALLDDPQHPVPLRLKDLVMRLHHQIQQLNDEIKDIESGLKQQLKEDDTGGRLQSIPGIGPITASALLADVGDASNYRSGRDFAASLGLVPKQYSTGGKTVLLGISKRGDKQIRRLLVQGARSIMLRIDKREDALGTWVRELLTRRHSNVVACALANKLARIVWVVLAKGGQYRPHPNA

SEQ ID NO: 439283 - protein, 333 aa, unidentified
MEVGQTMADHGVVGGVDTHKDLHVAAVVDELDRVLESRCFATTRHGYQQMLTWMRSFGQLRRIGVEATGTYGAGLLRYMQNAGVEVLEVTTPDTHDRRKRGKNNDLDAQNAAHAAFADRRTVTPKSRDGMVESLRVLKACRKTAVAARRVALQMIHNTIVCAPDDLRETLRKMTRMQLIRTLAAWRPDLTDYRSVVSAYRITLKSLGRRYLELHDEIADLDTMIVAIVDELAPALVARNSIGHGSAAQLLVTAGDNAERLQSEASFAALCGASPVPASSGKRPAIASTEAAIGRPTVRSTSSPSDGFGPIPGPRPTSRSVLPKATPSSRPSDA

SEQ ID NO: 439284 - protein, 391 aa, unidentified
MGTTYKVVQMGLDSHRNFSKVTARDERGRVAWRQRLEHADRTRLREQLAAWPRGVPVVLEATFGWGWLADELAQAGVDPHLASSKKVAGWRKSRGIAKCNRTDADLLSELWSEREPWWQVWLAPPEVRDRREWLRYRMGLVQLQTLTKNRIHATLHRHGIVQSFSDLFGRKGQAFLAQLADAQDATLRESARRTLAGHLELLRQLRQQIAEVTRELRRQVSADAQAERWRSLPGVSWVLAYTIFAEVGDVGRFKDGRHLSSYALLAPRADESGDESESTPTGRHVGHAGRRTLKWAFIEAAHGAVRRSAHFKEVFDRRTDGGKKDRNRGYIAVAHALARVGFACCRNATNYREQPPARPGCKPAETSSRSEARASRPGPGQPEDPMAVAAF

SEQ ID NO: 439285 - protein, 402 aa, unidentified
MNCVGIDVSKGKSMIAVMRPFGEVVVSPFEVLHTDSELSKLAGLLKSLDGETRVVMESTGNYHAPVAWLLHDAGLYVSVINAMLVHDYGNNSLRRAKTDKKDAVKLANYGLDHWLTLPRYVPDEDTRLMLKTCYRQYQQYSKVQTMLKNNLISLLDIAFPDANRLFTSPPRADGSEKWVDFVAAFWHCECVCGLSEKAFTAKYHKWCRKHGYNFSEDKALDIYASACGHFGVMPKTDTAKLLVEQAIFQLRATSATLAALKQEMQSLAASLPEYPVVMGMFGVGPVLGPQLMAEIGDVRRFHSKKALVAFAGIDAPPYQSGQMAIRSRSISKRGSASLRRTLFLVMSVILQRAPMNEPVYQFMNKKRSEGKPYRVYMMASANKFLRIYYASVKAYLASLDHD

SEQ ID NO: 439286 - protein, 329 aa, unidentified
MKKNWYVGIDVSKKWLDVAIFVENSDLKGYFHTQVSNDKPGYRELLRWLKEHDVDASTCTYGMEHTGFYSDGLQHFLDKKGYKYTMLEPAVIKHYPIQPREKNDRLDAAKIADYLYRFKDTVKLSRVPDKTMEKLRELHKERKFYVEDRVCYLNRKLVVGKEEAKRLDKMIEMLDKQIDAIEEKICDIIQNDKSLMENYLYLDSIKGIGFVNAVNAIVITQNFTVFKTARDYASYIGVAPHTKTSGTTVRWKPKPRKHCDLTAKADISQAAKIAVVHDVELKRFYERKCNGKDDADTVRKAMNAVKFKLVLRMFAVVKQKHTYRQFTTI

SEQ ID NO: 439287 - protein, 452 aa, unidentified
MQKQKKKKQILSVKTGTGFSLINPHAAGIDIGDTEHYVAVENGEGHEVRRFDAFTIDLRVIMQWLTSIGITTVAMESTGIYWLPLYLMLEDAGIEVYLVNAKSTKNVTGRKKDDSDAVWIQKLHRFGLLQKSFQPEHEYRIVRNYVRQRKDLVTIGSDSVRRMQKALELMNIKVHTVISDLIGKSGMKIIASILEGERDLEVLAGLCDPRIQATKEEIIKSLEGIWSDEYLFMLKQAYDEYYFYQKQIKDCEKKIQEQLLKQVAILKAGDITNVPQENSTKKKGKKNQFDFDVAGNLKELTGVDLCKLPGVNEVSALELTAEVGTDMNKWANGKHFVAWLNLAPNTKITGGKIISSKMMKKKNRAGQTLKMSASSLARNKTPLGDYYRRMRAKLGGKGAVLATAHKLARIIFVMLKEKKEYNPEMLNESQKQFNLKRIKHLEKQLEKLKEAA

SEQ ID NO: 439288 - protein, 506 aa, unidentified
MKVQASKPTFTIDYNPIGQYGSNICRQDIGRKRPYRSLLRQRYWAWSFTSKLITMAKVAKRKQTSKGLRLEVVNPNAAGIDISPKEMQVCVPSDRDGECNRTFGVYTKDLHYIAEWLKACCIDTVAMESTGIYWLPVFRILKESGFDVILVNASDVKNFSGRKTDASDAEWLMMLHSYGLLKPCFQPENIARTMRNLVRHRDNLIRSASREVLHLQKAMEQMNLKLDNVFSDILGKSGQSVIKAILNGERDPKVLSDLADPRCRTSKEEIEKSLQATWDEEHLFEMRQSDSLYQFYQQLIAECDAKINEIAMQYSATVDAPKTKLLRSEKYNAKKNRIGFDVEKVAFELWGVNVMRIPGMSRGSLLRLVGELGADFTTKFVDVKHFVSWANLVPNNKISGGALLSSKVPKKKNPVGIIFRQAANTLKAAKNPLGDYFRHMRAKGGHLQAMVATGKKLASIFYCMVQRKVEYNEKVYCDHRKQELQNKVAYLHKRLQRMESELANCG

SEQ ID NO: 439289 - protein, 412 aa, unidentified
MEVVYGCCCGLDVHAKTVVACLITKGRKEIRTFATMTDELLQLGDWLSSAGCTHVAIESTGVYWKPVFNILEGLLTVILVNARHIKAVPGRKTDVRDCEWLADLLRHGLLKASFIPPPEIRELRELVRYRQTLVTEHTAVANRITKLIESANIKLGQVASEVLGLSGRLMLRALAAGETNTETLAELAQGKLKSKKAELRRALAGCLTPVQRWVLTELLARVEELEAAQARVETRIGEEVVACAEPFVPEAVELLESIPGVGKWTAQTIVAEIGVDMSRFPSAKHLASWAGVCPGNHESAGKRKRGQPTKGNKSVRTILVEAAWAATHAKGTFLQAKYQRLVKRMPKQKALGAITHRLLVISYHLLRRRVPYAELGTAPLDQQQVARQRRRLVEQLIGLGVKVTIAEGGVVA

SEQ ID NO: 439290 - protein, 379 aa, unidentified
MVSASTPASLAETASATLFVALELSRSTWRVALHAPLTNKVSQHRLDGGDADGLLALITRKRSQAEEKLGRPVRVVCCFEAGYDGFWLHRWLYARGIENRVLDAASLLVNRRARRAKTDRLDAAGLLRTLMALERGEAQVCRVVRVPTPEQEDARRRSRERARLVVERGQHTSRIKGLLMTQGIRDFEPTRRDWPARFEALRTPDGLPLAPCLRAELLRECRRLWLVMEMIAEVEAEQKAVAEAEDGPAARLAQLRGIGLTFATVLGNEVFFRVFRNRREVGGYLGLAPSPWQSGAVRRDQGIAKAGNSRARRTAIELAWLWLRHQPESALTRWFHERAGSSKGRMRRILLVAMARKLIVSLWRYVTVGLVPEGAVLKV

SEQ ID NO: 439291 - protein, 326 aa, unidentified
MSVFKNYVGIDVSSKKLNINIVGDSNHGDYEIPNDKKSLREFINKQGISPDTYSVGAESTSRFHLICQETFVLSGFEFRLLNPILTGKKISSSIRKKKTDISDARIIADLLMRGEGNIITKKQLETDKRTVLRTRKTVVNHKTSVKILLKNIKLIDHKNNIRIKETINSLTKLISKMEKTISELECVAENCACDVTDEALIKSIPGFATNLAAVVSTEVGDFNRFPSSTQFKAYVGIDPKVTQSGDKLKNGHITKRGNAYLRNAFYLAAQVARCHDPELKAFYEKKKGEGKPTRVAICAVSRKLCERVYAVVTKKTPYEIRQLSFS

SEQ ID NO: 439292 - protein, 348 aa, unidentified
MTIVERARLVTGGVDTHLDVHVAAALDELGGLLGTESFPTTPAGYIELFAWFESFGPVARVGVEGTGSYGAGLARSLIALGIEVVEVDCPNRKARHRSGKSDTIDAISAARDALSGHASGQPKGGTGPVEAMRVLLIAKRSARSERIRTLNQMRHLVFVAPDDIRSRFHGLNVYNLTRQAAATRPRPGNQVDYVTLMTLRELGRRALGLEDEIDRLDDLLEPIVADHAPGLLNVFGAGIFVAATLAVAAGDRPERIRNEAAWAHLCGVAPIPASSGKTTGRYRLNRGGNRQANSALHRIVLVRMGHHEPTRDYLERRRAEGRTTLEIMRCLKRYVARETFKQLPGGSD

SEQ ID NO: 439293 - protein, 391 aa, unidentified
MYIVGIDCSKYKHDCFIATETGEVIRDTFTFDNSGPGFALFFSILETLKCPKNQIKVGFESTSHYMVPLMKHLSVKGYEFILLNPVIVSRFRRSTTLRRIKTDKIDAKTIAQVLASSDYESYHMQVYHFPELKSLTRLRDRLVKQRSYYLVMLTNVLDEVFPEFKEFFDDSLKSKTVFYLLDTYKIPSRMANMNSNSFDNLRKISKGKFSYAKFVKIKELAKNTIGSSSEADELEISSLLNIYKTINDEVCRVESKIEEIMTILDSPTVSIPGVGLMSAASIIAEFGDLSRFANADKMLAYAGLDVGRSQSGTADYKGKMVKHGSSYLRQALMNVVETMMIHAPVFYDFYHKKRGEGKPHRVALSHLARKLVRLIYKLETSHTRFDLTNSK

SEQ ID NO: 439294 - protein, 410 aa, unidentified
MASAGLTCGIDWAEAHHDVALVDESGAVVAKKRVSADLSGFTELLELIAEHGGDPSGTPVAIETDKNLFVVALAAAGFTVFPINPKALARYRERHSQSGAKSDPADAATLANVVRTDRHVHRPLPAISDQALAVKALARQHQEAIWALHQTISRLRSVLVEFYPQAVKAFPKLQHHAATEILAAAPTPAAGQRLTRRRIESLLRRCGRRNDPSLVEQLLTDLRAPALRQPEPVEHALGITVEGLVRIVVAMRDVVDRLEAELAVAFDQHELAPILRSAPGLGPVLAARVLAEIGDDQARFATASALRSFAGTAPVTRASGRSRYVKARKIRNRRLADACHWWAFATLTRSPGARAHYDRRRAAGDHHNAALRNLANKLLGRLWWCLHHHEPWDETAAWLLPEHDPATAAA

SEQ ID NO: 439295 - protein, 420 aa, unidentified
MHLTSVSPATVACDVSAYKLNLICRDLSAPGAAAEWEIANRTEPIIDTLTAIRTAAAARGITALRVVVEPTGIYHKLLLRIAATLGFETALVDAGHVTKMRSVIFGDSGKTDERDPYAIEAVAAQGRLITDRRLADVYQLLRQWGKLYHDAEVALIDAKSRVHRALRLLFPDFDFTTDFLYGPSGQAIVRCFGLDPHAIAAQNLSRIYERLRKHSTIRRSSVARLLAQARQTIVAVSRSRVTDLLARELALAWEDVELAIRRRTTARTELEALYDEARASDPQLPDTSGSAISKAAFARLLGEAGPLSDYASWRQLLRMGGVNLRERKSGKYVGQTKIARTGRPLFRAIVNQMALPLVKRDRLYGAYYHQKIGVRKMPGKKAMTAVGRKIVKMIWGWYRSGSPFDARRVFTCQGEHRRAA

SEQ ID NO: 439296 - protein, 418 aa, unidentified
MKHSKTKKIRTINKKTLIAALDIGKKVHYGYFRAPSGKDFQPFAFHNTRNGFDKFWERLCNFKEKQMLEEIIIGFESTGPYAEPICHYLRHKSVKLVQVNPMHTKRIKELTGNSPNKTDKKDPRVIADVISLGHSLTVIVPEGAAAHLRRLTQARERAIERRTAMSNQLQHLVFLIFPELVHIIKPSTKTGMYLIKHYSDPKKLLFAGIDKLNAIIKKVSRGRLGTDRAEQLHSAAKKSVGITEAKESILFEITHLVSKIESENHYVEDLEKQMGDYLEKIPYSHSILSINGIGYVTAAGLIGEVGDFRKFKTISEVLKLAGLDLYEVSSGAHQGCRRISKRGRALMRKLLYFAAINTTRKNGILYGPYQRHLAKGMPKIKALMAIARKLIGIIFALVRDHNNFIADYSRQLMFKKAA

SEQ ID NO: 439297 - protein, 414 aa, unidentified
MSMEVFCGIDWAEDHHDVALVGRDGQLLARRRIGDDAAGLAALLDLLAEHGDSAGQPVPVAIETPRGLLVACLRATGRKVYPINPMAVARYRDRHSVSGGKSDHGDSVVLANVLRTDLAFHRPLPADTELAQAIAVLARAQQDAVWDRITAHNRLRSCLREYYPGFLAAFEAARGGIMRPEARVILAAAPTPADAARLTLAQLRGLLKKAGRRRGIDAEAARLREAFRAGQMRQLPLVEQAMGRQTVALLRQLDAACASAEDLEQAAIESFNQHPDAGIITSFPGLGPLTGARVLAEIGDDRSRFCDAKGLKAYAGAAPITRASGKTKSVTHRRVKNNRLNATGYTWAFSALTASPGARAHYDRRRETGDRHAAAQRNLFGRLLGCLHRCLATGQHYDETIAFPDTTQKLPTAA

SEQ ID NO: 439298 - protein, 343 aa, unidentified
MEKKLFIGIDFSKKTFDVSILHQNNLLSADYQQFENNKEGCLALLKWIKSLTQEPVESWLFCGEHTGLYSLCLSEFLIKKGLFIWLENPLQIKQSGGIKREKNDKADSRDIALYAYRFQDRARHYQLPDKALKSLELLFSFRQRLIDNKKRLLVAAAEVRQVLSRHPTARYIYEQSQKDIARINKEIKEVEKRMLIEIKSDEGLQENFTLVTSIKGVALINTAAILIATQNFTRFENARQFACYAGMAPFGKQSGTSINSKPKVSRLANKKIKTLLTQAAKSAMAHDPNIRRYYERKTTEGKNKWLITNNVRNKIVHTIFAIVRSKQPYSVNYVRSTQNRKIV

SEQ ID NO: 439299 - protein, 397 aa, unidentified
MSMLFVGIDVSKDYSSAQGLDQEGKKLFYLEFTMNGEGFSQFLKGLKTHCEDLSGVTVGMESTGCYHINLFAFLCSEGIVCVVINPLLISNFARLSLRKTKTDKKDALTIAQFLLVHRSKLSQVSYSQNSQDLKDFARERESLAVMIAGLKNDVRRLLQMSFPELEHRCKLFTETMLRFLIKFPSARTIRTAKPKEISKALIHAEGKRKRVFISAEEIIKLAKASVASDSLAKELILSEKIETLLYLEQKQGRITEGLVEACRSMRVDELDILTSVDGISAITGSTFLAELGDIGMFKSYKHVIAFAGLDPSIHQSGQYEGVSRLSKRGNRHLRRVIFLMTLCAVRSQNVFREYFLKRKAEGLPPKKAILATAHKLLRVLFAMLTRKSYFRREVVEV

SEQ ID NO: 439300 - protein, 373 aa, unidentified
MPRYSTAFGMDVHLRSTTVCALDAETGEAVARRFPGNPWGEVAEWMSGFPGPSLAAYESGYLGFAPQRELSGLGVDCVVAAVSKVPRSAADFSSKNDRNDAARMAKAILSHDISPVWVPSPEIEGLRDLAGAHDAATARLAAAKQRLLAFLARRGYAYGGTTPAGNPRRYRTYDFLRWLDKVRPADDGGIRALAALRSEVEAASETRDDLLAEYRAAVAAGPLSAEVEALQSIKGCGFALAAAFASEVGDFSRFRSGRQVTSYFGLAPKQRSSADSVRLGGISGAGNALVRRLAVEGSWSYVQASHQPKLMPKGSGVPLEVRMHGRKGSERLLRRREEMLARGMPQAKANAVTAAELVRWLWALGAMCREATE

SEQ ID NO: 439301 - protein, 413 aa, unidentified
MEAYYVAGIDVHKAMLAVVVSEVKPGEVEFRRRRFGTRRSQLRELNQWLIEVGVQEVVMESTARYWRPVWVALEETGMRKHLAHAHSNGARRGRKSDFRDAERLVHRLVAGELVLSYVPEDEQQGWRWLTRTRYQLVCERGRVQSQIEGLLEDAQIKLSSVITDLLGASGRRILEALVREQGQHNPAKLAELGHAKLRASREELTDALDGRWLDRHRFLLGLHLDRIRQLDSQIEQIQQQTALAMQSCQEAVARLIRVPGIRTEGALQMLAEIGPTAAAFPSPEQLASWVGVCPGQQESAGQSSSQRSAKGNWQMRRLLSQAAHAASHAKGSFFESLYRRLLVKIGPQKAIWAVAHRLCRLIWKILHQGVSYQEQGSPTASPKSIQRRQHKLAAEFRKLGFQVQFTPINPSHP

SEQ ID NO: 439302 - protein, 415 aa, unidentified
MALKIVYQICCGIDVHKTFVVACIASTNKQGVTTYKRHRFSTFTQGLKELLQWLLDNHCKDVCMESTGKYWIPIYNVLEKDCNIVLAHPKYVKAIRGKKTDKKDAKWIADLFKHDLVAGSFMPPTDIRQLRDLMRYRFKLTCFMSSEKNRLQNCLTVSNIQLASVVSDTFGKSSQRILDKILENPDDTSFDIEPLIHGSMKKKLPELELAIDGFITPEQAGKLKVIKKHFEDLESRKAELEKLILALASPYQQELDLILTAPSFKNKFTAIGIISEIGVNMEAFPSAKHLCSWAGLTPTNNESAGKKKSVRVSKARCYIKPLLVQCANSVVKSEKHPEIRNRYLRLRKRRGHKKAIIAIARMLLTALYNMLKNKEPYNAELYRKSDALPVNREITIEQAILMAQFQGYKIKSAAE

SEQ ID NO: 439303 - protein, 412 aa, unidentified
MNQDKLYVGIDVSSKNNVCYLMYSDGSKHSSFSVPNNRNGAKIIVDRVTSVLLSQDIPQVVIGMEATSVYGDNLMRFLRESGSLGRFERNLHMLNPKQVKKFRDAYSDLPKNDYVDSYVIADHLRFGRINKEVYMDDYKYQALKMYTRVRHQLVQELTREKQRFLNTVFISFSGLTQEKIFSDKFGATSTALIEEFSSLDELAYMSTDERVDFIRKKGKNHFDDPEEIAEAVQRAAKNSYRPPQVIADAAKQMLAISMNTIRLLQKQIKEYDKAIEKMLEAFPQTLTSIKGIGNIYAAGIIAEIGDINRFPSQASLAKYAGLVWTQHQSSDFEAEDKRMIQGGNHHLKYYLCEAANALRRCDPEFKRFYALKYKEANKHNHKRALALTARKLVRLVYTLLKTNRLYIPPEEY

SEQ ID NO: 439304 - protein, 343 aa, unidentified
MKHYAGLDVSVKETCVCIVDGTGTVCREIKVPSHPQDLLRILQDPTWRLERIGLEAGPLSQWLFEGLADAGLPVVCIETRHTKAFLKAQLNKTDRNDARGIAQMMRVHLYRPVHVKTLASQKRRALLTARKLLQDKAIAIENDIRGLLRNFGLKVGIIGAVKFQDRIRELIADRPDLAEIIEPLLAARRALREHFVALHQKLLAVVRNDGVCRRLMTVPGVGPVVALAFVATLDSPARFRTSKAVGPALGLTPVQHQSGETNRVGRISLCGDAMLRTLLVEAAQSMLMRVIKWSWLKAWAMNVARRRGGRRAVIALARRLAVVLHRIWTDGTEFRWTRDAQTA

SEQ ID NO: 439305 - protein, 437 aa, unidentified
MRVLYEHVAGIDVHKDMIKVAIRSPGEKPWTRKTEILEFRTFYGVLQEMARLLRRRGVTHVVMEASGVYTDPVYYALCEQDFAEVAVVNPAHARALRGHKTDAADCRRLAELFECGLLRGSYIPPAELREVRDLTRYRMKTVQARTSEIQRLGKALESAGIKLGSVASDITGKSATAMIDSLIDGERRGAVLADLAIGRMRTAGKLADLSMALTGRFTEHHALLCRLHRDRIAGLDAAVADLDDQIAGRAGRWQRELDLLKTVPGFGDVVAQTWLAEIGPAPHRHFASHEKLASWVTLCPGNNISARKRKHGRTGDAGTYIKPMLIQAAWNAIRPKGRLQARYSRLVRRFGGEKNPGAKKKAITAIAHTLLKIACQVLKSEVPCQDLGADFCTRRESPDQQRAYLERRLRKLYPGCAITITISPPEAVLTSTVSNAP

SEQ ID NO: 439306 - protein, 455 aa, unidentified
MPKKTTRDQPELKTVNVSAAAIDIGSKMHMAAVNPACADVPVRSFGTFTQDLHDLADWFTACGVTSIAMESTGVYWIPVYEILEQRGFVVILVNARYAKNVPGRKTDVSDAAWLRQLHSYGLLRGSFRPDAEIATLRAYLRQRERLVEYAAAHIQHMQKALMEMNLQLHHVVTDITGATGMRIIRAIVAGERNPGVLATYRDVRCHSSTETIRAALVGNDRHEHVFALTQSLELYDVYQAKMLDCDRKLEVLIAALNNKSAKPVGKLSKPRIKTKQVNTPTFDVRSALYGLLGVDLTEIHGLGPSLALKLVGECGTDLRAWPSAKHFTSWLCLAPGNKITGGRVLSSRTRRSSSRAAALLRLAATTVGRSDTALGAFYRRLSSRAGKSKAVTATARKIAVLFYNTLRYGMSYRDPGAEHYEQQYRGRVLANLQRRAKSLGFVLQAIPGDANPAVS

SEQ ID NO: 439307 - protein, 362 aa, unidentified
MGFERTSVGLDVHARSVVAAAIDTQTGEVVKQRLVPAFGVIIDWLRELTGPVAVVYEAGPTGFGLFRALTAAGFECTVAAPSKITRAVGDRVKTDARDALLLARLQRMGEITPVRVPSVGEEAARDLVRAREDARGDLMRVRHRLSKLLLRHGHVYYGGAAWTGAHDAWLRKIVFDRSATAAAFDADYDAVQLTLARRDRLDTQITAMAAESEFTQVTRRLCCLRGVSTLTGFALAVELGEWNRFTGASIGAYLGLTPTEHSSGDTRRQGGITKTGNSHARRLLVEAAWHHKPGYDRVGKTMIERWDQAPAAARARGHAGNQRLHRQWIKFTERKKRSTVANVAIARELAGWCWSLAVMPEQ

SEQ ID NO: 439308 - protein, 344 aa, unidentified
MEITTIGLDLAKRIFQVHGVDATGQVVFRKSLRRAQVLPFFAKLPSCLVGMEACGTSHHWARELIKLGHEVRLMPPAYVKPYVKRGKTDAADAEAVCEAVRRPTMRFVPVKSPEQQAALSMHRTRNLLVKQRTQLVNMIRGLLAEFGIDIPKGLERALLMARRIIDGEAPDVPIEAAKIVGTLSRQTLDIHLRLRQIDRDLLVWQRGNDVACRLMTIPGIGPVGATALAASVTDPHQFRSGRQFAAWLGLTPLQKSSGGKERLGRITKMGDKYLRKLLIVGMTSLVRRAKYNPETIDPRLVNLLARKPVRVATVAMANKTARIVWAIMTRGETYRAGHQPALVV

SEQ ID NO: 439309 - protein, 323 aa, unidentified
MSSPSPEINIGIDVSKEKLDIAVQETDTHWTSKHEFTEFATLIKQLRSLRPTRIILEASGGLEQLLVSYLATAGLPVIVINPRQVRDFARATGQLAKTDRLDAFVLARLGAMLQPAVRQLKSAETQELEALVNRRAQLVEMLTAERLRLQQAQQQRRPAIVADLKAHISWLKKRLDQCENDLSQLLRSSPIWRETDQRLQSVPGVGPITSLVLIAELPELGHFANKQLVALCGLAPHARDSGKWHGKRTTRGGRARVRTALYMAALVATKHNLVIKTFYRRLLRAGKEKKVALTACMRKLLVILNAMFRTQTSWQPPRLVQEV

SEQ ID NO: 439310 - protein, 342 aa, unidentified
MDHFAGLDVSVKDTSVCIVDDTGKIIREVKVASEPEALSAVLKSPAYHFKRIGLEAGPLSQWLLSALAEAGLPAICVETRHMQAVLKAQINKTDRNDARGIAQMMRAGLYRPVHVKTLRSQKLRMLLTHRQLLQSKAIAVENDLRGTLRNFGLKVGMVGKVKFEARIRELVDNQPDLAVLVEPMLIVRRVLREQIVILHRRLLAIVRDDEVCRRLMTTPGVGPVVSLTYRATVDVPARFHKSKSVGAVFGLTCAKYQSGEIDRSGRISRCGDEMMRVMLYEAAQSMLRSKKWCWLKAWAMQIARRRGMKKAIVALARRLAVIMHRIWVDGTEFRWTREAAAA

SEQ ID NO: 439311 - protein, 408 aa, unidentified
MYNAVGIDASKLKSTITIIQPAGVVIRKPFDVLHTSDELNTLVTYLKSLVGETRAVIECTGRYHEPVVKSLSEAGIFISAVNPKLIKGQKQNTLRKVKSDPADARKIAKYALDNWAELREYSSMDTTREQLKTLNSQFTFFMKQKVAAKTNLISLLDNTYPGVNKLFDSPTRDDGSEKWVDYAYSFWHVDCVRKIGLKAFTERYEAFCKKHHYNYQKNKPALLFEESKQLVAVFPKEKSYKLLIQQSIQQLRLASEHIEIIRKEMNELASTLPEYETVMSMYGVGETYGPQLIAEIGDVSRFTHREAITAFAGVDPGVNESGQFKQRSNRASKNGSTRLRKTLFQVMSTYLQNKPVNEPVYQFLDRKRAEGKPYLAYMTAGANKFLRIYYGKVKECLRNLEQSQIEES

SEQ ID NO: 439312 - protein, 405 aa, unidentified
MDRGSLGAAEFDPSRKAGFGPSRCWPEADGLVWSSKAGKRTLMGWTAPAPGTDVPRLELQSSVGASHGKRQRHRPDLAKSVFPVHGIDAAGNILVRRQLRRLEVIAFFKKLSPCLVGIEACATAHHWARELIKLGHTVKLMPPIYVKPYVQRGKTNAADAEAIAEAVTRPTMRFVAVKTVDQQAVLMTHKVRELLVRQRTALINALRGHLAEFGIVAAQGSAGLKDAIAQFRAEQASLPAVARSALLRLIERIRQITDEVRKTEKEIVAWCRADTASRRLITIPGVGPITASAISASVPDPALFRSGRQFAAWLGLTPKPHSSGGRERLGRISKQGDGSIRRLLVIGATSMIHRARQDNPGKAWAKQLLERQPARVVSVALANKTARIAWAVLTRGEVFKAAAAA

SEQ ID NO: 439313 - protein, 319 aa, unidentified
MPRNGRVVGIDISKAKADACIRSLQLRLAQPSTPQGQAEMVAWLRANEVASAVMEASGGYERGWAEAIREAGIAVRIVDPKRVRYFAKSAGRLAKNDPIDAAMIAWFAETFAIAVEQTCDRDRDTLDRLMTARRLLVRVASQIGQLGEHRQPPAVVDAERAIGTAIAAQLATLEAAIATAIEANAAFAARQAIIQSVPGLGVRFAAGALAWLPELGSIGNKAAAALVGIAPYDDDSGARRGERHIKGGRREIRDLLYLATLTATRCNPIIKAHYQRLRATGKKAKVALVACMRKLIVILNTMLARDQMWNPPAGAVALA

SEQ ID NO: 439314 - protein, 334 aa, unidentified
MKKDHYIGVDISKKTIDVAIYVKNALKSSSFPHETFQNSEVGFKDMKRWMRKQNVVLAKSLFCMEATGSYTYELCLFLERNDVSYSVQSPLHLKRSFGLTHGKNDKVDASRIAYYAHLHRDDIKLSRLAPESVRRLKSLIAERKSLVVEIARCKMQLKEVGEHAPSPGTIKRTESLQKFLEEQVVSIEEEMEQTIETDERMNKNYHLLLSVDGIGVVNAINTIIATHNFEMFDNARQYASYIGVAPFEHTSGTSVRGRTHVEPGAKMLKADMTGAVRTCINHDKEIKHYYERKMAEGKPYGVVANAIKFKLLLRMFAVIKRQTPFVKKPDFIFK

SEQ ID NO: 439315 - protein, 378 aa, unidentified
MKTIGAERPDTTGVAVILGVDTHLDFHVAVAVDHLGRRLGELSVPTTAKGYEKLLCWAESFGPVGCAGIEGTSSYGAGLARHFKARGIEVLEVERPKHRRPSSRRNLQKKSDPSDAERAARAVLAGDASGVPKSGDGRVEMIRALRAARRSAIKSRTQAANQLQALRVTAPERLRRRLRGLSTKELVRVAARFRLGEDPVDVPSATKFALRSVARRYEVLSEEISELEAHLERLVAQAAPELVTLAGIGTDNAATLLIVAGDNPLRLKSEASFANLCGVAPIEASSGKVVRHRLNRGGNREANRALYMICLARMRRDSRTQEYVARRTAEGKSKREIIRCLKRYVAREVYRVLISCGTCSSPTGSQDGANISSGSSAA

SEQ ID NO: 439316 - protein, 344 aa, unidentified
MSVVTIGLDLAKSVFQVHGVDAAGHTVLRRRLGRADLLPFFAKQPPCVIGMEACSSAHHWARELSRLGHLVRLIPPQYVKPYVKRNKTDAADAEAICEAVGRPNMRFVPIKTIEQQSILALHRVRALLVRQRTSAVNAMRGLLGEFGIVAAKGIRRVEELRQRMSRTEPALLPDEAREAIGVLFDHLDGLQERVDNIEAQILAWHKASEASRRLASAPGVGPLTATAIVAAVGDGRQFKSARHFAAWLGLTPRIQASGGKEHIGRISKGGDRYLRMMLIHGARAVVGTAFRTDVRPKPWLMELLRRRPVNVAATAVAHKTARSLWAMLTRAELYRPRAAVVAAA

SEQ ID NO: 439317 - protein, 406 aa, unidentified
MFIGWDWASETHDVTVMDDTGKRIDRWELAHTEEGFAKTLARLRKHGNPAGLPVAIETTRGLAVDRLLAAGHPVVPVHPNAFHAMRARWGASKAKTDAGDSMKLADYLRTDGHLLPRLEPTEQATLDLQALARQRADHVEAKVAAVNQLAALLDEHWPGGKTVFASLDSDIAMAFLERYPTPASAATLTAGRLEAWCKRRGYSGKKPGSVLIERLRATPKAASRLSEAITGQLVRVQVQLVQGIRGTIRTLDKTIAEATKAHPYAPLFATMPRIGKVSLGQVIGEIGPILERAQTCEQLIAEAGVVPLTRASGKSRTVAFRFATNRRARVALTTFADNSRHGSTWAAKIYNDARARKKRHPHAIRILARTWLRVMWACWRDGTCYDPATHQANRKINTPADKPLAT

SEQ ID NO: 439318 - protein, 339 aa, unidentified
MKMVATIGLDIAKQVFQVHGADKSGRTVLRRKLRRGEVARFFSEMPPCLIGIEASGSAHYWARTLGGLGHTVRLKAPQFVKPYVKSQKNDANDAEAICEAVTRPQMRFVPQKSVEQQDLQCLHRVLSRLVACRTQLINQIRGLLAEYGIVLPQHPGRVRSGLPVVLEDAENKLTGFGRGLFRGLYEELAQLDEKIADADSRIQIAFQAHPDCRRIAAVEGVGPLIATAIVAAISNGHAFENGRQFSAWLGLVPRQNSSGGKSRLKGITKRGDPYLRTLLIHGARSVVFRARAKSDKRSLWITDKQQRLGTTKACVAVANKNARIIWSLIAREQEYRRAA

SEQ ID NO: 439319 - protein, 342 aa, unidentified
MNIPVRIGMDTSKSVFQLHGVDENEVVVVRRQFRRAEMIRYFERLPPILVAIESCGSSHHWGRLLQSFGHEVKLIPPQYVKAYVKRGKNDAADAEALCEAVTRPSMRFVPVKSKERQAACMLMTVRERLVSVKSQLSNAFRSYAAEFGIVGPAGRQNVAALIKRVLEDDSLPEMARDLFRLQADEYAAVQARLAKIEAKLMKWHREDDISRRIATIPGVGPIGSSMLSMKAPPPETFRSGRDFAAWLGLTPKDHSTGGRQRLGGITKAGDSILRSTLIVGATALLRHVRKGRHKPTPWLASLLERKPPKLVAVALANKFARIAWRLMISGGVYNQPVAAMPT

SEQ ID NO: 439320 - protein, 485 aa, unidentified
MSIFEEEVSGTEVIIQGDQGVEVQVLKSYGVGLDVHSQFIAVCVHVRNNNRVYKYMSDFDTDWNSLLSAKEWVIDTIKTHSAPVPDLSHPLHYVLEATSTYHMPVLRAWGGIPSVINPMLAGATKKKTDDLDAERLSFHDLTGVWPESFVASDGLSELRVLIAERNHYAKLATQCSNRINNIIVRFGITIGRGTSVTKNHEVRAIVEDLASENPSNYENICPDPLPAEVKTLIQKEYKLYDKYIDEADSYMSRVRHRVYSMDWETRDGTLSGPEMVRILCTTPGVGEITCFTWLAFVGTPRRFPNAKALAAYCGLDPSLKVSAGHVTSTKKRGGCRTLHAILVTSADRIIRAHSEAFGRWGYLMAKSSGKWKKATNAVGRKLCTAMYHMMMTGKEFSYDNYTLMQQVSTFEIPVDELPMLNPDFKRYIKLLHENGIHTTTDMVTAYLSCSLGGTKGLGRKFFVTIQDFLQRQHHYHNEYKKLKST

SEQ ID NO: 439321 - protein, 383 aa, unidentified
MENSSSNCCPKTSVIVSVELSKRNWLVASLSPGAAKPSLRPIPAGNSAALISHLRNLECKAADRIGEPVTIRLCFEIGYDGFWLARLLRSNDIDTYVLDPASFLVSRRGRRAKTDRIDAEAMIGILKAYLAGDKSVCRVVDVPSPEEEDARRVMRERGDLVHERTRIISRIRGLLALQGIRSVKAIKGGDWSKQLDDMRTGDGRPLPPNLRRQIERCFERLALLNDQIKDIERDRAEVVLHEESTFPCREKAVRLEQLKGIGPNSAAMLVAEVFCRKFESRRHVAAFLGLAPAPFASGDVSRDQGISKAGNRSTRVQMVELAWCWLKYQPSSELTVWYRNRFKGNGARAAKVGIVALARKLLIALWRFVETGLVPQGAELRAA

SEQ ID NO: 439322 - protein, 408 aa, unidentified
MKRYYMGVDWGDRLHQVYVGDEEGKKVREVKVPETVEGLAEMGRWLDEKRAEEIELWAAIEKPAGRIVDFLLDHGVVVYPVNPKAVDRVRDRYRMSGSKSDPFDAYVLAEFLRTDQVHLRALQPNSEKAQELKLLSRDQRRVGRQKTRLLNQLTITLKEYYPRVLEAFNDLETQIVLDFIKQYPTPAHLSVLKRKEFNRFATKQHHLGKARCEELWEELKKPQLAVPEHVVRAKAQLVEVLIEQLQASIKAVKIYHERVESFFASTPAAEIAKTLPGGKSGVVVPGIWAELGDARGRWKSSRHLQAEAGAVPVTKASGKSRVVQFRFACNKHLRHTMYWFSFGSLKHCEWARHYYRGQKAKGRTHPQTLRALAAKWLKIIFVMWRDHKPYDENYHLANIARQKIRQEA

SEQ ID NO: 439323 - protein, 410 aa, unidentified
MVKENFIYVGIDLHKETHTAVMIDCYNQKLGEITFPNRPAAFPKLVTKVKKCNTDGKEVVYGLENAYGYGRALAVWLIDKGYLVKDVNTAISHRQAKHRGAMYRKSDSDDAKAIALATLNMLDKLPDACPNDAYWSLGQLVHRRDNIMKQRTRLVNQLHEQLCIVYPSYKQFFNDISRPTALYFWEHYPSRKYLKGKSVEDLRAELVPVSHNKCSTKTCEKILDAVASDKVKNNAYQDARDMVTLSIVSDLQHYDSQLTEVDKMLEQMYKMLGCTLTTIPGVNVITAAKILAEIGDIKRFSNANKLAQFAGIAPLHLSSSGKGKDVATKQGNRRLQATIYFLAIQMVQLSSKGTPRNSVVRAYYEKRKAEGKTSQQALICISRRLISIIYGMLKHGTEYRMPVVESAGEK

SEQ ID NO: 439324 - protein, 366 aa, unidentified
MASMPTRAHASAPHPDDGEVILGVDTHKDTHVAAVLTPLGAILATDAFPATSAGYCELLDWAGLFGRLARAGVEGTGSYGAALTRHLLSHGIQVFDVNRPDKTARRQQGKTDTVDAQAAARAVISGRATAQAKSGDGPVQIARMYKLAKDSAIKARTQAINQLKAVVVSADPALREHLAPLTNPALIRACADMAWADAYLVRDDVLEATLITLQLLAERIQQLTAQVNELKRRLAAIVQAHAPQLVERIGVGPDSAVTLLITAGDNPERLADEASFAALCGASPVERSSGKQQRRRLNRGGDRQANAALYRIVQSRLRWDPRTQAYLKRRTSEGKTRREVIRCLKRYVAREIFSLLPRTEPTPISP

SEQ ID NO: 439325 - protein, 392 aa, unidentified
MVVSVGIDVSKDKHDCFIVSSEGEVLADVFTIPNTLDGFTCLLQRIRECTTPQDKIKVGLEATGHYSYNLLGFLLDNGLATYVLNPLRTNLYRKSLSLRKTKTDRVDARTIAFMLLSDAGLKPYTDTAYHNEELKSLTRYRFDKVKERAKLKSSISRLVCILFPELEKLVPTLHIASAYALLEEFPGAKQIASAHLTRLKVLLESASKGHYKRDMALEIRDAARNSIGSRMPAKSLELQHTIRLIRELDVEIAEIEEQIQSIMDELHSPITTIPGLGFRMAAMILAEVGDFTRFDSPDKLLAYAGMSPSTYQSGQLKNCYPHMEKRGSRYLRYALYNATKYVCYWNPVFAEYLAKKRAEGKHYNVALSHATKKLVRLIYALQKSGKAYLTAA

SEQ ID NO: 439326 - protein, 338 aa, unidentified
MIVIGVDVHKQSLTAVAVDEAGRMLEEKTVAVTDGALVSWATGISCERLWALEDCRQLTRSLEQELIAAGEQLVRVPPKLMAPERRAGRARGKSDPIDALAVARAALREPSLSRPREDEQPFRDLKLLVDHRDDLVDERRRAQQRLRWHLHQLDPSLAVPAKALDRPIHLDRVGRWLARRPPEVQVRIARELVVRCRSLTRAIVELEHELQQHTAQLAPALLELPGCGAITAAKLLAEIGPIGRFQTDAQLARHGGVAPLEASSGRVQRHRLDRGGNRQLNCALYRIAITQGRYHPQARAYLERKQSEGKSRREAIRCLKRTLARVVFNTLKDEPLLT

SEQ ID NO: 439327 - protein, 386 aa, unidentified
MRAVCGLDVHKDSVFLCILCETGEIFEKVYGVLTHELQSMCREMKSRGVTEVSMESTSVYWIPIWRVLEPHFRLKLVNPYFIRQLPGRKSDVKDAQWIAECTLKDLIRGSFVPPERIQQLRQYDRRIFDLDAEIVRKLSKLDAVMQRCNIRLSNYVSNTDTKSYKEVVRKLCEGVTAPEELIKVIFGRIINRHGRETILAALTGVVSDAEKDAMRQLRDELDLAEKHKQECQDRMLHICKTYYPDELKRLMTIPGIKERAATSLIAEIGVDMTKFQTAAHLASWSGLKPRNDESNKKIKSRRITHGNVFLRKTIIECAWGASRTRDCFFSRFSFHQTQVRKKNKMKVLVAVARKLLIAVWHVLHDGTDYKDFGANDCDASAVENNG

SEQ ID NO: 439328 - protein, 412 aa, unidentified
MKVVHEICGGIDVHAKMLVACLLLANGEKEIRTFSTMTDDLLRLRDWLLAVHCTHVAIESTGVYWKPVFNILEDALTVILINPEHAHALRGRKTDVKDAEWLADLLRHGLLKASFIPPPEIRELRELTRYRESLVREQSAVANRIQKLIESGNIKLAQVASDCLGASGRTILWALARGETDPVKLAALAQRQLKEKRVQLERALHGRLTVNQRFVLRELLQRWEELEAADRRVSKEIDHYLRDRPKLARARDNLDTIPGLGPRAAEIIVAEIGVEMKANFASDAHLASWAGICPGNKATGGKRLSGRTRKGNTYLRSALVQAAWGASLKKNCYLSSQFFRLLKRLGRKKALVAVAHSLLVIIFHVLQNDQTYTELGGDYFDRQHVEQQRDYYLRRLQMLGLKVTVEELSVAA

SEQ ID NO: 439329 - protein, 364 aa, unidentified
MTTIAQSAGERRVLGGVDTHKDVHVAAVIDDLGRILDTAAFASTRDGYRRLLAWLGGFGELVAVGVEGCGSWGAGLSRYLAARGVGVVEVNRPNRQNRRRRGKSDTVDAEAAARAVLAGEATVTPKAGTGPVEALRQLRVARAGAMKARTAAANQLHSLIDTAPERVRAQLRDLTFKKKIALAARWRPTLTATPDGASRYALASVARRWQALAAEIGELGRRIKTILDDVAAPLVAVHGVGYDTAGQLLVTAGDNPDRLRHERSYAALCGSSPVPASSGKTDRHRLNRGGDRHANSALWRIVIVRMTSHQPTKDYIARRTAEGLSKQEIIRCLKRYVARELFPHIHSVIAPTALEPPLNTQRAA

SEQ ID NO: 439330 - protein, 355 aa, unidentified
MKYYTSTTEFNCGIDLHARQMYVCVMDRQGKKLVHTNVKDNDFVFFLKLVQPYRHDLTVCCECMFGWYWLADACQAAGLKFVLAHALYVKAIHGGKNKNDRIDSEKLTHLLRSNLIPPAYVYPAQKRPLRALLRQRIFYVWRRAELLARIHSHQLAHNRIPAKQTRRVRDPWEEQLLAAEDHPLRQLALKNDLAMIRHFDHQIFQLEEELQRQTKQLASREYALLQTVPGIGETLGLTLLYEIGDIERFPTVKDFLSYCRLVKGTVASAGKIKGLRGAKLGNPYLRWTFGEAAVIAKRDHFKIRPLAQQLEARMGGNKFKANTVVAIKLARAVYFMLKNKTVFEPERLVAALARN

SEQ ID NO: 439331 - protein, 361 aa, unidentified
MPTIADAGRLVTGGVDTHAGMHVAGVTNQVGRVMGTREFPATTEGYAAALAWMRGHGELAKVGVEGTGSYGAGLARYLAAEGIEVAEVMRPNRQARRRRGKSDAADAIAAALAALNGEASGQPKSGDGAVESIRALQVARRGAVKARTQAGNQLRGLIITAPQALREKLAGLSAPEQIKLAARFRPGDLTSPAEAVKAAMATVARRHQALAAEIAQLDTALETLVAHAAPAGFRDRTGVGTRVAATLLVTVGDNPARLRTEASFAALCGASPVDASSGKQRRHRLNRGGDRQANSALWRIVFTRMATDPRTQAYMIRRTTEGKTTREIVRCLKRYVAREVYKTLAGPPPARPATPRISMIT

SEQ ID NO: 439332 - protein, 355 aa, unidentified
MTIVAHNHPYVIGVDTHARKHVLAILAATGQFIASAEFSATKAGTARAITWVARRTGEDLAALWVIEGVATYGAQLTATVAESGYQVIEAPRMNARAHRGAGKSDSLDARRIAEAALPLEEHQLRHPRSGEGERAALRVLVTARDHMTGERTATINALNALMRAIDLGIDARRPLRSKQILEISRWRAREEPLARATARAEATRLAGRVVALDGELAVNQKSIATLVGATPAHGLPEKTGIGPVTAAACLIAWSHHGRVRSEAAFACLAGVNPIPASSGNTVRHRLNRGGDRRLNRALHMATITRMIHDPTTRAYVERRRAEGRTTKEIRRCLKRYLARQIYRHLNATNATPNLA

SEQ ID NO: 439333 - protein, 346 aa, unidentified
MMVIGCDYHPSWQQICWVDTATGETAERKLEHGSGEAERFYRQLVEPALIGMESTGNCQWFVEMAATLGHEVWIGDAAKIRACEVRQQKHDRRDAALILKLLLEGRFPRIWTPSGQEKDLRQLLIHRHKLVRFRVQVKNELQHLAMNQGVTKKRKLWSAAGQKVLRELPLKPWASRRREDLFRLKDMLDEPIARLDEAVTQAAEQNSQAKLLMTQPGVGPITSLAFVLTMGDVSRFPRGKQVASYLGLIPREYSSGGHQRFGSISKQGNRFLRMLLVEAAQVAVRCDPQLRSEYLHRCHRKAKGVAKVAAARKLAIRLYWMLRTQKPYPEIVRIESSPRVPLVSAS

SEQ ID NO: 439334 - protein, 343 aa, unidentified
MRKTLFCGVDLHSSNAMYVITDQQDKQLFRRRLPNRLPLILESLEPFRKQLKVVAVESTYNWYWLVDGLMDHEYPVVLAHPSEMKQYKGIKAADDLTDAAFLARLARLDVLPTGYIYPRQDRPVRDLLRRRTLLVQQRTGIILSLQNLAMRQTGRSVGWRDIRKLSDRERTELLGDHDCLTFVTAQQVDLIEQLSKKIKLFEKKVLEHAQFKPAYECLLTMPGVGVILALTIMLETGQIGRFKTVGDYTSYCRCVRATHTSNGKNKDKDKNNGKNGNAYLAWAFVEAVHHAIRTCPKAKSFYDKKLAKRNGTLATKALAAKWSKAAYYMMKRQEVFDLARVFG

SEQ ID NO: 439335 - protein, 406 aa, unidentified
MDLVYSHVCGLDVHKKNVVACIITPEGKEIRTFSTMTDDLIALKEFIKAKGCSVVAMESTGSYWKPIYNLLELENIKILLVNAKHIKNVPGRKTDVKDAEWIASLLQHGLLQGSFVPDREQRELRELVRYRKSLIEEKSRELNRIQKVLEGANIKLSSVVSDINGASSRSILEAIINGEENPETLAQLSQGKLKNKMDELKRSLKGLINHHQKTLIEIQLRHIDYLDQEITKLDEEIKNRMHPFEQDLALLDTIPGVGRRTAEQIIAEIGTNMEQFPSAAHLCSWAGLCPGHNESAGKQKSARTRKGNQKLRSSLIEAARAASRAKDTYLSSQYHRIAARRGANRAAVAVAHSILVIVYHILKQKQPYIELGPTYYEEKKRNMIIRQSLKKLESLGLKVTVESVAS

SEQ ID NO: 439336 - protein, 298 aa, unidentified
MTITTVGIDLAKNVFAVHGVDQNGRTVLVKPKVSRAALPELIASLPPCVIGMEACSGAHYWARLFRQYGHEPRLMAAKFVSPYRMAGKSGKNDAADAQAICEAVRRPHMRFVPVKDESQQAMQCLHRTRQGFIEEKTATYNRLRGLISEFGVIAPQSADALRHMVSVQKSSLPLQVQQCVDDLMEHVDRIEANITEYDRILSHIAKTDHRSQRLMELKGVGPTTACALVASIGNAHDFKNGRQLAAWLGLTPSQYSSGGKSKLGRITKAGDSYLRTLLVQGARSVLIGAGKRTDSFSR

SEQ ID NO: 439337 - protein, 406 aa, unidentified
MSVHDCAASTVVVAVDVGKNTVACSVTDENRHRLFGPVDFAMTRSGLAVTVERIGELIPAGVGVKVGIEAAGHYHQPLMAQASWPMGWELVELNPAHVTEQRRVQGRRRVKTDAIDLEAITELVLAGHGTPVTQRAVVIGELAAWAAHRSRRVEVRTALKNQLLGQLDRAFPGLTLALPDVLAAKVGRLVAEHFTDPSRLASLGEARLICFAAGRGLIVQRRVAARLVAAARDALPTRDAAVAREMVATDLQMLRVLDQQIAHAEEELGVLLPHTPFAVLTTVPGWATVRASAYGAAVGDPTRWPGPRQIYRAAGLSPMQYESAGKRRDGAISREGSVTLRRALIDLGVGLWLNDPPAKAYAAGLRARGKKGGVIACALAHRANRIAYALVRDQRAYDAARWVQEV

SEQ ID NO: 439338 - protein, 349 aa, unidentified
MTIVAEQYAHVVGVDTHARTHTFSMLAASTGAVIGTSTFPTTGAGMSRAVEWIRRRTPTGNVLVAVEGTSSYGARLTRLLEVERFAVCEARPPRRQSRRAHGKSDAIDAVAAARTVLGSATTELVSPRAEGLREALRILLAARRSMDTQRTGARNALTALLRTLDLGIDARSPLTAAQVRTVQGWRARQGDGAAAAVARAEARRLASAVITLGAELEDNQRALAERVQLMAPGILDISGVGPVTAAIILAAYSHHGRVRSEAAFAALAGASPVPASSGNTNRHRLNRYGDRQLNRALDVVARTRSLTDPATRAYIGRRTAEGKSPREIRRCLKRFIARQIFRQLQTLMA

SEQ ID NO: 439339 - protein, 377 aa, unidentified
MRKNIRFVGLDVHAETIAVAVAEAKGEVCSLGIIPNRPEAVRKMIRKLGPPASLRVCYEAGPCGYVLYWQLTGLGVHCEVIAPTLVPVRAGDRIKTDRRDALKLARSYRSGDLTAVWVPDEAHEALRDLVRAREAAKKDQLRARHRLHKFLLRHGLRPGEKIKAWTGKHLSWAKTLRLELPALEATLLDYLTEVEHACERIARLERAIDQAIEAAPAAIRAVIDGLQALRGIARISAATIVAELGQLTRFSRPKQLMGYVGAVPREHSSGEHVRRGAITKTGNAHLRRILVEAAWSYRHRPNVGSQLRRRQRRASEQVKEIAWKAQQRLHYRYVRLMGRSKLKQQVVTAVARELAGFVWAIGVEVEKHLASRPVRAA

SEQ ID NO: 439340 - protein, 342 aa, unidentified
MQITTIGLDIAKNVFQVHGIDANETVVVRKRLRRSQVLAFFKALPPCLIGMEACATAHYWARELTKLGHRVRLMPAKDVKAYVKRNKNDAADAEAICEAVRRPTMRFVQIKSAEQQGQLMQHRTRDVLIRQRTQIINALRAHLAELGIVAAQGEAGVNELRAIVADDRDERLPIDARASVIVLAAQLEALQTLIGSIEKRIKMQHRSNETSQRVETIPGIGVLGATAIVATVADPTIFRSGRDFAAWIGLVPRQDSTGGKQKLGPISKQGDQYLRRILIVGAISVLRRALQNPGKYPWLTQLLARRPFKVVAVALANKMARTAWALMAHGGTYRAPELAEAA

SEQ ID NO: 439341 - protein, 344 aa, unidentified
MGEVSTIGLDIAKSVFQVHGVDVAGAVVIRKRVSRARVLEYFSDLPPCLVGIEACPSAHHWGRELQALGHTVRLIPPSYVKAYLKRSKNDANDAAAICEAVTRPSMRFVPIKTKEQQTALMLHRTRQLLVRQRTMLSNALRGHLAELGIVSAKGRNGTADLLSIIKDGSDSRLSPAVRGILDVLARQYGAIGVEIASIDRSIMALHRGCEASRRLAEIPGVGPIGATALVAEIGDWKTFSSGRSLAAWIGLVPKQHSTGGKDRLGSITKQGNRYLRWLLVVGAMAVIRYARKHGTEKRPWLGRLMERRPTKVAAVALANKIARMAWAIMVRGERYKEPKLLLAT

SEQ ID NO: 439342 - protein, 393 aa, unidentified
MRKPEQQHKPLNDLSRSLTPFDPNRTLIGVIELSKKSWLVAGMIPGVERQPLKKLAADENELLKLLERWRTEAEKAGHKIDRIAVAFETGRDGFWLARWLRARGIEAHVIHAASVAVSREHRRAKTDRLDTQQLMRAFLGWLRGERQHCKMAAIPTLEDEDAKRPHRERETLVGERTTIINRLKATLTRLGIRNFNPKLVKAPERLEHVRTPEGEPIPPNTQAELLRDMQRLRLVREQIGQIEKARLEHLKRNPNTGPNLMVSILARVIGVGIETADMLVQEVLSRNLRDRRAVARYGGVTGSPDESGSRSREKGLARSGNARVRRGMIQLAWRFLEFQKDSALAKWFRARTENAPRSRKKMIVALARKLLIALWHLVRDGVVPEGVVLRPAH

SEQ ID NO: 439343 - protein, 343 aa, unidentified
MQTVTTIGLDIAKSVFQIHGVNAAGNVIVRRKLKRRYVLSFFQKLPPCLVGIEACASSHHWSRELQALGHKVRLMPPAYVRPYVKRQKTDAADAEAICEAVTRANMRFVATKTPEQQSCLMLHRTRHLFIRQQTAVINAIRAHLAEFGIVAPVGRNGVEQLLDVVADASDKRLPEIARACLAALGVQLRALKLQILNFDRQIVAWHRSNEASKRLDEIPGIGPALATTLVASVADPKAFRSGRKFSAWIGLVPKQHSSGGKDRLGSISKQGDRYLRSLFTAGALAVIRYAKIHGTKHRPWLTALLARRPTKVAAIALANKIARMAWAMMARGDRYKEPVALAA

SEQ ID NO: 439344 - protein, 371 aa, unidentified
MENGITFVGLDAHKKKISVAVLMPGQAVALQWDAPNEAGAVKRMVRRIEREAPGEVRFCYEAGSLGYALQRQITEAGSERVSCMVVAPSLIPRKPGERIKTDRRDARKLAELFRAGLLTEVQPPTPEDEAVRDLCRAREDAREDLTRSRHRLGKMLLRKGVVYSQGNAWTARHRLWLRGLRFEHASEAEVSDDYLLAIEQLEERLRGLEEKLEGVAQKKPYAEPVGWLRCFRGIDTVTAMTIVTELYGFERFHSPRGLMAFLGLVPSEQTSGYDPKRGRITRMGNSHVRRILIEAAWHYRHRPGVASLRKRRQGQPAEMIALADKAQQRLYRRYRRMTEKGIPAPKAVTAVARELTGFVWAALRHTTKACA

SEQ ID NO: 439345 - protein, 376 aa, unidentified
MGERNTTDVGLDTSKNSIQVAMLLPGGDKAVEWEIANEPRAVRRMAKRLKREAVGELRVSYEAGPCGYVLQRQLRELDVNCIVVAPSLIPVKPGDRVKTNRRDAKKLAVMLRAGALTEVHPPTPEEESVRDLCRCRDDIREDLIRARHRLGKMLLRRGWIYPGKAWNDPHRRWLRSLALEHEADRAVFDDYLRAIEHLEERLCAIEITIEATSHREPYREPVAWLRCFRGIDTVTAMSLVAELHDFGRFQSARELMSYLGLVPSENSTGDRQRRGAITKTGNKQARRLLIEASWHYRHKPAVGKKLRKRREGQPGWVIAVADRAQARLHRRYWRLVTHGKAHNKAVTAVARELSGFLWAALREHEPAKRSGASVGG

SEQ ID NO: 439346 - protein, 349 aa, unidentified
MDRTTYGLDIAKNVMQLHWVDAETGEIGRKKLARAKLAAYFAPLQPVRIAIEACGSAHHWARVLGGLGHQVELLPAGQVRAFVRSNKDDAADARAIWLGAQQSDIRRVPQKSVEQQAVLSLHRTRQHWVSVRTATVNSLRGLLYEFGVVLRGGRRAGLKALAEQRSAIDEQIPATMRTLVDGQLNTLEQIGQRIDALEREIAALQEQLEGARELDRVPGIGVLGSTALAATLGDAKAWRSAREFSASLGLVPAHAGTGGKVRIGHLSKRGDPYLRTLLIHGARAVIEHAKDKPQWLQQLLVRRPPNVVVVALANKMARTAWALIAHGRTYQRDWKSTKPGSGAAQAAGA

SEQ ID NO: 439347 - protein, 345 aa, unidentified
MKITTIGLDLAKNIFQVHGIDNAGAVVVRRALRRGQVLSYFAKLEPCLVGMEACGTSHYWARELKKLGHAVKLMPPIYVKPYVKRGKTDAGDAEAICEAVTRPTMRFVAIKSADQQSVVMLHRTRELLVRQRTQLVNMMRGQLAEFGVTLAKGIQHASKFVGQLLEGKAPDIPELAVIVVSALAEQMRQVQVRIGELEKELRQWFREDPLAQGLASIPGIGPITATALSSTVTDPHQFTSGRQFAAWLGLTPRANSSGGKERQGRISKMGDQHIRRLLVSGMTSQLQSVRRRPDAHPWVTAMLARKPAKLVAVAMANKAARIAWVVMTRGELYEQQPTTLEVATN

SEQ ID NO: 439348 - protein, 461 aa, unidentified
MANEDQKGRPECSEAIDEGFPVLRGNVAGIDVGSEEHWVCAPARTGRGREVAVFAATTPGVEQLAAWLKDRDVTSVALESTGVYWIVPHEMLEAHSFDVVLVDSRWLGRVPGRKKTDRRDCEWIQRLHSCGLLRGAYRPVEQVCMLRTLVRDRGTLIAERADWVRRMQKTLDQMNVRVHRAVANVDGATGMAILRAMVAGERDPHQLATLRDPRCRKSEAQIAEQLTGHWRDDHLFSLRQALKMYDALSDTIAAYEREILRYLETMTSVDRRDDQAPPPTSPTKAQAIKSRGQDPLRHALYRMSGVDLTTIDAVGVETVSVVLSEYGPNLSQFPTEKQFVSHVGLAPHAPRSGGKVVKKKKKPGSASARVGAALRMAATSLRHSQTALGAYYRQVARRAGADVAVFATARKLAQHLYRLLRWKPYVDEGTAAYDKRYQLARAKRLAATAKDLGYKLIPVEA

SEQ ID NO: 439349 - protein, 406 aa, unidentified
MDVIYPRCTGLDVHKKTVVACVRIARDGPPLQEVRTFETTTTGLLTLADWLDSFGVEHVAMEATGVYWKPVWHVLEGHFELVLANAAHVKNVPGRKTDVNDAMWLADLLAHGLIRASFVPPAAVQELRVLTRTRKQFVRERSAHVLRIDKVLEDANLKLGIVLTDIMGKSGRAVLQAIVDGHDDPAYLADCVGRVKASRADILEALRGRVTVHHRFMLKLHLDHIDALNKAITRLEKEVGLGLDTFRKAAELLSTMPGLSEIAATVVVAEIGIDMSRFATPAHLLSWACLCPRNDESAGKRRSTRLRRGGKWLKTTLVQAAWAAVKVKGGYLQAQFHRLRARRGAKKAIIGVAASMLTAAWHMLRDGTEWHDLGAAHFDRADAQKTANRLIRRLQQIGYNVQVIAA

SEQ ID NO: 439350 - protein, 343 aa, unidentified
MDHFAGLDVSVKETSVCIVDDTGRIVREAKVASEPEALLAVLKNPAYHIKRIGLEAGPLSQWLYSALAEAGLPVICVETRHMRAVLKAQINKTDRNDARGIAQMMRVGLYRPVHVKTLRSQKLRMLLTHRKLLQAKAIAIENDLRSTLRNFGLKVGMVGNVKFEGRIKELVENLPDLATLAEPLLIVRRVLHEQLGILHRRLLDIVRNDDVCRRLMTVPGVGPVVALTYRATVDVPARFKNSKAVGASFGLTPSRHQSGESDRPGAISRCGDEMMRVMLYEAAQVMLTRTNKWSWLKAWAMKIARHRGMKKAIVALARRLAVIMHRMWVDGTEFRWTHDVVAA

SEQ ID NO: 439351 - protein, 318 aa, unidentified
MNVIGLDVSKDTIDATLITTKGSKDYIKISNSTEGFENLINWIKTKRIRKIAISMEATGIYYEQAAEYLSALYIVYVINPLKIKEYAKSQFSHTKTDKADSKLIAEFANRHLDKLTPFRPSENPILYKLVNLLQQLKEQQKETQNRLHTAKDIYIKSTHEAIIELLEEKIDQTSKRIEGMIKQKESLNIEYQNLQTIPAIGKETAVILLRHLTDKNFETANKFVAFAGLSPKIEQSGTSVNKKGRLSRYGHRQLKRALFMPALVAYRMNAFPQLVRNLEAAKKPKMIIIVALMRKLAKMAFYIHKTKKSFDKARHQTV

SEQ ID NO: 439352 - protein, 344 aa, unidentified
MTVGLDLGDRKSVICEVDAAGTVVKRCTLATTRGAISAYCGKRSGCRVVLEAGTHSPWVSRMLEACGHEAVVAHPSAVYGSRRRKKRNDRLDAELLARQGRADVQLLHPIQHRRLQAQEHLTVIRARDQLVRSRTKLINHVRGSVKAQGDRIGRCSAEAFPRKARGQVPREMRIAVFPLLDVIAELTTRIHDFDRQIEAVVVESYPEALRLQQLRGVGALTAPAFVLLVDDPYRFTRSRDVGAYFGLVPRLDDSSDGTPQSRITKAGAELGRRLLVSAARYILGPHGPDCDIRRHGQSIAERGGKNARKRAAIAVARKLAVLLHRLWVSAGHYDPDPLLRRRAA

SEQ ID NO: 439353 - protein, 327 aa, unidentified
MAAATDQLGRLLGTTQAPTTQRGYGQLQRWAQRLGQVERLGIEGTGSYAAGLARWLVDHGHQVVEVNRPNRQTRRRRGKSDPADAEAAARTALAGDEVTTPKTAGGTVEMLRVLRVARRSAMKARTQAANQLDSLLVTAPDQLRAQLRGLAPGRLVEVAASLRPGELASPIAATKLALRELARRHQALTAELDRLDSHIAKLAPKASATLLARRGVGPQTAAGLLVAAGDNPDRLRWEAAFSMLCGSSPIEASSGKTIRHRLNRGGDRQANNALWVIALSRMASDQPTKDYVERRTKQGKSKKDIIRCLKRYIAREVYQDLKAAIAT

SEQ ID NO: 439354 - protein, 342 aa, unidentified
MEYGAIDLHLRRSHFRIVEADGTTVREGKCDTTRADLTRVFGPYAPLRLLLESSTESEWVAQHLESLGHTVIVADPNYAAMYGARSRKVKTDGRDTAALFEACRLGIYRRAHRVSPAQRARRQQLRIRRHLVQLRSRSVNLLRAILRQEGWRLPSGSVEAIETRLDRLTLPAALTAILTPLRGWVRALNQLLAAADDQVVQLAQQDPITRHLMTAPGVGPVVALTFQAVLDDPARFGRDAGRASAFIGLVPSEASSGERRHKGHITKTGPRDLRALLVQASWVIWRGRSGAGAALRIWAQALAARRGRRIAIVALARRLSRILFAMWRDRRDFRAALAPSPA

SEQ ID NO: 439355 - protein, 416 aa, unidentified
MLGDADRFQAGCLFRAFDPVKEISLRLYPNDHLEAPEKRMTSYRSLAWPFTLLRVPLPTNGRIVAVAFIGVDLHTNSFTICRLEEDGGQQFATWQLAATDIERFCATLDADDEIAVEATGNSAWFCSEIRPCVGRIVVVNPKQFQVIRKSVKKTDKNDARSLAFFLSKDMLPETRLKTPEEGDLASLVHTRDVLVKSRTRLLNKIHAVHVRHGIKLKKESLSSKRRLVALEIGRFSTLEQVELRIVRDQVLSLTAAIDEIDKAVENAAEDMDGYDGLTSIKGIGPKSAAILLSGIGNVDDFQSADKLAAYLGIVPKVSQSNDTDNRGRITKRGNKLMRTTLVQCTLIAIRYSGYLNSFYRRIKDRRGAGKAIIATARKLLTIIYNTLRNRWVFEDFPAYKIAEKNKENSIVYGQSS

SEQ ID NO: 439356 - protein, 358 aa, unidentified
MQPEASREAKKMKYVGVDIGKWKCRAAVMNPEGVLIDEFAFNNDHQGIEDLASKLTPEDRVVMESTGSVWTNLYDALDERKVPVVLANPLKTRAIASARIKTDKVDARILAHLLRGDLVAECYVPPRELRELRALVRHRASLVRARATVKNRVHAIVDRRGIRCEYSDMFGKGGTEWLRGLDLGALDGLMLDNHLGHVESLSRQIGRVDEEIRSRASLDEDVRLLLSLTGVDVYTALLIRSEIGDIGRFPDYKRLVSWAGLAPSLHQSGSVEIRGGITKQGSRMLRWAMVEAAWVAVRHDERMRGFYERVKRRRGSGKAVVAVACKMLKVIWFMLSRREPYQSRNEGRYGVKLKSLVR

SEQ ID NO: 439357 - protein, 456 aa, unidentified
MESGKRHRAKEGLPLVHPNAAGIDIGSRSHVVAVPAHSDPEPVRTFATFTGDLHAMAAWLKTTGVTTVAMESTSVYWIPAFEILEASGFDVILVNARDAKQVPGRKTDVNDAQWLQKAHAYGLLRASFRPHQEIVALRSYVRQRERLLEMSSMHILHMQKALMEMNVQLHHVVADITGATGLKIVRAIIAGERDPAQLALLRDRQCKNPVGTIEAALHGHYRDEHVFALTQAVHSYDFCHVQVAECDRRIETILASLHGTSAETAGPPPKPARRSRPGANGFTFDVRTALYGILGLDPTQIDGIGPYVALKLVAECGTDMTRWPSAKHFTSWLCLAPGNKISGGKLLSSRTRRSGSRAAAALRLAATTVGKTDTALGAFYRRLSARTGKAKAVTATARKIAVLFYNALRHGMQYQDPGASYYEERYRQRVLDGLRRRAASLGYALQEQPVTADVVS

SEQ ID NO: 439358 - protein, 312 aa, unidentified
MRYFIGLDISKLSVDACFLEEGERTYRCYKNNYEGHTQLLESLDSKEKSLIVCEPTGGYEKKIVERLQQQGYPVHLVNTVSFANFSKSIHTCKTDRLDAYKLALYGQKFHPKERFNLWNEDLKTLQQRREDLVRMLADEKRRQEHACGDILLNLQDHIKVLEKMIMDLSEKIQKIIDQEASLKEVEKILVSIPGIGNCLASKLLSHLPELGHTSFTVNELAALVGIAPYARDSGQKSGHRFIQGGRKIPRDCLYIAVLTGRKSIPFINDLYERLCAKGKPKKKAIVACMRKFLVLLHALVKQKRTFQKVYQS

SEQ ID NO: 439359 - protein, 371 aa, unidentified
MQGSTFVGLDVHKMWIQIAMLLPGQDAPVEWRIPNEANAIRRMLQRISRESGEDVRYCYEAGPCGYALQRQITAWSDASCMLVAPSLIPAKPGVRVKTDRRDARKLAALFRAGLLTEVQPLGQADEAARDLSRAREDLREDLVRARHRLTKYLLRRGITFTPGKRAWTQAHRCWLDSLRFDDPVETAVVADYQLAIDQGEQRLQGFLTHLDRLAREPRYAPAVATLRCFRSIDTVTAVGLAVELHNFERFTSPRRLMAFVGLVPSEHSSGDTRRQGRITKTGNSHVRRLLIEAAWNYRHRPRVPIALRARREGQSPKTIALADRAMLRLHRRYQLLTLRGLQPQKAVVAMARELTGFIWAALSPLAARAAA

SEQ ID NO: 439360 - protein, 338 aa, unidentified
MSQCFVGVDVSKKEIHVCVLGKKTHPCPNCLAGFRKMMKSLREKESQGEGTIFHIGMEATGVYHLKLATFLKGEPDVVVYVMNPAQVKNFFQASFHRTKTDSIDACGIASCTEFLVSRGKIRAFETPDNEVERLRQLCSRREDLLSMVQMEKNRLEALKEVPSHSRDAERSILEHIEFLNRRMEDIEEKIKGHIQNSPELKEQADLLKSIPGISDTSAAALISEIRCAERFSNVKELVAFAGLAPAERISGTSVKGKTSICKTGSSRLRKHLYMPALVGIRHNPLLKEFYERLTNRNKPKKAALIACMRKLLHIIYGVLKNRTAFDPLWAKNRLAMAC

SEQ ID NO: 439361 - protein, 402 aa, unidentified
MNAVGIDVSKGKSMVAIMRPFGEIVSAPFEIKHTASDIHSLVELINSVEGESRIVMEHTGRYYEVLAHQLSKANLFVSAINPKLIKDFDNDSLRKVKSDKADAVKIARYALDKWQNLKQYNVMDELRNQLKTMNRQFGFYMKHKTAMKNNLIGILDQTYPGVNTYFDSPVRSDGNQKWVDFASTYWHVDCVRKMSLNAFIDHYQNWCKRKKYNFSQSKAEEIYGKAKELVPVLPKDAITKLIIKQAVYQLNSASTTVESLRTLMNETASKLPEYPVVMAMKGVGTSLGSQLMAEIGDVSRFTHKSAITAFAGVDPGVNESGSYEQKSVPTSKRGSSDLRKTLFQVMDVLIKTHPQDDPVYQFLDKKRAQGKPYYVYMTAGANKFLRIYYGRVKEYLSSLPES

SEQ ID NO: 439362 - protein, 327 aa, unidentified
MKKDFFVGADISKDKVDFCFLTSDESKKPKFISLPNDYNVIEAYFKSFTSDNVTVVLEYTNNYHITLQRVLNDLGIKYSLLNPEKTSYFLKHLNSKKTDIADSYGLSLYCRIFSSELNPTTYNKEYNLINSYNSAISLLIKIQTQLKNFKKSQKLVSDNQLDEIITTLTNQLTQLQKKLKLMAYEILKSFVPNCDEIIKANNGFGVDLAISLFPNLHFNRDKTAKQFISFVGLSPRIYESGSSVKKSQCINKKGNPKTRRILFLVAMSAIRYNAKFKQRYENLISKGKNKKVAIVAVMCAIVRYLKSLFPFDESFINGKSFNKLGAS

SEQ ID NO: 439363 - protein, 359 aa, unidentified
MKTSVSKKQRFFNQIKLTEDDDLYVGIDVHKASYHVAFYLNGAHAIDFITPADNAKLCSTLQKLKPAIKNIVYEAGPTGYSLARQLQQQSFPVHVIAPSKTPQYSARDSKTDRLDGRQLAEYAAKGLLRSIAIPTPRQEAIRQLPRLRNQFVVKLKRTKLQIKSFLLQYGIRQPEGLQHWSRIAVEKLKTLQLLSQLRYSLDTLIHEYDFLNEKIKDIDRKLNEAFTEKPHAKKIAILQTHPGVGSVTSMMFAAELFDPKRFNNTTELAKYVGLAPTIIQSGRTLRNGPITKTGRPQLRSTLIQAAWVWVAKDHQAREVYLRIVRNTGQKNKAITAMARRLAIHLWKMLCNNEPYRKTA

SEQ ID NO: 439364 - protein, 339 aa, unidentified
MKDTIVGLDLAKNVFHLATINQVGKLIKRKKLKRSQVHEYFIQLEPCKVAMEACASAHYWAREVNAMGHEVELLPPQHVKAYLRGQKNDYNDALAIAESALHGTIRPVAIKCVEQQDDQAFHRIRRQLVGDKTRLINQVRGLLAEYGIVLPQSEAAFRREIPAILGDAENGLTVQFRQLLDRQHQRFLSLAEEIAWYRDQLNIQAKTDEVCCRLTGIPGFGPVVSSAVKSWMGDGRQFNKGRDASAALGVVPRQHSTGGKERLSGITKRGDTYVRTLVIHGARAVVMRAKSKTDPLSLWINRLVATRGFNKAVVALANKLVRIAWVIIARNETYKPGII

SEQ ID NO: 439365 - protein, 346 aa, unidentified
MQYIGIDVHKVSSQLCFCDENGEIIEKRINTDRKRFRDVLEKAPRSKVLIEASTESEWVASCIEELGHEVIVADPNYAPMYATLNRRIKTDRRDAQALCDACRLGAYRPAHRSSERSRKLRAVIGAREALVRTRSRYVSVIRALSRRDGYRVRSGANVSFEKRVREAEIDPRLQGQIEPLLVVMRKLNEQIKAIDEQLEQEATGDRVAQRLCSVPGIGPVTALHFISIIDQVERFDSAHRLAAYLGLVPRELSSGEKRFRGRITKAGDRRLRFLLVEAAWRIVCRPRPETEHLRQWTDGIAVRHGKNVAVVALARRLSGILYAIWRDGTCFQPPAQRQVVKEVLSA

SEQ ID NO: 439366 - protein, 380 aa, unidentified
MVFLPSTIPSRMARTNLASAPAPGGDSDPVSVYIGVDTHRDFHVAVALGGQGCLLGEMHLPACTAGYEALLDWALELAEGQATSLLFGIEGTGCYGAGLSRHLQAAQCSVREVNRPNRQTRRQRGKDDAIDAEAAARALLAGTATAVAKAGNADAEMLRVLKSTRDSAVRCRTRAITQLKALLIVVPAELRESLQHLDTAELVNRCLNRNEEVASSPLTAACLVMRTLAERIRHLEQELMVLGRQLDRITQAVAPGLRAAQGIGPDNAAALLIAAGDNPQRLRSEAAFAALCGASPIPASSGTRQRHRLNRGGNRQANCALFRIALNRLRWDPATKAYAERRTAEGKSKREILRCLKRFIAREVYRLLQAGSLRPEVTRA

SEQ ID NO: 439367 - protein, 319 aa, unidentified
MADHSLPILCGVDVSLATLDIALVDQPVTRIPNTVAGITDWQASLPGHARIAVEATGRYHELLLGLAVAAGHEVFLINGLQLNHYRQAVGQRAKTDPDDARLLLRYLMHEQAELRPANPLNAKEKCLWSMLQQRATLVKVRSQVKQSLRGSSETEAIGQYVTTHLDQAITQIEHRMTELATELGWQASIRLCQSIPGVGPLSALALTACFHRGEFKRADQWVAYMGLDVRVRDSGTCRGRRKLSKRGNPELRRLLYNGAMSAAKMPSIRPRYEQYRERGMSSTEALVAMSRKLARIAFAVLSKGEAYDEKMPGWTCACP

SEQ ID NO: 439368 - protein, 395 aa, unidentified
MENPIIACDVSKGRSHIQGFMGLSKPFCNPFEVQHLRSDLRQLKQLAESLRKQTGRNPVFVFEYTGIYHECIARYVQEIGLKTYAISPLESAKVRKSSIRVTKTDSKDCLNIATVYYSRNIREFINGNDDTKALSRRKRDLKCVLIRQKCIYHRYLDLIWPCFDEKFGTDSQTSRRIILSYLHPDKLKKSNVKSIANHLLHYCYLGNSRALTIAQKAKDFASDCVSGVNEKSEYVNALSEALANLIKTEETIEKINEQMEFLSRKNPYYRLLKSIPGVGRNILLQMIGELGDFSRFKTAKQFVAYCGLDPSILQSGNNDGKHFSITRKGSQILRSSLYLAVNQMLTQHKDNQITRFYLQKKSSGLSHKVAAVASCRKLACCVFGMLHNGTCFETI

SEQ ID NO: 439369 - protein, 454 aa, unidentified
MQRMLWIGISSYRIDGSRKAPTTALCKIVNQLDTARRFMWNKVTLQSALWIQHHKSSLEVAFMVCVGIDVAKDKHDCFILSSEGEVLADVFTIENNREGFDTLLRQIRSCTSPTDIIKVGLEATGHYSYNILGFLLEKGMPPYLINPLHTNLYRKSLSLRQTKTDRIDARTIATMLMSDVDLKSYTNTAYHNEELKSLTRYRFDKVSERAKLKQSVSRLVNILFPELEKLVPTLHMVSVYAMLSEFPGAKQIAEAHLTHFKTVLLEASKGRYDREKAVAIRDAARRSVGSVMPAKSLELRHTIRLIQELDKEIEEVEAEIFAILDTMQSPITTIPGMGPRMGAMILAEVGDFSRFDSADKLLAYAGLSPSTYQSGKLNATGAYAHMEKRGSRYLRYAIFNATKYVCIWDPTFKAYLARKRSEGKHYNVAISHAAKKLVRLIYAMQKSGRPYQPS

SEQ ID NO: 439370 - protein, 312 aa, unidentified
MNDKNTSVYAGLDMAKASLQLHLQSKSYDLPNTADGHAQLSKRLAAIPGVHVVCEATGGYERAVGGALHAAALPVSVLNPARVRQFARAAGKLAKTDPIDAAQLTAFGQAFAPALTPPRTATELKLAALVTRRMQLLELRVAEAQRADTCADLDLRKLFTPWLAQLEKQIAKVEALIEALLQEQAPLAAQVQRLDDIMGVGRLTAVMVLATMPELGTLNRRQAAALAGLCPYNRDSGQWAGKRRISGGRAEVRRALYMAALSASRSNHLLKPFYARLIAAGKPAKVALTAVMRKLIVLMNHLLKNPNFSLAH

SEQ ID NO: 439371 - protein, 373 aa, unidentified
MPKYSTAFGMDVHLRSTTVCALDADTGEAVARRFPGNPWGEIAGWMGGFPGPSLAAYESGYPGFAPQRELAGLGVECVVAAVSKIPRSAADSASKNDRNDAARMAKAILAHDISPVWVPSPEVEGIRDLAGAYDGATARLATAKQRLLAFLAKRGFAYGGTTPAGNPRKYWTYDFLRWLDKVRPEDDGGVRTLAALRSEVEAAAEARADLLSEYRAAVDASPIAAEAAALQSIKGCAFALAAAFSAEVGDFTRFRSGRQVTAYFGLAPSQRSSGDSVRLGGISGAGNALVRKLAVEGSWCYAAARHQPKLMPRDTGVPLEIRMHGRKGSERLLRRREEMLARGMPAAKANAATAAELVRWLWALGTMCREGAE

SEQ ID NO: 439372 - protein, 363 aa, unidentified
MSNTTPVTVGLDVHARSVRLAAVRGDELLEERTLPYDHEAVERAIGRWPGAQACYEAGPTGFGLQRYLTAAGVDCAVVAPALVPQRPGDRVKTDTRDARSLARLHQGGLLETIWVPDPATEAARDLIRAREDARIDRMRDRHRLSKFCLRNDLTMPGRSWGVARRDWLSRQSFENPARQRAFETYCHTVNLVDARIETLEEEIRQVATEGPWSPLVARLRCLRGIDTLSALGIAVEIGDFHRFGGAEKFMGFVGLVPSEHSSGEKRARGSITKVGNTHVRRLLVEAAWHSRLRPRVSYRLARRQRGADPMVIERAWRAQQRLHRRWRRMSARGKSHQKIVVACARELAGFVWAIATEQPLRDA

SEQ ID NO: 439373 - protein, 479 aa, unidentified
MVLKQKKKQSVPLPSKKKVAIEVDSVLQKKAEKSPLESINLNAAGIDIGSRSHFVAVPPDRDPQPVQEFAAFTADLERLADWLERCGITTVAMESTGVYWIPLFELLESRGFDIKLINAHHIKNVPGRKTDVVDCQWIQQLHTFGLLSGSFRPDDEICVLRAHMRQRDNLIRYAGAHIQHMQKALNQMNIQLHHVVSDLTGVTGMKIIRAILAGERDPQALASHRERRCKHPVETIAKALQGNWRQEHLFALRQAVELFDVYQQKIDDCDQAIARVLDALESQTDQATPQPMRRQKLSRNTPDINLHERLFQLTGVDLTRIDALNPHSVLKILSETGTDMTRWPSAKHFASWLGLSPGNRVSGGKRIGKSKTTPSANRAAAAFRLAARSLYASQSALGGFFRRQKARLGGPKAVTAAAHKLAKIFYSMLKNKTAYEAPDANYYDEQYRKRVMANLRKRATQMGFDLVERSADDAQPCAA

SEQ ID NO: 439374 - protein, 400 aa, unidentified
MLLFFEVITMIFVGIDVAKDTHYAAVSDDSGAVLVKTFAFQNNAEGFCLLLKKLSEFDRSKLLIGLESTGIYSENLICFLYESGFRLAVINPIQTATLRKTAIRKTKTDKVDTMLIIKSLMVNSYRLYSQRDADSLKLRTLCRFRQNLKNSKARLKIQLAGYVNLVFPEFGKFFKSGIHIAASYALLKKYSSPKEIAALRTSTLCTLLSNASHGRFGKDTAEALKSLALSSVGVKNPYISIQIAQTIAQIELLEQQIKDLNSAIEEAMESINSVLMTVPGIGAVNAACILGEIGDIKRFSKPCKLLAYAGLDPTVRQSGQFTAKSTRMSKRGSALLRFALINSAWQLTLNDTTFKAYYDLKRSQGLNHYGALGHVAHKLTRVIFKLLTSDTPFNPAKLVA

SEQ ID NO: 439375 - protein, 331 aa, unidentified
MEQRKTIIGIDVSKKTLDIFIKTLDVHLQISNNSEGFKKLLAVLKASKLKLEDCFFVLEYTGGYEYRLVQFCQSKQISYVRISGLAIKRSMGMVRGKNDKIDARRIAEFGDEKQSKLEAETASLDGIMRLKRLLSQRDVFVSDRKAHQNRYNEIQYMMDLPDSDPMLKRYRKIADELQKLIDKTEDEIRKLIKANDAFQFNFDLITSIKGIGEVNGWTMIAYTENFTSFDNARQFGAYIGVVPYPYTSGTSIKGKSRTSKMANQHIKALLDMAAKAAINHDRETNLYYERRIAAGKHHMGVMNEIKFKLVRIMFAVVGKQQTYVDKYKNIA

SEQ ID NO: 439376 - protein, 439 aa, unidentified
MIETILPGVAAIDLGAEKLFVGLAEQPVRSFGSCTRDLHEMRDWLRENKIERVAMEATGVLWIIPHDYLQAEGFAVTLFHGAQARNLPGRKTDVQDCQWHAMLHGHGLLQPCFVPPEPIRELRTYCRLREDHLTMAAQHIQHMQRALDSMNVRLHNVLSQLHGVSGMRVIDAILAGERDARTLAALCEAQVRKAKEAELIASLEGTWAKHHLFALEQAVEAYRFCLQLVAKCDQKIEHQLGVINQGVEAVPRPKGRKVKVTRHNPPQIADLYGQLLTACGGRDAQMVPALGPLSWLKLVGETGTDLGHWKRQDHFTSWAGLAPTHHRSGKSRRRVPRRKTKVAQIFREAAMSLAKSKDCVLGEFYRTVRGRRGAAVAMVATARKLAVLYWQVMTHGIEYVEKGLEQHQKQMAERKERHLRRQASKLGFSLHPLKPSASV

SEQ ID NO: 439377 - protein, 342 aa, unidentified
MPHSPKREVEVFAGLDVSAREISAARFRSKEGTLTVAGFANTASGHKALLAYLLQATEGVRVCLEASGNYSLDLALTLHAHHHVEVSLVNPRRARRFAESLGERSKTDPVDARVLCEYAARMPWVVWRPPTARALRLRAITRAIESLGVMHTQEKNREHALKASQALPSLVIREMQRHQRYLENRMEQLRREARRLIAKDPELDRRFRLMVTVPGIAETSALQILGELAVLPDSLDARQWVAFSGLDPSQFTSGTSVEKRPRISRGGSRHLRRALYMPALVALRREPHLRTFYQRLVNRGKARLQALVAVMRKLLHALFAMFRCHQTYDGAKLCSVELASCA

SEQ ID NO: 439378 - protein, 387 aa, unidentified
MQAATVSTPITGHISTIFVAIELSQKTWLVTMHSPDRDKISRHKVQGGDHASLLTLIDQVRDRAVRRLGAVPAVVSCYEAGYDGFWLHRLLMAAGITNYVFDPSSIAVDQRARRVKTDRIDGEKMLRTLMAYLRGEPRVVRIVRVPTPEQEDARRDTRERDRLTKEQTAHTNRIKALLRLHGFAVGQPRRRDWLTWLAGQRDWQGKGVPPRVLTEIENEHARLMLVRKQLDALARTPAAADPAPAVAEMARRSELLQRLKSLGPAFATTLTQEVFYKDFRNRREVASYFGLAPSPWQSGGTDRDQGISKAGNPRARCSAVELSWLWLRHQPGSELSQWFRQRTLNAGARIRRIAIVALARKLVVALWRYLTTGLVPAGAVLKSAEAQ

SEQ ID NO: 439379 - protein, 419 aa, unidentified
MEVVHARCAGMDISKKDAKVCVRVAGAGRRKTVETVTTWGSMTDEILTLREHLIEQGVTCVVMEATSDYWKPFYYLLEDADFELQLVNAHHTKALPGRKTDVADATWLAQLGAHGLVRGSFVPPEPIRHLRDLTRTRVAITRERSREAQRLEKLLEDAGIKLSSVASDILGVSGRAMLEALIAGERDPEVLAELAKRRLRAKLPALTEALQGRFTEHHAFLTRVHLDLIDRHTAAIAALTARIETMMEPFQAFHTLICTIPGVSTLVADVIIAETGADMSRFPTAKHLASWAGTAPGNNESAGKTKSSKTRPGNPYLQGALGTAAMSCAQNSHTYLGARYRRIASRRGPQKANVAIQRSILVAIWNMATTGTLQRPRTGLLHAAHSAASPCSCNPTTRSPGLPGNPQHRVVNGKPLARE

SEQ ID NO: 439380 - protein, 589 aa, unidentified
MSIPSSLDRIGVGIDTARYGHRVCFLRPDRQPAAKPLTVLENRAGYQALHERLQQLHQQHPQAHFHVRIDAAGQYAANLEHFLRGLDLPLTVSIGEPKRNKDYQKAHFPKRTTDDTESQAMARFAVVELPPPTPPVSAPMALLREVAGRLQAQVKQTTQAINRLHNLLARVFPELATLTDDLAAGWVLRLLDKYPSAERLAQARLSSLEKIPHLPHDMAPALHQAAQHSVASLRGAVAETLVRDLVTQVCHCQKAEKTMRQLLTTTFADLPDSPHVQVVTVPGIGMATAAALVAQVVDIDRFATPEKFVGYFGIFPEENSSGVDKHGNPVPPGTLRMSHKGNDLVRHYLWNAARSAIRHNPAIRALYRRLKAKGKRGDVAIGHCMRKLLHLVFAVWKSNRPFDAKHYPWEQPSDIQVSMTQPITDTQVSTTPDAAAACANDKAVGHKRDKPAQEVVTTAPASVAPETIAVNPPAATTPAPRPKVDFTFLRQQVSLQQVLEHLGFLDSMRGRGTQQRGPCPVHGQATDRTRTFSVHLGKNSCQCFDAACGVHGNVLDLWAAVQRLPLYEAAKHLAETFHLPRNREEEPVN

SEQ ID NO: 439381 - protein, 321 aa, unidentified
MVVLDDNDEIADEVRVLDANLEEIARQYAGSKAAIEATSNYYSVYDTLDEYLDIVVADPNQTKALGVVEAKNDRLDAKLLAQLRSAGMIAESYVPSKELRERRALVRGRKQLVEKRTDFKNHVHAVLEQQGISYDWNPFTQKGREILADEDLPLSTVSRTLIWSYLEVIDTLDEQIEQLEDVIQERAASLKETQLLMSIPGVSFFSSLLITSELGDIDRFDRDKEVVSFAGLDPVVRESADSRTEGGISKRGNPRLRSILVQCANVAVHTCNDEYLSSFFERLKRRKNYSIAIVATARKLLVSIYHMLDRKEVYDPPGVSS

SEQ ID NO: 439382 - protein, 402 aa, unidentified
MPLLFAGWDWASASHAITIIDTTGRVVDRATLAHTEPELDAALARLAAHAPPAGLPVAIEATNGLVVDRLLAAGHPVIPVHATAFHAARPRWSAAGAKTDPGDSYKLADYLRTDGHRLRRLQPPDAATRELQALVRARADCLAAKTTASNQLWALLGAHWPGARAVWFRLASPIALDFLAAYPTPQAAADLTEQALAAFCRQHAYRGGKAAAELLARLHAAPTAPDGLHPIVLTQLVMAKVTLLRTILAGITELDRAIKTHVAKHPKARLLAALPYAGQISLAQLLAELGPILDRASSADQAAAEAGATPVTRTSGKTSSVRFRMAANRNARQALHVFADNARHGSPWAAKLYADARARGKRHPQAIRILGRAWLRVIWACWHTDTPYDPAKHRAEQRLAAA

SEQ ID NO: 439383 - protein, 460 aa, unidentified
MYEGMEKKGFLGIDVSKGYADFILLGGSGQVLEENFQLLDSKEGRQKLKELISGWRLAGMEELYCGLESTGGYENNWYHWLKESFKSSGVYVCRINPRGVKANSDASLKRTITDAVSAENIAFYMIRFPQKLDYGISDATVNEGFKEGRMHLTCIKMQQKQKVQLSNQLEKLLYQYYAELLVYCRHGIPVWLLLLLAKYPTATAVVKAGVKRISAIKGIGEMKAYSVISKSKDNVRNVSHQISHVIAITAKEILHKEALIKEEKQYLKDLYKSAEEVVLLSSIPGIGLDSAVAIALEIEDVTRFDTAKKMASFFGVHPTFKQSGDSTWGNHMSKAGRGEIRAVLYMVALSGMRYNPVLKQTYAKARAKGMKHGQAAGVVMHKVLRMIYGVLKSKVAFNAAIDEKNQQKATEKQHEKEAEDKKGKKTKQQKKHRFQDISTNAPISGRAEQRIKKQVASQTS

SEQ ID NO: 439384 - protein, 355 aa, unidentified
MDKIKYIGLDVHRDTISAAVLNESGRLLQQSVLMTRTAAILDFIGGVRGSLHVTFEEGTHSAWLYDLLSRRVDKLVVCNPRKNALLKSGNKGDAIDARKLADLLRAGLLSPVYHGETSALEVQQLARSYLMLTEDTTRAMGRLKAVFRGQAISCTGRRLYGPKHRGEYLAALGGCALRRRAERLYQQLDALQQLRRDARHDLIVECRKHVEAKWLQTVPFLGPLRAAVLIGRVQTPHRFRTKRQFWTYCGLALETRDSAEYRVTDGQLERKKRPAQVRGLNWNYNHELKNVFKGAANAASTGQGVFREFYLGLLKKGMRPEMARLTLARKIAAIALKIWKKGESFDAEHLKSKAA

SEQ ID NO: 439385 - protein, 340 aa, unidentified
MSLYGGIDLHANNSVIVLINEQDEVIYQKRLPNALPTILEQLAPYHTEMKGLVVESTYNWYWLVDGLMEADYRVHLANPAAIQQYKGLKYTDDHSDARWLAHLLRLGVLPEGYIYPKAERAVRDLLRKRAHLVRQHTANVLSVQNIMARNTGARFSVKRIQELTKEDLSTLLAEAAQVLAVTSSLVVLDCLRQQIKTLEKTIHKGLKHTPAYEQLLTVQGIGTILAQTIALETGAISRFPTVGNYASYCRCVDSTKISNGKRKGTGNVKNGNPYLAWAYMEAAQFAMRFQPAAQRFYQRKLAKSRNNTVLARKAVAHKLARACYYIMRDLVSYEVTKAFG

SEQ ID NO: 439386 - protein, 339 aa, unidentified
MDDYDGRQIVGIDLHRRRSVIVRMTETGEQLETVRIDNDPVALGLEIAKAGEAPEVVLEATYGWYWAVDALQDAGAVVHLAHPLGVKGFAYRRVKNDVRDASDLADLLRMGRLPEAWIAPASVRELREAVRHRAKLVALRTGLKAQVHAVLAKQGVTVPMTDLFGVAGGQLLDALRLDPAYNARIVSLRRLIDALDFEIDVVARRTAAKLATHPGYRAVQTIDGVGPILAAIFVAEIGDVTRFHRPEQLCSWAGLTPRHRESDTTVHRGRITKQGNTLLRWAAIEAVQRLHRGPLGAARARIGERRGANISKVAVARKLLTLVFYGLRDGHIRCLARPA

SEQ ID NO: 439387 - protein, 288 aa, unidentified
MYHYAGIDVSLECSSVCLVDGTGKILREARVASEPEALITWLRSLGLVLERIGLEAGPLSQWLYAAMRDAGLAVELLETRHVRDAFKAMPVKSDRNDARGIAQLMRLGWFRPVHCKSIEAQETRAVLTARKLLQSKLRDIENSLRGVLRGFGLKVGTTTERTFAERIRELVAGHPGLEIVAQALLEAHAVLRREFNGLDKHTQKLARSHPQARLLMTTPSVGPIVALTYASAVDDPKRFRSSKATGAHFGLTPKKYQSGETDYTVNRPANLTPHRRPILTPSCGGLCW

SEQ ID NO: 439388 - protein, 471 aa, unidentified
MARRLVGIDLGIASSHTVRVLDETGQQVCRRRCEPTVASLRRIEDAASVGAPPGTVLEVVLEPTGPAWLPVAVFFASRGHSVFRVSSAKSADLRRFLSKHAKSNGIDAETLARLPLFSPGGLLPLELADAEHAALDRRVRACDRLTRAASEHKTRIKDLVRQLLPMTPLIEDIGVADLAVLERWADPRTLLKIGPSKLKSLIVKASHNHHGAERAEQWRNAAAAAVELYGEHPAVAWQDLAAEVATEVRLLKAIQAELAVHSARREQAYRWADHGQLARSLPGIAKVGGPVIAAAIGRAERFPTGAQFKSYAGLAPRASETGNTDRKGQPMSKAGSSLLRTTFFRAADTARKQDPQLAKIYYTQMVERGANHVKALCVVAAHLAERAWAVMARGMPYVICDINGEAVTAQQAKTIIAEHWTVPPQVRARRRSTKTAKAGKAPQKSTLDQPSQTGGRNRGDLPHQTIVQHGP

SEQ ID NO: 439389 - protein, 338 aa, unidentified
MAILNVGIDLAKNVFALHGINERGQVDLRRPSVPRAKLHALVAALPPCTIGMEACSGAHHWARLFAQHGHTVKLMAPKFVAPYRMSGKRGKTDAADAAAICEAVQRPNMRFVSVKTAEQQSRLMVHRARQGYVEARTALFNRIRGLLAEFGVVLPQKPEVVRREAARHMDTLPGYGKTVIEDLLAEVRHLDERVRQYDGHVRAMARDSTPAQQLMQIVGIGEVTATAIVATVGNAREFSSSRQFAAWLGLVPGQYSSGGTTRLGHITKAGDAYLRGLLVMGARAVLNAAGNKTDSVSRWATNIALRRGYWRAVVAVAAKNARLAWAALTKGDSFTLPA

SEQ ID NO: 439390 - protein, 345 aa, unidentified
MTTMPQPVPTLVTVGVDTHADSHVAVAKDSFGRYLDATSVATTPVGYAELLGWAQRLGQITAWGIEGTGSFGAGLTRFLRGHGQVVVEVNRPDRQARRRRGKSDPLDAEAAARAVQAQQGSVPKAGDGQVEMIRSLRVARSTAMKARTQAINALKGLLVTAPDELREQLRDLSTVRLVQTAAALELGPVTTPVAAATLGLRTLACRYQALSAELTVLDAELDRLTAAAAPKLLALFGVGPDSAGALLVAAGDNPDRLRSNAAFSMLCGASPIEASSGKTRRHRLNRGGDRQANAALHRIVVARLRHDARTQDYLVRRIREGKSKKEAIRCLKRYVAREVFAALPR

SEQ ID NO: 439391 - protein, 372 aa, unidentified
MNNTIVYVGMDVHKESFTLADYTIDSEKSSNVRRTPADYKEILKYLEHLRTIYGSDANFICGYEAGCLGYSLYHQLTDRNVNCVILAPTTMLEKRSGKRIKTDKRDAELIAKCLAQHNYSPVHIPTNEDEQTKDYIRMRDDHKMALKKVKQQILAFCLRHNYHYDKQTHWTTVHLKWLKDLDCEPLYKEILNEYLLSYDALKDKIERLDNRIKELASKDEYRESVKKLCCFIGIQTHIALSVLVEVGDFKRFQSAEKFAGYLGLVPGEDSSGDDKVRLGITKAGNSHIRLLLTEAAQSYTKGPIGHKSKLLKAKQAGNSPQVIAYADKANERLRRRYYKMVIGKSKKHNVAKTAVARELACFIWGMMTDNIA

SEQ ID NO: 439392 - protein, 373 aa, unidentified
MNQPSTYVGLDVHKKDIVVALLLPHESEPTIWTIRNEPRAIRRLAKRLRREAQGEILCVYEAGPCGYVLQRQLRAEGIPTEIVAPSLIPVKPGERIKTDRRDAMKLAMAARAGTLTYIHPPTEAEEAVRDLCRCREDAVKDLTSARHRLSKMLLRRGFVYRKGSNWTGKHRQWLRSLRFEDRVTKAVFDDYLTSVEWLEERVRSLGAQLEEIAAADPYREPVGWLRCFRGIDTVTAMTIVAELHDFRRFEDPRKLMAYLGLVPSEHSSGERQRRGAITKAGNSHVRRVLVEASWHYRHRPAVGATLRKRREGQPAEIIAIADKAQRRLYRRFHRLVLANGKPTQKAVVAVARELAGFIWAALHQYPAQRQQAA

SEQ ID NO: 439393 - protein, 343 aa, unidentified
MVVHYIGADVHSNNTELAIERKGQIIERYAVPTSIRAIRQVLDQIPSPKYLAFEEGPLAGWLSRNLKDHVDGLVASDPRRNKWIASDGDKDDRIDAAKLAALLRGGYLRPVYHSDDLQRLWLKRWVALYHDRVRAATRAINKIRALARLEGQRVPRGALRDVATRQSWLDTLDHDLAEALGLLWRGYDRHRTEVRLAKRQMTRRGRAFPIIAYWQALPGVGPIRSATLFAYLDTPWRFQKKSQLCKYCGVGLQRSSSGQDRRGRDRPARLELFRQVNRRLKDAVMGMTMSAIRSRANVFRDHYEERIRHGALASNARHATARKLLTVMWGMWKSQRPFDAAWC

SEQ ID NO: 439394 - protein, 341 aa, unidentified
MSNAGTYIGVDLHKKTCFITIMNQAGKIKKQTEISTDTDKVAKFFSKHTDASVAVESTMNWIPFYENLESLGCSVVLSNPLQTKAIAAARIKNDKVDSKILADLLRTNLLPTAYIQPREIRDLKELVRQRVNYVEIRTRIKNKIHSVLFKNNLKHDFTCLYGKAGMIWLKELELRDIYRQEMNRYLTTLNLLDKQIAEMSDQIMATAKTDYDCKLLMTIPGVSYFTALVVKSEIGDINRFASAGKLCAYAGLIPSTYASAEKIRHGRISKRGSKWLRKALIDSVTSGSKHPSRLGFFYRKLKKSKGTGKAKVATARKLCTVIFAMLSDKQPFREFAPVKQR

SEQ ID NO: 439395 - protein, 339 aa, unidentified
MEHFVGLDVSVKATSVCVVDDGGKVILEQKVLTEPADIIALLTSLDVSFCRIGIEAGPLSQWLVNVLTAADLPVICVETRHMKALLTAQQINKTDRNDARGIAQMMRVGLFEPVHVKTLVAQKQRMLLTSRKLLQRKLLDLECELRGTLRNFGLKVGVVSGFRYEARVRELVAGFPGLAAIAEPLLSVRRVMRQQFAVLHKMLLDVVRGDPVCRRLMTAPGVGAVVALTYRATVDQPQRFVHSRAVGAHVGLTPKRYQSGETDYDGGVSKCGDALLRTMLYEAAHSWLKAWGVRVAQRRGMRRAIVAVARRLAVVLHRMWVDGSEFRWSKDSTALPAIA

SEQ ID NO: 439396 - protein, 343 aa, unidentified
MKIIRVGVDLAKNVFQVHGVDRNEKAVWRRKLNREEWLKVLLEKIEPGCEIGMEACGGAHHWARKLHALGYRVKLIAPQFVKPYVKSNKNDANDAEAICEAMSRPSMRFVSIKTVEQQDIQAVHRIRAGLMEQRIAKANQIRGLVSEYGLVAPKEIAHLRAAIPCWLEDAENGLSSRFRRLLNGLWQDLLLLSDRIAELDQEITVIAASDPVAKRLQQLRGVGPMIATALLATVGDATQFANGRQMAASLGLTPKQNSSGGKDRLLGISKRGDSYVRCLLVHGARSMIRTAKDKDDRLSQWVMRIATVRHPNIAAVALANKTARIAWAMIVHGSDYQPGLVTA

SEQ ID NO: 439397 - protein, 379 aa, unidentified
MRRVCGLDVHKDSIYMCILYENGSKIESVFGVLTPELDKLRDLLVSHHVCEVALESTSIYWIPIWNILSVDFSLKLVNPYFIKQLPGRKSDVKDAEWIATVLQKGLIRGSYVPDRMIQCLRQYERRNHELSKNIVHAEQRMDMILQRCNIRISNYVSCISCKGYQKVVNAIISGESNPKVLVTLIHKRTLNKHGRQVVEDSLNGFVSDTDRDILRQYRDERMQMEQHKSENKAKMQAICEAHYCEELELLQTLPGIKEESAANIIAEIGVDMKMFLTASAIVGWAGLKPRNDQSAGKIKSRKITHGNKYLRKILVETAWSAARTKDSRFMKMYQRLLARGKSKQKALIAVARKLLVLIWNMLSKKEAFNPEYKRRIQAA

SEQ ID NO: 439398 - protein, 338 aa, unidentified
MALYCGIDLHSRDCWLAILDDGLEVVREAKVDNDLGAILEILEPYREDLEGIAVESTFNWYWLVDGLDECGYQMHLVNTWAVKQWEGLKYSDDRHDARWLAHLLALGILPEGYIYPKQERSVRDLLRRRAFLVRKRTSFLLAMRGAFECRTGLRTTSREVKQWTAEEVESYLEDPVEALGITCLLEPMKTLDGQIRIIEKKALARARLRDEFAPLLTVWGIGKILALTMMYEVGEISRFKKVGNFASYCRLVKSARLSAGKRKGSGNRRNGNPYLSWAFSEAAHFAVRYHPPAKKYFQRKRSKTNGIVAIRALAHKLARASYYVMKDQVDFDSERVFG

SEQ ID NO: 439399 - protein, 362 aa, unidentified
MPQITPFVGLDVHAAQTHAGILDPLTGELSRRRVKGDPLVALELLAELGPRPLAVYEAGPTGFALARAGAERGLDVRVCAPGLIPRRPTDRIKTDARDAERLARLLAAGELTFVRVPTLAEEQLRDLVRAREDLRGDLNRARQRLSHLLRRRGLRFTGAGNNWTQAHRSWLRALDFDDRASQVTFADYLAAVDALEQRREVLERTLSELAPESPLAETIARLRCFRGIDLLAATGLCSEIGDFARFDHPRQLAAFLGLVPSEHTSDEKRRQGQITKAGPKHSRRLLVEAAKHAWRRPRLSEALRRRQAGQDPRVCAVAWRAQRRLHHQWQRLVSERGKPANVATVACARELATFVWEAAIIS

SEQ ID NO: 439400 - protein, 338 aa, unidentified
MYYTGIDLHKKTSFITTVNGSGKVVFTRNFPNNPEKILDYFFNLGEPTKIVIESMCSWHWLYDLLKANNFDVVISNPLKTKAIASAKIKNDKVDSHMLAQLLRADLIATVYVCSLKTRKLKELLRHRRRLVNDATRMKNRIHMLLMKNNISVAVSDLFGVKGMKYLKEIDLPIYHRQQLKCYLTLYGQLTKQIEPLTKRIKNLADKDPMAKLMMTIPGIGSLTAMFIIAEIEDISRFPSYRNLASYAGLVPCLDASADKSRTGRITKQGSPYLRTALVEAAQVIPRMKKSRLNIFYRKRIVRAGYQKAIVATAHKILRYAYYVLKNQTPYREEYPTCA

SEQ ID NO: 439401 - protein, 338 aa, unidentified
MSIVILGIDLGKNSCSLVGLDESGTVVLRRRMRRDGVIALASKLPSCIMAMEACCGAHHVGRALAELGHEIRLMSPEYVRPYVKAQKNDDRDAEAIAEAATRPTMRFVELKSEEQLDVQTLHRVRDRLVSERTSLTNQIRSLLLERGYIVAQGHAKLRSKLTELLAPDAEALSPRMVFLLEDMRTRWAELDRRIAAFDAEFATMARTDERARRLTSIPGIGALNATALVAAVGNAATFSKGRDLAAWLGLVPRQATTGGKPKLLGITKRGSRYLRKMLIQGARSAMPALAKTDTATGAWLRALLARAHPNVVVVALAAKMARTVWALLHHGRTFEAAR

SEQ ID NO: 439402 - protein, 339 aa, unidentified
MSKSIQPVQAMVFCGIDVSAATLAVAVQQEDQRFEERVFDNTAGGHKALIAWLQKRKGRARVSLEATGIYSLDLALALDGAEGIEVAVLNPKVMHRFAQTLRRSKTDSADAQALAEYSRRMPFVPWSAPGLSGLQLRTLSRHIQGLVVEHTRQTNRLHGAEKSASTPRCVVNDLKRSMASLKLRIVRLRGEALELVGSDEAMQKRFKLLICIPGIAATSALQLLGELAPLSPEMSVRQWVAHSGLDPAHQVSGTSVHKRSRISRAGNRHLRHALYMPALVAVRRDPHLKAFYESLLGRHKAKLQALIAVARKLLHAIYGILRTETAYDGSKLFPQIQTG

SEQ ID NO: 439403 - protein, 371 aa, unidentified
MNHVTSIGLDVHARSVTAVALDSITGEVRSQKFGYSPAEIAGWILQLDSPKAVYESGVTGFHLVRELREMGVDCIVGAVSKMHKPASDRRKKNDRNDAEFLARQLMAHNIVEVFVPDVETEGARNLSRALEDVRDDLTRAKHRLTHLLIRWGYVWNEFNEDGKRRGSWTRAHWEWIRGIELPDAAARESLDYYISEVRHIESQKKAIEKRVAQCASGPRWRDRVEALRCMKGIETVTAFALTVEAGVFSRFDSARAFASWLGLVPSEHSSGERASRGGITKAGNSHLRKLLVEASWHYARATKERKRSLYDESVPASISNHAAVGVKRLVERRRHLSCELRKRPVVANVATARELACWIWALGRMSEGALA

SEQ ID NO: 439404 - protein, 414 aa, unidentified
MINVGIDLHKTQFTTCVRGGTGNTFGKYPTTEEGYQAFFKKTSVWQASGETVQVGVESTGNTRYFKSRMEGEGIGVTVINTLKFKVVNESVKKTDKHDAATIAEFLEKDILPEAHLCSRKSEQMRRLLKVRTKLVGTVTVIKNQIHALLNSEGLEDVSASSLQSKRGRQRVLNALSQWENGLVVQPLVEMIERLEENVNIMEKQLRVLADGDRMVELLMGIPGCGEVCAWTIMAYTDDIKRFASAKKYAAFAGLVPWVQNSNETTRYGKITKRGPRELRTAMVQIVMGLRRLKKKTAAWRIMERYEAMKRSKGHPGIKIVAAARKIATIIWQMLTDDVAFNVEKMIDPKLNKKATCMSEASVLAKIVQEESRLEDHELEEAELEARVVTIVKPLVGKIKATKTGVAGKDKRKVS

SEQ ID NO: 439405 - protein, 354 aa, unidentified
MIAIGVDVHKQQCTVAMQQEGGELKCFGPMENTREGWRELLEQLPPEAEIALEVSTSGYFAMSVLEEAGWRERAHWVHTAGIDSLRKQKYDRLDAKRLARKLSVADRDPLPEAWFPPPAIRALRLRARQRCWLAVLRAQVKNRLQSLLQMHGLRPTVTDVFGVAGRAWLAAQALPQAPRESVEQLLRVHDFLGQEVEKAEGYLHAVDRQFPELARLRTLPGIGEILAPVIWSEMGTLERFRSADAWVNYTGLVPSLYESGEVSIRGGITHQGSAWVRWALVQAANGVIQGDNPFAHRYRCLRRRKPANVAKTAVARSLARCVYGVLKSGGDYQEARWGRRPTGSVRSLEQASLR

SEQ ID NO: 439406 - protein, 408 aa, unidentified
MTAAPGDDDRDDGAEEVIGGIDTHAETIHVAVVSVLGREIADAEFATTPAGYRAAYDFLNSHGAIERVGIEGTSSYGAGIARACAAGGLEVREVLRPDKTVRRRQGKSDPIDAYHAARAVLSGRATSPPKDEKILGLRALHLARRSAVKARTATIHQIHQVLVTAPDSIRQKYRSMTNTKLVTALSRSRTTRYDPVGAAIMRALKDLAARHEFLTSQAADLERDIRTVAESMNPGLLAAHGVGPDTAAQLLITAGANPDRLSNEASFAALCGTAPVPASSGKTRRYRLSRGGDRAANNALHRVALVRMSSDPTTRAYVQRQRARGRSSKEILRTLKRALAREMFKYLTRVVTAPATADLRPARQAKNITLTQAAAHFGVWPMHISTIERGTRRDDDLARAYRQWLQAA

SEQ ID NO: 439407 - protein, 449 aa, unidentified
MKKFSSESHGLPVIHSRAAGIDIGSRFHVVAVPADLAEAPVRTFQAFTADLERMADWLVDLGITTVAMESTGVYWIPVYEILETHGLHVVLANARDARAVPGRKTDVNDAQWIQRLHACGLLRASFHPDREIAALRSYLRLRERHLDYAAAHIQHMQKALTHMNLQLHHVVSDVTGVTGMRIIRAIVAGERNPTKLATMRDTRCKSSSEVIQSALVGNYQPEHVFALAQALAMYDAYQVQLEVCDQQIAQSLLRLSQQKSPPSDPLPKPRHRTRQPNALNFDVRSLLYQLVGVDLTQIHGIGPYLALRLVAECGTDLSRWRTAHHFTSWLTLAPGCRISGGKVLSAHTRKTKNRVTAHLRLAAVTIGRTNTALGAFYRRLSARIGKAKAVTATARKIAILFYNAMRFGMAYQDPGADHYEQKYRERVVKGLHRRAAEFGFTLQAVEGVS

SEQ ID NO: 439408 - protein, 391 aa, unidentified
MHQVQVRSEPVAAIRSDLRAIFVSLELSRSKWLVTSLSPGAGERMSRHVVDGGDLAGLLALLRRLQEKAQARTGELFPVLTMQEAGLDGFWLHWALVKEGIESHVVDPASIAMPRRRRRAKTDRLDGESMLRAFLAYKRGEPRVCSMVRVPTPEQEDERRLSRERRTLTHERIQIVNRIKGLLCSQGITGYQPLRCNRRKKLDALETGDGRAMGAHLKAQISRDLDRLELLIEQIRQVETERDALLTAAKDKACGDQPAPMAMLLELVSIGPELASVLWHEGLFRHFDNRRQLASYAGLAATPWQSGKIDQEQGISKAGNPRLRTALIQLSWLWLRNQPDSELSKWFRERATEDARRKKSFIVALARKLLVALWKYITRGVVIEGAVLKTV

SEQ ID NO: 439409 - protein, 310 aa, unidentified
MFSYPAGIDVSSGSLEIRVDQLDVAMSCSNSQSDFPGLIGWLTLHRVGRVLLEATGGYERKVMKALQAAGFEVIRINPGRAKSFARAMGQQAKTDPIDARLLAQFAAVIKSPDSRVTSAEQDDLRALVQQREHFVQQRDDDKRRLKTASSDVVKPALQSHIDYLQKVLKELESLIRQSTERLDRKKVALLCSVKGIGLVTAASLMSYLPELGEVGRHQIAALSGTAPYNDDSGKHKGKRHISGGRFAARRSLYMACWSVIRFQPEFAARYKALREKGKCAKVALIACMRVLLVRLNAMIRDGSEWKEHAA

SEQ ID NO: 439410 - protein, 391 aa, unidentified
MIYVGIDVAKDKHDCFITNSDGEVLFQVFTIQNNREGFDGLFSRIQSVSHDMSNIKVGLEATGHYSYNLLGYLMDKGLTTFVINPLHTNLYRKSLSLRKTKTDKVDARTIAMMLMSDVNLKSYSDTSYHNEELKSLTRYRFDKVQERARLKQSVSRLVTILFPELEKLVPTLHMASVYALLSELPSAGKIASCHLTHLTKLLEHASKGRYRREKAVEIREAARTSIGSNMPAKSLELKHTLRLIGELDSEISEIESEIKRIMDEIHSPILTIPGIGYRMGAMILAEIGDFSRFDSPDKILAYAGASPSTYQSGQLESSYSHMEKRGSRYLRFALINAAKYVCHWDETFGAYLQKKISEGKHYNVAITHVTKKLVRLIYAMEKSGKPYIKAE

SEQ ID NO: 439411 - protein, 344 aa, unidentified
MDHFAGLDVSVKETSICIVDDTGRIVREVKVGSEPEALLKVLGNPAYRFKRIGLEAGPLSQWLFSAVAEAGLPVVCVETRHMRAVLKAQINKTDRNDARGIAQMMRVGLYRPVHVKTLRSQKLRMLLTHRKLLQSKAIAIDNDLRGTLRNFGLKVGMVGTVRFEARIRELVEDLPDLAALIEPLLIVRRTLREQVVILHRRLLAIVRDDGVCRRLMTIPGVGPVVSLTYRATVDVPARFRKSKSVGAVFGLTCSRYQSGEVDWSGEISRCGDEMMRTMLYEAAQSMMHSKKWCWLKAWAMQIARRRGMKKAIVALARRLAVIMHRIWVDGTEFRWTREQAAAAA

SEQ ID NO: 439412 - protein, 424 aa, unidentified
MKKHSKSSQRSEPTLKRTKARGPVQRDAKEVLTEVLGKLTAKLDAPAKLDAPAVSTSAKENRRGDTIGPNRDRLTVGVDLGDRWSQYCILGLEGETLTEGQLRTTQEDVRGFFQALSVARVVIEVGTHSAWVRDVIREWGHEVLVANPRLMEGSKRRKRKSDRIDAHKLARLGRVDPQSLYPIRHRSREVRQDLVVLRARDALVSVRTELINTTRGLVKSMGTRLPRCSSPSFADKVKDAIPVEVKEALLPLVQLVETVNECITRYDQKIEELGREKYGHTTLLRQVKGVGPITSLAYVLTLEDAQRFSNSREVGPYLGLVPKQEDSGDSQPQLGISKTGDRMLRRLLVGSSQYMLGAFGPDSDLRRYGLRLCERGGKNAKKRAVVAVARKLAVLLHHLWVTGDVYEPLHHRGAETRIAQARAA

SEQ ID NO: 439413 - protein, 338 aa, unidentified
MNTVTLLGIDIGKNTFHLHGQDARGYQVLRKKLNRNQLLPYLAQISTCKIAMESCGGSQWLARKIMEQGHQVQLIAPQHVKAYVTGNKNDFIDAEAICEAASRPRTRSVQVKTVEQQVLCTEHRLRKSLVSRRTAVINQVHGFLLEFGVIFPAGYAALDRVPGLMQSRELPIRLINAIERMLEDIRQLTGEIKKLDVEIKQNLVQSDAGQRLQSIPGIGPLIASALVADVGDASVFKSSRDFAASLGLVPRQYSTGGETVLLGISKRGDKYLRSLLVQGAHTVLYRVDHRTDALGMWAKNLLARKPLNKVVCALANKMARIIWVLLTKGGTYNSQLLA

SEQ ID NO: 439414 - protein, 347 aa, unidentified
MNFYTQQHKHSCGIDLHAKAMYVGILDQHGAKLVHKNLPTTPEAFLRLIAPYREDVVVAVEGMFTWSWLADLCQQEGMAFVLGHALYMKAIHGGKAKNDTIDAHKIAVLLRGGMLPQAYVYPAEMRATRDLLRRRCHLVHKRGELLAHIHNTNSQYNLTEMGKKLTYKANRAGVADHFSDPSVRKTIEMDVSLIDHYDKLLGDVELYITRTAKLHDVQTFTRLQSVPGIGQILALVILYEIQDITRFPRVQAFVSYCRLVKCAKESNGKRVGTSGKKIGNVHLRWAFAEAAVLFIRQSQPGKEYFAKLEHKHGKAKALTVLAHKLGRAVYYMLTREQAFDLQRFVAA

SEQ ID NO: 439415 - protein, 355 aa, unidentified
MSSEKYIGLDVHQATISVAVMDSQGKTIMESILETKASTLLEFFAGLRGSLFVTFEEGTWAAWLYDLLKPHVSDVLVCNPRKIPLHKQGNKSDKIDARKLAERLRLHDLKPVYHGETGVRMLRELARSYLTVVKDLSRVMNRLKALYRSWAIPCAGRDVYYTRHRSQWLEKIPEAGTRRRAEQLYQQLDMLKHLRQQTRRELLAEGRKHAITAKLRQIPALGPIRCALAVALIQTPHRFRSKRQLWTYSGLGLETRDSGEYHYVHGQVRRRKKQATIRGLNKDYNHDLKGLFKGAATRASVQPGPFQEFYQRSLAKGIQPTMVRLTLARKLAAITLTLWKKGEDFDLNKLNSQAA

SEQ ID NO: 439416 - protein, 387 aa, unidentified
MKNAIHYVGLDVHKETIAVALCDSEGRATSLGTIPNGPDPVARLMRRLQQKATLRVCYEAGCCGYVLQRQLTAMGIDCIVVAPTLIPVKSGDRVKTDRRDALKLARYLRAGELTAVWVPDEAHEALRDLVRLREDAKADQKRARNRLGKFLLRQGWFPPEGTRVWSRAHREWLDSLWMEQSAQRIVLRDSLAQLDHQNERLAALDAAVSEQSGVLSEPMQRVVAALVCLYGVQQLTAVTVVAETGDLGRFAKAPQLFSYAGVVPREHSSGGPDKSRRGGITKTGNTHLRRVLVESAWHYRHPPKVSAQLRKRRAGKDPVVVELANKAHRRLYQTYRRLIEAGKPAPRAVVAVSRELLGFMWAISRQVQGQGTAATEAAAVGAAEARP

SEQ ID NO: 439417 - protein, 347 aa, unidentified
MLADELDYVVGVDPHRDTHALAIVQAATGAALFEVQVTASERGYAQALRLAERESPGRRAWAIEGTGSYGAGLARFLARRGERVLEVGRTRRERRSHAKTDALDALRAARSVLGKAQLASPRAAGEREALRALMVARAGALAAKKAGLCQLRALLVTCPEPLRSELRSLTRARLLRRLAAVRPDRHQDAELRGTLLALRALARRVQALTAEEHELKQEIQALVARLAPAVLDEPGVGPIAAAQVLLSWSHRGRFRSEAAFARLAGAAPIPASSGRLLRHRLDPGGDRQLNRALHTIIISRRKNHPPTSAYIERRRAEGKSVREAIRCLKRYLARHLFRLLEAAPMAA

SEQ ID NO: 439418 - protein, 416 aa, unidentified
MDTMYERCCGLDIHKKTIEACFCSGKKKTHMSFGTTSAELRKLTMWLVENDCQSVAMESTGSYWKPIFNILELSGTDMKIIVVNARHMKNVPGRKTDVNDAEWIAELLQYGLLRPSFIPDREQRELRELSRYRKSLVGERAREINRLQKMLEGGNIKLTSVVSEVTGYSSRRLLDRLLRNDEPMTEDVISGLVHTSLAGKSKELETALDGLLSELQKELLIKVLDHIDDMSKRIADLDDFCRKQMKKYEDALDKLDEIPGIARRTAETILIETGLDMSRFPTAKHFARWAGLAPGNNESAGKRSSGRTTKGNPTLKSTLIQSAKVAARKKNSFFKARYQKIAAKRGANRASVAVAHSMLIAIYHILKSGERFKDLGEDYYNQFNREKKKNYYLKKLTKLGVNLKEATLSISIQTAT

SEQ ID NO: 439419 - protein, 359 aa, unidentified
MRKRLSKKQMFFNKINLTKDDDVYVGIDAHKESYSVAIWLNDTPAIDFVMPADNTKLVKFLEKVRIGLNMVVYEAGPTGYTLARCLQKADLPIKVIAPSKTPRQSARDSKTDRIDARTLAKYAAKGLLRTIAIPTKQQEADRQLTRAREQMVSKQSRVKLQIKSFLLQYGIKQPPSLRAWSANAVRELNALKLSKQLRFCLDLLVEELQFLQNQLTIIEDQLKEIFGRQRHAQKVALLQTHPGIGPVIARQFNAEIFAPKRFKHKTELAKYVGLSPTIIQSGQSLRDGPITKTGRPELRSNLIQGAWIWIIRDPKAHKTFLRILHNTGHKNKAVTAMARRLAIHLWKMICDNKPYINAA

SEQ ID NO: 439420 - protein, 339 aa, unidentified
MNSMAVGVDIAKNVFQVHYVDQATGEVVNRPIKRAKFLEHFANRAACLIGMEACGGAHHWARELTRMGHDVRLMPAEFVKAFNIRNKNDAADARAIWLAVQQPGKPVAVKTEMQQAMLALHRMREQLVKFRTMQINGLRGLLTEYGEVMSKGRAKLDKEIPAALGRIAERLPAALIDTLREQWNGLTRLDEQVAEIERRMREWKKEDRAVKSISEIPGVGLLTATAAVAMMGDPKAFRSGREFAAWTGLVPKQTGSGGKVNLHGISRRGDTYLRTLLIHGARAVLTHAKEPGPWVAEMKKRRPTNVVVVALANKMARTIWAVLAHNRPYRKDYVSVKLA

SEQ ID NO: 439421 - protein, 377 aa, unidentified
MPTRELICDNSRGSVLEPERWIANSHGREVGMYYCGLDVSRKTTHVHLEDGQGKRVEHRVVPTTPQGLEGALDKYFARGLRVAVEAGGSTGWIHDLLRELGAQVHVVHPTKVKWIAASKKKTDRVDARLLAHLLRINGLPEAVHMPTRQSREVRRLLRARRQLVQIRTRLINVVRSVLEQQQVNLRAGALGSRKGWRALYDLPLLPGIREIVSAYDATVAATTAAITTLETQLAVRAQADKRVAQLQTIPGVGPLTAQTVVAAIDRVHRFANARKLVGYIGLAPSVRSSGERVEYGRITKQGRSDVRAVLVQAAHALLAIKRDTARPLQHWCARVARRRGKKTAIVALARKLLTIAFYLLRDGTTFDPTRVRIAAAA

SEQ ID NO: 439422 - protein, 347 aa, unidentified
MTEAYDGRQVVGIDLHRRRSVIVRMTEDGRKLGTVRITNSPAALRREIARAGEHPRVVIEAAYGWYWAVDVLEEAGAEVHLAHPLGVKAFSYRRVKNDERDAADLADLLRMGRLPEAWIAPPEIRELRELTRYRHKLVKARTSYKDQVHGVLAKLGIPVTRSDIFGPGGSIWLDGLDLPQPYAGKVASLRQLAGELSTEITLLDKVLGDLLAGHEGYAAIQQLPGIGPVLAAVIVAEIGDIRRFGGPGQLGCWAGLTPRHHESDTKVIRGHVTKQGSRVLRWAVVEAIQRQPAGSRPRQVKDAIIARRGKEARNIAKVAAARELLTLIFYAMRDGRIRRAPTPGQAA

SEQ ID NO: 439423 - protein, 350 aa, unidentified
MQKIYIGVDFHARQQTICYLTTDSGELLLHQLRHQDKAAVRAFYAQFSGQVIVGLEASGYSPWFERLLEELGCEVWLGHATEIRRRARGRHKNDRRDAELILDLMLHNEFPRLYLPPLQSREVLRMLRYRQKLIKMRTIGKNSLQALALQSGLAKGPHLFTKAGLQELRTATMSPAMQWQREQWLQLLEPLNQRLLETMCWLQQQSQADQRISRLRTHPGVGLLTALCLVHSLEPVSRFANSRKVTAYAGLDPVERSSAERQRFLGISKGGSRVLRFLLVEAAHTALRKDAELRRFYQRLAQRHGRPKAKVAVSRKLLIRTYIMLRDEIDYAEFQRRAVAARPARSAHGH

SEQ ID NO: 439424 - protein, 342 aa, unidentified
MGEISIIGLDLAKQVFQVHGARVDGSVVLRKKLTRGQLLAFFSKLPPCIVAMEACATAHYWAREIGEFGHEIRLVPPAYVKPFVKRQKNDVADAEAIAEAATRPTMRFVEPKTPEQQARAMVFRTRELFVRQRTQTINALRAHLAEHGLIAPKGLWNLSSIRQLIDQAEDTVDGLIVETARIYLEQIETFSTRILSLEAVLKKEAARSDASSRMMTMPGLGPITAMAIEAFAPTLTVFRRSRDFAAWLGLVPRQHSSGGKQILGRTSKMGQRDIRRLLIIGAMSIIRWASKKAPVPGTWLHAMLLRKPRMIVAIALANKMARSLWAMQTKREDYRDPLLTVA

SEQ ID NO: 439425 - protein, 343 aa, unidentified
MQTVTTIGLDIAKSVFQVHGVDAAGQVVIRRQLKRRQVLTFFERLSPCLVGIEACASSHHWSRQLQAIGHTVRLMPPAYVKPYVKRQKSDMADAEAICEAVARANMRFVPTKTPEQQSCLMLHRTRHLFIRQQTAVINSIRAHLAEFGIVAPVGRRGVAELLHAVADPNDRPVPEIARACLAALGAQLLRLKEQILEFDRMILVWHRSNHTSKRLHYIPGVGPMLATALVASVADPSTFRSGRNFSAWIGLVPKQHSSGGKERLGSISKQGDRYLRSLFVAGALAVIRYAKIHGTEHRPWLTALLGRRPTKVAAIALANKIARMAWAIMAKGERYKQPAALAR

SEQ ID NO: 439426 - protein, 339 aa, unidentified
MTIGLDIAKSVFQVHGVDAGGQVIVRRQLKRRYVLTFFQKLSPCLVGIEACGSAHHWSRELQALGHTVRLMPPAYVKPYVKRQKNDATDAEAICEAVTRANMRFVPTKTAEQQSGLVLHRARHLFVRQQTSVINAIRAHLAEFGIVAPVGRHGVEELLNVVTDPNDKRVPDIARACLSALGDQLQSIKQQILEFDRLIRAWHRSNEMSMRLEAAPGVGPVLATALVAAVADPKSFRSGRNFSAWIGMVPKQHSSGGKNRLGNISKQGDRYLRGLFVAGALSVIRYAKVHGTKHRPWLTALLARRPTKVAAIALANKIARMVWAMMATGERYKEPVALAR

SEQ ID NO: 439427 - protein, 428 aa, unidentified
MEEITEEPVQVVARVCAIDIGKAGLVACVRVPHASRPDRRVQEVREYATVTPALLALADWLRVERVELVAMEATSDYWKPVFYLLEAEGFTCWLLNAKHVKNVPGRPKTDRLDAAWLAKVVERGMCRPSLVHPKPIRQLRDVTRYRRSLVREQTREKQRLEKTLEDAQIKLDSVISDLHGVSGRQMLQAMIDGQRDPKVLAELARTSMRRKIPQLREALTGHFDDHHAFICATMLRRIDALGDDIAELDARIEQMIAPFAQAVAKLDEITGVGVRSAQETVAELGVDMSVFPTAAHLVSWAKFSPIDASSAGRKKGNTTGKGNPWLAGTLGEVVAGLARTNTFLGERYRRLARRRGKKRAIVAVGNSVLTIVWHLLSDPNARYQDLGPGYYESRISKQRRQRDLIRQLEQLTGQKVNLQPQPGLPAAA

SEQ ID NO: 439428 - protein, 350 aa, unidentified
MIIIGVDYHPEFQQIASVDTETGEFKERRLQNREEAEKFYRELAAGGVAARVGMEASGHARWLEHLLKELQLELWIGDAAEIQTKRVRKQKTDRQDAQLILRLLLEDRFPRIWVPSAENRDLRQLLWHRHRMVQARTRIMNQLQAVALNEGLRCKKRLWRERGRQQLESILLLPWASRRRSDLLQLLDQLNPTIAELTQAVEREAEHCVEARRLMTHPGVGALTALAFVLIIGEPERFHCGKQVASYLGLVPLEKSSGKRRRLGHITKQGNSMARFLLVEAAQATVRSDPRWRSKYFHLLMRRGRKTAKVAMARRLAVNLYWMRRKGWNYEQLISFGSHAGQPGNPHGVR

SEQ ID NO: 439429 - protein, 373 aa, unidentified
MKDTIKYVGLDVSKEKIAVAIADEGRDEPRYWGMIPNTPESIRKLVNKLGEKENLRVCYEAGPTGYGLFRLFLSLGIECEVIAPSLIPKKPGERIKTDRRDSIKLAKLFRSGELTSVYVPTEDDEALRDLVRAREDAKEDELRAKHRLTKFLLRHDIRPQKGVKKWTTRYCEWLNTLKFERSASRIVYEEYMHQLTEIQQRLNRLEEEIERQAIIGVHAPMIQALQTLRGVAVVTAASLVAEVGSFQRFSSPKQFMAYVGLIPSESSSGELRRQGKITKTGNRHVRRLLIESAWSYRYPPAVKGKLKKRQEGQPPELLQISWKAQTRLNKRYFRLLSRGKVAGKAITAVARELSGFIWAITQEVEKKQKKNIS

SEQ ID NO: 439430 - protein, 417 aa, unidentified
MSQSFLFFVGIDWATEDHSVCVVDREGNKVAECRALHSGTGLQQLIDWLRKQTGVAPDQVAFGIETPAGAVVDTLLEHSYPGFHINPKQLDRFRDRHTVAGAKDDSLDAYVIADSLRTDRPCFHPIQVDDPQIHRLRTLSRLEDDLGQDWSRLTNQLRQQLHRYFPQMLELSPAADEPWLWELLQTAPLPAMACKLRRSQLQKVLTRYRIRRLNAQQVRERLQTAPLPVAPGIAEAASEACLLLILRLRLLAQQKNHVAQCMKAILVDLAEDDNRKQHRDVQVLSSLPGVGRIIAATMLVEAAQPLANRDYHALRAYGGVAPVTRQSGKRRQVIMRYACNQRFRNALYHWARVSLQNDDRTRAHYHCLRKKGHSHGRALRGVADRLLAMLVSMLRSGSSYDPRRRSSARFAAELSAS

SEQ ID NO: 439431 - protein, 361 aa, unidentified
MRVVFGIAVSKVSSEVAILVNGEKVHGYTIPNDAIGFTRLLGDLKTVHKPEIIFEATGVYSRRLQAFLEDNGYAYTRLNPLEAKKQLDSLRVRKTDQIDAEKLAQSQFVLNRKPTYVQEEVYQELRDLSRFYQNLTEDIVRAKNRLHKVLQVTFSELETILSTPTGEQYWNLVIAFPCKDFVFDLSKNELSKSIRQSTSKRISDKRVAYLAEKLTVLANQSYCAVKKTSPILEEVHYYAKELLRLSEQRQAVLDQMVELAQPLPEYDILLSIPGIAETTATSIIGELGDIRRFQSANQINAFIGIDLRHYESGNFLAKEHITKRGNPYARKILFKCIHNIASASHTNPCHIIVTPYQKIST

SEQ ID NO: 439432 - protein, 341 aa, unidentified
MGEVSTIGLDLAKTVFQAHGADASGGVVFRKKLRRDQLLAFFASQPKCLVAMEACASAHYWAREIAALGHETRLIPPAYVKPFVKRQKNDMADAEAICEAAQRPTMRFVAPKSAEAQGAAVIFRTRDLLVRQRTQLINALRGHLAEFGFIVRQGPGHVSKLVDLVADPASELPAEARPVLAVIADSLQAIQARVSLLDREIAARAKADPVVKRLMTIPGVGPIVATALVALAPAASTFRRGRDFAAWLGLTPKQHSSGGKERLGRTSKMGERSLRRLLILGASSAAKVAARDGSRASPWLAGMLARKPRMLVTVALANKMARIVWALMAHGGTYRAPAAAV

SEQ ID NO: 439433 - protein, 354 aa, unidentified
MIIIGADYHPGFQQIAFVDTDTGEFQERRLQHPEEAEKFYRDLAAQGMRVRVGMEASGHARWFERLLSELHFELWMGDAAEIRTKRVRKQKTDRQDAQLILRLLLEDRFRQIWVPSWENRDLRQLLWHRHRMVQARTRIMNQLQAVALNEGLRCKKGLWREAGRKQLESFPLAPWASRRRRDLLELLDRLNPTIAELTQAIEQEVEKCAEAQRLMTHPGVGPLTALAFVLIIGRTERFQCGKQIASYLGLVPLEESSGERRRLGHITKQGNSLLRFLLVEAAQVTVRSDPEWRSKYFHLAMRRGRKIAKVAMARRLAVRLYWMWRKRWDYEQLKKFGSHAGQPGHRHGVQSITE

SEQ ID NO: 439434 - protein, 422 aa, unidentified
MLEETQDTEEFIERVAALDIGKKELVCCVRVPGQGKRGRRLQEVRTYQTMTRSLLVLADRLGELGVTRVVMEATSDYWKGPFYLLEAQGFEVWLVNAKDVKHLPGRPKTDRLDAVWLCKVAERQMLRPSFVPPPVIRRLRDVARYRADLVAVRTAEKQRVEQLLEDAQIKLSVAASDIFGVSGRAMLAALLAGERDPKVLAELARGRMRAKRSVLEEAFTGHFTDHHGFLLARMLARVDALDADIAELDGKLEELIAPFTAAADRLDEITGVGRTAACAIIAEIGTDMGRFPTPGHLASWARFAPAVKQSAGKTKGKNATGHGNPYLARVLGEAAAAAGRTDTFLGERYRRIARRRGAKRAIVAVGRSILVIIWHLLADPDARFHDLGPGFYDTRINPERAKRNHVRQLEALGYKVTLQPAA

SEQ ID NO: 439435 - protein, 367 aa, unidentified
MKKISTVAAKATKNFSQPKLTMGLDLGDRSSWYCLLDEVGEVRQEQKLSTTPKAMRGVFGVMPRSRIALETGTHSPWISRLLSELGHEVIVAHARKVRLIGESRKKDDRLDAQTLARLARIDPQLLCPVKHRSAQAQADLTVIRARAGLVRARTALVNTARSLAKSYGQRLRGCNVRNMNPEKAKGLSPELQRALEPLLACIESVSEQIREYNERIEKLAQDSYPQVVLLKQIKGVGTLIALTFLLTLEDPHRFRKSRDVGCYLGLQPGRRNSGQSEPQMHISKEGDPYLRTLLVQGAQHILGPFGVDCDLRRWGLKLAERGGKSGKKRAIIATARKLAVLLHHLWVSGEVYEPLHNSRRTAIAAAA

SEQ ID NO: 439436 - protein, 345 aa, unidentified
MTKILKQVVGIDVAENELVVSLGRLNGTLHKEVYAFKQFANKLSGFKALEAWVNKHTDKQVDVRYVMEATGVYHEKLAYYLSDQKREVCVVLPNKISNYMRSLDLKTVTDKTASQAICQFGIERKYELWQQPKKIYRDLKQLTRERDQIIAERTVSKNQLHAEQAEAFPNEKSISRLKERISLCNSQEKEIRLDIAAIIKTDKELAARIDNVATAPGVGRLTVVITIAETNGFDLVKNKKQITGYSGLDVEEKESGTSVKKKPKISKKGNRHVRKAMHMPALTAIRVDDRFKAIYVRLVSKHGIKMKAAVAVQRRLLELIYTLWVTNKPYNKNHTHQSVENTQAV

SEQ ID NO: 439437 - protein, 402 aa, unidentified
MNAVGIDVSKGKSMVAIMRPFGEIVSAPFEIKHTASDINSLVELINSVEGESRIVMEHTGRYYEVLAHQLSEANLFVSAINPKLIKDFDNDSLRKVKSDKADAVKIARYALDKWQNLKQYSVMDELRNQLKTMNRQFSFYMKHKTAMKNNLIGILDQTYPGVNTYFDSPARSDGSQKWVDFASTYWHVDCVRKMSLNAFIDHYQNWCKRKKYNFSQSKAEEIYGKAKELVPVLPKDNITKLIIKQAVNQLNIASATVESLRTLMNETASQLPEYPVVMAMKGVGTSLGPQLMAEIGDVSRFTHKGAITAFAGVDPGVNESGSYEQKNVPTSKRGSSNLRKTLFQVMDALIKTHPQDDPVYQFIDKKRAQGKPYYVYMTAGANKFLRIYYGRVKEYLSSLSES

SEQ ID NO: 439438 - protein, 372 aa, unidentified
MGHHTEVFVGIDTSKSRNAIAIADGGRGGEVRYLGEFPATEAAIRKLVAKLAAKCCHLTFCYEAGPTGYGLYRLLKSLGHDCLVVAPSLVPKKAGDRVKTNRRDAVSLAKLLRADELTAVWVPDERHEAMRDLSRARQAVKKDLQGKRQQISSLMLRLGRIYPGKTTWGPTHMRWLMSQKLEHREQRIAFEELLEGIRQESERMERLEDAIREVVPEWSLAEVVVALQAVRGIDLIAAVGVLAEIGDLSRFQNPRELMGYLGLVPTEHSTGDQVKRGGITKAGNGRARRILVEAAWSYRYPPRVSRDKQPKVEAAPRGAREIAWKAQTRLCGRFRSLERKGKRRTVIVTAIARELSAFIWAINRELMPPRQA

SEQ ID NO: 439439 - protein, 376 aa, unidentified
MPSLALAPTLTAVAVGPTAGVTVGIDPHRQTLTATALDPRGGQLGHDHFPNTGAGHQAVLEWARALGPVRRVGIEGASGLGRPLAEFLIDHAVDVREVPPHKTSARARGRHEGKSDVLDSSRIAAETQTNDRLAHAFKQFDIAAPDQVRDQIALWHNTRTSLTKIRVQLIGELDALIQDLPEDLRSQLPVTTTVRARINALSRLDIPSVSDPILALRLQLIHARTVMLREVMAQDKNAEAELATLVEQAGTTLTGVVGIAARAAALILLETGDARRFSEAGFARFTGTAPIPATSGEGRGEPVRHRLSRGGNRRLNAALHRIAMIQLRCEPRARALYDNARQRGHTRREAMRILKRHLSNVIYRTMIRDNTRRALT

SEQ ID NO: 439440 - protein, 479 aa, unidentified
MIRSVGIDLSRTGNHQVCCLDEQARPCDSFSFDSTLEGLEKFEKRVFLEGATPTIVFEPTGLAWIPMAAYLRARHPDCQLVKARLQKVAALRRYLHSRAKSDRVDGVTLAKMPFIDAEQLDEAYLPPAEYHALQRLTRQRERLMKSITIRKNRIGSIINGYLPGLRKAFTDEWSDRARLFYRQLLNPFTVVRDGKDAFKTLFVSAKTKGAVTESHRVYQLCQKLVEFYEKSRAAGMINEDFFDNLQDEISCELRLMETEEAEVERVSGRIEELYRHLHPSDHLRTIPGIGVRTAQVFLAVIGDPNRFRNQSAFANWTGVVPGARQSADSEGKGLRMTKAGPAMMKRALYQAGDIARRYDPQLADLYYREMVQHGKTHLQAMGAVMSHLAARILAVLQEDRPYELRDNQDRPISKMEAIGLIQQFKVPEETRQARRRRKPNEGRLSGRRTREAAKAPQSAPLIPPPKIEYCAEELQSTAN

SEQ ID NO: 439441 - protein, 408 aa, unidentified
MNPLFVGIDVSSKNNVAYLMKPDGSKHSSFSVQNNLGGAKLLSERIVSALGSMQLERVVIGLEATSIYGDSLVYALREDGRLGRFQRKIHVLNPKQVRKFKEAYSDLPKNDWVDAFVIADHLRFGRINREVYMDDYRYKALQTLTRARFDVIQNLTREKQRFANYLFLKCSGMAQDKDIQNTSATTIALMEHFETVDDLANADLEELTAFITETGRGKFADPDATAKAVRAAAKGSYRLPKTVNDTVNQAMAVSIASMRALKGQVKVLDKAIEQQFEIIPNTLTSIPGIGKVYSAGIIVEIGDIHRFDSQASVAKYAGLVWNRSQSGDFEAEHSRMIKSGNRYLRYYLLEAANSVRRCDSEFRRYYDLKFKEVNKYQHKRALALTARKLVRLVFRLLKDNRLYIPPEG

SEQ ID NO: 439442 - protein, 348 aa, unidentified
MDTIGLDLHKRESQLCIGQDDGQISELRIVTSRERFTAVLGTRPRAKILLEASTESEWVARHLESLGHEVIVADPNFAPMYATRSRRTKTDRRDARTLMEACRLGAYRVAHRVSSGRRHVRAELAVREALVRTRTRYIAVAKTLVRRDGLRVAASESHLVARRIAALELSDTLSGELLPLFEILAPINEQIAAADRRIAALVAADPAMTLLATAPSIGPITASAIVATVDDVTRFASAHQFEAFLGLVPGERSSGEKRRIGRITKAGNSRVRYLLVEAGWRILRTKSAETAALRAWGLTIAARRGKRIAVVALARRLAGILYAMWRDGTPYQPTRLRTSAPASEQLMA

SEQ ID NO: 439443 - protein, 338 aa, unidentified
MKLYGGIDLHSNNSVIALLDEEDRVVYRRRLPNVLEVVLSELEPYGDAIAGLVVESTYNWYWLVDGLMAGGYQVHLANTAAIVQYAGLKYTDDDTDACWLAKLLRLGLLAEGYIYPKEERPVRDLLRKRGQLVHQHTSNLLSIQSLLARNRGGSPGSNQIKRLTDDEVDRLLPDRELALAVKSSLAVMGTLADVIGRLEKAAKARIRLRPEFKPLLTVSGIGEILGLTIMLETGEIARFAKVGNYASYCRCVGSERISNGKRKGRGNRKNGNKYLAWAYIEAANFAVRFNPAIKRYYQRKCARTNRIVAIKTVAHKLARACFYILRDQVAFDVNKAFA

SEQ ID NO: 439444 - protein, 354 aa, unidentified
MKKIFIGIDFSKEKFDATLIKAEGLKECAPSVHEVFDNKTSGYRRLVKWVKAHTEGFAADAWLFCGENTGGYSIGLSNYLYASGYDMWLECAYKIKHSAGIQRVKNDKADSRAIAEYAMRNYDKMTLHKPQSASLTCLREVFLYRHSLVRQKVALTVRRDEKRLTQEKSDARAFMSFTSKHLITEVNKAIAKCDEKIKEIIASDDELRKVFDIITSMPGIGIQNATCLMVYTDNFQKFDLDSRKIACYYGIAPFGRQSGTSVNSRPQVSPFANRMIKSLLSQAALAAIKFDMNVHNYYQRLIERGKHPLLVHNNIKNKMLHILVAMVRDRVKYNPDNVYRKSNEVSLAPQVLNI

SEQ ID NO: 439445 - protein, 355 aa, unidentified
MNAVGIDVSKGKSTVAVLRPFGEVVASPFDVIHNDSDLKQLVDLIKTLPGESKVVMECTGTYFEPIAQFLHNNGIFVSVVNALLVHDYGGNSLRKVKTDKKDALKLASYTLDRWTELEEYVPADEQRKTLKILNRQYNQSNKIQTMMKNNLISLTDSVFPGINKLFTSPERQSDGHEKWVDFLNAFPHKDCIAGLYLSVFKTKYKSWCKKNKYNYSDSKAEEIHTFAKSIIAVLPLNYSVKLLVTQAVMQLNTILETVSSIRKEMDRIASSLPEYKTVMAMYGVGKVYGPQLMAEIGDTRRFRNRRAITAFAGLDAPPYQSGQLDITSRHISKRGSAALRKVLFQITQVFNFEQA

SEQ ID NO: 439446 - protein, 289 aa, unidentified
MEHSAGIDVSLESASICVVDGSGRLMCEAKVASEPEVLIGWFGGLGIAAARIGLEAGPLSQWLYAGMRAVGLPVELAETRHVRAAFKTMPVKTDRKDARGIAQLMRLGRFRPVHCKSLPAQEVRALLTARKLLQSKNHDVEMSLRGVLRGFGLKVGPTTPRTFPNRIRELVAGHATLLMISEALLAARGALFEQWQKLEKRLRSLAREDNRVRLLMTAPGVGPIVGLTYASAIDDPGRFRSSKAVGAYFGLTPKKYQSGETNVTGRISKIGDGGVRTALYEAANVILTR

SEQ ID NO: 439447 - protein, 440 aa, unidentified
MAKAVQQFTLGIDVSKHELIIHGWESGEYTTLSNEPDAIRSWLSSLVGPVRLAVEPTSTYHVEIVDQAHAHGHAVYLVNPRQLAHYRESVNLRHKSDPDDAWLLARFLDKEAEELRRFAPQSRQAQALWTLLKRRAVVVRARTQLQQSLRELQLAHQGVMTQFKRLIARIDQRIKALISKLGWQDDYRRCLSVPGLGPVNAAALVCAFNRGSFAGSDAFVAYLGLDVRRRESGLFKGKRKLSKRGEPELRRLLYCAAKPARCHPHFNHYHRAQINKGYSKIAANVILARNRKRNRRNHNFGTLVGCHGIDGVAAGVVLVIGHQQLVARLQLETAKNRVDAGGSVDHECKIISLGSKEASEVCAGCVELPQIVVIEEDQRFALDLQSNARLLVEDLLRCRTKGPVIEENDLGVEQPTIGEIVFCHHPPDVLGHHTRQCGLE

SEQ ID NO: 439448 - protein, 364 aa, unidentified
MDPAHPAGTHFGRGLQRGRIIMQVVRIGLDLAKYVFEVHGVDGQGNVVIRKTLRRGSVSTFFADLPPCLVGMEASIGAHYWARVLTGLGHKVSLISPQFVAPYVKTNKNDRNDAEAICEAVGRPTMRFVPPKSPEQLAVQALHRIRQRLVRSRTKLVNQIRGILAEHGIVIARDIWRLRRALAEITGNSTDSLNMLVRVLIIEGKAELLDLDRRIASCDRRIRELYRTSELCQRLGEIEGIGPVTATALVAAVGDRSCFKNGRQFAAWLGLVPKQRSSGGRNRLFGISKRGDRYLRTLMTPGVRADLGKARGKQDPRSRWLASLRQRRHANVAAVALANKNARIVWAMLAGNVSYEPARSVQAA

SEQ ID NO: 439449 - protein, 418 aa, unidentified
MLWTGGEEIVSIIAVINRTMDLPMRKPRPRNRSQRKPNDLSRSLAVLDMDRTLIAVIEMSASTWLVAGIVPGVERQPLKKLEPDEHALLALLQRWRGEAERSGRTITSIAVAYEAGRDGFWLARWLLSRGIEAHVIHASSVAVSREHRRAKTDRLDTQMLKRAFLGWLRGERDHCKMAAIPTLAQEEARRPGRERESLAGEASRIVNRLKSALARLGVRKFNPKLKKASERLNDLRTPEGEPIPPNTLDEMKRDMERRQLICAQIRKIEQERLKHLARAPDTGPHAMVRLLARVIGVGIETADTLVQEALSRHLRDRRAVARYGGLTGAPDSSGSINREKGLSRSGNARVRRCMIQLAWRFLRFQKDSALAQWFFHRTGNARGMRKTMIVALARKLLIALWRLVHEGVIPEGIVMRPA

SEQ ID NO: 439450 - protein, 325 aa, unidentified
MTTSSPSSVSLFVGIDVALDKLDLARSDSDKLLTVANDPDGIAQIVGMLQSASPTTIVVEATGGLERRLLETLIDASLPVALVNPAHVRHLAKGLGILAKTDAIDARVLAEFARLASPRLAQKRSANQSELDALVTCRRQLILIRTEQTNRRRTTFSKSAIKSIDAVLKTLARQIQSLDKQIRKLIESDDDLDHLDKILRTAPGVGPVLSSTLVVDLPELGKVDRREINALVGVAPFNHDSGRLKGKRAIRGGRASIRSVLYMATVTAIRSNPIIRSFWAKLLKAGKLKMVALVACMRKLLGLLHAMIRDNLTWHELSVVKALDL

SEQ ID NO: 439451 - protein, 347 aa, unidentified
MAFIGVDLHSNSFTICRLETDAEEEFETFQLSMDDVKRFCLSLDAEDSLAVEATSNSAWFCDQVRSCVGRLVVVNARRFELIRKSVNKTDRNDARALAYFLSKDMLPETRLRTHAETELGSLVQTRDVLVKQRTMLLNKIHAIFTRHGIKLKKESLSSKRSLTELGISRFTPVEQIELGVLRDQTLSLTDTLKRLDKAIEKTAEQIDGYEEISSIKGIGARSAAILLAGIGNVEDFASADKLAAYFGIVPRVSQSNETDNRGRITKRGDKLVRTTLVQCTLIAIKYSGYLNAFYQRIKARRGAGKAIIATARKFLSIIYDTLKNGWIFEDFTKFKIKENQCPAGHPS

SEQ ID NO: 439452 - protein, 425 aa, unidentified
MSPKKSEVDDLMVLYPCCAGLDVHKKTVVACIITTGERGKVNRQVRTFATTTVHLLELADWLAEHEVSHVAMESTGVYWRPIFNILEATFEVILVNAQHMKAIPGRKTDILDSQWIATLLRHGLLKASFIPPRPIRDLRDLVRYRKSLVYARNQEVNRLHKLLETANIKLGSVASDILGKSGRDMLASLREGVTDHTMLAELARGKLRGKLPDLREALEGRVQAHHRLLLGHLLDHIEFLEQRVQTLERELEPYLNPYQAEIALLVSIPGISDTTAATILGEIGADMSAFPSAKHLASWAGVAPGNRQSGGKRLKAHTTKGNARLRAALAEVVWVISRTKDNYLSAQYHRLARRIGKAKAIVAVSHSLLVIIYHLLRDKKEYSDLGSRYFETLDQDRVRTRAVRQLQALGYTVTLQTSAPKEESA

SEQ ID NO: 439453 - protein, 292 aa, unidentified
MRPGGEAFVVTRDGKGLEELVGRLQELGPTLVAVEATGGFETIVAAAVAGAALPLAVVNPAQIRHFAQAVGKRAKTDPIDAGVIAHFVEAVRPVPRALPDEASRLLAELVGRRRQIIEMMVAERQREKRAANVRVRKSLARHIAMLERELAAIDQDINTLVRGSPVWRVKEDLLASVPSIGKTLARTLLAELPELGSLDRRNIASLAGLAPYARQSGRWRGRSMIGGGRAAVRSATFMAALVASRCNPPLKDFYQRLVSVGKPKMVALIAVARKLLTILNAILRDNRPWQSA

SEQ ID NO: 439454 - protein, 396 aa, unidentified
MKVVYQTCCGVDVHKSFLVATIIKTISGVEPSYQKKRFSTFNNSILQFKNWLIENQCRDVCMESTGKYWVPVFNLLEDDINVTIANPKWVKAVKGNKDDTKDSKWIGDLFRLGLVPGSYIPCKPIRILREFTRYRYKLTSCRTSEKNRYQNALTVCNVALDSVVSDIFGKSATSVIDYLIERSDNSINHEEIASRLLRSLKKKSDSVIESIEGYQMTDSQKYRMRLVRAHLDYITSTINDIDTMLDSLIAPYENAVQLLCTIPGVDRNSAITVISEIGTDMTPFSNSKRLCCWAGLTPGNNESAGKKKSVRITRAGVYLKPALVQVAHAAVKSDKSPYYKQKYERIMKRRGKKRAIIAIARMILTAIYQMLSTGEAWNPTDLYTVSYTHLTLPTIA

SEQ ID NO: 439455 - protein, 402 aa, unidentified
MNCVGIDVSKGKSMIAVMRPFGEVVVSPFEVRHTANELSELAGLLKSLDGETRVVMESTGNYHAPVAWLLHDAGLYVSVVNAMLVHDYGNNSLRRAKTDKKDAVKLANYGLDHWLTLPRYIPEEDTRLMLKICYRQYQQYSKVQTMLKNNLISLLDTTFPDANRLFTSPPRADGSEKWVDFVATFWHCECVCGRSEKAFTTQYQKWCRKHGYNFSEDKALDIYASACGHFGVMPKTDTAKLLVEQAISQLQTTSSALAALKQEMQSLAASLPEYPVVMGMFGVGPTLGPQLLAEIGDVRRFHSKKALVAFAGIDAPPYQSGQIDVRSRSISKRGSASLRRTLFLVMSVILQCAPIDEPVYQFMDKKRSEGKPYRVYMMASANKFLRIYYASVKAYLESLEHD

SEQ ID NO: 439456 - protein, 385 aa, unidentified
MTIQHIACKFIRRDYDVFAGLDVDKKSMSVVFADHQGAMRALRMAYRAEPLVNYVRKHFAGQRVAFAYEAGPTGFGLHDELVRQAYTCVVAAPSKVPRAPGERVKTNRLDSRKLAESLRGGQLQGIHVPPAIYRDLRHLVQLRDTHVRQLTASKLRIKSLLLYEGIPFPDPQEKWTVRAMRELQRLPCSETVRFKLDDLLETLHFHFQAAARATKQIRQHCLHDPELQQSIELLLSLPGIGWIVASHLVARLGDPQQIKNGKQIAGFLGIVSSEHSTGEKENRGEITRAGDSRLRNKLIQSAWTAIRKDPELCAFYRRIYQRHPQKVAARKAIVAVARKLTQRIYVVLKEQRPYVVRPDSSIAPLTAEETVGPRDRLDTAQNDQP

SEQ ID NO: 439457 - protein, 316 aa, unidentified
MVGIDVASTHVDVAAIGAMLPAALAQVSNDADGHTALADGLARLKAELVLMEATGGYEAALACALQAAGLRVAVVNPRMARDFARAMQRLAKTDRIDAATLAEFAGVLARRPDCERFIRPLSEPEQQDLAALVTRRRQLVTMQLSERQRLRLARPVTRPSIEALLDAIARQLDDVEAEMAHHVAQHHAQMAKLLQSVAGIGRVAAATLIAELPELGRLNRRQICALVGVAPYAKDSGASRGRRRIAGGRFEVRRALYMATLTATRHNADIRAFYERLVAAGKLKKVALIASMRKLITHLNAIARDHLNAQTRPANA

SEQ ID NO: 439458 - protein, 412 aa, unidentified
METLVERGCGLDVHQATVVACLLIVRKDGKVEKQVRTFGTATRELLRMREWLLSQGCTHVAMESTGVYWKPVYAILEGAFQIVVANAQHVKKVPGRKTDVKDAEWIADLLCHGLLRSSFVPPKPIRELRDLTRYRRKLVESQVAERNRLLKVLETANIKLASVATDVFGTSGRLMLRALIEGKATPQEMAELAKRKLRSKIPQLQLALEGRLEDHHRFLLKLQLDRLERVEGDLAVLEQHIQEKLAPYAAQLALLDEIPGVDWTLAVVIIAELGVDMSVFQSVSQLASWAGVCPGNNESAGKRKSSRIPKGNVYLKTALVEAAQSAAKTKGTYLRDKFYRLKARRGYKRAAVAIGHKILVSIYHMVSQNVSYNDLGDLYLDKLNKNHLTRNLVHRLERLGYSVTLEPQQKAA

SEQ ID NO: 439459 - protein, 355 aa, unidentified
MNTIKYIGMDVHLATISIAVLDANGKLIMEVTIATQAGALLDFIRGLSGTLQVTFEEGTSAHWLYTLLEPHVAKVVVCDPRQNPRRLGEKKSDRLDARKLAEWLRLGTLKPVYHGNALGPALKELARSYRTLVSDTTRVMSRLKALYRARGIRCAGTRVYSPRFRDQWLEQLREPGARGRADLLYKQLDLLLPLRQEARAAMLTESRKHPAHKILCSIPSLGPVRVALLLALLQTPYRFRGKRQLWTYAGLALVTRTSADYQMVDGQVTRSRKPALVLGLNANHNHTLKGLFKDAAASALAHPGPFKDFYATRVAQGMKPELARLTLARKIAAIALTLWKKGEGFNAEHVKAQAA

SEQ ID NO: 439460 - protein, 319 aa, unidentified
MFNLGIDVAKAKLDCALRLPNGKHRNKVVENNRQGFTALHAWLLKHAAGSPRVCMEATGTYWEGVAEYLAGLGMVVSVINPAQIKAFSASRLVRTKTDKVDAQLIADFAHERQPEPWQAPSPAEQSLRALVLRLDALQAMRQQESNRLEVARAAVRQGIEDHIAWLDAEIKALILAIRRHIDDDPDLRGKRELLDSIPGLGERTIPVLLSYYANPERFDSAKQAVAFAGLDPRQHESGSSVRGKPRMSKVGHSFLRKALYMPAMVAVHKTPWGKRFGQRLRDAGKAPKLIIGAMMRKLVHVAFGVLRSGKIFDPALHAA

SEQ ID NO: 439461 - protein, 411 aa, unidentified
MEVVYRRCSGLDVHKKSVVACVLIWEGGVVKKEVRSFGTMTEDLLLLHDWLSAHGVSHVAMESTGAYWKPVFNVLEGSFTVLLVNATHIKAVPGRKTDVKDCEWIAELLCHGLLKGSFIPPEPIRDLRDLTRYRKSLMDERVREVNRLHKLLESANVKLASVATDVMGVSGRAMLEALLLGSTDPEVLAELARGKLRKKLPLLRRAFHGRFRAHHRFMLEQILSHMDFLDEAIEQISQEVKSRLSPFCEPIELLKTIPGVNQRVAEVIVAEIGVDMSRFATHRHLASWAGLCPGNHESAGKRKSGKTRKGNRWLSRALVEASWAGSRAKGTYLKSQYHRLLPRKGKKKTAVAVAHTILVIVYHMLVKKVPYRELGQDYLDRLNRTAITRHHVKRLQSLGYNVTLQQTAAAA

SEQ ID NO: 439462 - protein, 412 aa, unidentified
MGTTIAGIDVHKKVLMVVVMKVASGQAEAMWQRRRFGAMGSDVRQLRLWLVEQGVEEAVMESTAQYWKPVWYELEPHLHLHLAQAFSNRAPRGRKRDFKDAERLVRRHLAKELILSFVPQPEQRAWRTMSRMKTQLAQDRARLHNQMESLLEEMQIKLSSVLSDLLGASGQRILRALAEGETDAEKLASLGSQQLRSTRQQRIDALSAMPSAMHRRLLGLYLQRLQQIDAQIEELTQMIATTMKPHEDTVMRLAEVPGFGADSAQQVIAEVGPEAGAFDSAAQFTSWAGTCPGKEESAEQNKSSRSAKGNKYLRRVLTEVAQAAVKTKGCHYQIVFRRLLPRLGYKQALWAVVHRLCRLVWKILHDHVSYIEQAPFRDPGALKQRARTLARALRRLGYDVKLQPTQTNILNA

SEQ ID NO: 439463 - protein, 441 aa, unidentified
MEKSNEEKITQFPTVNQNAAGIDIGAEKIFVSVDGITVENFRTFTSDYQKCIDYLKESRIQQVAMEATGVYWIAFHEMLEEAGIEVCLVNPKETGQVKGRKSDVRDCQWIQKLFSAGLIRQSYVPKGKLKELRLMVRERLDMIEMGSTYVNKMQRALELMNIKLTSVISQIQGSSGLRMIKAILNGERDTNKLLALCDVRIIKSKSEDILKALEGNYNTTYLYMLRSSLQMWELHEEALMNIDKKIEELLEDLNQDRSHIDDSNPEKSIRHHKPHIKNLHQKMLDMYGINVSSLSGLNDYSLLRLVGETGAELSRFPTVKHFVSWCQLSPRHKQSGKFKKSLRVKTRSQAGQIFLESATSLLNSKHIAIGAFMRRIRAKKGSCIAIKAGARKLAEAYYNLITKGQQYVEQGIVNYQNKLKEREQKLLIKLAVKHNLALIPI

SEQ ID NO: 439464 - protein, 369 aa, unidentified
MSKPITSFVGLDVHYDSIALGVAPTGREPPHFVGTVAPQWAPLCKALSRLGKRESLQIVYEAGPCGYTLARQLRAHGYACEVIAPAKIARRPGDRIKTDRRDALLLARAARAGELVSVTIPDERDEALRDLSRAREDAVRARLKARQQLKALLLRQGRRYSGRSSWTAAHERYLAAVCFQQPAQDIAFGEYRSAVRDAQERVERLTEAVRSHLAHWRMRPVVEALMSLRGIDLIAAVTLVAEIGDFARFARPCELMGFLGLVPSEYSSGSARRQGAITKTGNSHARRVLIEAAWNYRFPARISAALQKRQQDQPKTVRAIAWRAQLRLAKRYRHLAARKLALNKICVAIARELSGFVWDIARQVKPLAT

SEQ ID NO: 439465 - protein, 355 aa, unidentified
MSIVGAFDVHRRQLTFDYLDIETGEVRRGRIVPADREHLRAWLARFAGRDDVRFAVEGCTGWRYVVEELLAAGIEPHLAEPADTAALRGKKRHAKTDKADAAHLRARLLAADLPECWIPPAHVLEARAVVRLYKDLLDERGGWHQRIAATMFHQGVPAGSSMDTAAGRAAAAEAQLSPAGRQAVEAGLRQIDRLTGELDPLRRQLDLISRRQPGCAALRAAHFGIGAVTAVAIWAELGDVRRFGNSDDVVRHTGLDITVYSSDGKRPAGHLSRQGPALLRWALYEAAGPPCRSPASSPAAATTPCANSARTRWPPPRNTPVTPPGRGARHADEPAAGSRHLPACPGLRPWAASKE

SEQ ID NO: 439466 - protein, 387 aa, unidentified
MKYNTQNAKIKSITEKTLIVGIDVGSETHFARAFDWRNYEYSKKPLEFSNTESGFATFKAWMEDIAEKYGKDVVIPGMEPTGHYWFNLGAYLQDNGMKPVHVNPHHVKKSKELDDNNPNKNDRKDPKTIAALVNEGRFSYPYIPTGIYAEIRSLSNLRLQTQEEITRIKNRIARWFSIYFPEIKDVYKKPDSVSGLMVLKVAPLPQDIVKLGVDGINQIWRDAKLRAAGAKRAKTLITAAEHSIGSQEAPDSARIELKNLLNDYEVYCKREEELMGMIEEKLSGIPYIDKLLEIKGIGIKTVSGFLAEVGDITRFDDPKQLQKLAGYAIVECSSGKHKGESHISYRGRKRLRYVLYEAAISLIARNEEFKKIHRYYRTRKENPLKKM

SEQ ID NO: 439467 - protein, 353 aa, unidentified
MGMDIAVLGVDLGKNVCSVVGLDASGAVVMRRKVRRETLIRLAEKLPPCVVGMEACCGAHHLGRLFAAHGHDVRLMSPEYVRPYVKAQKNDDRDAEGIAEAATRPTMRFVELKSQDQLDMQTLHRSRDRLVGERTALINQLRAILLERGMIAPQGKRKLEQFLSVLMDEQDGAGLSPRMVILVADVRAQWAELDRRIAAFDGEFVRWARENEDARRLVTIPGFGAIIASALVASVGRAEAFDRARDLSAWLGIVPQQFTTGGKPKLLGISKRGNKYLRRQLIHGARAALPYVAERDTPLGRWAKALLERAHRNVAVVAFANKLARIAWAVLRRGERFIATGMPGRRKEFGGPA

SEQ ID NO: 439468 - protein, 313 aa, unidentified
MNQKEQERFVGIDISKQELVVAVRPSAELQTFSNTEEGLAALVRFLQALSASSIVLEATGGFARAAVNTLALAALPVVVVNPRQIRDFARSVGLLAKTDAIDAQIIARFAEAVRPEFRPLKDLETQKLEDLNNRRRQIVEMISAEKNRLGMAPPWSQKDIRAHIAWLEKRLNKVNDNIDGLIKQSPIWSQKEKILTSVLGVGPVVSTTLLCGLPELGSLSARKLSALVGVAPFNRDSGQYRGRRSCWGGRAHVRAALYMAALTASRCNPVIRAFYLRLRNAGKPAKVALVACMRKILVILNAMLKNNTCWQQA

SEQ ID NO: 439469 - protein, 364 aa, unidentified
MYDSTTTVAVGLDVHARSVRLAAVRADELLEERTLPYDEEAVECALRRWPLVRCCYEAGPTGFGLQRHLVSRGIDCQVVAPGLVPQRPGDRVKTDSRDARKLARLLAGGLLQPIHVPSRELEAARDLVRAREDARLDRMRDRHRLSKFCLRHGRRLPGLSWSVVRRKWLSEQQFEFVAQQLTFDTYVHAVDLVDARIEALERAIRETAEQEPWRQLVARLRCLRGIDTLTALALVTEIGEFSRFQTAEEFMAFVGLVPSERSSGERRRQGSITKVGNAHVRRLLVESAWHARRRPKVGYELARRQRGQDAVVVERAWRCQQRLYSRWQRMAGRGKPQQKIVVACARELAGFVWAIATEQPLRTT

SEQ ID NO: 439470 - protein, 344 aa, unidentified
MKLTTVGIDLAKNVFQVHGIDERGKVLVKKQLRRDQMAAFFVNLPPCLLGMEACGSAHYWARKLATMGHTVRLMAPQFVKPYVKTNKNDAADAEAICEAVARPNMRFVPIKNVEQQAVLALHRVRQGFVKARTAQANQIRGLLGEFGLIVPQGIGYIASRVPELIEDADNELPGSFRVLVQRLLDHLKELDRQVEELEAQIQAWHRSSDLSTRLAQVPGIGPITASALVASIGDAKNFDCGRQLAAWLGLVPRQHSSGGKSNLLGMSKRGDSYLRTLLIHGARSVIYRAGQKADPCSWVNAVVQRRNKNVAAVALANKNARIVWALLAHDRRYETGYSKAAEVA

SEQ ID NO: 439471 - protein, 332 aa, unidentified
MHSDNNVTVLIDEKDEVVYRKRLPNDLRLILEQLSAYQSRVEGIVVESTYNWYWLVDGLMEQGYKVHLANTAAIQQYNGLKYTDDDSDARWLAHLLRLGVLPVGYIYPRADRPVRDLLRKRSQLVRQRTTNLLSIQNLMTRNTGSSLSAKQIKGLDVQQVDELLPEGDLALAVKANLAVMLSADEQSEILERTVIQRVQLRPQFRFLKTVPGIGEILALTIMLETGDIGRFASVGNFASYCRCVDSRKISNRKKKGQGNTKNGNKYLAWAFVEAANFAIRYNSGIKSFYQRKKAKSKGVVALKAVAHKLCRASYYIMRDQVPFNITKAFGQK

SEQ ID NO: 439472 - protein, 325 aa, unidentified
MKKIFMGIDISSRTLDICLKTDGKVRYFNIQNDPKAIRPFLKKHTKAGTIVAMENTGRYNWHLFEVLQGLELSVYVLAPIHLKKSLGLARGKNDKVDSLRICSFIEKNEQDCKPWKQSPLSVRRLKVLLTERESRVKMKGQLARQQHDYKLMKTMGMDKELLKLNKKLIEAIDIQIKKIECDIEKHIGDDIELREKARLIRSVPGVGKVVSWMMIAKTDGFTSMSDPRKMACYCGVVPFEHQSGTSLRYRPRVSVFADKKMKSLLHLAAMSAIRLNNQLRIYYLRKVQEGKNKMSVLNAVRNKIIHRIFAVIKNQTIYKNDLVLS

SEQ ID NO: 439473 - protein, 317 aa, unidentified
MTETTTITAGIDTSKDKLDVAVHGQAACLTVQNQLAGWEQLAAAFAKIGVTRVGIEATGGYERGITRHLQAAGFTVLVLQPLQAKAYARLHLRRAKNDRIDAALIAACAHIVEAPSVEPDARLDALSDHLTFIEQIEEDIVRFKTRAEHINDKHLRAIVTADIKRREALRTAELRRIAKQLRSHDDLARRFALVLSVPGIGERTAIALIVRMPELGRISREEAAALAGLAPFDDDSGKHKGERHIAGGRNRLRRSLFAAALAASFRWNPALIALYQRIIAKGKPHKLALIACARKLLIFANTVVQRGTPWQTEVKQT

SEQ ID NO: 439474 - protein, 372 aa, unidentified
MNYNTVYVGMDVHKESFTLCSCKYEDEKASHYQRTPASYKNVLRYLAFLRTIYGEDTRFVCGYEAGCLGYSLYHQLENFNVECVILAPTTMLEQRSKRRIKTDKRDAEIIAKSLAQHNYSPVHIPTKMDNQTKEFIRMRDDHKAELKKIKQQILAFCLRQGYQYDGSGNWTAKHVKWLRSLKTEGLYKEILDEYLLTYTILTDKLNRLDQRIEELASEEEYKEPVSKLTCFLGIKTHTALSVIVEVGDFQRFASARKFAGYLGLVPGQHSSGDDRNGLGITKAGNTHVRRLLVESAQSYTRGKIGYKSRVLRSRQAGNSPQIINYADRANERLRRRYYQMVLKDGKKYNIAKIAVARELACFIWGMMTDNIY

SEQ ID NO: 439475 - protein, 367 aa, unidentified
MEKSSTVFVGMDVHKESIDITVAEQGGEVRRLGQIGGDRGSLLKMVRRQQSKGHKLVFVYEAGPCGFWIYREITTLGHACMVVSPSLIPRRAGDHVKTDRRDSERLASLARAGELEAIHVPDIRDEAIRDLVRGRDDAVVAQRRVRQQLKALLLRNDIRYVGKTSWTGAHRRWLSELKLPEPAQRIVFEEYVDAIVVATARIERLTRAIETEVAGWRFAPVVGALQAMRGIQFVHAVTLIAELGDLTRFASARQLMGYLGLVPREDSSGEHRHQGSITKAGNSYARRALIEAAWAYRYPARVTRIIATRQAGISKAVCDIAWRAQLRLCAKYRRMNARHLNHNKIVVALARELSGFVWAIGQSVKPQ

SEQ ID NO: 439476 - protein, 348 aa, unidentified
MDHHAGIDVSLECSSVCVVDANGKIVREGQVASEPDALIAWLGSLGLPLARVGLEAGPTSQWLYGELKRTGLAMELLETRHVRDAFRAMPVKSDRNDARNIAHLMRLGWFRPVHCKSMAAQETRAVLTARKLVQSKLQDVENGLRGILRGFGLKVGKTTTRSFAGRIQELVAGHPTLETIAEAPLSVRAVLLREFSGFEKRVRSMARADGRTRLLMSTPSVGAIVALTYASAIDDPARFKSSKQVGPHFGLTPRKYQSGETDRSGRISKIGDASVREALYQAAHVMLTKPVKGCAELKSWAMRISKRARMRKAKVALARKLAVIMHRMLADEQAFRPTTRTKLATVAA

SEQ ID NO: 439477 - protein, 367 aa, unidentified
MEKGITFVGMDAHKVAIKQAVLLPEQTKPIEWQLANEKAAVRRMVRKVQRLAPGKEVRFCYEAGPCGYALQRWIQEAGAVCVVIAPSLIPRKPGDRIKTDRRDARKLAELYRAGLLTEVHPPTPEDEAVRDLCRAREDAHEDLVRCRHRLSKMLLRRGWIWNGSKRAWSQGHRLWLRSLRFEQQADQVVLDDYLLAIEHVEQRLRCLEQHIEAASQLPAYAEAVGALRCFRGIDTLTAMGLVAELHDFMRFDSARGLMAFLGLVPSEFSSAESERRGAITKAGNRHARRLLIEAAWHYRHHPNASSLKRRRQGQPPEVVALADKAMHRLHRRFNRLLAKGKPRPKAVVAVARELAGFVWAALHSKAA

SEQ ID NO: 439478 - protein, 495 aa, unidentified
MISVGIDVAKRSHEACFMDAEGKEIGRPLRFPNTAGGVATLSDHLRRLGQPVSIALEATGHYWLALHERLAQEGFSVQVVNPIQTDAYRRTTVRKVKSDRRDSWIIADFHRIGRVRPGYVPDVTVLPLRELTRFRFRLVDQVRDAKRKALTILDRVFPEYEGLFSDVFIATSRQLLPTATTAEESASFDLEELAALLRRSSRGRFGREKAQAIQMAARNSLGLSSLGPVAALELRCLLDQIEFLEAQIAQVEAAIEELMAQEEQYLTTIKGLGAVLAATILAEIGDIGRFSRLESLVAYAGIDPAVYSSGQFRGTQAKLSKRGSPYLRRALWPAATSARHPGPELQEYYERKRRAGKPYGIVMSAVCRKLLARIYVILKENRPYEVRQPLTLHSRSFPQGFSHPNCRAGGPRPYNITSCPSAASGCSCCCDKPGSCGARWSVGPSELMTEGQDWTIDPSGPAGLYPSSPAHILRAGRLGPSGPCALRASRDGPAH

SEQ ID NO: 439479 - protein, 487 aa, unidentified
MSVVTGHVCDIGEAVKAAIPFERVSITTYPNRCGIPNEMMEEDMAQRKRTVLELAHPNAAGIDIGSASHFVAVSPDRDDEPVREFKSFTENLEELADWLVCCGVDTVAMESTGVYWIPLYEILEARGFAVNLVNARHVKNVSGRKSDVLDCQWLQQLMSYGLLSGAFRPTDEICMLRAVSRQRDMLLASQGRHIQHMQKALTQMNVQLANVISDIVGETGQKIVRGIIAGERDGHVLAKMKNARIRASEEEIAKSLQGNWREEHLFALKQAMALYDNYGTLLTECDTKLESMLATLVGDNDSDPGRGRRASNSKNAPQFDVRTYLFRLCGVDLTRINGINPTTALKVIAEVGPDMSRFKSAKHFASWLGLCPGTKISGGKILSGASKRTTNRAAQSLRLAAAALHKSQSALGAYFRRLAARLDRAKAITAVAHKLARLIYTMLTKGAEYTDQGQDYYEERYRQRVMHHLAKRAEKLGMQLVPASQST

SEQ ID NO: 439480 - protein, 272 aa, unidentified
MIIIGVDFHPEFQQIASVDTDTGEFQEKRLEHREEAETFYRGLAAAGQKVRVGMEASGQARWFERLVAELQFELRIGDAAEIRTKRVRKQKTDRQDAQLILQLLLEDRFPKMWVPSWENRDLRQLLWHRHRMVQARTRIVNQLQAVALNEGLRCKKRLWREHGRQQLEAFRLAPWASRRRRDLLELMDRLNPTIAELSQAIEQEVEKCPEAPRLRTYPGVGALTALAFVLIIGKAERFGSGKQVASYLGLVPLEDSSGNRRRLGHITKQGVR

SEQ ID NO: 439481 - protein, 400 aa, unidentified
MISVGIDVSKGKSTVCILKPYGEIVSKPFNITHTHKDLSELSSMLFRLNDEVKIVMEATGIYHLPILTYLQEKGFFVSVINSYLMKSYRNESLRKAKTDKIDSRIIANYGIDHWFKMKEFQISGVIYEELKLLGQQYRHYMKLHLLSLAELTHLLDLTMPGIKNLLASWNETNRKDKRSDFVERFWHYDVITSMSEQEFTEKYILWAKEKKYVPSQEKAKVIYTLAQESIPTLPSETSSVKMLVTEAVRVLKEVDATLGLILSRMQEIAKTLPEYSVVREMGGVGNTLAPKLIAEIGDVRRFRNGKALVAFAGIDPPPYESGQFVGCNRKISKRGSASLRKAGYETMRSLKMRSRPEDPVYRYVVKKESEGKSKKSAKIAGLNKFLRIYYARVTELYKNI

SEQ ID NO: 439482 - protein, 338 aa, unidentified
MQTYAAIDLHSNNGVLTVIDEHDRVLRQKKLANKLELFVSELEPFRATLQGVAVESTFNWYWLVDGLLKHGFTVKLVNTAAMQQYEGLKNTDDPYDAWWLARMLRLGILATGYIYPREERAVRDLLRKRSSLVQQRTANILSVQNLEQRNRGIKISSGEVKKLTEERIGELYDNEDLGLALTTTIKVIGALTEQTRCLEKAVLKKARLRDEFKLLLTVWGIGEILGLTIMYEAGDMSRFAGPGPFASYCRCVEAKRLSNGKKKGENNAKNGNRYLAWAFVEAAHYAIRYYPEAKRFYDRKAARTLPVVAIKAIAHKLARASYHVLRDQKPFDPKKVFS

SEQ ID NO: 439483 - protein, 275 aa, unidentified
MEHYAGIDVSLELSSVCVVDGRGKIVKEAKVASEPEALVYFLKELGFAVDRIGFEAGPLSQWLHAGLTQAGFETVLLETRHVKAALSAMTVKTDRKDACGLAQLLRMGWFQQVHAKSIGSQEIRALLVARKQLLGRLLDVELSIRGILRGFGLKVGQVTRKTFEARIRELVTGHTTLERIAEAMLPARATLKAQYEKLHKAVLAIVREDVVCRRLMTVPGVGPLVAVTFKSAVDDPSRIAKSKAVGALFGLTPRKYQSGEKDVTGGITRTGDEMV

SEQ ID NO: 439484 - protein, 427 aa, unidentified
MGLIVPSTIHPEREDQPLPYEWFVGIDWGSQQHQVCVLDRARRLVGARAVDHDGASLAQLAAWLWTLSVGQPQRVSVAIEVPRGAIVEGLLERGFHVFAINPKQLDRFRDRHSVAGAKDDRRDAFVLADSVRTDRPSFRRLQLDAPHLLLLRELSRVEETLLEEFRRSANRLREQLHRFYPQMLQLCSAADEPWLWDLITLAPTPAHAMLLSEEQVQRVLKAHHIRRLKAPEVLACLQAPALPVAPGTAEAAQAHCGFLLPCLRVLAEQLQACSQQVSTLLRTMADEPGEGGSPSDVAIVQSLPGVGRKITAWLFAEAAQPLAERDYQVLRTHGGVAPVTKQSGKRRQVVMRHGCNPRLRHALYHMARVAMQRDAHFSSVYAALRAKGQRHGQALRNIGDRLLRILIAMLRHRTGYDASRIRCKPVV

SEQ ID NO: 439485 - protein, 392 aa, unidentified
MIYVGIDVAKDKHDCFITNSDGEVLFNSFTISNNRDGFETLFQKIESVSDDLNNVKVGLEATGHYSYNLLGFLLHKGCPTFVINPLHTNLYRKSLSLRKTKTDKVDSRTIATMMMSDMNLKSYSDTSYHNEELKSLTRYRFDKVKERAKLKSSVSRLVCILFPELEKLVPTLHMVSVYALLSEFPSANAVASAHLTRLSNLLSESSKSRYGKVTAVMFRDTARSSIGSHMPAKSLELKHTIKLIQELTIEIDEIEAAIKRIMDEEIQSPILTIPGISYRMGAMILAEIGDFSRFDSADKILAYAGMSPSTYQSGKLDNCYAHMEKRGSRYLRYALYNATKYVCHWDESFAVYLEKKRLEGKHYNVALSHAAKKLVRLIFAMEKSGLAYIPAS

SEQ ID NO: 439486 - protein, 382 aa, unidentified
MYIVGIDIGKNHHEASIVSPEGKQIGRSLRFATTHKGADSLMSFIFKNIGNSPCVFGMEATGHYWYPIYSFLKAKGYTICVINPIQSDSLRKMYIRQTKNDSIDSFLIAEVIRFGQFGTTSMADENILAMRQLCRYRDSVISSRTEIKLRIGTIMEQIFPEYEKQFSSLWVSTSMGILEKYLTPENIENAPIDELFEIIKDKSHNRLTKAKAISIKEAAADTFGIKIAQDAFSFQLKQLIDRMNFLDKQIEALDIEIMKYYEQFDCYLHTIPGIGMIAAAAILAEIGDINRFKSSSALVAFAGIDPTVRQSGEFNSTHNHMSKRGSPYLRHAIFLAATTCSFHNSPLNAYYKKKRDQGKHHLTATGAVARKLTTVNLCRVTG

SEQ ID NO: 439487 - protein, 368 aa, unidentified
MGLDVHAQTIAVAIAEPDGEVRSLGTIANRAESIRKMIKKLGSVEQLRACYEAGPTGYVLYWQLAELGVACEVIAPTLAPMKAGDRVKTDRRDAERLARSFRSGDLTAVWVPDAGSEALRDLVRAREASKQDQLRARHRLAKFLLRAGQRPAAGVKAWTQLYMVWVRQLRFAQVAQESTRLDYLHEVEHMAERVKRLEQAITEAVKLASPAIQEVVKGLQALRGIAQISAVTIAAELGNMTRFAGARQLMGYSGAVPSEDSSGKRMKRGSITKTGNAHLRRIAIEAAWSYRLRPGVGPALRKRQEGVPEEIKEIAWKAQQRLHKRYMRLAAAGKDQRKIITAVGRELLGFVWAIGIKAEAAAKQKMAA

SEQ ID NO: 439488 - protein, 340 aa, unidentified
MPLYGGIDLHANNSVIVLLNEQDEVIYRKRLPNALPTILEQLAPYHTAMEGLVVESTYNWYWLVDGLMEADYRVHLANPAAMQQYSGLKYTDDHSDARWLAHLLRLGVLPEGYIYPKAARAVRDLLRKRAHLVRQHTATVLSVQNIMARNTGARFSVKRIQELTKQELTTLLAEETQVLAVTSSLVVLDCLRQQIKTLEQTVHKRLHHTPSYEQLLTVQGIGTILAQTITLETGAISRFPTVGNYASYCRCVDSTKISNGKRKGTGNVKNGNPYLAWAYMEAAQFAMRFQPEAQRFYQRKLAQSRNNTVLARKAVAHKLSRACYYIMRDLVPFEATKAFG

SEQ ID NO: 439489 - protein, 399 aa, unidentified
MASMTVATLDPQPGQVTGVVVGGVDTHKDLHVAAVVDGGATVLGTESFSTTRAGYRALLGWMRGFGDLRRVGVEGTGSYGAGLTRHLAEADVEVLEVDRPDRTDRRRRGKSDTFDAICAAQAALAGRRTSIPKSRDGMVESLRVLKLTRATAIRARTKALQLLRHHIVSAPEELRGQIRNLTRMQLIRTCAAWRPDTVGFRDPVVATRISLKSLARRILELNDEIADLDALIEPLVRELAPQLIATSCIGIETAGQLLVTFGDNPARIRSEPAFAMLCGVAPLPASSGMTQRHRLNRGGDRQANRALHMIVISRLRVDERTQAYAAKKTAEGHSKLEIIRCLKRLLAREVYYLLRPAGSGQAAGLSPELTPGRFLHPQLTRRSAGAGNIMPNAALTDQA

SEQ ID NO: 439490 - protein, 421 aa, unidentified
MRKADTRKVKFVRDDTLIVAIDVGMEMNHGYCTTPDGKDIKPFKFDNTRDGMDKLWGMVMASKNRFQCEEIIVGYESTGPYGEPLVHHLMKKPVMLVQINPMHTKRVKEISDNSPLKTDDKDPRVIADIIKLGRTLSIVIPEGDAAYLRRLNNSRERHVKERTALVNQLQQLVFLLFPEFKKVLKNIKCRTPLYLLKKYPTPESISVLETPVLGEEMRKKSRGKFREHHADMLINLAKNTVGIREGVAGISMDIRHILVQLEMLKSLIAEIENEMEIALGRIPYSSKLLSIKGLGIVSVAGIIGEIGDFKKFQTQGEIMKLAGLDLYEISSGKMKGQRRISKRGRSLLRKILYYAAIQTIRKNGILYDYYTRLTDRGMKRMMALVAVSRKLLGIIYAIVRDDSEYLVNFESIKRQVIKKAA

SEQ ID NO: 439491 - protein, 366 aa, unidentified
MKRVQSNTLDFSGQNIYVGIDVHLKSWSVAILSEHSVLRRFRQDPEPEALHKYLVSNHPGADYFSVYEAGFCGFWIHEKLTDLGINNIVVNPADVPTMSKEKLRKTDAVDCNKLARELRSGSLEGIYVPGTDILEMRSLIRLRNLIVKDSTRAKNRIKSLLRFHGVEIPEEFTRSSIGCWSKRFLNWLHCLEFSTEYGKKTLELHLEQFIRLRKMLLQETRAIREISRKAPFDKPIRLLTSVPGIGVTTAATLMGEIDDIVRFSNADHLASFIGLVPMCHSSGDNDNVGDITPRRHFMLRCLLVEAAWVAIRKDPAMTMAYTEYRKRMNPQKAIVKIARRLVNRVYFVLKHEKEYVPCVIKRYRIL

SEQ ID NO: 439492 - protein, 384 aa, unidentified
MSADHRPEQTAIRTDLGAIFVSLELSRATWLITSLSPGREKMSKHQVRGGDTAGLLARLAELQAKAHARTGQHFPLIVIQEAGLDGFWIHRVLQSEGIESHVVDPASIATSRRRRRAKTDKIDGEALLRALLAYKRGEPRVCAMVKAPTSREEDDRRISRERKVLTTERVAHVNRIKGLLFAQGISDYEPMHRDRRARLHDLTTGDGRPLPQHLKAQVSRELDRLELLLEQLKAVEAERDALLTATEAPAKPGSAELLLDLKGIGPEFASVLWSEGLYRNFANRRQVAAYAGLAPTPWQSGTVDHEQGVSKAGNPRLRTTMIQLAWLWLRHQPDSALSRWFHERVERRGGLRKTMIVALARKLLVALWRYVTAGVVIQGATMKV

SEQ ID NO: 439493 - protein, 332 aa, unidentified
MKRTHSTTKKQAGKLGKAMAKSLNVGGVDVGKFELDAAIDGISSKPLRQKNTPQGRAAIIAFFIEHGVERVGIEASGSYEFEMVDAMREAGLKVTVFQPAQVRAYARFRKLRAKTDPIDAALIAKCTAARGEELDTPDPRLPPLAERLTFIDQIAEDIGRLRTRLDRFRDERLIGTIKDEIARLTKLQKAERTSLRKEVRAHPDLLKRYRLLISIEGLGDPTALTLLIRMPELGHLTREEAASLAGMAPFTQQSGRWIGKARVAGGRSRVGKALFAAAQAASQRWNKALVALYQRLTESGKHHSVAVVACARKLVVYANTVLERGTPWLMQD

SEQ ID NO: 439494 - protein, 361 aa, unidentified
MVGSMSLGGLDVHASQTHAAVLNTATGELSGTRLRMAPAQVVEFLATLPAPVRAVYEAGPTGFGLARAASARGIDVRVVAAGKVPRASGDRVKTDRRDAERLARLLAAGELRFAFVPAVADEQFRDVIRAIEDCRGDLMRGRHRLSKFLLRREVRWPGPGSTWTQRHMSWLRGLHFDDLCSQATLVDYLWGVETLVSRRAALIAALEQAIPDSHHAPTIAAPRCFRGIDTLSAAALCAEVGDWRRFRPKQLSGFLGIVPTEHTSDRKRRQGSITKAGSVHARRLLVEAAHHYRHRPAIGDGLARRQHGQDPRVIEIAWRAQRRLHQRWEVLADQRRKPAGVVAIACARELAAFCWEAATLN

SEQ ID NO: 439495 - protein, 412 aa, unidentified
MRVIIERCCGLDVHQETVVACLLIGAPGDRPTKEVRTFRTVTRDLEVLRDWLAAAGVTHVGMESTGVYWRPVYAVLEGHFDLIVGNARHIRNVPGRKTDVKDAEWIADLVRHGLIAKSFVPPRPLREMRELLRYRRKLTESQAAERNRLLKLLETANIKLASVMSDVFGVSGRAMLRALIEGWVSVEAMADLARGQLRRKRSDLILALEGRMEEHHRFLLATQLRRLEAIEQDIATLDLRITERLEPYRTPHALLMQIPGVDWLVAAVLIAEIGVDMSVFLSVHHLSAWAGVCPGSHESAGRQKSGRARKGNVHLRTILVGAAISAARTKGSYLKDKFHRLKARRGAMRAALAIAHKILVSAYHMLAKGLPYRDLGEAYLDQIGQTRTVANLKRRLERLGYHVTLERTTQAA

SEQ ID NO: 439496 - protein, 331 aa, unidentified
MDEVRRFVGIDVAKAALDVFIGSAGAAFSVANDEVGIRELLRQLEPADFVILEATGGLETPVASALAAAGIAVAIVNPRQVRDFARATGTLAKTDRLDAKVLAHFGEAVRPEARPLVDEQAQVLEALVTRRRQLVEMLTAEKNRRARAPKVLHRSIDEHIRWLEKRLSGFDDEVGQLIRNTPLWRERDELLRSVPGVGKVLSSTLLAQLPELGMLNRKQIAALAGLAPFNRDSGSMRGSRCIWGGRAQVRRVLYMATVAGVRSNPTVRTFYLRLRANGKHAKPALIACMRKFLVILNAMLHDKTHWQTPALTSPTSPLSPLLGAVSEHGCC

SEQ ID NO: 439497 - protein, 321 aa, unidentified
MFLGLEIAKAQFLAALMMDHKYKTKAFDNTSSGFDQLWVWLQRLDATTARACMEATGSFGEALATFLVDHGVEVSVVNPARVKSYAQSEGLRTKNDRVDARLIARFCQSMQNKLELWQPAPVEVRELRALVRRYETLIAMRTQEKNRLEANPPASIIESIQEHLGYLNAQIAKTEQAIRQHIDQHPKLRKQNDLLQSIPGIGNTTSALLLAEVQFDQYRSARQVAAHAGLTPKHRESGASVKGRPRLSKIGSARLRKGLYLPALAAIRHNPLLAAFADRLTLAGKCKMSIIAAVMRKMLHIAFGVLKSGQPFNPEFHPSNS

SEQ ID NO: 439498 - protein, 337 aa, unidentified
MYYIGLDIHKKTISFCVKDAAGCLHREGKIGSSRRELDVWLRTLPQPRMMAMEATIFTGWIYDYLLPHAEKLKVAHPLMLRAIATAKKKNDKIDASKIADCLRCDFLPECHMAPTEIRDRRRVLRYRNLVVKQMVQMKNRVSGLLMETGASYNKQRLHKVGYFGEMMSTNADISDAVRPLLNLSRGMIRRSSKLEYDLVSSLERDPLLRERLRRLRTVPGVGSITALTWALEIGDYTRFSSNRQAISYCGLCADEKSSADKVMRMPLSKQRNKHIQRVLVEAAKLAPRESPELAMIRARELERGNPNRATLAVARKMVCYMLAVERRQQDFVRTAAA

SEQ ID NO: 439499 - protein, 373 aa, unidentified
MNESIKYIGLDVHKETIAVSVAQGQRDEVRYLGEIANAPEAIAKLVRQLAKDEVALSFCYEAGPCGYGVYRQLQALKQDCMVVAPSLIPRKAGDRVKTDRRDSLSLARLHRAGELTAVWVPDTEHEALRDLVRAREDMKHLQRQAKQRLLAFLLRHGMRYEGKSNWTQAHFRWLEQVKFGQPTQQIVFQEYVDAVLAGGRRVGGLERMIEQVAQASPTWPVTEALMALRGVNLLTAVTVVAEIGDLTRFANAPQLMAYLGLVPSEHSSGGSVRRGGITKTGNSHVRRVLIEAAWTYRHAARKTAVLQRRAERTPQAVQDIAWAAQKRLCQRYRLLQAKGKRQVQVCTAVARELSGFIWAVGQTVQPSYRGTHR

SEQ ID NO: 439500 - protein, 349 aa, unidentified
MSPKLNSGIAVIGIDIGKNSFHVVGLDRHGAIVLRQKWSRGQVETRLANLPPCLIGMEACVGAHHLSRKLTLLGHNARLMPAKYVRPYSRGQKNDFRDAEAIAEAVQRPTMKFVATKTAEQLDLQALHRVRERLVSQRTGIINQIRAFLLERGVAVRQDLRFLRAELPRILATPCDGLSPRMVRVLEELACDWRRLDERIEGLSSEIEVLARRDAGCKRLMSVPGIGPIISSAMVAAIGTGDTFTKGGDFAAWLGLVPKQISTGDRTILGKISKRGNRYLRVLFVQAAWAVLIKPKSWARHGLKPWLEAAKKRLHHNVLAVALANKLARIAWSLLAYGRVFEATKIQAA

SEQ ID NO: 439501 - protein, 373 aa, unidentified
MDEYSEVFIGMDVSKSRIAVALAEVGRAGEVRFVGEIEANEAAVTKLVRRLSAKYGKLMFCYEAGPTGYGLYRLIGELGHGCLIVAPSLIPRKPGDRVKTNRRDAVSLARLLRAGELTRIWTPDERHEAMRDLTRARSAAAADLRVKRQQTGAFLLRLGRIYPGKKTWGGQHWKWLTGQAFAHLEQRIVFDELLQATGEARARVVRLERAIEEALPDWSLAPTVTAVMAMRGFDLVAATTILSEAGDLGRFETPRQLMAWLGLVPSEASTGDRVRRFGITKAGNSRARRAMIESAWCYRHPARVGPAKRARVEAAPPAAQSIAWKAQTRLTARYRALIRKGKLKTVAVTAIARELTGFVWAIHRALGAEPIAA

SEQ ID NO: 439502 - protein, 398 aa, unidentified
MNVRVEKACGIDVHKSFLVATMLTYEGVKETKEFNTGLEDLINLREWIIERHCQRVAVESTGIYWITLYTCLEGKVETIVANPRFIKNIPGRKTDHLDSEWIAELCLNGQIKPSFIPSKEIRELRDLTRTRTKMIQTRTAFKNRVHKVLQRANIRISVVLSDIFGVAGLQIINGILNGKCIDDVLKDVKKINKKKAAIKEAVCGELSQADVFMIRECLETIAFLQSKIDQLDSMINQRFEKVQKKNQMEILMSIPGISFTSASAILAEIGDINVFPFPKSLVGWSGLAPSLDESAGKSSNGHITKKGSKYLRRMLVQCANAIADGKPNKLRFFFQRILMKKGRKIAIVAFARKLLSITHHLLKNNEKYNEEDLKPKQVKVPKFKDISELRLVSTDMLG

SEQ ID NO: 439503 - protein, 413 aa, unidentified
MDVVYERCCGLDIHKKVVTACLITPGADGRPRKEICSFGTMTDDLLQLADWLLEAGCTHVAMESTGVYWKPIYNLLEDRFNLLLVNAQHVKRVPGRKTDVADCEWIADLLQHGLLTGSFVPERAERELRELTRYRSSLVRERAAEVNRLQKTLEGANIKLTSVVSDLTGVSARRLLAELLSTGTAAGKVAGLVHSRLRDKVPELERALAGRFGSHQRFLLARQLRHIDELDQLIEDVSNEIAERMRPFEEEISLLDTIPGIGRWQAEVLLAEIGIDMTRFPTAGHLASWGGMCPGNNESAGKRKSGKTRKGSPWLRVCCTESACAAGKTKTYLGAQYHRLMPRLGKKKTALAVGHSILIIAYYVLTRRDPYSDLGSDYFQRRHRDRLERHLVKRLQALGNDVTLRRLEPVAAA

SEQ ID NO: 439504 - protein, 301 aa, unidentified
MSNCTRYLGLDVHAETITAAIAEGRGRIRSIGKFPNRPEAVRKLIEKLGGGRNLRVCYEAGPTGYALYWQLTKLGVDCEVIAPSLIPKKAGDKVKTDRRDAEKLAQSYQAGDLTPVWVPTPEHEALRDLVRQRAAAKADESRAKHRLAKHLLRRGLREPEESGAWTHPWWRWVQSLQFEHEAQQVALADCIAEVLHMGERLARLDKAIDRLVETAPPHMRAVIEALQALRGVAKLTAVTIVTEIGTFKRFRRPTEMMGYTGFVPSEYSSGGRESKGRLTRAGNAHLRHVLGEAAWHARHRP

SEQ ID NO: 439505 - protein, 410 aa, unidentified
MEVLHPHCAGLDIHKDSVVACVRHMVDGKVTTEVKTFKTTTQELMALSDGLSAEGVTHIAMEATGVYWKPVWHILCDGEFELVLANAAHVKNVPGRKTDVNDATWLADLMAHGLIRPSFVPDEPTQQMRDLLRTRKQFVRERTGHTQRIQKTLEDANIKLDSVISNIVGISGRRMIEALIDGQAAPEALAALAHGRLQATPAELEASLRGRVTAHHRFMLRLHLDHLDALDAAIARIDKEVEDNVEPFRVAIEMLTTIPGVSRLSAEVIVSEIGIDMSRFPTEGHLISWAGLCPKNDESAGKRRSTRMKKGAPWLKTTLVQCAWAATRTKGTYLHAQYLRLRSRRGAKRAIGAVAASILTAVYHMLENGTLYQDLGANHFDNRAKGKRVLQLVNRLKNLGFAVQITPMAA

SEQ ID NO: 439506 - protein, 354 aa, unidentified
MIIIGVDYHPEFQQIALVDTESGEFREKRLMHREEAESFYRALAAAGQKVRVGMEASGFARWFERLLGELPLELWIGDATEIQRKRERKQKTDRQDAQHILKLLLKDDFPRIWVPSGENRDLRQLLWHRHRMVQARTRIMNQLQAVAINEGLRCKKRLWRTGGRQQLESFPLGPWASRRRSELLELLDRLSPTIAELSRAVEQEAEKRPDAQRLRTHPGVGALTALAFVLIIGDVGRFQCGKQIASYLGLVPLEKSSGNRRRLGHITKQGSSLLRFLLVEAAQVTVRSLPEWRGQYFRLVMRRGRKTAKVAMARRLAIRLYWMWRQGLDYEELVKFGSHAGQPEHRDGVQRSIE

SEQ ID NO: 439507 - protein, 425 aa, unidentified
MEVIHRRCSGLDVHKETVVACVRLVLDDKITREVRTFETTTSGLLLLLAWLTELGCTHVAMEATGVYWKPVWNILSDGDFELVLANAAHIKNVPGRKTDVSDAAWIADLLAHGLIRSSFVPEQEFQELRELLRTRKQLGRQQSSHVRRLQKTLECANVKLDSVITDIVGKSGRAMLQALIAGETDPVKLAALADRRIKASAQELREALRGRVTDHHRFLLHLHLQHIDFADSAIQDIDRNVTALIARMDQEVEAGQTRATFQSLILLLMTIPGIDVLSARIILSEIGRDMSRFPTAGHLLSWAGLCPRNDESAGKRRSTRLRKGDPWLKTLLVQCAWAARRKKGSYFNAQFLRLRGRRGPKKAACAVAASLLTTIYHMLKDGTQFQDLGADHFDRRSKDVRAKRLVAQLANLGFNAKLTPLAQAA

SEQ ID NO: 439508 - protein, 326 aa, unidentified
MEGKIALGLDVAKSTIEACLLRDGQKRGDRTTIDNSIAGGQKLLTWLHGTDLSEVHVCLEPTGKYSRVVAAFLHEAGLKVSQVNSYAVLSHGRSKNYRNKTDRIDAYLLADYCLKENPPTWSPPASSHVELSELQARIDEIEEMLGQEKNRFSAGGMSALVQSDIQEHIAQLIVRKEKLEKAAKDLIDTDALLSANFKIVHSIIGLGEKSALGLLSAVRFEQFQKPRSVGCFAGLTPRRFESGTSVYKRECISRKGSNQLRKRLYFPAMVAMQYNPQMRAFAERLRAKGKPPKVIICAVMRKLLVLTATLIRKQEFYDPQKGLAIA

SEQ ID NO: 439509 - protein, 343 aa, unidentified
MTVARIGIDLAKTVFEIHGVDERDKAVIRKTLRRDEVVRFFANMPPCLIAMEACSGAHYWARRLMAFGHEVRLISPQFVKPYVKTNKSDLNDAEAICEAASHPSMRFVPIKSEEQLSIQASHRIRSRLVANRTALANQIRGILAEFGITVPRGLAILRRRLPDVLGSDKVSLDSLVRSLILDLHDELMAADDRVRAYDQRIKQLCKMSEACQRLARIEGIGPLTATALVAAAGNATSFRNGRQFAAWLGLVPRHQSSGGRTRLLGISKRGDRYIRTLLIHGARSALGRVGHKKDPRSRWLLKLCGRRPYNIAAVALANKNARIAWALLRHGEAYDQRRSVAAA

SEQ ID NO: 439510 - protein, 347 aa, unidentified
MRFYTNQHQFYCGIDLHARSMYVCILSHDGEVLLHRNMKAAPESFLKAVAPFRDGLVVAVECIFTWYWLADLCAELGIPFVLGHALSMKAIHGGKAKNDKIDSQKIAVLLRGGMLPQAYVYPAEMRATRDLLRRRTHLVRKRAELLSHVQNTNSQYNLPEIGKKIAYKANREGVAERFADPAVQKTIEVALALITYDDKLLQELELSILKTAKRHAANTLYLLQTVPGIGKILSLVLLYEIHHIDRFPSVQDFASYCRLVQCSKESAGKRLGTSGKKIGNAHLKWAFSEAASLFLRNNPQGQKLLARLEKKHDKGKALSILAHKLGRAVYFMLKRKVAFDMDRFLQT

SEQ ID NO: 439511 - protein, 345 aa, unidentified
MGSYVALDVSLRSTSVHIVDEAGKCLWRGKCASEPEALAALVRKRAPEVVRVGLETGFLSTWLCHGLAETGLPVVCMDARHAKAVLSVRPNKTDANDAEGLAQLLRTGFFREVRVKSWASMLVRNLITARRQLVRTQVDLANQLRGILRTFGLVLPPGSGGGRRFEVAVRERAAMRPGLSLIILPLLETWRAVRERVAVLDKAAVAAARRDPRCRLLMSAPGVGAITALTYVSTIEDPQLFQGARAVGAWLGLTPRRYQSGEIDSMGRITRCGDPLLRTALYEAANQVLTRSHAASALRRWGLMLKARNGHKKAVVAVARKLAVILHAMWKTDAVFCAEPARVRT

SEQ ID NO: 439512 - protein, 431 aa, unidentified
MCFAPAFGDQEESMGKINERCGGIDVGKRFLLCCVLTGAAHEEPRSQTRRFDATVSDLVRLREWLAAERITHVVMESTGSYWVPVFNILEGHFIIVLANPEEVKNRKGHKTDRKDAEHLADLLRHDHIRASFIPPKPIRDLRDLTRRRLQLIQDATRERNRVEKLLEHVNVKIGNVLSDVFGVSGQSMLLALLDGKTTAEQIAHLARGQAKRKIPQLTEALEGHGMRDHERFLIRSCLRHLACLEEEVEQMDGEILHRMQEPPFQGAFQRLQTIPGVGQLAAASILAETGVDLTTFPTAEKMASWAGLCPGNRESAGIKKGSQTTQGNSYLRTTLVQCAWSATRKTGCIFQTRFRELSPRRGQKRAIVAIAHQMLTVLHFMLKNDVPFNGAANAPTQRRRQRRAHHHLRCLRRLGISVQIVEPTEFAPQTG

SEQ ID NO: 439513 - protein, 351 aa, unidentified
MPRKSSVCTVTAIGIDMGKTTLHMVGLDSYGAIVLREKVSRGRIASRLANLPPCLIGIEAGMATHYVARELAALGHDVKQVPPAYAKPFRQGHKNDFRDALAVAEAVQRPTTRFVPPKSNEQLDLQALHRVRSRLVSQRTAVINQIRGFLLERGIIVRQGLRFLRQLLPDILAKRTDVLSPRMVRIVSDLAGDWRQLDDRIETVTDEIETLAKADDSCRRVMTVPGIGPIISSAMVAAIGNGSAFSKGRDYSAWLGLVPKQMSTGDRTILGRISKRGNSYLRMLFIQAARVILLRPANWPKHGFGAWLVRAIQRLHPNVLAAALANKLARIAWTVLAQERSYEARVTKAEA

SEQ ID NO: 439514 - protein, 365 aa, unidentified
MTMYLGLDVHASATVYVAQDQEGKVLGSGKVSTSREGLKEMLEKVGAPAGSKVALESGSQSFWVSGLLSELGMESYVIEASEVRQKARRPRQKSDRRDAFEICDGFRRDIFVKMVYVPVREAQRLRLVLSRRRHFVRICTSQINAAKSLLRSIGLSELAGTLVTVKAWEELLAKPELGELKQMVSLHYQVWRSARAQAEELKGELDKVLTPFAELSRRLQTVPGVGEITAATFIAVIARPDRFPTSGEVSSYLGLVPSGWDSGESEKHGPITKTGNSELRSLLVECAHHASSPNHPLHPYFARVCAKGGFKKAVVCVAQRLARILWRMWLNQEDFQVEKLNVIKGRRKVSRTYYWRIKEPVSAEA

SEQ ID NO: 439515 - protein, 343 aa, unidentified
MQTITTIGLDIAKSVFQVHGVDAEGHVLLRRQLKRRYVLAFFEKLPPCLVGIEACASAHHWSREPKALGHTVRMMPPAYVKPYVKRHKNDATDAEAICEAVTRPNMRFVATKTPEQQSCLTLHRTRHLFIRQQTSVINAIRAHLAEFGIVAPVGRHGVEKLLGIAADTNDKRLPEVARVCVAALGAQLQTLKAQILEFDRMIMAWHRSSEASRRLDDIPGVGPALATALVASIADPSVFRSGRDFSAWIGLVPKQNSSGGKDKLGNISKRGDRYLRSLFTTGALAVIRYAKIHGTRHRPWLTALLARRPTKVAAIALANKIARMAWAIMAKGERYKEPAALAA

SEQ ID NO: 439516 - protein, 349 aa, unidentified
MSESYEGRQIVGIDVHRRRSVLVRMTETGERLETVRISNDPEYLRQVMARAGEHPEVVLEACYGWYWAADTLAELGASVHLAHPLGVKAFSYRRVKNDERVAADLADLLRMGRLPEAWIAPPATRELRGWVRHRAKLVGLRSTLKCQIHGVLAGAGVAVPMSDLFGVGGQQLLTTTRLCTQSRARVDSALRVITTLDFEIELFTKLVAGRLRTDPGYRAIQQIPGVGPVLAAVFVAEIGDIARFHRPEQLASWAGLTPKHHESDTTVHRGRITKQGSRLVRWAAVEAVQRVPDHTRCGQHRDRVAARRGRNIGVVAAARELIRLVFYGLRDGHVRALAAPAATTPKAAA

SEQ ID NO: 439517 - protein, 342 aa, unidentified
MNYGAIDLHLRSTWIRIVEPDGTPVLERKIPTTREALMAAFGDQAHARILIESGTESEWVAQTIEACGHEVIVAAPTYALMYGHRNPQVKTDRRDVVALAEACRHGIYRAAHRVSEEQRQRRRALRVREQLVRSRTQLINLVRAQLKQEGYRLPRCSSETMPRRYALLSLPEAMRSVLAPAMTMIATLSEQIVASDTALMAVAAADPVVQRLMTAPGVGVITGLTYRAVLDDVQRFGDARGVAAYLGLVPREDSSGTRQRKGTITKAGPNQLRVLLVQASWVVWRQRTAGGALHAWVERLAARRGKRIAVVALARRLGRILYAMWRDETDYGTPLLKTPVKV

SEQ ID NO: 439518 - protein, 365 aa, unidentified
MTGTEPHAWGTGLMDDITFVGLDVHKATVCIAVAEGGRGGEVRQLGVFENRSEILSKVASRLSKGGGRLSFCYEAGPCGYGLHRLLTGYGHECVVVAPSLIPMKAGDRVKTDRRDALMLAKLHRAGELTAIWIPDAAHEAMRDLVRARATSVRVLAKARQHLQGFLLRHERIYCGARAWTLAYRRWLTTVRFEHPAQQIVLQDYIHAVQEAESMAPVVAALQSMRGVALVVAVTVVAEVGDFRRFANPRQLMAYLGLVPSEHSSGSSVRRGGITKAGNALARRVLIEGAWTYRMSARVSRKLHDRLEGLPAAVRDIAWKAQLRLCARYRRLAATGRPKVVVTTAIAREMVGFIWAIARLAQPAPV

SEQ ID NO: 439519 - protein, 389 aa, unidentified
MYYVGIDVSKYKHDCIVVSNDGEIICDTFSFDNDYDGFQTPSSMLSSLGEHENIRIGFEATAHYTLNLKLFLENAHYSFMEFNPVLLSKFNKSQTLRRTKTDAIDCAAIARRLMTVEYKPHPVGFYHAYSLKSLTRLRDSLVRQRSFYLVKITNVLDHTFPEFKPFFGNKFSKTAIYLPENYGNADRMSRMNSLSYENLRRISRGKFSPKKFIELKNLAATTVGESNEIFDLQLSGLLSLYKLSANEIDSLEQKITELICKIDPRSLSIPGIGPLSAAVIYAEFGDIAKFSSPQKMLSFAGLEPGYYQSGTSAHGGHMVKRGSSHLRFTLMNLCVPLIQYNIVFAEYYAKKRAEGKPHRLACSHLVKKLLRVIYTLETKRIDFDPEKLR

SEQ ID NO: 439520 - protein, 320 aa, unidentified
MPYIGIDVSKDSFIAAYPAKSGYTTKTFKNTTSGVRQFMTSLPEGCHCVMEATGNYSMLLLYLLQQANITVSMENPQKIKHFARAMLSTTKTDEIDAKLIAMYGEKMEPAPYKIPSESIMLLKQKRTVLRQLKKQLTAMINLQHSLSVLPKQDSTAKVATEQTIKFLRKQISKLEDEITHLSNKEFKRQMELLTSIKGIGENIASALIMATGGFTYFSSAKQISRFLGLCPTYQQSGTSVNVKGHINRNGDTHLRSQMYVVACSSIRANAACREMYERLRSNGKSAKVALIAVANKLIRQAFAVVTNNRPYIDGYVSTLA

SEQ ID NO: 439521 - protein, 422 aa, unidentified
MFAESEDDEQIIERVAALDIGKAEVVCCVRLPAKPGTKRRVQEITTHTTMTRSLTDLANRLVGLGVERVVMEATSDYWRPPFYLFEAHGLQPWLVNAKDVKHLPGRPKTDVLDAVWLCKVAERQMLRPSFVPPHEIRRLRDLTRYRVDLVGARGAEKNRVEKLLEDACIKLSVVASDIFGVSGRAMMTAMIAGERDPKVLADMARSRMRTKIGQLEEAFTGYFDDHHRFLLARMLGRIDSIDADIDALDTEIEAYLAPFGDAATRLDEMPGIGPTAAAIIVAEIGLDMTRFPTPAHLASWAKFAPEIKSSAGKNKGNGSTGHGNRYLARVLGEAAVAASRTETFLGARYRRIARRRGKKKAIVAVGRSLLVAIWHVLSDPENRFVDLGADHFDRHVDTATKKRNHIRQLEALGYTVTVQPAA

SEQ ID NO: 439522 - protein, 343 aa, unidentified
MSIVGGLDIHRKQITFDYVDTETGEARRGQVCPADREHLAKWLARFAGQDAHFALEGCTGWRYVAEEIIAAGLTPHLADPAETAHLRGPKRRAKTDRADARHQRVLLEQGRLPECWIPPSHVLECRALLETYLDLREQRTGWVQRIHAVLFHHGAPHIAGQRLGTAEGAAALQAAAARCSPAGQLQLAIAAQMLLVYDERLHQVRRQLLDQARHLRGAAELTARLYGVGPITGLAITCWLGGAGRFSSARKAVRFAGLDITVYSSDGKRSPGRLSRQGPPVLRWCLYEAGKAHARTGAPDHAYYAQVKERIDGKRAALSEARKIIRQAAHILTGLGDDALAAC

SEQ ID NO: 439523 - protein, 378 aa, unidentified
MHKIRFVGLDVHAETVAVAVAEPDGEVRSLGMIPNRPEAIRRLVRKLEPVEQLRFCYEAGPTGYVLYWQLTALGAKCEVVAPSLVPHKPGDRVKTDRRDALKLARCYRAGDLTPVWVPDAAHEALRDLVRAREAARGDLLRARHRLGKFLLRHGWRRPDSIKSPWTNAHLEWIKTKVHFEQPAQEIALSDYVHQVEHLVARIERLDQAVLEAARSVPPPMRAVIESLQALRGVAQVTAVTIVAELGEISRFAKARQLMGYSGLVPSEDSSGERQRRGAITKTGNAHLRRVIVEAAWAYQFRPWLGGYLLKRQVGLSEEVKEIAWKAQHRLHARYRKLLAQGKNKPQIVTAVGRELLGFVWAIGVNVETKMREQKQVAA

SEQ ID NO: 439524 - protein, 323 aa, unidentified
MIEAVKKCVAGLDVHKKTVMCTILTERRGGDLKKATREFSTFRDDLNRLAKLLYTSEVELAVMESTGIYWRCVYEEIEEMGIPCYVVNARHIKNVPGRKSDVSDSEWLAELARCGLLRPSFVPPKDFREIRMLTRYRKKVIGMLGSEKNRIHKILESAGIKLGAVVSDIDGVSAREMIAAIIEESHTSEQIAHMARGRLKSKEADLVKSLQGRLSDRHRFLLKKIQKHIQWLENHISEIDRQVEKAMIPYKEQWQLLQTIPGVDKTSAAMLLAEIGVNMDCFGNKDRLSSWAGMCPGNNQSAGKKKVVAQGTATNLSNQCCVK

SEQ ID NO: 439525 - protein, 347 aa, unidentified
MRFYTNQHRYYCGIDLHARSMYVCILDPQGQILLHRNMPCAPESFLKAIAPYREDIAVAAECIFTWYWLADLCSKQNIPFVLGHALYMKAIHGGKAKNDKIDAHKIAVLLRGGMLPMAYVYPPEMRATRDLLRRRMYLMRKRSELLAHVQNTNSQYNLPEIGKRIAYKANREGVAERFSDPSVQRSIEVDLKLMDHYDQLLTDLELYIVRTAKQQDAYAFYRLRSVPGIGKILALVILYEIHDINRFPTVQDFVSYSRLVKCAKESAGKRHGTSGKKIGNVHLKWAFSEASVLFLRANPKGQRFVEKLSSKHGKAKALSILAHKLGRAVYYMLSRKQAFDMNKFFSS

SEQ ID NO: 439526 - protein, 454 aa, unidentified
MDIGLSARTISWPPLRPAWMRCERESVGVVLPACLPSVEGGVHTKLLGLDVHREFTYVVMLERERLTHLGRIPTTPEALRSLAARLGPEDHVVLEATVNTYAIVQLLRQHAGRVVVSNPVQTRAIADAKIKSDKVDAEVLVRLLAGGWLPEVWVPDPKTQALRQQVAHRADLVQQQTRLKNRIQSVLHRNLVPGCPRSDLFGKAGRAWLMQHALPQLPTHEQAMIHATLRELAVVQGERGQAERTLAEIALAQPAVRRLMTIPGIDAVTALAVLAAIGDIHRFHAPSKLVGYLGLDPRVRQSGTRLATTGHISKRGRAHARGLLVEAAWAAVKTPGPLRAFYHRLRSRRGAQIAAVATARKIAVLAWHLLTRDEDYTFARPSLMTRKWRALELHAGRPARRGQLGMAHAYNVKAARRQELELCTQAERVYVALTHQWQHKRTQQDAGATNGKRL

SEQ ID NO: 439527 - protein, 463 aa, unidentified
MPRTPRRPARRRPVRLPPELRSVNLHAAGIDIGAASHFVAVPEGRDADGRTVREFATFTADLYALATWLTACGIETVAMESTGIYWIPLFEVLSARGFDVKLVDPRQLKHVPGRKTDVLDCQWLQQLHTFGLLAAAFRPDDAICVLRGYLRQRAMLVTCAAQHIQHMQKALEQMNVKLPEVVTDVTGVTGMAIIRAILAGERKPETLATLRDRRCHHDQATIARALEGTWREEHLFALRQAVDLFDVYQSKIADCDRTIESCLHGFADRSDGDALPSIPRSSKRPRNAPAFDARTHLHRLTGVDLTRVDGIDAHSALKVVAEIGLDMSRWPTEKHFASWLSVSPGNKISGGKLLTSRTKHSANRVAAVLRMAASTLHQSRSALGAFFRRLKARLGAPKAITATAHKLACLIYNMLKHGTEYVDQGQQYYEHRYQQRVLSTLSRRAQELGYHLVKAPDATPLPA

SEQ ID NO: 439528 - protein, 331 aa, unidentified
MEFKIYVGIDVSKLKLDVFIRENQVHKLFKNDLNGFDLLLRWLQEQTRQPLQSMLVCFEHTGLYSMSLAIFLEDRKIPFSMIPALEIKKSMGITRGKNDLIDSKRIAEFAYRFRDKISLTKLPAAGIRKIHSLLTLRDRMVTHMRGYALSRNEALRTMKKEDFTELFSAYEQMIVTLKEEVKKLEKAIRTVIRDNKELRTSFELITSVKGIGFVVGSYLIVYTHNFTRFSNWRKFACYCGIAPFDYQSGTSVRGKTQVSSIANQQMKKLLHLSAICAIHTDAELKEYYQRRLAEGKARMAVVNVIRNKLVARIFAVVKRGTPFVDIKKYIA

SEQ ID NO: 439529 - protein, 412 aa, unidentified
MLFAGDDWAEDHHDVEIQDETGRKLAARRLPEGAAGIAALHELIAGHLGQNGDPGQVVVAIETDRGLWVQALVAAGYQVYGLNPKQVARFKERYNLSGAKSDAADAHALADMVRTERHQLRAVAADTPEAEAIKVVARAHQTLVWERTRHTLRLRSALLEFFPALVAYAGLGLTGADTLELLVKAPDPASAARLSAAQITAALKRARRRDVAVKAEAIKAALRVRHLIQPVAITAAYAAAIRATASVLITLNEQISELEGQVEAHFRQHPDAAIYLSQPGIGTINGARVLAEFGDADGRYASARARKNYAGSSPITRASGRSKIVLARFVRNDRLADALQSQALSALTGSPGARAYYDKQRERGLGHNAALRQVSNRLVGILHGCLKTCTLYDEATAWPDHHATQHASRLAA

SEQ ID NO: 439530 - protein, 345 aa, unidentified
MTEAYDGRQVVGMDLHRRRSVLVRMTEDGRKLETVRIENSPAALRAVIARAGEHPRVVVEATYGWYWAVDVLEAAGAEVHLAHPLGVKAFSYRRVKNDERDCTDLADLLRMGKLPEAWIAPPAVRELREVTRYRHKLVGQRTSCKDQVHAVLAKAGIPVTRTDIFGSGGGIWLDGLPLPQPYAGKIASLRALISVLDGEISRLEEQAAAMLAGDRGYAAIRQLPGIGPVLGAVICAEIGDITRFRNPGQLASWAGLTPRHYESDTRVIRGHVSKQGSRMLRWALVEAIQRAPAGTRPGLVKDAILARRGDDARGIAKTAAARTLLTQVFYAMRDGYLRRATSPAA

SEQ ID NO: 439531 - protein, 428 aa, unidentified
MNCNTQNAKIASITEKTLIVGIDVGSETHYARAFDWRNYEYTKKPLEFSNTEAGFQTFKAWMEDMAEKHGKTAVIPGMEPTGHYWFALGKFLQDNGMKPVHVNPHHVKKSKELDDNNPNKNDRKDPKTIAALVNEGRFSYPYIPTGIYAEIRSLSNLRFQTQEELTRIKNRIARWFSIYFPEYKDVYGDLKAVSGRMVLKAAPLPEDIQKLGAEGVNQIWRDAKLRGAGMKRAKTLVSAAEHSVGSKEAPEAARIELGNLLNDMDVYVLRLEELLRGIEKKLKEIPYVDKLMGIKGIGLATVSGFIAEVGDIGRFDNPKQLQKLAGYAIVSNDSGKHNGESRISYRGRKRLRYVLYEAAISLIGKNHEFKEIHEYYRTREKNPLKKMQSVIAVACKIIRVFYTILTKGVDYDGNRLLGDIRRPQVQAA

SEQ ID NO: 439532 - protein, 481 aa, unidentified
MKICSNGGVTVVAGLKVDSLWRFQPAVQSGLGVAANPGLLPPSVGEHAGQVVFPFDTPRPPLPCGGCTMDIIYPRVGGLDLHKKTILASARRINQQGKLEEETRSFGTMTRDLLQMADWLAAHGVTHVAMEATGVLWKPVWNILEGNFELLLVNPRELKQVPGRKSDVKDCQWIAQLMQYGLLRNSFVPARPQRELRDLTRHRAQLQGERTRVVNRIHKTLEDSNVKLGSVASDIVGVSGRQMLEELVNGQVDPAKIAKLAQGRMRRKIPELELALQGHLTDHHRFMLKQLLSHLDQLDQQIGQFNQRIEEMVTPFVDEELKEKLDAIPGVNRTTIENVVAEIGTDMSQFPTAAHLASWAGICPGNEESAGKRKRTKITRGNRWLRRALSEAAWAATHTKGSYLAAQYRRLAGRRGKKRALIAVAHTLLLIIYHLIKHRTDYQDLGEDYFLRREPERLRRYLVKRLEQLGYDVKLTGPEAA

SEQ ID NO: 439533 - protein, 463 aa, unidentified
MQTRPLGAVAGFASVSGSSAHQRVERRDEVPTRPAMPQGSGLQGATLAHVTTSTIDPTLTEAAATEVFAGIDWGGSFHQICLIDEDGKVLRQQRVPHDAAGFDELDRLLTCHRARLRVAIERAEGLLVEHLHLLGVEIFCVSPKISARARERYRMAAAKSDAFDAFVLADTLRHEHRHWRALTPPSPVLAELRAISRDRDRIVIAQQATENRLRAVLEAYHPAPLHLFSTLDRDITLDFITDYPTPEQAGRVGTARMDGFCRRHGYSGRTQPEVLVERLRPHLLSAGEGTVAGKAFSASLFTEQLRMLNTHLRAYDKRLDELLERHPDTPIFTSFPGVGPVVAATLISEMGDDRHRFPAPGALLAEAGLSPVTRASGRTRQVRFRYASNRRMRHMIDWWMFTAIREDDWTRQAYDHARARGQGKYRALRGLGSRWTRILWRCWTDHTRYDPAIHHRNPEPTTA

SEQ ID NO: 439534 - protein, 344 aa, unidentified
MQITTIGIDLAKNVFQVHGANERGKTVLRKQLRREQVAAFFANLPSCLIGMEACGSAHHWARKLQAFGHTVRLMAPQFVKPYVKSNKNDAADAEAICEAVTRPTMRFVPIKNVEQQTVLSLHRVRQGFIRARTAQANQIRGLLGEYGVVVPQGISNISLRVPDLIEDATNDMPGAFRQLIERLLEHLKLLDQQVGEIEMQIKAWHRDDEISRRLEQVPGIGPITASALAATVGDARNFDNGRQLAAWLGLVPRQHSSGGKAKLLGMSKRGDAYLRTLLIHGARSVIYRATQRNDSDNLLVKLTARRNANVAAVAQANKTARIVWALLVHNREFRAGYTPAMAAA

SEQ ID NO: 439535 - protein, 397 aa, unidentified
MFYLGIDIAKHKHYASIIDSTGKPITKPFPFHNHKEGGQALLTWLYQYISSPTELSIGMEATGHYWIAVYSFLLDHGFSVIVLNPLQTNAWRKGTEIRKRKTDAIDATMIADVIRFGRFLETPLVDEKMFALKQLSRFRNSLVRNISDLKRKALVVLDQTFPEYQSIFSNVFGKTSSQLLIEYTSPSDYERLSIDDLTLIIEKASRCRLGKKTANQLMELASNSFGVTFCKDAFSFQLKMLMEQIRFIETQLRECENQMSQLLSDLDTPITTIPGIGPILGATILSEIGDIDRFDKPSKLVAYAGIDATISQSGQYESTGMSMSKRGSSHLRRALFQAAITAYKHDPVLKAFYEKKRNQGKHYYVCIGAVARKLCYIVYAILKSNKPYKIPPFPCQR

SEQ ID NO: 439536 - protein, 344 aa, unidentified
MSKVITIGLDIAKNVFHAHGADERGAMVFSRKLTRGKLLEFFAGQPPCTVALEACGGAHHWARQLQALGHDVRLIPPAYVKPFVKRNKNDAVDAEAICEAAQRPGMRFVAIKTEEQQAAGLVFRTRDLVVRQRTQLINAIRGHLAEYGWVAPRGTASMAMLADLLEDGDMASSLPEAARPMFKLMIDLLAELDEQIATLDREIARRAKEDEAARRLMAIPGIGPIAATAIIALAPPIETFRKGRDFAAWLGLAPRQHSTGGKQRLGSITKMGERTIRRLLIMGASSVVLQASRRGAPGGSWLERMLARKPRMLVSVALANKMARMVWALLTKREDYRAPAAVSA

SEQ ID NO: 439537 - protein, 411 aa, unidentified
MATMFCGIDWGESRHDVAIIDQAGNVLGRAKITDDAAGFSELLTLLAEAGDCEDEQIPVAIEKDHGLLVSALRSTGRAIFPLNPLAASRYRARHQVSGAKSDATDAVLLANILRTDLAAHRPLPADTELAQAIRVLARAQQDMAWTRQRIGNQIRSLLKEFYPAALDAFVPLARGGLAHPEARIILAVAPTPAKAARLTRARLRTLLAKAGRQRRINTEADRLFEALRGKYLRHPAVVEDAMGIQLTALLTHFDAVCRASDDLEVAAREHFERHPAAPVINSFPGMGTLLGARVLAEIGDDRARFAAARGLKAFAGSAPVTRASGKKTVVTYRRIKNNRLAAVGTIWALSALSVSPGAKRHYDARRERGDWNRQAQRHLFNKFLGQLHHCLQSGATYDETHAFPPPLDIAA

SEQ ID NO: 439538 - protein, 345 aa, unidentified
MESMYYIGLDVHKKTISYCVKNRSGQVLQEGRIGATRGELDSWMKTLPQPWSVAMEATIFTGWIYDHLLPHAAKIKVAHPLMLRAIAAAKKKNDRIDAGKIADGLRCDLLPECHMAPTEIRDRRRTLRFRHLLVRQRVQMKNRVSGLLTETGVSYSKQRLHKVGYFRELLSSNEEIHSNIRPLLKLSRDAIVRLQKTEYALVSSLQRDPLLADRIKRLRTVPGVGPITALTWALEMGEVSRFPSIKQAISYCGLCGDEKSSADKVIRTPLSKQRNKHIQRVLVEAAKLAPRENHELALVYETEKQKGNANRATLAVARKMVAYLLAVDRGKRDFVPAEDHRGMAA

SEQ ID NO: 439539 - protein, 331 aa, unidentified
MKNFFIGADVSKKTLDCVLYDTNNEKMRASYIKINNNKIGLENLIKWMKEHKVVKNQALVCMEYTGKYSFDFAELLEKKKIDFVLVPALKIKGSFAGARGKNDKVDAERIATYAYRYRDELVPTSLKDDKIVRLRDLMNDRKLAVKHAAAYKTIMTEYKEKKSALRYKRAERIVAEYKKQIAAIEKEIKEVINSDEKMNKNYELLTSIPGISLVNAVNLIVFTGNFSFFADARKFASYSGVAPFEYSSGTSVNKGTHVSKMANKMLKADLSQAAKSAINFDPWLKEYYERKRKEGKSYGCVLNAVKFKLIERVFAVVKRGTPYVNTMKYSA

SEQ ID NO: 439540 - protein, 402 aa, unidentified
MNAVGIDVSKSKSVVAIMRPFGEIVSTPFEIKHTASDIHSLIELINSVEGESRIVMEHTGRYYEVLAHQLLEANLFVSAINPKLIKDFDNDSLRKVKSDKADAVKIARYALDKWQNLKQYNVMDELRNQLKTMNRQFGFYMKHKTAMKNNLIGILDQTYPGVNTYFDSPARSDGSQKWVDFASTYWHVDCVRKMSLNAFIDHYQNWCKRKKYNFSQSKAEEIYGKAKELVPVLPKDAITKLIIKQAVDQLNSASTTVESLRTLMNETASKLPEYPVVMAMKGVGTSLGPQLMAEIGNVSRFTHKSAITAFAGVDPGVNESGTYEQKSVPTSKRGSADLRKTLFQVMDVLIKTHPEDDPVYQFLDKKRAQGKPYYVYMTAGANKFLRIYYGRVKEYLASLPES

SEQ ID NO: 439541 - protein, 352 aa, unidentified
MRCPKHQVTSEEDLFVGIDLHKNRWHVTIRTVDLELFSASIPGTWEALHRVLGRYPGHPLQAVYEAGYFGFRLHDRLVDHGIPCIVTPPSLVPQEYGNRVKTDRRDSSKLARLLAKGMLKRVWVPSEEELYHRQVVRRRRQLVRDRVRTQSRIKAELRFYGIQLEEPRGRWTQIYFETLRSIRFGNRWMQESFNRLLEQYEFLSAQVDKQTQLLRELSETARYRERVEILLSVPGIGVISAMELLLELQDVARFRRAEQLAAYVGLTPSQYSSADKVRMGRITGIGKNTLRSILVEASWKLITKDQVMREKYERIKIRSGGKRAIVAIARTLLLRMRRMLLDGRAYALPLAA

SEQ ID NO: 439542 - protein, 410 aa, unidentified
MKEVYRRCCGMDVHKETIVVCVLPPVGGEGKAVRKRYGTFRNELIRMRIWLKQLKVTEIATESTGVYWRPVWNVFEEEGFRLLLVNPAQVKALAGRKSDGRDAQRIAEYLQDGRLDASFVPAAEIRQLRAMLRHRVSLPEQRNEVHNHIRDLFETASIKLSSVVSDLMGVTGRGIVEALIAGEDSADRLSWKVRGSLRKKEKEVKESLKGYFNEFHRSMLESHYRHYQFLTKEIAAFEERIAQAMEPYAAKVELLITIPGIDRMVAWHLLAEPGIDLTAFPDAAHCCSWAGMVPGENESAGKQKSSRCRKGNKTLRRVLTQAAWAVSHTKKGYLRAFFHRVKARRGWARSIVATGHKILTIAFQVLKTKTPYKEPGNDYFDRIDPARAIKKYIQKIEALGPRVQLLPAQG

SEQ ID NO: 439543 - protein, 350 aa, unidentified
MQIVGCDFHPRWQQVSFLDQETGEYREAKLVNGDGEAERFYRSLSPGALVGIESCGNAQWFIDLLSSLGHTVWVGDAAKIRASYVRKQKTDRRDADHILKLLVEDRFPRLWTPSAEQRDLRQLLIHRHKLVEIRTRVKNGLQHLAMNRGVQKQSRLWSVRGRAELEKLPLEGWSARRREDLLELMKGLDRQIKELDEAVVQAAREDAKAELLMSQPGVGPITAMAFVLTIGDVSRFEYSGKVASYLGLIPSEYTSGGKRKLGATSKQGNRFMRQLLVEAAQTACRLDEGFRKQYQARCHHKPKAVAKVAAARRLAVRLYWMLRLNKRYPEIAHIESSSGVPLAIHGRDVE

SEQ ID NO: 439544 - protein, 388 aa, unidentified
MYLVGIDIAKYNHQCFIATTHGEVINEFSFDNNSDGFKLLLKHLSALDQSLEIKIGLEATGHYGNTLKQLLSANGYTFIEFNPYLAKQFFKFTTIRKTKTDKVDARLLSSMLASVDYKTLHTKYYHTNELKSLTRTRNSLIETRSNTLVQITNALDIVFPEFKAHFSTRLGLTALYILKKYKTPEKISKLTKNQFQTISNKSMGKFTYPKFLKLKDLAKNTIGIKSNSITTVMIIHIDLFHSINTNIEILENEIKKIMILTNCKMITIPGISLMSAATIFGEVMDFNNFSNPAKLIAFSGFDIAIYQSGESLSYGKLVKRGSSLLRKTIWNLVLGSIRLIPEITEYYHKKRAEGKHRNVIFSAISRKLLRIIYHLETNNVSYDKNKIR

SEQ ID NO: 439545 - protein, 451 aa, unidentified
MSKDRTRSKPSGLPIIHPFAAGIDIGSRFHVVAVSPDLCDEPVQTFQAFTGDLQRMADWLVATGTKTVVMESTGVYWVAAYEVLESRGLEVILVNAREARAVPGRKSDVNDAQWLQRLHACGLLRASFRPGRDIAELRAYLRCREKHTDYAAAHIQHMQKALTFMNIQLHHVIATITGVTGLRIIRAIVAGERDPGRLAAMRDVRCKESLETIRNALVGNYQPEHVFALKQALALYDFYQQCIDECDVEIERAVAILNIAHSFPEAPLPKAKHRNKMPSDPNFDVRTAMYQLAGTDLTQIHGIGPFLALRLIGECGTDLSRWSTAKHFTSWLTLSPGCKISGGKVLSSHTRKTSSRITVALRLAAVAVGRSNTALGAFYRRLAGRIGNAKAVTATARKIAVLFYNAMRYGMDYRDPGADHYEQQYRDRVIKQLHRRAAQFGYSLQPQDSPA

SEQ ID NO: 439546 - protein, 339 aa, unidentified
MSVKTVGLDLAKDVFQVHGISENGRVIFNKAIKRAKLLAFFENLPPCIVGMEACGSSHHWGRTLRKLGHDVRLMPANYVKPYVKRGKTDAVDAEAICEAVRRPTMRFVEIKTEDQQAVLSIHRTRDLAVRQRTQMANMIRSLLREFGHILPLGVEAVTAFSKRHLDGDQPDMPDIANGMLEMQCYQFIGLSERIAGYTKMIEQHALLSTDARRLMGMPGIGPITASAIVATIGDAHQFQTGRDLAAWLGLTPLNKSSGGKERLGKITKKGDRYIRKLLVVGMTSRAVMAKRSPEKVDLWTAKIIADKPFRLATTAMANKAARIIWAMLTKKQEYRQPTF

SEQ ID NO: 439547 - protein, 375 aa, unidentified
MPRMPQAPEPSHAHVDPTVVDPTGVDPDEVVLGVDTHKDVHVAAVINVLGVLQGTRSFPTTAAGYQQMLRWATGFGTLRRAGVECTGSYGAALARHLVGEQIEVIEVNQPDKATRRRRGKTDTVDAEAAAHAVLSGRASASAKAGNGPVEMVRIFKLAKASAIKSRTQAINQLKAVLVGADPQLRDSLSGLSNPTLIRRCAQLDAGTPRDATTAAAYTLALLARRILELTTEIDDLNRQITDTLSTHAPQLLERNGVGPDTAAALLITAGDNPERLHNEASFAALCGVSPVEVSSGKTQRRRLNRGGDRRANSALHTIVLSRLRWDPNTRAYLARRIANGKTRREAVRCLKRYVAREIYQLIAQPTEPTQCARAA

SEQ ID NO: 439548 - protein, 346 aa, unidentified
MKVLIGVDPHKASVAIAVVDEAVGELIERATFPQNRAGLRSLERWAKRFPERRWAVENAGGLGRHLALRLAMAGESVVDVPPKLSARVRVLSTGNARKNDGLDALATALAASRHERLSALDPEAVSEVLRLLSERREDVVAERTRALNRLHGLLRDLVPGGVAGTLSAHRAARILRGIRPQGASARLRRRLASEILRDVRTLDRKIADLNERIEAEVEASGTTLTEIFGVGPILAAKIIGTVGNVARFPTKAHFASYSGTAPVEASSGEVVRHRLSLAGNRKLNNALHMVAICQARSDARGEAYYRKKIAEGKSRKEALRCLKRRISDAVFKSLMADSQAPSRSAA

SEQ ID NO: 439549 - protein, 467 aa, unidentified
MVCFNPSTKLTRVRPAELIVARWKQLSTRRKFVSYFAPLVDLSEDEERLLREVGTGMQVVHERCCGLDVHKKTVVACILITLANGEVQRHIRTFSTMTAGLLALSDWLESLTVTVIAMESTGIYWRPVFNLLEDGRTVILVNAQHRKAIPGRKTDIKDSEWLADLLRHGLLKASFIPPAPIRELRDLTRYRKSLVQERAREVNRVQKVLETANIKLSSVATDVLGKSGRDMLSALIEGTTDVEILAELARGKLRKQLPQLQQALDGRVQAHHRLLLKHLLAHIIFLEETLEQLQQEIEQHLCPFEETMTLLMSIPGIAALAAAAILAEIGDDMTRFPSAKHLASWAGVCPGNKQSGGKRLSGKTTQGNATLRAMLAEVVWVLSHMKDNYLSAQYHRLARRLGKKKAVVAVSHSLLVIIYHVLSTKQPYSDLGADYFEQRDSARLTQRSVRQLEALGYTVTLVPKEVA

SEQ ID NO: 439550 - protein, 349 aa, unidentified
MEIDTIGIDLGKTVFHLVGLNVAGEVVVRRKFSRLQLLRFTANLRVRLVGMEACGGSHFLGRSLREQGHEVRLMPAQYVKPYVKTNKNDYIDAEAIAEAAGRANMRFVPIKSDDQLDMQSLHRVRDRWVARRTSVINQIRGLLLERGITFRKGRRHAEAGLPAILEDADNRLSGLLRMLLAQLQGELRQLQSQIDEADTLIAKRASEHGPCRRLMAIPGIGPLTATAVAASIGNGSEFRKGRSFAAWLGLVPKQQSTGGRQKLLSISKRGNHYLRRLFVSGARAVLQCRDKQSPGLSAWLGQLASRVHTNVAAVALANKMARVAWAVLAKSEIYRPPLAVIATEALVCN

SEQ ID NO: 439551 - protein, 436 aa, unidentified
MQVNTSDARVSIGIDAAVVAAHQVAVRGEVREDFKIRPTLAGLAELTKRLGPYVGAMVVAEPTAGTWLPLAHAVVDAGCAIGFVANRDSARLRKAIVGASKTDVIDADMLAHCEEVLGVVPAPIPPSEQIALRRAMRRRHIATVDAHRVECRLWALAAWSFPDLWRATGGHTLAQPLLGRWPHLERLSRARLSSITDIVAAHSRDLDPKRRAERIRETASGWARFWDGRLDLDALAWEVTAMLGDIAAADQRQANATGHAIGLWQRHWPDDPLTSIPGLGPVCSSAIRGWWGDATQFPTAKAAVAHTGLNPSMWSSGLTESPSRRITKQGPAELRLALYQAANVARRHDPQLAAHYRRLMVERGHNHISANTAIARKLACRAWAIATTGRSYQPRDLDGNPISYNQATALAVELAIDDDIRAQRRGHSRRGRLNPT

SEQ ID NO: 439552 - protein, 349 aa, unidentified
MKSIGYIGLDIHKKVIAFCIKINSGAVIEEGKIDATRSALTTWVARIDRPWIGAMEATLFTGWIYDFLKPHAQELKVAHPKMLKAISASKKKNDRVDAAKIADLLRCDLLPECHMADKQTRELRRALRYRNLVVRQAVLMKNKMAGLLMEVGAEYNKDKLHGKGYFDNLITTVEEVPESVIDLLKTSRASLEMFQAVEKRLRNALKNHPALRERVERLSSISGVGDMTALTWALEIGDVSRFSSRRKVISYCGLCSAQKESAGKSYRSPLSKDRNKHLQTVLIEAAKIAPRWNPELAALYERELARGNRNRATLAVARKLAVWLLAVDRKNEPFQTRTKEDKTAKQQAA

SEQ ID NO: 439553 - protein, 392 aa, unidentified
MLFVGIDIAKRNHEASVIAQDGSVVRKAMRFANSQAGYNKFMDMVRSLKEPVVFGMEATGHYWLTLYTHLRNDGFTVHVINPIQSDALRGMYIRKTKTDSVDSVIIADVIRFGRYCETSVEPGDLQAMRELCRQRFYIIDMASDLKRKVIALLDQVFPEYEKLFSDTFGASSMEILSQYTTPEEMLSVSSQQLAEILEKASRGRLGAEKAVEIQNAARNSFGIVMASCSFSLIIRQYIEQIRSLEASVDVFNAEIARLLSGFDTQLTTITGVGPTLAAVILSEIGGDIRRFSSPAKLAAYAGVDPTVKQSGDFSGSRMKMSKRGSPYLRRAIWLASTVAAFKDPAIHALYERKRAEGKDHMTVIGHICRKMISIIFAVLRDNTPYVPAAISD

SEQ ID NO: 439554 - protein, 309 aa, unidentified
MKEELVYLGVDIAKAYLDTAMGNEKSRFSNDALGHRQLINWIKQMPANVQVICEPSGGYERALVRALVGAQLKISLVPANRVRQFARAKGILAKTDRIDAKLLCAFGEAMQPGTINASQLEQQHLRELESQRRHLTHLLVMEQNRAARMSDLCVCKMNRRLITQIKKQIEQLERLIQGQIKASPELSTKAEKLTAISGVGARTAALLLAQLPELGQLNRREVAALVGVAPFNRDSGRMRGKRAIYGGRKPVRHGLYMAALVAAHHNPILRNFYLRLRAAGKPAKLALTATMRKLLIVLNSALKTDLNYA

SEQ ID NO: 439555 - protein, 380 aa, unidentified
MEKVCGLDVHKDSVFACILDEQGKKILEKRYRTLTPDLTTLREALIEQGCGSVAMESTSIYWIPVWHVLESDFSLKLANPYFIKQLPGRKSDVKDAQWIAECLQKDLIKGSFVPEGILQQMRQVSRQLRRLSKSITRVKQQIDNQLQRCNIRFSNYVSNQGNNVSLRKIVDALIAGERDPSRLVRLVHGRTKNKHGHQVIAASMEGVINPTDIEMLKGCMEQINLFEKQQAACLNHLEELADAYFAGEISLLCTIPGIQKYSAMCILSEIGNDMSVFGKASHLVGWAGLRPRNDESAGKIQSRKTMHGNKYLRQMLVEVSWSAARSKKTFLGKKYYLLSKRMKSQKALLSITRKILVIIFNVLQTGQPFDANRNLQDVKA

SEQ ID NO: 439556 - protein, 387 aa, unidentified
MIYYVGIDISKYKHDFCIISNAGELIVENSSFQNNKIGFQSLLEQLKPYNKSDIHIAFEATGHYSLNLELFLVNNGFSFMKVNPLIIHQFLKTRSLRRTKTDKADSLTIANYLMSVPYKPNSDLLYTIFTLKSLCRARENLIKERSKFAVLLTNELDKSFPELKPFFNNMISTTLLYILEKYTNTKHIAAMKDYESIRKLSHGKFTYAKFARLKELAKNSVGFYNENTDLLISTYVSIYNDFNNKINPIDKQISTIIKVLNPRMLTIPGIGEISAATILSEYGDIKNFSNPNKMLAFAGLDPSINQSGTLEYNGKMVKHGSGHLRYAIMNSAMSILRFSPDFYDYYLKKRSEGKCHRVALSHVCKKLIRVIYSLEKNNIDFDPSLLK

SEQ ID NO: 439557 - protein, 360 aa, unidentified
MSTYYIGADVHSNSTELAIEKRGKIVARYSVPTNIPAIINVLDSLQGKKYLAVEEGPMSSWLYRNLNKKLDGFISSDPRRNKLIASDGDKDDKIDAAKLAALLRGGFLRAVYQSDDDGRVQLKQWVSLYHDRVRDAVRGINKIRARCRMHGVKIPRAALRDPDSRPKWLSEINHKALANQLIMLWIGYDATAQQVKFAKRQLSILSKKYEMVQFFSQLPGIGLIRATTIFAYLDTPWRFKKKNKLWKYCGVGLQRTTSGTDKKGRPKPARLKLPWAVNRTLKNAVLGAALSAINQKDNAFKDYYERMVQNGMITSNARHAVARKMMTVMWAMWKTSSRFNEKIITADAISNISAVSALQR

SEQ ID NO: 439558 - protein, 312 aa, unidentified
METKFVGIDVSKSVLDFDCLPVSATRQFSNDAEGIAALVNLLKDSGVDRIVIEATGGYETAVGSALAVAGLPVVVVNPKQVRDFAKAMGHFAKTDRLDAKVLALFGERIKPPLRKLPDEAQRALADVLGRRSQLVVMRAQEKARLAMVTTVARKSVEQHIAWLDKCIAKLDVDLGDRLRKSPVWCSKATLLDSVPGVGNVTTFSLLAQLPELGTLNRQKIAALVGLAPFSDDSGKRKGVRYIRGGRADVRCALYMATLTAIKHNPPIKAMYDRLIKVGKPFKLDMTACMRKLLTILNAMLKTNQTWKIQPSS

SEQ ID NO: 439559 - protein, 339 aa, unidentified
MELCCGMDLHSTNTVVGIIDEKRKHLIDRKLPNDPELIRNFLKPYKTDLKGIVVESTYNWYWLADLLQEEGYRVHLSHPVANEQYNGLKHSNDKHEAFWLAELLNLGILKEGYIYPRQARSLRDVLRKRAHLVRVRTALLVSLQHMISRNYAVKVKTGDIKRLREDVVFPVLKNEEALLLAGTSSKEVIDCLTRQIDKIERWALKRLCREGVLTQLITLPGVGDILGMTILLETGPISRFREVGNYASYCRKVSSRWTSNDKVKGRGNIRNGNRYLAWAFSEAAEHARQTNEACRRFYDRKLRQTNTKVAHNALAHKLARAAYYIMKDHVSYQEEKMFS

SEQ ID NO: 439560 - protein, 346 aa, unidentified
MKILALDLGKYKTVGCAYESESGAHQFKRGCTTPAGLAKMVQEVKPDRVVIEVCSIAGWVCDLLWGLGIEVQVANTSDDAWRWRKVKQKDDRRDALKAARLSAVNQVREVYIPANEVRQWRALITYRQHLIRRRTKIKNHIRDLLLREGQILRRGSGCWSEAGLKQLEAQAQPFSECGPAELWRGELQLELEQLREMQRQLATVTAQLDKLGAGDARVQLLRTVPGVGPRLAEAIVALLDQPQRFRKASQVSGYIGMVPKALDSGETERRGHITRQGSRLVRSLLVEVAWAGLRHNAWVRQTYQRLSGGQKGRKKIAIVAVGRKLLVKCWAMLRDNRAWDWQPQIT

SEQ ID NO: 439561 - protein, 422 aa, unidentified
MTSPQPSPTEFAAYVGIDWANQKHTCSLRAADSQRIENYELDNTPEAVEKWAAELEQRFQGRPIAVALEQQRGALVALLSQYAHLVLHPVHPSTLDHYRKGFHPSGAKSDPADSDLLRDLLERHRDRLKPLKPDTEATRKLQFLVEGRRKLVDEKTGLSNRLTDTLKQIFPQVLRWFDDVASPLVGDLLRRWPTLPDLQKAKPATVRDFLHQHNCRSEERTEQRLQAIQPAVPATRDGALLQAGSLAVESLVRLIAGLRDSIGRYDKVIAEITKAHPDFPIFDSLPGAGAALAPRLIAAFGTDRDRFGNAADLQCFTGIAPVVQSSGSQRWTHWRWACPKFIRQSVQEWAQHSIPRSVWAGEYYQQQRDGGSSHHAAVRALAFKWLRILYRCWKDRKPYDEQIYLRSREKRLLPLPPTPATT

SEQ ID NO: 439562 - protein, 339 aa, unidentified
MVLYGGMDLHGDNVFCTVMDQEYRPVFERRLPNELPTILAALEPYRERLKGIAVESTYNWYWLVDGLQAQQYPARLANPARMQENIGLKSANDKTDARFLAKQVAMGVLPEGYIYPKEERSVRDLLRRRMRLVHMRTGEWLSLEGQVARHSGKDMGIQALNGLQDGELGQLLGNDPLVLQAAQINYRHIAFLDREIRQIEKAVEPRLKLTDGYERLLNVPGIGRILAMTIRLETGPIARFPGPGNYASYCRAVKTEHTSNERKKGEGNGKSGNRYLAWAYIEAANFAVRYSPELRAWYQRKAARTKRVVALKALANKLAKACYFILRDGVEFDVKKLVG

SEQ ID NO: 439563 - protein, 393 aa, unidentified
MNRSDPMTERFASHKPATAFDHDSTLVAAMELSGKSWELGAVVPGVARRPRRRVKVGDVGEVLAAIERWKGEAAKAGRAIVRVALAYEAGRDGFWIARYLIERGIEAHVMQPASIAVERRGRRAKTDRIDLDMLLRTLLAWLRGEPRVCSMVRVPSIEEEDSRRPGRERDHLVRERVAIENRITSLLSLHGIAGFKPRLKKAVERLERLRTAAGSPPPPRTMEELRRLMGRQRLLGEQIKQIEAARDAAARAPNPNREERMIQFLIAIAGLGVETATLLVCEVLCRPFRDRGAIACFVGLTGTPFQSGGMEREQGIAKTGNQHVRCILVQLAWRWLRFQPDSALSRWFVARVAGGKGRIRKIMIVALARKLLVALWRYVQTGLAPEGVALAAA

SEQ ID NO: 439564 - protein, 339 aa, unidentified
MVLHGGLDLHGDNVCCALMNTRYEVEFERRLPNHLPAILAALAPYRERIAGLAVESTYNWYWLVDGLQAQQYPMRLANPARMQENIGLKNANDKTDARFLAKQMVMGVLPEGYIYPKGQRSVRDLLRRRMRLVQVRTAEWLSLESLVARHSGRDLGIQALQGLEAGELSALLGEDPLVVEAAQLSYRHIAFLDREIRLIESTVEPRVKLSANYQRLLTVPGIGRILAMTIELETGPIGRFPGPGHYASYCRAVKAEYTSNNKKKGEGNSKNGNRYLAWAYIEAANFAVRFSPELRAWYQRKAARTKRVVALKALANKLAKACFFMLRDGVAFDVRRLVG

SEQ ID NO: 439565 - protein, 329 aa, unidentified
MQEGDGRIKAVGKMGHDGFGNWVEKKLKAGFELYSCYEAGASGYWLHRDLAELGVKNLVIAPKAMGQDKRQKTDRRDSSQLCDALDRYLRGNRTALSPVAVPTAEQEEKRALIRYHRQIMADRSRYEARGKGLLCAQGIEVGGKWWQPKTWKELKTHPRFKSWMEQALQAWRTKLLAAEVEQQDLRRKVEALAPALLPKGVGAYSAVALEYEMKGLARFKNAGQISSYTGLCPGIHSSDGRAKEGSINRCGNAAVRWNLVEMVWRLLKWQPDYQPMRQLAAELVKSKRAKKRLVVKAARHLAIDLWRLQTGRSTPEALGLIMQPTAKAK

SEQ ID NO: 439566 - protein, 320 aa, unidentified
MNPLGVDIAKRTFAVALLRDGKFKNKTFANTPHGFQALAGWLSSLDAGRVHVGLEATSTYGEALSEWLFAAGHRVSVINPAQIKAFGMSLGTRNKTDPDDARVIARFVLAQSPPEWIPAPPEVRQLREMVRRLDAVMAMREQETNRLETVSDPMVRRSIQEHIDFLDAQIKHLREDIDDHIDRHPGVREQHALIQSIPGIGSLTASRMIGLLPPLSGFRSARQLAAYAGLTPARRESGHSVRGHSALSKRGPADVRKALYMPALVARNRNPVIHAFCQRLAQAGKTPMQQIGAAMRKLLHLIFGVVKSGRPFDPNYLPGS

SEQ ID NO: 439567 - protein, 412 aa, unidentified
MELTPIYKRVIGLDVHQAKISACAVAEQADGTVTVESREFGGFKRDRRALAEWAKSFGPEVVVMESTGIYWKSPYAALESVGIAAWVVNARHVKTVPGRKTDVADAQWLATLARAGLLRASFIPQADIRYLRLIARQRQKLGGMLASEKNRLHKLLADAGIRLNVLVSDIHGHAGRAMVKALIAGKPIHEVLDLAGRLRASRAELFEALQPEELSRSHLFVLTEIMAHIEELESRMGRFELELLQGLSAWQPQLILLQTIPGIDIMGAAMLLVEISGDMQSFGSAERLASWVGICPGNNESAGKRKSGKTRKGNAWVRRLLCEFAQAAARSRCALKDKFAALSIRKGHKKSIVALAHKMLRIVFAVLKSSQPYHDRAVDYEALSVQRNAPRWMKMLIKHGFLEAGTSPVAAA

SEQ ID NO: 439568 - protein, 406 aa, unidentified
MKQFWGCDAHKKYSVFVAMDETGKKTKPTRVPHDLEAYRHFLTRLPEHSHIAIEATGHWYWIVDEMERARHIPHLTDALEAKKRVGKTHKSDPIDAGGLSLLLRCGTLPEVWIPPAPLRDQREMLRTRMALRDLRTALKHRIHAAIDRYNLYTTDISDLFGLRGREYLNNCLAKLPPVTASMIVVQLDALDQLEIKIEALEKRIRAEIASTPAVRRLMTLPGVADTLGPVIAFEIGDVARFSRAECLASYAGLVPRLISSGDRIHHGRTPERKINPFLKWAFVEAAVCSLHHTGPCYAHVKTLFARLIPTKGFGRAVVAMARHLAEASFWMLSKNQDYRPPQPPRLAPQQQATVHGDFVAGLKRSEQSGGNGGLRAFEGGDFLLSDRERGIAVTGVNVSFVFAFGP

SEQ ID NO: 439569 - protein, 473 aa, unidentified
MGKGSGNGTTRGDRRRNARRERLRELLPRDGAVIGIDLAEDKQAIAVIDHDVRVLARKTVKVKAFRLGEALDWAVGQARAKGFEHVAVACEPTGPRWLQVQRLCAERGLPLVCIQPLVSHIAREQQDYTTHKTDESDCVMIARLAVELHCYVPEELDETWAYLRQLGRRRAQLITAETASMHRIGDFLSVAWPTATETCAQPLKSVTWLAALQVVTSRCGGQPARLAGMGWQAFTAAVRAVVPEWGGKRDFRPIAVRVFDVLASTEGVVAWSRRGLLRRVADELGDLQRTRAQLRAVEADMAGVLDELGLSRLADIPALTAVGAAAILAEAGDPHRYDGSSSLVKHAGMSPSDNASGTFLGDAHISRRGRPGLRLTVWRAVWPMLQFNPVMAAKYQAMTQAAGAAEEQAGGTRSASAAAAAARARRARARVACAASLLRWIYSMVVHDTSWDAAVAAGEAACQHAPRCPAEAA

SEQ ID NO: 439570 - protein, 336 aa, unidentified
MRYIGLDVHKNNIAACVIADNGKPVKIIEIPNRSGLSEISGYMKNNNYCVMMESSTYVYDVYRYFESIGIEAHVAHAKGLRMITSSDKKTDKNDAETIGRYLRLWKKGELELSMAYIPTKEEAELKDICRLKEEISGKIGDEARRIKSHMFRNSESFPGGNDNLAVNKVRAGIADAYPNDQVLLSRLRYLEDLRKESFQISEMIMRMLPKDRNVEILVSVPGIARQTAVQIMSMIVDVKRFGDPEKMCSYFGLVPRVRNSGEKEYHGRMTKNGDKMMRAIMERVTLSHVLHCDSTITVFYKRKLPEMGQKKALISASRKMLTMIHSLLTNDKTFRA

SEQ ID NO: 439571 - protein, 391 aa, unidentified
MSLYFVGIDISKYKHDCCIISATDQKVISKFSIKNNKVGFEELITTFNSLSSPEDIRIGFESTAHYALNLELFLENAHHSFMEVNPVLIKEYKKSTTLRRTKTDSVDCESIARWLMTVEYKPHSKGFYHAYSLKSLTRLRDRLIRQRSFYLVKITNVLDHTFPEFKPFFNERLSKTALYLLENYGSAEKMARMNSVSYEKLRSISRGKFSPQQFIALKELAANTVGVNNSIFDVELNSLLTLYKTLVTEINTLEKEINLLIEEVHPHYLSVPGIGPISAAIIYSEYGDISNFDNPGQMLAFAGIEPGINESGTESHGGRMVKRGSSQLRYALINCCLPLIRFDMTFATYYAKKRAEGKPHRVAITHVAKKLIRVIYALERQDTDFCVQKLR

SEQ ID NO: 439572 - protein, 355 aa, unidentified
MRILSLDLSKYKTVACDYEAETGRHQFATVLTTPKGLHDLIVDRAPDRVVIEICSIAGWVCDLVRSLGIEMQVASTNDERWHWRKVKTKNDRRDGLKLAQLSARNELDLVHVPQSEMRQWRALIAYRQHLVQRRTKIKNHIRELLLREGQLLPRHRSAWTQDALAALEAMVKPLREVSMDELWRGELEVELAQFKAVQAQLTEVVAKLDALGAANHNVRLLQTASGVGPRLAEAVVTMFDDPRRFRRGAAVSAYIGMVPKQWDSGETERLGKITRHGNRLVRSLLVEVAWCALRHNPWARETYQRISGGKKSRKKIAIVAVGRKLLVRCWAMLRDQTAWHWEGQSAVVTPSAPTA

SEQ ID NO: 439573 - protein, 343 aa, unidentified
MYYIGLDVHKKTISYSVKDAAGCVHGEGKIGSTRPELDAWVRTLPQPRIIAMEATIFSGWIYDHLLEHADQVKVAHPLMLRAIAAAKKKNDRVDASKIADCLRCDFLPECHMASTAIRDRRRLLRYRRLVIRQAVQMKSRISGLLMETGVSYNKLRLHRMGYFEQLLKTNDEIPDSIRPLLRMSREHINRAIQLDRTLLKTLEQDPMLVDRLERLRTIPGVGPITALTWALEVGDTSRFRTIKQAVSYCGLCGDEKSSADKVMRTPISKKRNKHIQQVLVEAARLAPRYSQELALLYERERQRGHGGRATLAVARKMVAHMLAVERRGTGFIPAGEFSPAAAV

SEQ ID NO: 439574 - protein, 366 aa, unidentified
MKKIAYVGIDYHLNSLSIAVVLENSKKVHETIRLKNDDKMIAKYMKKLSKTFNIHACYEASCNCYAFQRKMISWGYHCDVIAPSLIPKKRGERRKNDRRDARNLAKLYANAMLTVVHPPGEEQESVRSLIRCRIVFKDSEKRVKQQINSLLLAQDLHWSLSKWTKSHRDWLCELDLHNKYLQQVLDEYLGHLEYLDTRIRYLDKQIDEIAKSELYAPSVKKLKAFKGIGTFTAMLLIAEITDFKRFPNPRALMAFLGLIPSENSSGDQQKGGSITKNGNHRCRKQLIESVQHYVKKPYMTVQMKDNIVQVDRRSATIATTCMKRLHKRYWALTMKGKIRPVALTAIAREFVGFIWAMMIQPEPATV

SEQ ID NO: 439575 - protein, 310 aa, unidentified
MTQPLVYLGLDVAKATLAGSLAGQSFALQNKPPDHAVLCARITAHGGPVQVICEATGGDERPVVDALRAAGLTVSVLHPTRARQLARGLGYLAKNDPLDAAALAKIGALLVPEPTLAPPEGVATLAALVGRREQLAELIRREKHHREMTVLAVLLRDVDQNLVALQKRLEKNETLIAKHLQTHRDLEQKAKRLQEAPGIGLVGAVTLLGLLPELGIGSQARISSLAGLAPRDHDSGTFHGARRVHGGRPKVRRILYLCALSAVRYHPRLKTFYTRLRAAGKAPKVALTAAARKLLTYLHAALKNPNFKLA

SEQ ID NO: 439576 - protein, 339 aa, unidentified
MKYTPVGVDIAKHLIQVHFINEHTGEVVDKQLRSKDFLTFFSNREPCLIGMEACGGSQHWARELKKLGHEVRLLQARFVKAFVMGNKNDVMDARAIWMAVQQPSKEIAVKTEEQQSVLVLHRSRRQLVKFRTAQINALHGTLLEFGETLHKGRAAMDRELPAALERMKTKLPPYLITVLEDQYTRLSELDMLIDDLEKQLNSVARQSETCKRLMEIPGVGPLIATAAVATMGKASAFKSGREFAAYVGLVPKQTGSGGKVRMLGISKRGDTYLRTLFIHGARSAALLTKEPDPWITELKKRRPTGVAIVAMANKLARTVWAIVAHDRKYDKNHVSIRPY

SEQ ID NO: 439577 - protein, 424 aa, unidentified
MMLKIVYPVCCGIDVHKKFVVATIATTNDKNVTSYQTRSFNTFKNDLIALNNWLVENKCKDICMESTGKYWIPVFNVLEDFCTITLANPRYVKNIPGKKTDKRDSIWLADLHKHALVKGSFIPPKPIRELRDLIRYRFKLTKVSSSEKNWVQNSLTVSNIMLANVVSDTFGKSASSIIKHMLENPDLTSFDYSSMLHKSLKKKADEIEQAVAGKFSKEQASKLSVCYEHFNSVEKCIETLEATILELSLPFKEQIDIIATLPGIKQASATAILSEIGTDMSVFTSDKHLCSWAGLTPQSNESAGKKKSVRISRAGVYIKPLLVQCANAAIKDKSCTVFKNRYEAIKKRRGHKRAIIAVARMMLTCIYHMLSKNEPFNPLLYDDNTKSKQRSKEDFQSIEQAILFLQTKGFTVNVSDLVAVKNQY

SEQ ID NO: 439578 - protein, 422 aa, unidentified
MKQTLDEERFAAFIGIDWADAKHDLCLQAFGCDKRESSILKNTPEAIEAWVSALRRRFGGKPIAICVELSKGPLVYALAEYDFVVLFPVIPLTVARFREAFATSRAKDDPSDAQLQLELLLKHLDRLKPLKPLSPAIRALEQLVEHRRRLVGDKVRLSNRLSSVLKNYFPQLLEWLKDRNTTLFCDFLTRWPTLKAVQQARSSTLERFFHAHHVRSATLIAKRIGAIKAAVALTTDEAVIAPNALLTQALVAQLRVVLSAIETFDEEIARCAQRHPDFALFDALPGAGPALAPRLLVAFGDQRERYACAADLQKYAGIAPVTERSGRHCSVHWRWRCPKFLRQTFVEWSAKSIHHSFWAQAYYQQKRTQGQSHQAAVRALAFKWIRILFRCWQDRRPYDESVYLRALQERGSPLLKDLPCST

SEQ ID NO: 439579 - protein, 311 aa, unidentified
MIVGVDLSKAHLDVARHEQAGTTRYANTEAGIEAFVQDLQAAPSRLVVAEATGGYEIALVRALQRADIPIAVVNPRQVRDLARARGKLAKTDAIDAKAIALFGAVMRPKPLPAPAPGREALAGLVARRRQLIDMMTAEKNRREHAEGVIREWIDENLAALKSQLANVDAAIALALEADAELTRRRDILVSVPGIATLTAAVIIAELPELGHIGAKQAAALVGVAPINRDSGQYRGERHIGGGRPSVRCALYMATLSAVRHEPTIKAFHHRLRQAGKKPRIALIAAERKLVSLINTLLERNQTWKPPQQHGC

SEQ ID NO: 439580 - protein, 403 aa, unidentified
MFYCGIDIAKYKHEATVIDQAGAAVQESISFANSKEGCEKLLALFQRLDISKEGLLIGMEATGHYWLSVYGYLLEQGFEVKVINPIQSEAFRKMYIRQTKNDRKDSFIIAQIMRFGQFSATNLAEEVIVAMRQLSRYRLALVDTCGDCKRRVIALLDQVFPEYDSLFSDTFGVTSKEVLSQYPTPEDMLTVSIRKLTTLLEKASHGRFGKEKAGQLKAAAASSFGVNFAKDAFAFQIRQLIEQLEFLEGQVAELEEQISSLLKQTGSYITTIPGIGDTLGAIILSEIGDIHRFDAPNKLVAFAGLDVRVTQSGEFTGTRQKISKRGSPYLRRAIWLAASKAAFCDPILSEYYQGLRARGKHHLTAVGAVSRKLCNTIYTILKEDRPWQPIPPKGKKVSNYTEE

SEQ ID NO: 439581 - protein, 374 aa, unidentified
MEERTQFFVGLDVHKDSISVAACEAGRTSARFVGVIRPDVRQLAKLLAKAGEPSHVSVVYEAGPTGFGLYRELRRRGYRCEIVAPSLIPQRAGDRIKNDRRDCCRLAELSRAGELKAIWVPDEVHESIRDLCRAREDAVQARLRARQQLKSFMLRHDRHYPGKTSWTKTHERWIADQRFDHAGETLALAEYLLAVEAAQQRVDRLTTALLQIVQSWRFAPVVAALRSLRGIDSVTAIGLIAEIGDFERFETARDLMGYIGLVPSEHSSGNSVRRGSITKTGNGHARRLLVEAAWNYRFAARMSTTLRNRSAELPAAIRDHAWKAQMRLNSRFAQLSSRGVHINKVCVAVARELAGFVWAIARQAQAAAPVASGA

SEQ ID NO: 439582 - protein, 311 aa, unidentified
MSGVNAAIDVGKLKLDIALGSDGELFSEPNQPRAVTRLAKRLTELGCARVLIEGGAYQNVLVGALRAAGLPVVIINPRRVREFAKSIGRLAKTDHLDARLLALYGERIQPPVRELPDEQNQVLRGLWVRREQLIEMLVMEENRLEHAPKALHRSLRAHIDYLRKQIKQADHDLDREVRNSALWEKYELLRSVPGVGPVLSIALLSDLPELGRLNRGEIAALAGVAPFNCDSGTLPGQRKIQGGRKRLRRVLYSATVASVRCNPVLRPFYQRLRATGKPAKVALVAAMRRLLLILNAMLKSKTIWRPSCPAA

SEQ ID NO: 439583 - protein, 378 aa, unidentified
MKAARFTADEIERVAYLTTKGYLPVAVDVASRVFQVCYYDLGAKHIKNYQLSRVKFFEFIDDTQTPRKLIGIEACGSCNYLCRYIEEHNHKCHILLAQKVKAFLHLDKTDRIDALGILKALITPSMQHIPARTQENQYLLNLITVREQLNKQFVQTVNAAHAFLYESGVVAGTVSVKSANKVTEALKALCNAETKKEHSEDDCSYSHLNCISESLLSNIESLQTKIKEINTHLLSYASNNEICSNLQTVPGIGKLSAVALYAAMGDPERFSSSRAFAAFIGVAPVTTGTGGKTTVLGIRKSGIQSIKKMLYMCAMVYLRQAMKNGTESSWLKLRLNQNRSKKIIICAIMNRLARIAYAIAKSGQPFDETKCNMIKKLR

SEQ ID NO: 439584 - protein, 354 aa, unidentified
MLIIGCDFHTRYQQIAMAREETAEMIVERRLDHESGEAQAFYRSLQDSHEPVRVGIEATGPIHWFERLLTELGHELWIGDSAKIRASEVRKQKTDERDARLILDLLLAQRFPKIWVPTPAERDLRQLLWHRHKLVRMRTMLGNQLHFLAMSQGLCRKQKLFSKKGRAELGSLTLGPWASRRREELLKLLDQLDPPIAELDRAVLEEAQRRDDAVRLMTHPGIGPVNALAFVLTIGTVSRFPCSRKIASYLGLNPTEESSGGRRRLGGISKQGNTMVRWLLIEAVHHAVRQDPALRQDYQRLKFRRGHAVAKVAIARKLAVRMYWMLRSGADYAQLVRRQGSPGATLVDASPSLG

SEQ ID NO: 439585 - protein, 337 aa, unidentified
MKYYVGLDVSVKETAVCIVDMEGTIIAEKSVLSEPDALADYLAGQGMPLEKIGLEAGSLSPWLCRELRDLGLPVICIETRHAKAAMEAQNVKTDKNDARGLAHIMRTGWYKEVHIKSNESQKARVLLNNRRCVKGKMIDIENQVRGTLRAFGLKVGVVTRKNYEQRIRELIADDLELLSYVEPLLIIRTHMMEQLVKLEKAVLDMVKADPVCERFMSIPGVGALTALSFKTAIDRPERFKKSKNVGVHLGLTPRKYASGEMDYNGHITKCGDDGARFHLYIAAQTLLNTVQKWCPLKAWGTRIAKRSSKQKAYVAVARKLSMIMHRMWVDGTYYAHA

SEQ ID NO: 439586 - protein, 409 aa, unidentified
MLIKKQIRIYRIHRKVVSMNKIIYIGIDVHSSNFTLCSFEPGYGLTEDKIFGQVQFKEDFIKNTEKYISTLKKQRKDIDVVCGYEAGCLGYAPQRELSKRGIKCVILAPTTMAVQKGGKKVKNDFRDAVDIAKCLASGAYKPVYIPDTEDEDVRDFIRMRDDHNTALKHIKQQLNAFLLRHGFKFDGKTKWTLKHIEWIKKLSCTDKQREIINEYLATYETLSDKIDALDLRIEELSQTERYADTVKKLTCIKGIKTHTALSFVTEVGDFNRFKSAEKFAGYIGLTPGEQSSGESEHKTNITKAGNRHLRRLVVECAWSYMRGFVGQKSAGLKKRQKNMPQEVVTYADKASTRCQRKYNRLTTKGKNSNKAVTAVARELCCFIWGMATSHYEGTTQPKDNSVLKESALD

SEQ ID NO: 439587 - protein, 338 aa, unidentified
MGEQYVGIDLHRRRSVIVRLTGEGEVLETVRVDNDPVALSLELAKAGPNPEVVLEATYGWYWAADLLQACGARVHLAHPLGVKMFGYQRVKTDARDSRNLAELLRMGRLPEAWLAPPQVRELRELVRYRAKLVALRSGLKAQVHAVLAKEGVRVPMSDLFGVGGSRLLDELRLGRAYGLRVASLRRLLVAYDREITMFGREIASALAGDVGYLAIQAIPGVGPVLAAVFVAEIGNVHRFAGAPQLCSWAGLTPRHRESDTTVRRGPITKQGPRLVRWAAVEATQRLPGGSKQAVDFHRIADRRGTGIGRVAAARRLLTLVFYGLRDGQVRCLAPRKAM

SEQ ID NO: 439588 - protein, 403 aa, unidentified
MRHVIAFDISMGKSYMVIYNAQKQCIFEKEIQHLKPDFKELQKKIYELTKKTGKLPEIVFEATGIYSRQLERFMQDNQYTYCLLNPLEAKLQCDSLRIHKTDRSDAHRLALTHFTATRRVSHGTNHIFHQLKSLSRFYSELDGELSVIRSRMHKVIQLTFPELEKMFTSKSDLFLNFVQLFPHPDCVLSLSKTIIKNLIRANTNKKISNLMAEKKAIQILEIAKNSYPAVSQNDVLCDQLKVYAKRYQELLQQKECCINKMVFIAEQRAEYSIILSLPGIGPNTAVRLMAEIGDITRFTNNKQLNAYAGIDIRRFQSGKTFYKDKINKRGNKHLRKLLFLIIQNMIKLRRYGRNHIIEYYDKLKTQLYNKCHKVASIACVNKLLKLLLHLITHNIHYDYRLAA

SEQ ID NO: 439589 - protein, 488 aa, unidentified
MSAAGQQEGKKDPTLNARAPKRKARGSRCPQGKGHRRRSKLTITNPDAAGIDVGSRVHYVAVPEDRAPVSVRSFGAYTAQLDELVQWLKECAIKTVAMESTGVYWIPLYQKLEEAGFEVLLVDARQAKHVPGRKSDVQDCQWLQQLHSYGLLRAAFRPEDAICRLRTLQRHRKSLAEFAAMWVQHMQKALNEMNLHLHHVLSDISGLSGMAILDAILAGERDPRKLASLAHYRVQKSQAQIEAALTGDYRPELLLVLSQSLQNYRQIQQQITQCDLSIEKQLAKMTDCATPRQAAEPMPSSQDLGGGKPGKRKSTVALETSLAGHLKRILGVDLTTIPGLNVLAILTLISEIGTNMTKWRNEKAFVSWMGLSPNNKISGQRVLSSRTRKVVNRAATILRLAAMIVGKTNTPLGSFYRRKRAQLGGPKAVTATARKLGCLIYRLIKNGQGYNEPDMHTYELKYKDQILNSLRKRAISFGFDLVELPKAA

SEQ ID NO: 439590 - protein, 326 aa, unidentified
MQGKEASEQETKVKCSVGIDVSKSWLDIHILPGNERLRVANTYADIRRLKRWLGRFDIALVAIEATGKWHRHVQRSLVASNIPTAVVDPFRVRMFAKAQGILAKTDRLDARVLALFAALMDPATRAPASQIMAELAELIAARNRAVEAQTVLKNQLSTSEGSFLKSQLKRRLLRAGKDIAELDDEILRCIRTDDTLARRYAVLTSIPSVGFAVAATLLACLAEIGSASAKQIAMLAGLAPIADQSGQRDGVRVVWGGRPAVRRILYLAALSAIRFNADMKAFYQRLRASGKAPKVGLIAVARKLVVLANTLINEDRLWQPRALKYA

SEQ ID NO: 439591 - protein, 358 aa, unidentified
MDVIHDRAAGIDISKRDAKVCLRLPSARKGQFRPAVSTWGATATEIVELRSFLEQQDVPVVVMEATADYWKPFYYVLEETLPVLVNARDARNIPGRKTDVSVASWLAQLAACGLLRASFIPPPRIRELRDLTRARAITVRDRTREIQLLEKFLESSGIKLSAVVSSLTGVSSRLMLDDLITGQRDPLVLAAHAKGKLRSKLPELTAALNGRFGEHHALMTKLYLDQIDTYTRKIRTLTESIELLMVPFRQTREVLSTIPGVSELVADVIIAETGAGMSVFATAAHLASWAGVCPGSNESAGRVKSSHIRPGNKYLKSALGIAALAASRTKGTYLAAKFRRIAARRGPMKLSSRFSTRF

SEQ ID NO: 439592 - protein, 356 aa, unidentified
MSHDVKYIGMDVHKEAIVIAVLNGNGKQVMETIVETKASSILQFVHGLRGELHVTWEEGTWAAWLYDLLQSQVEEVLVCNPRRNALLKEGSKSDKVDARKLADLLRTGMLRPVYHGENGLRTLRELARSYQTIGKDLTRVMNRLKAVYRGWGVPCAGTRVYAPRYREEWLSKLLQAGVRRRAELLYQQLDGLQALRREVRREFLAESRKHKAAKLLRKIPCIGPIRAGLLIALMQTPHRFRSKRQLWTYSGLGIETHDSAQYRYVDGQLQRSKKPQQLRGLNRNHNHAMKEIFKGAATRASCCTGPFHDFYAALLAKVMKPEMARLTLARKIAAITLTLWKKEERFDAEKLKMQAA

SEQ ID NO: 439593 - protein, 465 aa, unidentified
MTTAKLWRNRKERKDWARRLRSEDPGLEVVHPHAAGIDVGNSAHYVAVRPDRDPEPVRRFECFTADLYRLAEWLASCGVKTVALQSTGVYWIPLYEILEDRGFEVYLVNARHTKNLPGRKSDVQESQWLLKLHTYGLLNNSFQPPAEIRVLRTYWRQRAEHVSGAATCIQRMQKALTQMNLQLANVISDLSGLTGQAIVRAIIAGERNPRKLAELSHPRIEASREEIAKSLEGNWRPELLFVLRQEVEMYDTYQRRIAECDQQLQKHLTRFADTALPQSPEAEPRQKKAKPTKNAPRFDLGSELKRITGVDLTRIDGIDVMVAQTLLSEVGMDMSRWNTEAHFSSWLGLCPDNRISGDKLLGKGTRHVVNRAATALRLVARNLIRSRSYLGAQYRRLRTKLGAPKAITAMAHRLARLIYRMLKYGQRYVDKGTEYYENRYRQQQIHLLQKKAAKLGLQITVAVES

SEQ ID NO: 439594 - protein, 348 aa, unidentified
MAHFVGLDVSVKETSVCVIDDTGKVILEKKVPTEPADIIALLTSLGVTYGRIGIEAGPLSQWLVNALTAAELPVICVETRHMKALLKAQQINKTDRNDARGIAQMMRVGLFKPVHVKTLVAQEQRMLLTSRKLLQRKLLDLECDLRGTLRNFGLKVGVVSGGRYEARIRELVAGFPRLAAIAEPLLNVRRVMRQQLAVLHKMLLDTVRDDPVCRRLMTAPGVGAVVALTYRATVDQPQRFVHSRAVGAHVGLTPKRYQSGETDYDGRVSKSGDALLRTMLYEAAHSLLIHSGKWSWLKAWGVRVAQRRGMRRAIVAVARRLAVVLHRMWVDGSEFRWSKDSAAVPAVA

SEQ ID NO: 439595 - protein, 274 aa, unidentified
MKHYAGLDVSVKETSVCIVDEAGKVCREVKVPSHPEDLVRLLKDPAWQLERIGLEAGPLSQWLSSGLAEAGLPVVCIETRHTKAFLKAQVNKSDRNDARGIAQMMRVNLFRPVHVKTLTSQKRRALLTARKLLQEKAISIENDIRGLLRNFGLKVGVVGLIKFEERALELVEGIPELAEIMVSLLAARHKLREQAGKLHRKLLSIARNDEVCRRLTTIPGVGPIVSLAFIATIDIPARFKSSRAVGPALGLTPVLNQSGESTRIGRISHCGDHA

SEQ ID NO: 439596 - protein, 336 aa, unidentified
MKKNEFRNFVGIDVSKQTLDAVFIFNNEINQSTHQQFSNDAKGIKKLLGYVKKQKGVNAVNTLFCLEHTGIYGRKLTYTLFEKQWCVWLEMPVAILRSMGLQRGKNDKVDAKRIALYAMKNIEQVKLWEAPRQEVTALRQMLNTREALIKGLKALTMPIKEYKETGHKELSEMMKESTKNTVKGMEKDIEKIEQAINELIKNDTALLHLFGLLMSIPGIGKITSAELICFTNEFKNYTEAKQLACYCGVAPFEHSSGSSVRKKTRVSKMANTALKTKLHLCAMVAIQHDQELKNYYERKVKEGKNKMSVINAVRNKLVHRITAVVKRQTPFIKMAA

SEQ ID NO: 439597 - protein, 312 aa, unidentified
MADMVRLAGIDVSKETLEVHVLPSGASRTVTYDRRGLLVVRRWLLDQGVAVVALEASGGYERQISEALEEAGLVVHRLNPLRVRRFAELRGRLAKTDRLDARTIAEFARAYPQERQLPRDARRDCLAEHLLVRRHTQQAIVDCINQLEHLRDGRLRRLVMARKGSMQRTLATLDRRLAQLIAEHDDLTQLSDRLRTVPGVGPVLATTLIALLPELGSLTRRQVAALVGVAPFDHSSGRQIGSKTIQAGRALVRNTLYMAAMVASRRNPTIKAFAERLAGKPGKVRLVACMRKLIVTLNAMVRDEAQWQPRTP

SEQ ID NO: 439598 - protein, 431 aa, unidentified
MEPEFAAFVAIDWADQKHAWALEVNTSSDRESGNIDHTPESVEIWAAELGLRFAGRPIAVALEQSRGPLVFMLTKYEHLVIFPIHPSTLANYRKSFRPSGAKDDPNDAGLLLDILVRHRDKLRRLDPDTPETRTLQFMVEERRKLVHEKTRCSNRITAHLKLYFPQAIGWFDEIGSHIVADFLERWPNSERLQKARPATIERFFIEHNSRNAERIAERLEQIRKIVPATKDTAVLRSCSAAVIAWAGLLRQLLNAIKAYDEQIDTLARQHPDYALLKSFPGAGPALTPRLIAALGSQRDRYQTAHEIQCYSGIAPVVASSGKQRWVHWRWSCPKFVRQTFHEWALHSVAYSEWARRYYDEQRAKGKRRNTAIRALAFKWIRILFRCWKDHKPYNEQAYQQALALRRQKQTASQLVEVKWKNVAGFMKITAS

SEQ ID NO: 439599 - protein, 342 aa, unidentified
MAAIGVDTHKATLAACAVDPLGTPIAEATFANDPKGHLTFIAWARSKAPEATIGIEGSSSYGAPLARSAQRAGLCVREVPPHLSRAERRRTRRPGKSDPGDALAIARVTARERNLPPIRLPDQTTELRLLVEAREDLIGEATRVRNRLHAHLIILLPGYGGTVANLVAAHNRTAIGRRLRGNSTVQAELARSLLARLVHIGREVDGLTRRITAGVAGHPLLGLPGAGAITVARLIAEVGDVRRFRTADALAALAGVAPIPASSGQIQRMRLNRGGNRQLNRALHVIAVSQARFHPEAKAYVTRRIDVDGKTWREAIRALKRRLVRPVYRLLLEGSSVQLAAA

SEQ ID NO: 439600 - protein, 349 aa, unidentified
MRYFQPAAETRFYAGVDLHARTLFLVILDHTGQLRYARNLPANPQAFRKAIAPFRDGLVVGCECMHCWYWLADTCRDDHIPFLLGHAWGMKAVHGSKTKCDRKDAEAIARLLKGGNFPLAYAYPKERRGLRDLLRARLRLVRQRAELYGHIHTARRQLNLPPVSNHVKYKSKRAAITADIDDACVRRRVEADLSLLEPLDSTIRRLEKDIEVAARQHYATEMAVLQSTPGVGIVIALTILLEIDTLERFDTRQQFCSYARLCGARQESAGKTVGQGNAKQGNAWLKWAFSEAAVLSAQKNERIGKYLDKLSSRLGKAKALSALAHKLGRAFYHMLQKKEVFNIDKFLRH

SEQ ID NO: 439601 - protein, 401 aa, unidentified
MGVDWAEEHHDVCMLDEQGKVLARAQVANSVHGVARIHALVAEHSEESGEVVVGIETDRGLLVQALLAAGYQIYAINPLAVDRYRDRHSVSGAKSDAADAKVLADLVRTDRNNHRPVAGDSAQVEAVKLLARAHQSLVHSRQRQVNQLRSALHEFYPAAIEAFKDDLGGRDAVAVLEYAPTPSRGRSVSQAKLISALRRAGRERNLKARAAELQRILQQPHLEQPATLVAAYGVIVKSCVRLIRELNAQTTELEQELTKSFELHPDAELYLSLPGLGFVLGARVIGEFGDDPNRYSDAKGRRAYSGMAPITRASGTRHVVLARYARNRQLADACYLWAFSSLKRSAGAHQYYRALRARGKSHAQAIRALGNRWVSILHGCLRHRQLYSETVAWRAPVAVAA

SEQ ID NO: 439602 - protein, 342 aa, unidentified
MEEVTIIGVDLAKNVFQVHGAGADGSVVFRKKLSRPQFSRFMAGQSPCHIAMEACPSAHHWARELTGHGHRVRLIAPHYVKPFLKRQKNDAADAEAIVEAALRPTMRFVEPKSTDQQARAVAFRTREQLVKQRTESVNALRSHLYEFGHVAPVGIGYLPRLERVVEDPEANIPDLARDICRMLIEHIAHLADRIKALKSKIAAMSNEAEMPRRLQTMPGIGPITALAVETFAPPMDQFRRGRDFAAWLGLVPRQHSSGGKQKLGKTSKMGQRDIRRLLVIGATAVIRWASRRGAPAGSWLARMLERKPIPVVAVALANKMARGIWAMLSRNENYRGPVLIGA

SEQ ID NO: 439603 - protein, 347 aa, unidentified
MRFYTRQHRHYCGVDLHARTMYVCVLDQKGNVLVSKDIASAPEPFLELIAPYREDLAVAAECMFTWYWLADLCAREGLVFVLGHALYMRAIHGGKAKNDRIDAHKIAALLRGGMMPQAYVYPQAMRATRDLMRRRNYLMRQRAELLAHITNTNHQYNLSALGVRPARPAERSGIAEHFAEAPVRKSVEVDLSLIEHYDRQLLPLERYLESSAQAHDPVALAIVRTVHGMGKVLGLSILYEIHDVGRFSRVQQFLSYCRLVKPTKESGGKILGHSGRKIGNAHLKWAFSEAAVCFLRANKPAQALRARLMAKHGKGKSLGIIAAKIARAVYFMLRRNEAFDAERFFTH

SEQ ID NO: 439604 - protein, 347 aa, unidentified
MRFVGIDVHKVNCQICAFDDVTGEILEKRIPTTAPSLQEFFKGWEPCRILIEAATESEWVARVLERLGHEVIVADPNFAPMYATRDKKVKTDKRDARALMEATKLGAYRKSHRVSDVQRTVRRRLAVRDALIGSRSKMINTARAVTRQDGYRVPSGEAETFHLRVRAMEIGQEVKDVLAPLLGAMEELTEQIALCDEEVVAIGQSKETQLLQTIPNIGPITSVAFVATLDNCERFPGARNASSYLGLVPSEFSSGEKRHRGAITKRGNARMRWLLVQAAHGIMRKETVANKPLHNWARAVEMRGGKNVAVVGLARRLGRVLFAVWSTGLPYDERRVQPRKVVLEPAM

SEQ ID NO: 439605 - protein, 400 aa, unidentified
MNVVGIDIGAARHVAAVCREGEQEAEKAILRISSRRAGFDDLDRWMTRHGDVGLVVMESSGHYWMSLASHLRRRGLPVALVNPLSAKYFAKSRLQRTKSDPADARTLAVLGMSTHPTPREPLAGAELREAARFAMTLVTEQAKVCQRIQRLVDLGFPELRDAFEDPTCVSALAVLRQAPTAAAVQRKRATTLARATRPGGGRAIGPKRAESLKALAEQTVAPPELERQVGFELALLIEQYDLLEGQITQAESRLAGLVEGDVARRLQSIPGVGPATAATLLAEIGDIFRFTDVDQLLSYAGVHPSRGQLGSQGRQPGDELAHGQDRQCPPPRRALPDGHGRCAAQPRHRRALRPQARGGQVQDERPGALHGQSARPRLGCLAWRSGLRSRLPRLTRHYGT

SEQ ID NO: 439606 - protein, 312 aa, unidentified
MADMVRLAGIDVSKDKLDVHVLPSGESRTVAYDGRGLAGLRRWLIGLGVALVAVEASGGYEREVSEMLEEAGLIVHRLNPLRVRRFAQMKGRLAKTDRLDARTIAEFACACPQERQPRRDPRRERLAEHLLVRRHTQDAILDCINQLEHLRDGQLCRLVKARKASLERVRDKLDRCLVELIAEHDDLAELSERLRSVPAVGPVLATTLIALLPELGSLTRRQVASLVGVAPFDRSSGRQNGPKSIEGGRAFVRKALYMAAMVASRHNPVIAAFYERLAGKKGKVRLVACMRKLIVTLNAVVRDGAQWQPRTA

SEQ ID NO: 439607 - protein, 358 aa, unidentified
MRIIGCDLHARQQTIAMLDSETGELEEKTLEHEGETVREFYSALRGPILVGIEATGSMQWFLELMEELGIECRVGHPAKIRKAETRKQKHDRRDARLLLTLLAENRFPTIWMPSSEQRDLRTLLRHRHQWVRLRSRVQHTLQSMALNHGLRRGRSLWSQAGQGELRALPLAPHASERRKALMTLYPRLQESIDELDRQVSEQTQQRTDARRLMTHPGVGPVTALATEVFLGDPKRFSDGKALASYIGMIPSEHSSGRRQRLGAMSKQGNALLRYLWCEAALHAVERDPELKRFYRRKLVQKGLGKARVAAARKLGIRLWIMMRDEIDYQEFCRRGKARQESGSVRAGMPDRNSGPAEQ

SEQ ID NO: 439608 - protein, 383 aa, unidentified
MQTSNVRAPINNTTSTIFIALELSRRTWLVTMYSPDRDRNSRYKVTGSDHTALLEQIERVRTRAARVLGSSPAVVSCYEAGYDGFWLHRVLTAAGITNYVFDPASIAVEQRGRRAKTDRIDGEHLLRTLLSHCRGEPRAVRIVRVPSPDQEDARRATREEGRLITEQGAHINRLKALLRLLGMPVGNPRRSDWLTWVSEQRDPQGARVPPHMLAELEREHARLMLVAEQLAALKKPSEKIKLTAAAAEMAKRRDQLFDLKSLGPSFSSKLVNEAFYKDFKNRREVGGYFGLGGSPWRSGDTDREQGISKAGNRRARHAAIELAWLWLRHQPDSALSGWFKERTFNASKRVRRIMIVALARKLMVALWRYLTTGLVPHGAVCKS

SEQ ID NO: 439609 - protein, 445 aa, unidentified
MHYKRLLSLIDSVSSYLSVGLDVGADFTWMSIALPNGSFIGKPFKIIHSDPRSRDLAVTKIKEAQETYSLKSRCFLESTGIYHIPLLCFLRDKGFDCSVINPIITKNSTNINIRKLHNDKFDSKKAALVGLNVSLKTSILPDDSVVDLRNLVRDYYYFKDLQSAVALKLTAELKVSFPAYAKVFSKVTTQSSLKLLSSYPLPADMLAASKEDIVDIIRSTARFGEAYALRKYDAIISAAQDAAVFGRALPSNAVRIRLYIDTYQEYQKHLDALLKALHETVEKLQDTLIYDQICLLQSLYGIGFLSAVVLVAEMGDFKLFSSPKKLYAYFGLDPAVKQSGKLNGDKVHMSKRGSSLARRVLHMAALNNVKVAKGSGTPVNPVVYDYYTRKCSCKKKPVAMGAVMHKICNIIFAMLRDNKPFEIITPEEHCRRFATEHPDKIRKAA

SEQ ID NO: 439610 - protein, 340 aa, unidentified
MKKRYIGIDLHRNRFTCCIRLDNDRTYVTEWALEALARLVKKLRATDEVAVEITSNTRLFHEAVLPHVARVVVGDTNQFRVISQSVKKTDPNDARLLSLYLSKDLLPEVRMKDKDLAQLASLTQTRDTLVKQRSALKNKVNNILSARGLNLAKEALSSEKKLAEVLELPFDEIVRIELRVIVEQIRGLNKSIAELEKTIGEEGSKLEGHKGLSSIKGIGKITGAILLSVIGDVNDFADEGRLASYFGIVPRVSNSNQTERSGRIHKRGTKLGRTALVQSALIAANYSPYLKRFYEQVKARKGAGKAILALAHKFLGIIYRTLKNKWVFEDFPNFVLAEES

SEQ ID NO: 439611 - protein, 352 aa, unidentified
MSHKSASFAAVSTIGIDLGKNIFHLVGLDQRGAIVLQLKCSRAQLERRLANIASCLIGMEACSGAHYIARQLAALGHDVRLLPAQYVKPFLKGHKNDYRDAEAIAEAVQRPTMHFVAIKTPEQMDLLALHRVRSRLVGQRTGVINQIRGFLIERGIIVRQGVVPLRKALPDILSSNTQALSPRMVNLITELVQDWRRLDERVAAVSAEIEALAEQDEACQRVMTVPGVGPIISSAVVAAIGNGAGFTQGRDFGAWLGLVPKQESTGDRTILGKISKRGNKYLRTLFVQAAHVVLARRPSAAMRSLWPWIERAARRLHRNMLAIALANKLARIAWAVLARGRSYQPRIVADVA

SEQ ID NO: 439612 - protein, 392 aa, unidentified
MFYVGIDIAKKNHEASIIDSNGKLLDKSISFSNSQAGSSKLISLLEKYNISTSNVVIGMEATGHYWLSLYSYLLDLEYTVYVINPIQSDAFRKMYIRQTKNDSKDSFVIAQIMRFGEFSTTSLANDDIMSLRQLSRYRLALVDECSDWKRKCIAILDQVFPEYSKLFSDTFGVTSKELLAKYPTPEDMLSVDTQTLTELLSKSSRGRFGALKAVEIKESAKNTFGISLARNAFAFQIKQIIAQIDFIEDQLDELEIEIATLLHQTNDVITSIIGIGDILGAIIIGEIGDISRFESASQLVAYAGLDSSVKQSGDFIGTKTKISKRGSPYLRRAIWLAATVAAFKDPALSVYYQSLRLRGKHHLTAIGAVARKMTNIIFAVLRDDKPYVPNIK

SEQ ID NO: 439613 - protein, 377 aa, unidentified
MKTELYLGLDVHKDSISTAVAEAGRQGEVRDTGAISNDLHTLEKFFARLRKAHGPDVIIHVCYEAGPCGFGIARRLKQLGLECSVVAPSMTPTRAGDRIKTDKRDARKLARLLRSGELTAVYIPEPTDEAMRDLCRARTDAVDDRRRARHRLKAFLLRHGYRYHGKTAWSAAHQRYLRELVLAHPAMKVILEDYLVAIDGAEERIARCEQAMRDLLAGWRLEPAVKALMAMKGFQIVAAMILVSELGEIHRFAHPRQVMAYLGLVPTENTSSDKRRQGGITKCGNAHARWLLIESAQHYITPPKVSQELSKRQEGQPHEVRAISWRAQNRLHGRFTRLAARRLQRNKALVAIARELCGFVWELLRRQPCYQLEAVCF

SEQ ID NO: 439614 - protein, 421 aa, unidentified
MSKGRYHSVECKGVDWDALAAQAAGRGLVFAVDVAKHDFVACLRFAGEDPLVRVKWQHPEETPAVLAGLGRLIAAGPVAAVMESSGTYGDALRWQLGQLGATLYRVSAKRVHDAAEVFDGVPSLHDPKAADIIAQLHDLGHSQEWLEADTHRRALTAQLKMLHQCKARHQQELNRLEALLSRHWPEALTLLELDSVTLHHLIAAYGGPAQVHALEGQARTLMQQIGRPGLAAAKIEALLDSAGHTVGMPCILEERELLRWQAKAVVETHTELRRIEKLIEQAVAGDPALASLRSVVGPVTSAVLLAAQGSPLSYPDADSYCKGLGLNLTERSSGKHKGRLKITKRGPAVARFYLYFAALRLIANEPVVAKWFKAKTARPGAIKGKQVVELMRKLAKALWHHAHGRLFQAEKLFDQRAVAGA

SEQ ID NO: 439615 - protein, 359 aa, unidentified
MNTTTVGVDLAKNVFVACVADGAGRVIETREFNRAGFLAWLSTLPRGTLVGMEACGGAHCWGRTMQALGLEPRLMAAEFVRPYRKRQAVKNDRADAVAIVAALLAPGMRFIPVKTEAQQHRLAWHSLRLGWIEERTALLNRIRGLLAEFGMVVEIGAMRLRRKLAEHEFDTAQPAPIRHLIQGVRDQLDALDLRIAECDRQIAAQQADDAAARRARELPGVGMLTADAVVASVGDATMFHNGRQFAAWLGLTPSQYSSGGKPKLGRITRRGDDYLRTLLVQGARSVLAAALRKARNTPEALTRLQQWIVTLNGRVGYHKTLVAIANKHARQLWAVLAKGEGYNPEAWRQWHDSVEQPAS

SEQ ID NO: 439616 - protein, 357 aa, unidentified
MGKSIIDTSSVTRVGLDLAKRVLRIHAVDATGFVVIARSVNRRTLLKFFDMLPRCVVAMEACSSAHHWGRQLLERGFAVKLIPPAHVKPYVRRSKNDAADAAAICEAAGRPGQRFVPVRSVENQAALMRHRARELMVGQRTAALNALRGHLSEIGVVAAQGVQNAYALKEMADEGFDENGEIVVPDCVRLALAPLVRQIDALDEAIEAIDRELEASARTDETAKRLMTFPGVGPVTAMALLATIQDFAAFSSGREFAAFLGLTPREHSTGGKPRLGRITKMGDRYLRKLLVQGACSALGHRKGHNDALRRWASGMLERKTVKYKFKLTAVALANKLARIVYALATKGGHYDDRLVAA

SEQ ID NO: 439617 - protein, 406 aa, unidentified
MQGSVITVDVSKGSCHYQPYVSNGHPMRKPKVLHDTVEGFQSLSDLIDTMKDRYECETIPVIFEATGVYHRCLQKYLDDHQIPYYIISPLMSASYRKTTPNSNKTDDLDCSHIAKAYYGECNLFPYDKPSKSFHNLRELNRYYECELNHLRMRKNTFRKYLDIVYPRLDKCFKGHSSLYDEIPMEVIKQYPHPSLLLKHKEETIVKKIEKKTSHNASFIQNIVHEMYECSMHCYSGADVTDVESMILPELVDDLQSQEERCDEILKQLVSEAQKTPYFTSIVSIVGIGDNLAARIIAELGDMSRFSCRRAITAYAGLNPKIRQSGDMDGIHLAISKKGNKHLRCLMYLAVSCNYRLKKCDVLYEFNQKKRQQSFSPLKPKAATIATAHKLLLIIYALCTNGTVYHS

SEQ ID NO: 439618 - protein, 565 aa, unidentified
MDLPLTRARPQSAPLGAFAVATAFSLRPLTPPLHAARAVKTPKRLECLGLTPAQTDTVFPMSLRNPARRNPNMESGRVAKRRSVSKMDVGGAFARPQIRSSQTSPKRARARIPAAGVAPGQTSERTTSHEDYCISARPAGQPKPVKRNMENTNWNERKYFGALDWASDHHDVVVVDKTGATVYKSRIQHTPEGWQKLREELVSFLPLAIAVETNHGMAVEQMIALGYEVYPVNPKSSTRYRDRKAPSGVKDDELDAWSLADALRVDGHGWRRLMPDDPLVVELRLLTRDEVSLISQRTSFVNELQAALRDYYPAALAAFDDWTRPNLWEFIETFPTPEILQTAGKKKWEKFLRTHKLWREDTAEKRMVIFETATALQGSPGAVAAKSLLAVSVVKVLIMLQAQLDAYRARIEERFHQHPDHDLFGSLPGTGTKLAPRLLGEIGDNRSRFDCAEGLQSYAGTAPVTFQSGQIERHRVRRACAMQLRSTIHLWVNLSRQKCAWAEAYYQAHREKGQSHACALRCLGQRWLKILWKMWQTKTCYDETVHMRNQLKHGSWLLALQPPKA

SEQ ID NO: 439619 - protein, 337 aa, unidentified
MEYFAGLDISMKETHICVMDREGKVALEAKAASSASAIAVELAKAPTAQQIIFETGRMATTLYHGLAALGLPVVCIESRHAYQALKSIATHKTDRNDARGLAHLARTGFYKPVHVKSLPAHAVRALIIARKKLVGQRVTLENQIRGLALVFGIRLPRGLSPAFAEQVTGASSEVPALSSALRGLLVARDALLGAIAAINRDVKRLAHSFEACQRLMTIPGVGHLTALAFVAAIDEPDRFRSSRDVGPYLGLVPRRWKSGEIDYTGSISKVGDRRVRTLLYEAANVMLTRYRGDLALKAWALRIGKRSTMRKARVALARRLAIIMHAMLRDGTEFQIA

SEQ ID NO: 439620 - protein, 411 aa, unidentified
MHNRQNYLYVGVDLHKEHHSAVIINCWQEKLGEIQFENKPSAFSKFLLEVETYVSDGLSVVFGLEDVGGYGRALAKYLVDHEQVVKEVNPALSFLERKSQVMIQKNDSWDAECVARILINKLNQLPDAKPNDLFWSIQQLVSRRNALVKAQSALKNQLHIQLNHHYPSYKKFFSELDGKTALAFWEQYPSPSCLEGVNIKRLTAFLLDVSNNTCSVRKASEILRLVKEDGQTMKEYQEMRNFLVRSIVREIEFKKKEMKYIERELKQLVNLLDYQLETMPGIELVTASALIAEIGDVRRFPNANKLARFAGIAPVYFGSGGKGKTHKSKQGNRALHALFYNLAVQQVQVAKGSKLPRNPVFHAYYQKKLKEGKTKGQALVCIMRRLVNIVYGMMKYKIAYELPVVEEKEVV

SEQ ID NO: 439621 - protein, 346 aa, unidentified
MEHYVGLDVSLKLTAICIVDRTGKIEREGVVASDPESIAAFVKSHAPHVARVGLETGATSTWLWTELNKMGLPVICIDARHAKAALKLQINKSDRNDAVGIARIMQCGWYKEVRVKDLDSHAIKALLVSRALLVKIKRDIENQVRGLLKNLRLVIGQAKMNVLTVRATELAEARPELAAAIEPLLKAREAIERQIADLDRKVMRLARNDAQVRRFMTTPGVGPITALCFLATIDDPTRFKRSRSVGAYVGLTTRRFASGEIDWTGRISKCGDKMLRSYLYEAANVLLTRVAKWSALKAWGIRLAKRSGLRKAKVAVARKLAVILHRMWIEGTEFNWSSKEAANQPA

SEQ ID NO: 439622 - protein, 402 aa, unidentified
MNAVGIDVSKGKSMVAIMRPFGEIVSTPFEIKHTASGINSLVELINSVEGESRIVMEHTGRYYEVLAHQLSEANLFVSAINPKLIKDFDNDSLRKVKSDKADAVKIARYALDKWQNLKQYNVMNELRNQLKTMNRQFGFYMKHKTAMKNNLIGILDQTYPGVNTYFDSPARSDGSQKWVDFASTYWHVDCVRKMSLNAFIDHYQNWCKRKKYNFSQSKAEEIYGKAKELVPVLPKDAITKLIIKQAVDQLNSASTTVESLRTLMNETASKLPEYPVVMAMKGVGTSLGPQLIAEIGDVSRFTHKSAITAFAGVDPGVNESGTYEQKSVPTSKRGSADLRKTLFQVMDVLIKTHPQDDPVYQFLDKKRAQGKPYYVYMTAGANKFLRIYYGRVKEYLASLPES

SEQ ID NO: 439623 - protein, 383 aa, unidentified
MENRPLRFGAKRIFGLDLSKKTLKACRLDEDSGFEKQNIFDEKMTDDGRHHLASRLRKGDYVAMEGGSSTSFLARYLMENTEAEIFVLNPCKLHIIFESACKTDKQDCIKIAKYIRDTNPSNWCLIPVPTYEETSLRSLINSHISTKQERTRAINQLHAFFNLNGISFLKKSDLGDSDRRHDLVDHYFSQDDLRGMQARLMLQDIDNIELSEDGYGEMIRKALLSRPRESLIWMSIPGVGPLTALACVAYIGDGKRFSTPDQLRNYVGLVPRIDQSGIKEVIYGVNHYGCMPVRRNIVQAAWSVSNLSFDCRFRQRWRELKASGKKGQKIAVKVANDMLTMGWTLLKKGELYNGLGDFSYLKRKLRSYKMTAIDSSCFDECLK

SEQ ID NO: 439624 - protein, 362 aa, unidentified
MKIIGCDFHPSFQQIAMLDTETGELIERKLLHPEEAIRFYKSLAGEEVLVGLESMGNTLWFERLLNRLGLGVWIGDAMAMRVSNPRKQKTDKRDACHILKLLQEGRFPRIWVPSLEERDLRQLLKHRHTLVQMRTRIKNQLQHIALNQGWQKKRTLWTQPGQQWLRQLELEPWTSRRRDDLLEMLKEMNQRIAQLNTAVEQAAAQRPEAVLLMSHPGVGPILALATVLTLGDVSRFPRGKQVASYLGLIPKEASSGQRRRLGAISKQGNSFMRFLLVQAGMSAARGEAGLGRVYKRLVQKKHHGVAKVAVARQLVVRLYWMLRENKQYPAVVRMQGSPSHPVAEVMAVALNGRPASQPNKEG

SEQ ID NO: 439625 - protein, 411 aa, unidentified
MEAIYESVCGLDVHSGSVQACVRRWKERRIEQEVRAFGTMTRDILALADWLAAEAVTHVAMESTGVYWKPIYNILEGRFEILLVNAKHVKHVPGRKTDVKDCQWLAQLLQCGLLRGSFVPDRPQRQLRDLTRHRSQLVHQTAAVANRIHKVLEDANIKLGLVASDILGVSGRDMLRALIAGQQTPEEMAELARRQLRGKIPQLRLALEGALTEHHRFVLAELMDQLEDLERRIERFTRRIEEISGPFAAAIRAVAEIPGFDQRSAQNVVAEIGTDMTRFPTDAHIASWAGVCPGSNESAGKRKSGKTTKGSRWLRSALCQAAWAASRTKRSYFRSQYRRLVGRRGKKRALVAVGHSLLVVIYHVLLTGRPYQDLGIDYFDKLDAARIVKSHVRRLESLGYKVTLATSEKAA

SEQ ID NO: 439626 - protein, 413 aa, unidentified
MSDSFRFFVGVDVGSEAHQGCVVDGDGQTLGQRGIAHTGAEVAAWFDWLAQLTAGAAPQEVAMACEMPHGAMVEAALLRGYAVFAINPKQLDRFRDRFSVAGAKDDRRDALVAAQALRTDRYAFRRLSLGDPRLVRLRELSRAEDGLREDLRRGSNQLWQLLQRYFPALLKLAPAADESWLWALLAQAPLPDQAARLRPATLKRLLGAHHIRRFSAAELAELLRQPTLTLAPGAAPAIAEQVLLLLPRLELLHRQLTHLIRSIDHLIEELSFDENYREHRDVQILRSVPGVGRVFTATVLSEGAEALAHRDYRVLRAVAGVAPVTAQSGKTLLVSMRRACHRRLRHAVFHSASVHAQLDPRAHRLYAQLRSRGHSHARAVRGVADRFLALLFALLKSGQSYDPQRRALPEPAA

SEQ ID NO: 439627 - protein, 424 aa, unidentified
MKNIDVLNTLYVGIDVGSQTNAVYATDFCCEKTFKCNVDNNHPGAVLLAGKIAAFMKDRHLNGLVIAMESTSVYSTHIASFLSTADNLMPFTPYVYCLNPKVTSAYKKTFVAEGKSDPEDAYAIADFARCDKIKSEPWRGSQYLAIQRLTRHRLHLIEAVAREKNYMLSNIYLKFSELAVIDDARQPFSDKYGATASAILTDFLSTEDIASMPLLDMAAFVNQKGRGRFSDPEATAKLLQQAARNSYRLDKCLYEPITLSLASSFNCLKAFEKEVKAIDKAILETIKGFNTNEYQCFTSIPGIGPVYAAGVLSEIGTIQAFKSHESLAQYAGITWPRNESGKFKADDKRLSKQGNAYLRYYLLEAANSVKNHLPDYKDFYNKKYAEAATHKHKRALALTSRKLIRLIFGLLDKNQLYTPVGGRT

SEQ ID NO: 439628 - protein, 314 aa, unidentified
MIISPHCVGIDVSKRMLDIFDDAVGRPERIANTLQAITERVAGWRCGNVFVVFEATGVYDRELAEALRQADIRFARINPARARDFARADGRLAKTDAIDARMLAIFARKMMPAVEPAPEPARSALASLAKRRDQLVQIRAQEKNRRSEATDRTTIEGIQRHLDFLNGEIKAIEASIKTLIKAEPDISEQARLMRSAPGIGPVACMQLLAKMPELGCLGSKQVAALAGLAPFNVDSGSYRGKRAIGGGRKRVRDALYMAALNAVRRDLTMKAFYQKLRTVGKPAKLALIAVARKLLTTLNAMPRDRKAYVRPQPT

SEQ ID NO: 439629 - protein, 343 aa, unidentified
MTRFIGLDVSQKITAICIVDNAGRRLWRGQCPTNPEQISVLVRRHAGSDARIGIETGAMTPWLVHELRNLGLEVVCLDARHARAALEMQINKTDQNDAEGLAQIVRTGWYRSVHVKSFDSHRARALLGARTQLIGMTTRLSNHIRGVLKTFGLLPGAMRGLPFDRKVEALLLDRSDVALIIRPMLVAWRQLREQIAVFDKAIRVLVRSNSACWLLISVPGIGVLSALAYVSTVEDPARFGRSRSVGAHLGLTPRQYQSGEVDRSGRISRWGDTLARTLLYEAAGVILSRVKRASSLKDWARAIAKRSGNGKARVALARKLSVILHSVWRSGEPFRWSEHARAA

SEQ ID NO: 439630 - protein, 350 aa, unidentified
MIIIGCDYHPGVQQISFVDTDTGEFQETRLQHREPAEQFYRELALRGMQVRLGMEASGQARWFERLLAELQMELWIGDAAEIRARRVRKKKTDREDARHILRLLMEDRFPRIWVPSWENRDVRQLLWHRHRMVQMRTRVMNQLQAVALNEGMRCKKRLGGERGRQQLESFPLAMWGSRRRHDLLELLDRLNPTIAELTQAIEAEVANYPAAQRLMTHPGVGALTALAFVLIIGETERFQCGKQIAAYLGLVPEENSSGESRRLGHISKQGSGFMRFLLVEAAQVTVRSDGQWRSRYFHLAMRRGRKIANVAMARRLAVRLYWMWRRQWDYEQWKEFGPHAGQPGMSDGVK

SEQ ID NO: 439631 - protein, 363 aa, unidentified
MVKNEVRVYGLKHQKEKRSMDHFAGLDVSVKETSVCIVDETGKVVREVKVASEPEALLAVLKNPAYHFTRIGLEAGPLSQWLFSALAEAELPVVCVETRHMQAVLKAQINKTDRNDARGIAQMMRVGLYRPVHVKTLRSQKLRMLLTHRKLLQSKAIAIENDLRGTLRNFGLKVGMVGKVKFETRIKELLENLPDLAELVEPLLIVRRTLSEQIVILHRRLLAIVRDDEVCRRLMTIPGVGPVVALTYRATVDVPARFRKSKSVGAVFGLTCSKYQSGEIDWSGRISRCGDEMMRVMLYEAAQSMLRSKKWCWLKAWAMQIARRRGMKKAIVALARRLAVIMHRIWVDGTEFRWTREQAAAAA

SEQ ID NO: 439632 - protein, 392 aa, unidentified
MVVSVGIDVSKDKHDCFILNSEGEILSDVFTIPNSLDGFTILLQRIRDCSSSQDNIKVGLEATGHYSYNILGFLLDNGLPTYVLNPLRTNLYRKSLSLRKTKTDRVDARTIAAMLLSDAGLKPYTDTVYHNEELKSLTRYRFDKVKERAKLKSSVSRLVCILFPELEKLTPTLHMPSVYALLDEFPGAKQIAEANLTHLKAILHNASKGRYNRDKAIDIRESARASIGAVMSAKSLELRHTIRLIRELDAEIEDIEAAIQSIMNEMHSPITTIPGIGTRMGAMILAEVGDFSRFDSPDKLLAYAGMSPSTYQSGQLKNCYPHMEKRGSRYLRYALYNATKYVCLWAPTFADYLAKKRAEGKHYNVALSHAAKKLVRLIFAMEKSRQPYCSAT

SEQ ID NO: 439633 - protein, 343 aa, unidentified
MQTITTIGLDIAKSVFQVHGVDADGQVVVRRQLKRRYVLAFFQKLPPCLVGIEACASAHHWARELQALGHTAKLMPPAYVKPYVKRHKNDAADAEAICEAVTRANMRFVATKTPEQQSCLTLHRARHLLMRQQTSVINAIRSHLAEFGIVAPVGRNGVEQLLGVVADSNDKRLPEVARACVAALGAQLRVLKVQILEFDRMIRAWHRSSEASMRLDQVPGVGPVLATALIASVADPKAFRSGRDFSAWIGLVPNQNSSGGKERLGNISKRGDRYLRSLFTTGALAVIRYAKIHGTKHRPWLTSLLARRPTKVAAIALANKLARMAWAMMAKGERYKEPAALAA

SEQ ID NO: 439634 - protein, 369 aa, unidentified
MTHYTTSRSMYSIKIICKDMKKICIGIDVSKETLDVTVIHIESYELMEKLGYSKFENRPSGFRSMTAWVRKVIKSRGQMAEALFCMETTGSYDLPLCHWLHKNGLNVWRESALQIHCSKGFQRGKSDKEDSEIIAQYAARHQNRYTAFVPDAEAIADLKELICYRDSLVERRKECKVRLANKKETLVNKNSKAWKCIERLSKAEIKRLDKVIGECDEEIRNLMKEDEQMEKNYQHLTSIVGIGLINGAALIAYTGNFKKITTPNKMSCYCGCFTFYEDSGTSVHRKSPYRNACCKMLKGYLRMAAKSAMLANTELRKYSERLREKGKPYAVILNNVANKLLHIMFSLVKHDYDYEYNHEIVRRMERGIA

SEQ ID NO: 439635 - protein, 342 aa, unidentified
MEHTTIAVDLAKSVFQIAVSHRPGHLDEERRLSRDRLLPFFAQRPPATIVLEACGSAHYWARQLQPFGHTVRLLPPHDVRPYVRRNKTDRTDAKGLLEANRNEEIHPVPVKTIEHQAIASLHRLRSTWLATRTARLNTLRGLLREFGIFIPVGSQHVVPRVRELLVEPTPVPLLLHTTLAAACDEIEMLATNMRAVERQLGALASEMADVTLLQTVPGVGVITATALVALVADIRRFPSGRHFASFLGLTPKEDSSGSRRRLGAISKRGDVYVRMLLTHGARSVVWHAKTAARPTSLQQWAVHTEQRRGRNVAAVAVANKLARIVWAVWGQQRPFAADRRPA

SEQ ID NO: 439636 - protein, 408 aa, unidentified
MRLFVGDDWAEDHHDVELMDVTGRRLAKARLPEGVAGMARLHAMIGGQVGEADDEDVEVLVGIETDRGPWVAALVAAGYTVLAVNPLQAARFRDRLGVSGAKSDAGDAHVLADMARTHSHELRPVAGDSAEAGAVKVVARIHKTMIWERSRHTQRLRHALLDYFPAALAAFEDLDAADTLELLAKAPTPAKAARLTIAQISGALKRARRRDVAEKATAVQAALRAEHLGQPEIVANAYAASVQALIAVLTVLNTQVKTLQGQVETHFGQHPAAEIIGSQPGLGPVLGARVLAEFGDDPDRYDSAKARKNYAGTSPITRASGKKKTVLARFVHNDRLIDALLSQAFSALRLSPGARAYYDRQRARGAGHNAALRQLANRLVGILHGCLKTGTLYDETTAWSHHAENAAA

SEQ ID NO: 439637 - protein, 338 aa, unidentified
MTTGLAAGTYKLFVGIDIAATTAEVSTQRPGAKAGRSFKIDQTPEGFHRLVHMLQATDNEPSHVLVVMEATGSYWMSLATRLVHEGFRVSVINPSQAHHFAKALLKRAKTDAIDAQTLAQLAMVLQPEPWMPPPQIYYELQQRLAQRDDLLNLRQQVRNQLHALDQYPEVIASVRTRMERLLVLFQSQIDEVEGEIAAALNQDSAWAAAAERLQSIKGVGWVTAAWTLVTTLNFTTCDTVDALTAYAGLAPMPRQSGSSVWHRPSIGHSGNGRLRTAFYMATLTAARFNPAIKAFYNRLLEAGKPEKVARCAAARKLLHMAWAVVKKDQPFDPNYAQG

SEQ ID NO: 439638 - protein, 338 aa, unidentified
MKTDQTTQTYALFVGVDIAATTATASILRPGAQAQRSFTINQTPEGYTSLLHKLQATGHAPCRVLVVMEATGSYWISLATRLVHEGLAVSVINPAQAHHFAKALLKRAKTDAIDAQTLAQLAMVLQPEPWTPPPQIYYALQQRLAQRDDLLNLRQQVRNQLHALVQHPEVIPEVRARMDRLLATFEAQLTEVESEITAALTQDSAWAAAAERLQSIKGVGWVTAAWTLVTTLNFTSCDTVDALTAYAGLAPMPRQSGSSVWHRPAIGHTGNGRLRTAFYMATLSAAQHNPIIKTFYARLRAAGKPEKVARCAAARKLLHISWAVVTKDQRFDPNYARG

SEQ ID NO: 439639 - protein, 414 aa, unidentified
MSRRVSEVEKVKRSASRSTVGCAIARAEPHVERRKGVIYTKHKRQTMDEIITAYVGLDAHAESTAIAIAEAGIAAPRFIGKVRAKFPELSKALGKLGEPQGLRIVYEAGPCGFATARQLRQAGYQCEVVAPSKIPRRAGDRVKTDRRDALSLAGLARAAQLTFVVVPDERDEAMRDLTRARIDAVRARLKARQQLKALLLRHDQRYIGKTSWSTAHERYLATISFAHHPQEVAFVEYRRAVGEAQARVELLTKALSEELEHWRMRPLVEALMTLRGVDQLVAMTLAAEIGELKRFAHATELMSYLGLVPSEHSSGQKRRLGAITKTGNSHARRVLIEAAWNYRYPARISARLQRRQENQSATVRDIAWRAQLRLNHRYRRLTARGLQHNKTCVAIARELAGFVWSIGQQITIQA

SEQ ID NO: 439640 - protein, 340 aa, unidentified
MSEITTIGLDLAKHVFQVHGIDAEGTTVLRKRLRRNQVLGFFSRLPRCVVGLEACATAQYWARELGALGHEVRLMPAQYVKAYVKRNKNDAADAEAICEAVQRPTMRFVAVKTAEQQAAQLLHRGREQLVRQRTMLVNALRAHLAEFGMVAAQGLRNVAQLIAIVRDASDLRLPDVARQVLQVLSAQLEHIEAAIAALEKQLMAWHKANAVSQRLASIPGIGPIIATAIATTVADPGVFRSGREFAAWLGLVPRQNSTGGKTRLGGITKRGNRYLRRLLINGASANLLRSKATKADPWVIGLRRRRPPLVVAVALANKTARIAWAVMLRKTEYQPRAVAA

SEQ ID NO: 439641 - protein, 342 aa, unidentified
MKNTTIAVDIAKSVFEIAVSEQQGQVSDRQRLSRAAFLRFFAQREPVTVLLEACGSAHHWARQLQGLGHRVVLLPPHAVRPYVPRNKTDRSDARALLEAARNTDIKPVPVKTCGQQALTALHRLRSGWLAARTARINTVRGLLREFGVVIPVGPKHVQQHLRATIEDVGSPLPESLRPVLALMAEEIHQIEERIDLVERQLQRLSKQMPVVARLQTIPGVGPISSTALVSFVGDITRFPSARHFASYLGLTPREYSSGLKRRLGTISKRGDTYLRMLLIHGARAVLWATHRTEPHEQLRCWASNVERRRGHNKAAVALANKMARLVWAVWKRGQDYQEVTAV

SEQ ID NO: 439642 - protein, 392 aa, unidentified
MICVGIDVAKDKHDCFIMSSEGEVLADVFTVSNSKEGFEHLLQTINTCTGIGNSKIKVGLEATGHYSYNLLGFLLDNGLTTFVINPLHTNLYRKSQSLRKTKTDRVDARTIASILMSDMSLKPYTNIAYHNSELKSLTRYRFDKVKERAALKSSVARLVNILFPELEKLLPTLHTASSYALLSELPSAKHIAEVHLTHLTNLLYVASKGRYSKDKAIQIREAARNSIGTYMPAKALELKHTVKLIKEFNNEIAEIESEIQSIMDKIDSPITTIPGISLRMGAMIIAEVGDFNNFDSPDKILAFAGLSPSTYQSGQLNNCYAHMEKRGSRYLRYALFNATKLVCYWNPLFADYLAKKRSEGKHYNVAVSHAAKKLVRLIFALQKSGQPYMANS

SEQ ID NO: 439643 - protein, 369 aa, unidentified
MEDRITYVGLDVHKEGIVVAVAEGGLRGEVREYGRIANTAAALDRLVRKLGGEGVRLRFCYEAGPCGYGIQRHLSARGHECVVVAPSLIPKRAGDRVKTDRRDAAGLARLHRAGELTAVWVPDAQHEAMRDLVRARLDAVHALRRAHQQLSGFLLRQGCHYGRPAWTKLHRRWLAGLKFEQAVHHIVLEDYIAAIEAAEARRDRLTAQIEAMLPDWTLASVVAALQTMRGMALVNAATLIAELGDLSRFANARQLMAYLGLVPSEHSSGASVKRGGLTKAGNKAARRLLIEAAWCYRFPARVSRELRLRQEEQPKPIREIAWNAQLRLCARYRRLARSGKPANVVTGAIARELAGFIWAIARCVPPAAG

SEQ ID NO: 439644 - protein, 335 aa, unidentified
MKKFDYYVGIDVSKLTLDVTFLYECNNITKTEHYKISNNEKSIAQFVNKKLGNYAAEQILFCFEDTGIYSLPLAYYLSDNKLFYWQVPALEIKRSKGISRGKDDKTDSNDIAHYAYSHKHKLRLSIMPAKYIQQLRLLFTEREKLLKSLASFEKTSENKNFVSKEVFNTVASVNKQVINQLKKALKNIEKEMLAVIEPEDCLKQQYKLITSIPGVGMQTAIYLIIATKGFEAFGNWRQLACYAGVAPFPYQSGTSIRGRTKVHPLADKKLKSLLNMCAICAVRHDKELKTYYERKVKEGKSKMLVINNVRCKLLARVFAVINRKTPFVNTCKFAA

SEQ ID NO: 439645 - protein, 341 aa, unidentified
MQVTTIGLDLAKHVFQVHGVDAADAVVLRRRVRRSEMVRFFGRLECCLIGLEACATAHHWARTLRALGHEVRLLPPHYVKAYVKRNKNDVADAEAICEAVTRPSMRFVPVKSVEQQGTLALHRGRELLIRQRTMLINALRGHMAEFGIIAAKGPSNAGALVALLADPADDRLPTSALAALRAIAAQLAMAEEQIAALHGEIVAWHRRSEASRRLAGVPGIGPVIASAIVATVADPSAFTSGRHFAAWLGLVPKQNATGGRQSLGRISKRGDSYLRRLLITGAQSVLRWAKKGKSSPWLIALLARRPRSVVAVALANKMARIVWAMLRRGEDYRNEAIASAA

SEQ ID NO: 439646 - protein, 333 aa, unidentified
MKETAISIRQDGKRIWRGKCASDPQLLAAVIRKRAPYVRRIVFETGPLSVWFYHALTAEGLPVICIDARHAKAALDMAANKTDANDADGLAHLAEVGFYREVRVKGFDSMLIRTVITARRQLLKMRLQISNQIRGLMKTFGLVVPKGAGSVFERNVRELLQGEEKLARIVVPMLRAWSNIRHQIAELSKQLAAMAREDQHCRLLMSVPGVGTVTATAFAAAVEDPANFRNSRAVGAWVGLTPRRDQSGEVDHDGHISRRGDNQLRALLYEAAAVILNRSRDTSTLRTWALELKDRLGFKRAAVALARKLAVIMHAMLRTGELFNPRGGTPVAA

SEQ ID NO: 439647 - protein, 400 aa, unidentified
MFVGWDWASAAHDVTMLDDNGRIVDRWALAHTEQALTSTLARLARHATPAELPVIIERPDGVVVDRLQAAGHPVIPVHPTAFHAARPRWGASGAKSDPGDSYKLADYLRTDGHRLRRLEPADPGLVELRSLTRLRDDQIRTRTATINQLTALLDAHWPGPRNLFYSLASDIALAFLTAYPTPQAAARLGEARLSAFLRRNSYRGGKTAAELLACLRNAPTAPAGLPATSLTAMIHAQVQLLRAVQSSIHDVEQLIKQRVAEHPRTRLLATLPGVGQINLAQLLAEVGPILNRVHSAEQAAAECGATPVTKESGKTRGVYFRWAANGRARKAITAFAHNARMQSPWAAKLYADARSRGKRNPHATRIVARAWLRVIWACWQTNTPYNPAAHRAEALQTTRT

SEQ ID NO: 439648 - protein, 344 aa, unidentified
MEIVTLGIDLAKNIFALHGVDAAGKVVLQRPAVKRAKLLELTAALPPCLIGMEACSGAHHWAREMARQGHEVRLIAPKFVAPYRLSGKRGKNDAADAQAICEAVARPAMRFVPVKTVEQQSELFLHRARQGYVEQRTALINRIRGLLSELGIVLAQKADTIRRELVPLLEDLPGHCNTVVADAITDLERLDARIAEYDRHIAQCAKANADARRLMQLSGIGPTTASALVATVGDGHDFASGRQFAAWLGMVPGQYSSGGKQRLGRITKAGDRYLRTLLILGARSVLQSGKKKDDPISRWTRDVEDRRGYWRAVVAMAAKNARLAWAVLRRGEAFRLYGQEVAAG

SEQ ID NO: 439649 - protein, 372 aa, unidentified
MDESSKTLYVGLDVHKDSIAVAYAPEARGAEVLSLGAIGTRQSDLDKLIRKLQSKGATTLVFVYEAGPCGYGLYRYLTGKGVACHVVAPSLIPRKAGDRVKTDRRDAMTLARLMRSGDLSAIYVPGVEDEALRDLSRGRDDAMQDLKRSKRRLKSFLLRQDIRYEGRATWNAAHLRWLSEVVCPTPPQQIVFQEYVRAVSEQQDRRQRVEHELHEAVKHWRLYPVVEAIQALRGVELTGAVILLTELGDLTRFENPRQLMSYLGLTPSEYSSGERRRQGGITKAGNSHARRALVEGAWAYRYPAKVSRHLQLRLEKLPVEVQAISWKAQVRLCKRYRQLTARGKHVNQVVVAIAREMAAFAWAIARLVPLAS

SEQ ID NO: 439650 - protein, 372 aa, unidentified
MEQNTTYVAFDTSKETIAVALAEGRRRGEVRFFGTVANRPEAVRKLVDKLAGRHSRLAFCYEAGPTGYGLYRQIRALGHDCQVVAPSMVPVRPGGHIKTDRRDATTLAALFRAGELTAIWVPDAAHEAMRDLVRVRQTATEGVRRARQQLLSFLLRHGRIYPTKRHWTRAHRRWLAEQRFEHPAQQIVFEELIQAVEQAIARRDRLQQQMIALVPSWSLQPVVAALQALRGVAMVAAIILVAEIGDFRRFATPRQLMAWLGLVPREHSSGGSTSRGAITKAGNGRARRLLIESAWTYRLPARIAAELLARSAALPEAVKAIAWKAQVRLCARYRRLRCTGKPTNVVTVAIARELAAFAWAIAITVMPAPQTA

SEQ ID NO: 439651 - protein, 350 aa, unidentified
MCSLPVFVGLDYHDASVRVCVLDTDGRELANADRCNDWKAIAEFADRFGRPVRAAIESCCGAADLAEELVSCAGWSVDLAHPGYVQRMKQNPDKTDYQDAQLVADLERIGYLPRVWLAPQHIRELRQVVRYRLQLTEQRRATKLRVRALLREQRCRAPQGVNAWTKAWDHWLRHTAELSAEGRWVANQHLQELACLVTRIRQVEKRLERLTANDVEVQRLQQQVGIGPVTAWTIRAEIGHFDRFRTGKQLARFCGLSPRNASSGQRQADAGLIRAANPALRTVLIEAAHRLVNYDRYWQKFAQRLRAAGKPGSVVAAAVANRWIRRLYHEMKTPSGELAVAVRSARSEDS

SEQ ID NO: 439652 - protein, 369 aa, unidentified
MEERIKFFVGLDVHADSIEVAVAEAGRQPARCVGRIAHDVAKLLKLLKPYGDSQYVHVVYEAGPTGYGLQRALAKRGYRCQVIAPSLVPKRAGDRVKTDRRDGLRLAELSRAGELRAVWVPDPADEAIRDVARAREDAVKARMQARQQLKAFLLRHELRYPQRTSWTKTFYRWLATLSFQSDGAQTAFTEYWQAVTAADERVGRLSAALVRSIEDWRFEPVVKALLALRGIDHISAIGLVAEIGDLSRFAHPRQLMAYLGLVPSEHSSGERVVRGSITKTGNTHARRLLTEAAWSYRFRARIGYGAQRRAEGLPQVIRDLGWKAQLRLSGRFARLQARGVHTNKVCVAVARELAGFVWAIGRQAQLEQH

SEQ ID NO: 439653 - protein, 388 aa, unidentified
MATQIDDLSRSLVALEQDTTLIAAVELSQSSWLVGAIVPGLERQPQKKLEPDPSALLKLLERWRDEGVKAGRTMRRIVLAFEAGRDGFWLARWLRKRGIETHVIHSTSVAVPREHRRAKTDRLDLAMLMRVFLGWLRGERKHCSMVAIPTLEQEDAKRPSRERESLTGEKTRIVNRMKGALARLGIRGFKPELRKAPQKLAALSTPEGVVLPPNTRAEIERDMARLAVVRGQIEVIERTRLERLQQAPADGPNAMVLLLARVIGVGIETADMLVQEILSRTLRDRRAVARYAGVTGSPDESGAKRREKGLAKAGNARVRRGLIQLAWRFLIFQKDSALAQWYRVRTDGTKGARKTTMIVALARKLLVALWRLVTIGEVPEGVVLRPAA

SEQ ID NO: 439654 - protein, 420 aa, unidentified
MSLKDCAAFVGIDWADQEHAICLIDAQTQKSEQHRIDQDPEAIDQWVATQQQRFPGQKIAVCLEQKRGALMYALMKFECLLLVPVNPKQLARFREALGSSGAKDDPSDARLLAELLIKHSEHLRSWQPDDERTRKIRLLAEDRRNLVNERTALTNRLKSRLKQYFPLALEVCGKSIYGALTCQLLLRYPSLQKLQAATDDQLTEFYREQHCYRSQIVAERLCLIRHATPLTTDPAIVDSSTLIVEVLVQQILTLNEAIERYDAQLTAMMEEHPDADIFRAFPGAGDAMAPRLLAALGSDRQRLSDAQQVQQISGIAPVTRQSGKSRIVQRRWAASRFLRQTFHEFAAHSIKQSPWAKAYYDMMRARGNKHQAAVRALAFKWIRIIYRCWKDRTLYDEMAYCAALIKRQSPLLKYLSTTTN

SEQ ID NO: 439655 - protein, 346 aa, unidentified
MEHYVGLDVSLKLTAICIVNELGKIVREGAVASNPEAIAAFVKSHAPHVARIGLETGATSTWLWTELSVMGLPVICIDARHAKAALRMQINKSDRNDAVGIARIMQCGWYKEVRVKDLDSHAVKGLLVSRALLVKIKRDLENQIRGLLKNLGLVIGRAKMNVFAVRAAELVEDRPQLAAAVEPLLKTREAVELQIADLDRKALRLARNDVQVRRFMTVPGVGAITALCFLATIDDPTRFKRSRSVGAYLGLTTRRYASGEIDWTGRISKCGDKLLRSYLYEAANVLLTRVAKWSVLKAWGIRVTKRSGLRKAKVAVARKLSVILHRMWVDGTEFNWSAKEVAAQSA

SEQ ID NO: 439656 - protein, 343 aa, unidentified
MEHFAGIDVSLEQSSVCVVDGAGKIVRETKVTSEPEVLVRFFRALEIGVTRIGLEAGPLSQWLHAGLVAAGFEVVLLETRHVKAALSATVNKTDRKDARGIAQLLRMGWFRPVHAKSPGAQEVRALLVARKLLQTKLLDVEFSIRGILRGFGLKMGKTSKGQFVARVRELVLGHPMLELITEPMLRAREALRTAYASLHGEVLAIAKPDEVCRRLMTAPGVGAVVAVTFKSAVDDPGRFIRSRALGAYFGLTPKKYQSGERDVTGAISRVGDAMVRATLYEAANIMLSRVTRFSSLKRWALDVAKRRGLKRANVALARKLATVLHRMWIDGTTFHWGKQAAAV

SEQ ID NO: 439657 - protein, 322 aa, unidentified
MVVVGADVHKHTHTFVAVDAVGRQVGQRTVAATTAGHRKALAWAREQFGEELTWAIEDCRHLSARLERDLLSAGQVVVRVPPKMMAEQRRTARTRGKSDPIDALAVARAFLREPTLPVASHDGISREAKILTDRRESLVNTRTRTINSLLWRVHELDPGHAPKPRSLDLAKHQQALRAWLVTLEGIVAEMALDELEDIIALTGRIKAFDKRLAVLARKHTPALLALPGCGELTAAKLLGESAGITRFHSEAAFARHAGIAPIPVWSGNTAGRVRMTRSGNRQLNAAIHRIAITQARMPGTSAGPTTRRSSPKASPRPRPCAA

SEQ ID NO: 439658 - protein, 426 aa, unidentified
MQTVAQLDPLALVGVDWASEEHAICVLGTDGRQQAGFSVAHSKDGLAGLLRRLGRHGERARVPVAVERPDGRLVDALLEAGHPVVPVSPNAIKAWRESEVISGAKDDPGDAEVIAEYLRLRSHKLTVAVPYSEETRALRAVVRTRDDLVAQRVAAGNQLDACLDAFWPGAKAIFADTTSEIALAFLSRYPTPGSARALGERRMAAFLVKHGYSGRRPAAELLERLRSAPEGIADGPEAEARRDAVAGYVRVIRALNTSIKALDRSIAAHLGEHPDGEIFTSLPRSGHINAAQMLAEWGDSREAYDSPEAVAALAGQVPVTKRSGKHHAVSFRWACDKRFRAAMVTFADNSRHASPWAADIYRRARTRGADHPHAIRILARAWIRVIWRCWQDRTAYDEARHGAARQLGQPNTTAEPAPTPTATQAA

SEQ ID NO: 439659 - protein, 433 aa, unidentified
MPTTHPYDLVIGLDRSDRKADLHLIDTRTDTVQKQTVATSPEALHDWLAQLRQDHPQARVALCLEQPAANLIVFLETYSWISLYPINPITLQKFREAFVTSRAKDDGKDAQYLAELLLSHHDKLKPWQPDDSQTRQLQQLVLHRRAVVDQRTGLTNRLIALLKQYFPQALDLCGEDLWRPLATAFLLKWPTLQSLKKARKESLKQFYHLQGSRSQTLIEQRLERIDKAVPLTDEIALLQSYTLRVQLLCKELQLLLKTLQEFDQQIANVFQQHTDRPIFEALPGAGPVLAPRLLASMGSERERFAQPENLQCFSGVAPVTKQSGGKCYIHRRYCCPKFLRQSFHEYAKESILHSRWAAAYYGQQRNKGCGHHTAVRALAYKWQRIIWKCWQTRTVYKEAIYEAALKKNKSPLVGLLDQIELGKSPVKSRTKKS

SEQ ID NO: 439660 - protein, 348 aa, unidentified
MYTRKDIVLAVDYHDKNLVVRSLNCHTGEERLLKRPTTPEAIAELVDDSVHQAREAGGGVFWIMESTTGWARVKALLGNRARLIMANVLQMPLPPKARRRKTDKIDTQRLLREFLNGSLPLAFQPSAWFRQVRRVVSARESLVSRRTAVRNWIGRYLAHETWLPRTGLWSAKGMRWLRRLPETIDGPDRVVLWVKLDELEQLAGLLGPIEAEILHIHGHWPAAQRVDAIYGIAQISAVSILARIGPVERFTNAEQLISFAGLAPGIHQSDGTRRNGRIGGGGTDKHLRHYIIEATLWARRIPRYRPTYERVERKRGKKIARLVVGRLLLRSIYKMLRAGVQFDRLPAA

SEQ ID NO: 439661 - protein, 397 aa, unidentified
MIAVGIDISKAKSTVAVIDSDGTVLASPFTMAHTQPEMEAFVSYLKGLGEPTTILMEYTGHYHYPVLKKLQDEGFPVCIVNPYQMKKYGDVEIHKAKTDKKDALRIAAYALEKSYKLVPYSSMEQKYEDLKFLSRQYSQRITYVAKLKVQLIALLDQTMPGITRILPLNSRNPEKCALLLFIKRFKSFDEIQRIGKARFLASYDVLAKKTSERSASSKGLSIYELAVDSITTRGEDPYIWLSQNQCVDLLSATQNAADEIISQMRNIAETIPEYKVLRAMHGVGDRLGPIILAEIGDVHRFHSGKALNSYAGNDAPPYQSGQFESRNRHISKRGSSALRKACYEVMQALKLIKPQDDPVYLFMLKKEQEGKPFNVAKMAGVNKFLRIYYARAMELYK

SEQ ID NO: 439662 - protein, 397 aa, unidentified
MKCPQGLHYRGSVAHSAVRRVRERHIQHKGGTEMNSVHYVGMDVDKEKIVLARLGAGRTAEVHEHVIANTPSAVKKYFTALLADAEVHASYEAGCFGFGLYRQLSGMGVTVVVAAPGLIPRKASDHIKTDRRDARTLAMTLRAGQLTGIYIPTAQDESVRDYLRMYEDLRGDLRICKQRVLHFLLRRGIRYDQGGPWTVKHKNWLSSLEFSDPRDRKTLDMYLSTMQEIEGKCSEAAEEVEQIASQDRYREQTKKLTAFKGIKTLIALSFVAEIGDFRRFPNARQFMAYLGLVPSEHSSGNKRRQGGITKAGNSHLRRLLVEAAWHYRSYHPSSRVLTERRKGMEPQILTYANRAGRRLSRKYMHLLHRGKRSQVAVTAVSRELAGFLWGAMTGQVA

SEQ ID NO: 439663 - protein, 420 aa, unidentified
MNDSPQWQQYQAFGALDWGSQTHSVIVIDAAGKVMEDFAIEHSALGWKQFRQKLQVYGSIPFAIETSQGAAVEQLLEAGMIVYPLNPNRAQAYRQRKAPSGVKDDRLDAWSFADALRVDGHGWKALQPEQPLTKELRLLCRDEVSLIEQRTALIQQLRQALAEYYPAALEAFEDWTSVSAWMFLQRFPTADSLAQAGRRQWQKFLHSRRLWGSDQGPRRMEIFAHATELAGSEPTVKAKSLLALSLVQMLFAVQKQLELYRQRIEELFARHPDHDLFGSLPGAGSKLAPRLLSEIGDDRQRFEADAQALQCFGGTAPVTIRSGKDRKYWPVHQRQACNKHLRHALHLFAEQSLSRCVWAHIYYQHHRQKNQSHANALRRLAHRWLKIIHKMWLDRSPYNAELHHRNQLQHGSWIFQFQKS

SEQ ID NO: 439664 - protein, 369 aa, unidentified
MGDRITYVGLDVHKDGIVVAVAEGGERGEVREYGRIANTPAALRRLACKLGQQGVELRFCYEAGPCGYGIQRQLSALGHECIVAAPSLIPKRPGDRVKTDRRDAASLAKLHRAGELTAVWVPDPGHEAMRDLVRARLDAVRALRRARQQLSGFLLRQGCHYGRPAWTKLYRRWLAGLKFEQAVHHIVLEDYIEAVEAAEARRDRLTAQIAAMLPDWTLAPVVAALQTMRGMALVNAATLVAELGDLSRFANPRQLMAYLGLVPSEHSSGASVKRGGLTKAGNSAARRLLIEAAWTYRFPARVSRELRLRQEEQPRPIREIAWKAQLRLCARYRKLARSGKPANVVTAAIARELAGFVWAIAQRVPPAVG

SEQ ID NO: 439665 - protein, 423 aa, unidentified
MKLTYKVCCGVDVHKTFLVATIITSSFVLPQYQQKRFSTFYSGLLAFKQWLLDNDCKDVCMESTGKYWVPVWNVLEDSMHVVIANPKWVSAVKGNKDDKKDSKWIGDLFRMGLVPGSYIPPKDIRILRECTRYRSKLVAMRSSEKNRFQNAFTVCNLTLDAVVSDMFGKSSTDILNYLLDTDTVDPDHCVSLLRRSLKKKASDVVEAVKGFNMTAEQKERVRIVQGHFADIDKRISQIDQIIAKLTAEYEGTISLLCTIPGIDRRLAITIVSEIGTDMTEFGSSKRLCRWAGLTPGNNESAGKKKSVRISRAGVYLKPVLVEAAHAAVKATQKCPYFRIKYERIMKRRGKKRAIIAIARMMLTAIYAMVSTGETFNPCDLQKFDMPEELKKKQIISDAKDAVKLLVSLGLVAEGSISLEALAG

SEQ ID NO: 439666 - protein, 369 aa, unidentified
MEKDTTYVALDDSKRKIVVGILRSGDTQPELREIANDPRQIRRLFERLKREGPVAACYEAGVSGYDLHRQLIALGVAGAVIAPALTPRRPGQRIKTDRRDAAKLVRLFRAGELTAIHVLDESEEAVRDLVRCRDDIRRDVLRWRHRVLKLLARHGRACLTGKNWSRAHWRWIREQRFDLPPLQRAFEATLFALEQALARQAELDKELEAVAATASYREPVGWLRCFRGIDTLSAIILLAEVVDFQRFRRPRELMAYLGLVPSEYSSGESQRRGALTKAGNSHARRILVEAAWHYRHRPTIGRALASRTHGQPDEVVAQAWRAQQRLHRRYRHLVGHGKRTPVAVAAVARELVGFIWAAMTRHESRRAAA

SEQ ID NO: 439667 - protein, 429 aa, unidentified
MSEVELVQSEPSYSAFIAIDWADKTHVWCLQVAGAEQRESGELEHTPEAVEAWVAQLCQRFCSVPIAVAVEQSRGALVFMLSKYEVLHLFPVAPTMAAGMRAALYPSGSKDDPRDADLLLDLLLHHRGKLRRLQPDTEATRRVQNLVEERRKLVDEKTLQSNRLTSYLKIYFPQMLNWFEHLDTEPVCALLLRWPTLEELQRVPPSQLRTFFRKHHCRDQKLNERRIQEIGQAIPAIRDRAVIEAKSTVVKVSARMMHNLLEGIAALDEKIEEAAAAHPDFFIFDSLPGAGAVMAPRLLAAFGSQRERYGSAREVQTYSGIAPVIERSGKKKWVHFRRACPKFLRQSFHEWAGHSIAQSVWARSYYQQLRSRGKGHHAAVRALAFKWIRILFRCWKDRVADDEVKYLAALAGRGSPLAAVHVAMTGEAL

SEQ ID NO: 439668 - protein, 351 aa, unidentified
MSTNAAKQNVTTIGIDIGKNTFHVVGLDSRGEIVLRQKFSRGQVEVRLANMPPCLIGMEACVGAHHLSRKLLALGHDAKLIPAQFVKPFVKSHKNDFRDAEAVAEAVQRPTMRFVPTKSVEQLDLQALHRVRARLVSQRTAVVNQIRAFLLERGVAVRQGIRFLRHSLPDILANRGDVLTPRMAHMIEELAQDCQRLDTRIDNVTEEIEAFVKRDEACERLMTVPGIGPIISSATVATIGDGSAFRRGRDFGAWLGLVPRQISTGDRTILGRISKRGNRYLRMLFVQAARVILLRPANWHKYSFGRWLEAAAKRMHHNVVAAALANKLSRIAWSVLYHGRGYEARIGAQAT

SEQ ID NO: 439669 - protein, 326 aa, unidentified
MANKLESSVYVGIDVSKASLDIAVRPSGEHWQVENTSEGIASLVAKLQSLTPVSIVLEATGGYETAVAVSMSVVKLPVAVINPRQAREFAKSLGRLAKTDKIDASVLAHFGEAIHPEPRVMPDEQTMLLQAALVRRRQIVEMMAAEKNRLHTAHKSIQPRLKEHITWLEAERDELDKELYDQLSNSVVWREKESLLRSVPGVGPVTATTLLAELPELGHLDRKKIASLVGVAPFNCDSGKKRGKRSIWGGRASVRNALYMASLSAKRYNKVIKAMYDRLILMGKPAKVALVACMRKLLTILNAMMHAGKSWQPDLASSKLTVASKS

SEQ ID NO: 439670 - protein, 364 aa, unidentified
MHSINNIELSSLEETRCQFNGGRCAIKLGIDVHQDFYVVVEQVEGSNPKPPQRFAKEAFLHWATRLKQKSSAEVYAVYEACGFGFSLQRKLSALSINCYVVCPQKLDEQNRRVKTDGLDAKALCLKLDRFVQGNRDALAIVRVPTEEHEQLRAIHRQREQLVGARKRLEAQGRSLMVNHGLEPVQNWWKPRTFAALPAPQWMKELLANSQPILVALQQKISALTVQLQSAASPDQPRGLGKMTSVLIDREIGDWNRFNNRRQIASYTGLCPGEYSSGNTRLQSCVTKHGNPRLRTALVELAWRLVRFQRDYKAVRKWRQVLAKGALATGAARKKAIVAVARQLAVDLWRIKTGRLSAEELGLIN

SEQ ID NO: 439671 - protein, 346 aa, unidentified
MYDRKDIILAVDYHAQNTEVRWLNCASGEERCLRIPTTRGGILRLMEKAVGEAGRVGGQVVWIMESTTGWARVKELIGSRVQFIMANVLQMPLPPKAYRRKSDKIDTGRILREFLNGSLPQSYQPTAWWREVRRLVDSRQDLVERQTAVKNWVTHFLHHETWYDREGLWTQKGMNRLRAFRLSASDRMVLNLKLQELEQLAQRRGEMEAAMQGVYDQWREAQWVDEVRGIGMVTAVSILAHIGLIERFPSAEDLISYAGLAPGHRQSDQTAHNGRIGGGGTDSQLRYLLIESMQWVCQIPRYRPAFERAQAKHGTNIARIIVARMLLRSLFKVLRDRVRFSQVQAA

SEQ ID NO: 439672 - protein, 414 aa, unidentified
MTVAFSFAHFAAIDWAKQTHHAVIVNHTGQIVTEFSFSHTLEGWQQGRQRAARLAPLAVAIETSQGVVIDQLLQTPDCTIYPLNPKAARAYRNRKAPSGTKSDHLDAWSFADALRLDGSAWKPLSKQDPLLEQLHLLCRDEIALIEERTALVNQLLAALHEYYPSALAAFEDWTLPAAWAFVEAFATPQALAHAGKRRWEKFLHTHKLARPETYQKRLELFAKATEFGASEALTLAKSRLALTRVRQLRVLQIQLDDYRQQIEKLFEQHPDHEIFGSLPGAGPKIAPRLLGELGSDRHRFESPQALQCYGGTAPVSYQSGLVHQVRLRTQCNLVLRSTIHLWADRSRHACPWAEIYYQSLRKRGKTHACSLRCLGQRWLKILWKMWQTRAAYNSELHQQNQLRHGSWVLKLHNA

SEQ ID NO: 439673 - protein, 338 aa, unidentified
MAIVTIGIDLAKNVFAVHGVNEAGKPVLVKPTVARGKLLELIASLPPCTIGMEACSGAHHWARLFMAHGHTVRLMAPKFVAPYRLSGKQGKNDAADAAAICEAVQRPHMRFVPIKTVEQQGQLCIHRVRQGFIEQRTATINRIRGLLSEFGIVLPLKATTIRREAMAHLEDLPGWANTVIGDLLSEVSHLDERVEQYDQHIAQIAKEDSRTQQLMRLPGVGPTTATAILAMIGNGHEFKCGRQFAAWLGLVPGQYSSGGKARLGHITKAGDSYMRSLLVLGARAVLNSAKNKSDSTSRWAVALAERRGYWRAIVAIAAKNARMAWASLTLGERFAMPA

SEQ ID NO: 439674 - protein, 349 aa, unidentified
MKIIGCDFHPGYQQIAMWDKATGETLEKALSHERKEEVRAFYAGLEGLMRVGIEASGQSQWFERMLAELGHEVCIGDAAKIRASCERKQKTDRRDAELLVKLLAEDRFPRIWVPTPAERDARQLLLHRHKLVRMRTQVKNQLQALALNQGVQRKWKLWSAAGRQQLEALPLLPWASRRRAELLVLLDQLGASIGELDSAAVEQAHIRPAARRLMTHPGVGPITALAFALTMGPVDRFRRGKQVASYLGLIPREHSSGGRGQRLGHISKQGNPFLRGLLVEAAQSAVRHEPEMRRAYQRLAQRKCRALAKVAMARKLAVRLYWMLREEVDYAQLLQGSHAGQPESSCGRG

SEQ ID NO: 439675 - protein, 355 aa, unidentified
MKNQAIYYLALDVHQATVVASMRNEQGVVVMRATVRTEAQAVVGLVRAAGGRVHVAFEEGTQAQWLHDVLEPHAERVIVCNVRGKNEVANKSDRLDADDLSERLRLGSLKAVYHGTPSVLTLKELVRNYNSIVEDATRVMLRIKALFRARAIRTPGRSVYRPAQRHEWLDQLTTPGARVRAASLLEQLDLLLELRSKAKAAMIAEARKQPGWKPLRSMPFLGVIRVSQLLAIMATPHRFRTKRNLWPYAGLAVVTRSSADQEFAGGKLRRRARAARTRGLNRNHNPMLKSIFKGAATAAAAKAGPLKDSYDACVARGTKPELARVTLARKIAAIALRLWKKGELWDPAKLTIATT

SEQ ID NO: 439676 - protein, 416 aa, unidentified
MDTMYERCCGLDIHKKTIEACFRSGKKKTHMSFGTTSAELRKLTMWLVENDCQSVAMESTGSYWKPIFNILELSGTDMKIIVVNARHMKNVPGRKTDVNDAEWIAELLQYGLLRPSFIPDREQRELRELSRYRKSLVGERAREINRLQKMLEGGNIKLTSVVSEVTGYSSRRLLDRLLRSDEPMTEDVISGLVHTSLVGKSKELETALDGLLSELQKELLIKVLDHIDDMSRRIADLDDFCRKQMERYEDALDKLDEIPGIARRTAETILIETGLDMSRFPTAKHFARWAGLAPGNNESAGKRSSGRTTKGNPTLKSTLIQSAKVAARKKDSFFKARYQKIAARRGANRASVAVAHSMLIAIYHILKSGERFKDLGEDYYNQFNREKKKNYYLKKLTKLGVNLKEATLSISIQTAT

SEQ ID NO: 439677 - protein, 412 aa, unidentified
MQTLIERGCGLDVHQATVVACLLIVRKDGKVQKQMRTFATTTRELVGLRTWLLSEGCTHVAMESTGVYWKPIYAILEGALEIVVANAQHIKKVPGRKTDVKDAEWIADLLCHGLLRSSFVPPKPIRELRDLMRYRHKLVESQAAERNRLLKVLETANIKLANVATDVFGISGRLMLRALIEGKATPQDMAQLAKGLLRKKIPELQLALEGKLEQYHRFLLELQLQRLEAAEKDLAALEQRIQQRLEPYAAQLALLDEIPGVDWILAAVIIAELGVDMRVFGSVSQLASWAGVCPGNNESAGKRKSSRIPTGNVYLKSALVEAANAAARAKGTYLRDKFFRLKARRGYKRAAVAIAHKILVAIYHMLSQQVSYNDLGDLYLDKRNKNHLTRNLVHRLERLGYTVTLTLQQKAA

SEQ ID NO: 439678 - protein, 364 aa, unidentified
MRKVYYIGLDVHKDNTQMAVLEMKGKEPVTVKVIDSDPMKVAKAILPYRKEGAVRVAYEAGCMGYTLYRVLTEMKIDCQIIAPNKVFRGGNNERIKTDKRDAVAIAWMLRRDEGAGIAVPDREDEAARDLLRCRGDMKDDLKRAKQRLLKFLLRHGHNYENTRYWTGKHRKWMKTLAFEMALDKAVFEQYMYTIESIEERVARIDLQIQEIAESPRYSERVRKFRSFKGVDYIIALSLVCEIGDFKRFPTAAAFMSYLGLVPSEYSSGKKRKQGGITKTGNGHIRRLLTEAAWHYTRPARVSKRLAGRRVGTSESVISYADRALSRLHGKYVKLLFNGKSKQAAVTAVARELSGFLWGVMTTAA

SEQ ID NO: 439679 - protein, 470 aa, unidentified
MSKVKAKKTKAQDIISMQVVNPYSAGIDVGDKEMVVAVPEGLSEPRVRTFGTMTCDLHEIAAHLKVCEIDSVGMESTGVYWKPLFRLLIHEGFEVNLVNAAHVKNVSGRKDDENDAMWIQKLHSCGLLKSSYLPDEEQEALRTLVRHRKTLVQDSCRFVNRMQKSLELMNVKFHTVISDIVGETGRAVVEAIIGGERNAANFLPLISKRIKADLSTIEKSLQGNWLEEHLFTLKQNYEMYKIFWEKIAVCDQQIEKQLQQYEAKCNEGVIEEPKKVKEEPTVTPVGKKGKVVKKYGDKNRPRFDVHGYLERIYHVDVMAIHGINSTSALDIFAEIGTDLSKWKNEKHFVSWLNLCPNNKISGGKLISSKLFHKKPNPASLAFRAAANGVQKSDNWLGDYFRRKKAKGGNKYAIIATANKIATIFYKMVRHKEDFKPVDLEQYQQKYKQVKITFLKRKLAQLEQETEKVAA

SEQ ID NO: 439680 - protein, 348 aa, unidentified
MDHIIRIGMDTSKHVFQLHGVNAAEEPVLRRKLRRNDMVVFFERLAPTIIAIEAAGASHHWARLLRSFGHEVKLIAPQLVKPYVKRGKNDAADAEALCEAMSRPTMRFVPVKTAERQAALMLLGLRDRLVRNRTQLANAIRGYAAEFGLAAAKGIAHLAPLLARIQSDESLPGLARELFAAHAQEYAQLQAQIDEVEGKLMAWHKTNPGSRRLAQIPGIGPIGAAMLIMKTPAPETFRSGRQFAAWIGLTPKDHSTAGKVRLGVITRAGDEGLRSALVVGATAVIRHLRNGKGRSMLSAWVEQLLKRKPPKLAAVALANKLARIAWKLMVTGETYTAKPRPIASAGIA

SEQ ID NO: 439681 - protein, 410 aa, unidentified
MQTLVERGCGLDVHQATVVACLLIVLKNGRVQKQVRTFGTTTRELMGLREWLLSESCTHVAMESTGVYWKPIYAILEGAFEIVVANAQHVKKVPGRKTDVKDAEWIADLLCHGLLRPSFVPPSPIRELRDLTRYRRKLVESRTAERNRLLKLLETANIKLASVATDVFGVSGLLMLHALVEGKATAQEMAELAKKQLRKKIPELELALEGKVEEHHRFLLRVQLRRLRTVEEDLGILEQRIREKLKPYAAQFTLLQEIPGIDETLAAAIIAELGVDMGVFESVSQLSSWAGVCPGNNESAGKRRSSRIPKGNVYLKTALVEAANSAAKAKGTYLRDKFYRLKARRGYKRAAVAVAHKILVAIYHMLSHQVCYNELGDVYLDNLNKHHVTRNLINRLERLGYAVTLQQKAA

SEQ ID NO: 439682 - protein, 309 aa, unidentified
MTTSSYVGIDVSKDRLDVAVLGEEHEWQVNNTQTGIANLVQQMQEICPTLIVVEATGGYQRAVVEALFVAGLAVALVNPARVREFARACGLLAKTDKLDAQVLAVFGQRVQPRRYQGKSEAEKQLSALLVRRKQLEEMLKAEQNRLRTITPSLQGWVERIIAVLKEEKKRLDEQIRETIKQQKAWQEQSEILRSAPGVGPVTTATLLAELPELGKMDRQKIAALVGVAPMNYDSGKKRGYRKTKGGRGEVRSVLYMATLVATRCNPVIQTQYQHLLKRGKEKKVALTACMRKFLTILNAMQRDQQPFHM

SEQ ID NO: 439683 - protein, 397 aa, unidentified
MYIVGIDIAKRKHEAAVIDGEGAVIIKPFSFTNNCSGYNRLLAMLAKAKLPLDEVSFAMEATGHYWLALFTRLQKEGFRVQVINPVQTNSIRSFYIRQVKTDPRDALLIAEVIRFGHFSESTLHPENIYELRELCRGRHAIVSMQADVKRKVVALLDQVFPEYETAFTNLFGDTSMAILQTCPTPKELSETPLEELCHLIEVSSHKRFRMAKAQELQALARNSFGFAMAGDVFSTMIRLYAKHLDFLKQQVREMDRKIAEIMDTMDTPITTITGIGPTLGAYILSEIGDISRFSSAAKLAAYAGIDPTMRQSGEYNGVRNRMSKRGSPYLRHAIWLAASSAVLHDPALKLYFQKKRDEGKPYMASVGHACRKMVSIIYAVMRDNKAYTPCIQNEISA

SEQ ID NO: 439684 - protein, 423 aa, unidentified
MKTNWTQHTHFAALDWACDHHDVIVVDHAGSIVAEFRFAHTATGWAEFTDTMKPFAGCPLALETSSGPAVDQLLQRNWPLYPVNPKAAQRYRERKVPSGTKTDRHDAWSLADALRTDGQGWRPLLAQDEATVTLRALCRDEITLIEQRTALANQLIAALREYYPAALEAFDDWTDPNAWALVARFQTPAQLQQAGKRNWEKFLHTQKLWRPATAPERMKIFAAANALPAGPAIVSAKSLLALSLVRVLQALEKQLDEYRQRINQAFAQHPDYDIFGGLPGAGQKLAPRLCAELGTVREVFPDADALCCHAGASPVSFQSGQINKARIRWACDTVLRHTVHLWADCSRRKSAWAEAYYAKKREAGMSHAAALRCLGKRWLKVLWRMWHDRKSYDATVHEQSLKEHGSWVSALLGATEATTTISQ

SEQ ID NO: 439685 - protein, 315 aa, unidentified
MSEKTIEIFVGIDVSKDTLDIGIHPSKETFQVAHDDEGIAQVVARLREVGPELIVLEATGGMEIQAASRLVTAGLSVAVVNPRQVRDYAKACGQLAKTDRLDALVLADFARAIRPKVRPLKDAATMELEALLTRRDQLVKMRVQEQLRLGAASKVQIKSLKSHIAWLDKRITELDDDLTKRLRESDAWRVKDDLLRDIPGIGPVTSVNMMARLPELGTLTNREIGKLVGVAPLPDDSGKYRGKRFIQGGRADVRCVLYMATITAMTRNPVIKVFAERLKKTGKPPKVVIVACMRKLLTIMNAIIKNNTPWNPKTA

SEQ ID NO: 439686 - protein, 385 aa, unidentified
MPTPNDLSRSLTAFDQHRTLIAVIEMSQSSWLVAGVVSGIDRQPLKKLDADENALLRLLHRWRDEVEGRGVRIERIVVAFEAGRDGFWLARWLRSRGIEAYVIHPSSVAVSREHRRAKTDRLDTELLKRAFLGWLRGEREHCKMVAIPTLAEEDAKRPSRERESLVAEQSRIINRVKSALARLGIRGFNSKLKRAADRLEDLRTPEGEPIPPNTLAALRRDLARRRLLREQIKQIEEARLERVSSATGERPNAMVQLLARVMGLGIETADMLVQEVLSRDMRDRRAVARYAGLTGSPDESGARRREKGLARSGNARVRCGMIEFAWRFLRFQKDSALAQWFLKRTADARGTRKKMIVALARKLLIALWRLVREGVVPGLVLRPAH

SEQ ID NO: 439687 - protein, 350 aa, unidentified
MINFYNGQHAYYCGVDLHKKTMYVYVISREGETVFHKNIATRPEEFLRAVAPYREGLVVAVECMFAWYWLADLCRREGIAFILGHALYMRAVHGTKTKNDREDGYKIARLVRGGNFPLAYVYPAEWRPTRDLLRRRGYFVRRRAELLTHVQNTVTQYNLPPLKRKIAYKANREGVAELFPDPMVRKSIEADLELLDYFDDVIGRLELDLERTAKVHDAQSFFLVKTIPGVGRIIGMTLLYEIGTVERFPRIQDFMSYCRLVRPPKTSAGKPTGEASGKKIGNAHLKWALSEATLLLVRESAAVKVQLARLESKHGKGKALSILSARLGRSVYHMLRKREAFDMKRFLGQS

SEQ ID NO: 439688 - protein, 415 aa, unidentified
MGRAARDGNFVAVSNRWSASDAPAERPRPAPGQALSRSLVALDQNSTIIAVIELSQSSWLVAGMLPGIERQPRKKLEPSPERLLGLLHRWRDEAVRAGRTITRIALAFEAGRDGFWLARWLAARGIEAYVIHASSVAVSREHRRAKTDRLDTELLKRGFLGWLRGERGHCSMARVPTIAEEDAKRPNRERDCLVGERTRIVNRIKSTLTRLGIRNFKPTLRKAAERLATVHTPEGMPLPPNTLAELQRDMARLGFVVSQIRQIEDARQQRLEQQPETGPHAMVRLLARIVGVGVETADMLVHEVLSRPMRDRRAVARYAGLTGSPDESGAQRREQGLARAGNARVRRGMIQLAWRFLMFQKESALALWYRARTADSRSGTRKTMIVALARKLVIALWRFVTTGETLEGVVLRPAS

SEQ ID NO: 439689 - protein, 343 aa, unidentified
MQTVTTIGLDIAKSVFQVHGVDAEGNVLIRRQLKRRYVLAFFEKLPRCLVGIEACATSHHWSRQLKALGHNVRLMPPAYVKPYVKRQKNDAADAEAICEAVTRANMRFVETKTPEQQSCLMLHRTRQLFIRQQTSVINAIRAHMAELGIVAPVGRKGVEQLLAVSTDTNDKRVPEVACACVAALGAQLRMLKAQILEFDRQIMAWHRSNETSRRLDAIPGIGPALATALVASVADAKAFRSGRNFSAWIGLVPKQHSSGGKDKLGSISKQGDRYLRSLFTAGALAVIRYAKIHGSQHRPWLTALLARRPTKVAAIALANKIARMAWAMMAKGERYKEPVALTA

SEQ ID NO: 439690 - protein, 482 aa, unidentified
MKKRTIYQNRSQELLSLFERAGNSSKVMCIPIDFAKKDHVVMFCNGFGDILRKPFSVKNSQMGVAYLIDQVMRSCCHHRIKKEHVFFGGEDAQSYTENFVNTLRSEGFLVANVNAHEAKTQRENLQASTDRLDLMGIAVMLLNRKANCAPAQAGTYLNLRTLVRHRKKLVKMKTGVSNRIHTVIDRLFPGFLNEKKSGIDPFSKSSLYLMSDRFSAQQICRRRRSTLTKHLRRFGTKGAENVATKLQAYAKQVLTPLEEHTATLQLSLSYNIKHYRCLQENIDHLEKEIALLLSQTQGAFLTSIKGIGIVLSAGVTAEIGDPFAQKPLNNLVSYAGIIPRVKQSGGSEGQPYMGRVSKRNNHILKDYVVQSAFHIGRHGPKDLLLDYKRREAQGQHADFGMGRRFMRMAMCMMRTSQVYLPLRLRGNSVDQRDKAEYYLSIWPLLKEKWKRADALESAFEKDRPLGHWRQIVQHLYDIELDI

SEQ ID NO: 439691 - protein, 411 aa, unidentified
MHNRQNYLYVGVELHKEHHTAVIINCWQEKLGEIQFENQPSAFSKFLLEVETYVSAGVSVVFGLEDVGGYGRALAKYLVDHEQVVKEVNPALSFLERKSHVTTQKSDSWDAECVARILVNKFNQLPDAKPKDLFWSIQQLVSRRNALVKAQSALKNQLHIQLNHHYPSYKKFFSELDGKTALAFWQQYPSPSCLEGANIKQLTAFLLDVSNNTCSVKKASEILKLVKEDGHTMKEYQETRDFLVRSIVRDIEFKKTEIKYIERELKQLVKLLAYQLETMPGIELVTASALIAEIGDVRRFPNANKLARFAGIAPVYFGSGGKGKTHKSKQGNRALHALFYNLAVQQVQVAKGSKKPRNPVFHAYYQKKLKEGKTKGQALVCIMRRLVNIVYGMMKYKIAYELPVVEEKEVV

SEQ ID NO: 439692 - protein, 368 aa, unidentified
MNSVKFIGMDVHKNSITIAIADQDHRAAARTYGAINHDLGALDKFCRKMVSTASQLRFVYEAGPCGYRIHRHLTDKGFECMVAAPSLIPKKSGERIKNDRRDAKKLASLHRAGELTAVYVPNLEDEAMRDLSRAREDAVCATRKAKQQLKAFLLRHHMVFSGRSKWTKAYFNWLSDIAMVHSAQQVALQEYIDAVHENMHRVHRLTDQIRQLVPSWRLSPVVAALQSARGVSLIVAVTILAEIGDLNRFENPDQLMAYLGLVPSEHSSGEKTKRGAITKTGNSHARKALIEAAWAYRMQPRVSRLLLKRQQGLSDQVRLISWKAQLRLCTRFRRMAARGKPKPVVVTAIARELSAFLWAITKQVQPAV

SEQ ID NO: 439693 - protein, 402 aa, unidentified
MKKVCGLDVHKDNIFCAIYNGESHSQVKEYATLTPAIYSMGEYLQSEEVEEVALESTGIYWIAVWDIFYEMGFKLTLVNPYLIKQMPGRKSDIKDAQWIASLLHKGMMRGSFVPAPLIQELRVYSRKYGKLRQQVTRVLTCMDAILVKAGIRASSCLSSISTKSFMGIVEALIAGWTDPGYLVSLVYGNRKNKQSGKLKEALRGNIRAHHRQELSWAKQEYDIYQLQISECLSQMERICGLHFALPVNLLQTIPGISRIAAMTIIAETGGDMSVFENSGKIVGWAGLRPRNDESAGKYKSTATTKGNKYLRSILVQVSWAASRSKGSFFKEKFQRMTMRKPRKKALVAIARKLLVVIWNVLKHTRQYDPRLAPVYDPVKMKARLAYYKKEYEKTANILNINL

SEQ ID NO: 439694 - protein, 393 aa, unidentified
MRRPVSAGCDKLPRIDALEGAKKRRPAVKKTSTVRVNGNMIFKGHKLTIGMDLGDRSSNYCVLDEAGEILLEQKLATTPEAMKQTFEKIPRSLIAMETGTHSPWVSRLLKELGHEVLVAHAQKVNLITKSTRKDDRHDARTLARLARIDPELLGPVRHRSAKAQIHLTVIRARAELVRARTALVNAARGLVKSYGERLPKCGTEQVSRELAAELSAELREVLEPLLKEIESLNERIKEYDARMEKIARESYPQVALLKQVKGVGTQIALTYVLTLDDAHRFAKSREVGCFLGLKPGRRDSGQSQPQMHISKEGDRYLRTMMVQGAHYILGPFGEDSDLRRWGLRLAERGGKNGKKRAVVAVARKLAVLLHRLWVSGEVYEPLRNSHKAMRAAA

SEQ ID NO: 439695 - protein, 309 aa, unidentified
MEHFVGIDVAKDRLDVHLRPSGESFTVTRDGEGLVQLVDRLQRLAPRLVVMEATGGYETIVASAVAAAHLPLAVVNPRQIRDFARATGKLAKTDAIDAAAIAHFAEAIRPPARPIAEPEAQALGELVARRRQVIEMMVAERNRRRRATQRRVLQAIDRHLELLQTELSELDGDIDGAIRGSPAWQADADLLASVPGVGPATLRTLIAELPELGRLDRRKIAALVGVAPINRDSGTMRGRRSIAGGRPAVRTALFMAALVASRKNPVIAPYYAKLRAAGKTGKQALTACIRKLVVILNAILRDRKPWQPA

SEQ ID NO: 439696 - protein, 342 aa, unidentified
MDHFAGLDVSVKETSVCIVDDTGRTIREVKVASEPEPLLATLRNAAYQFKRIGLEAGPLSQWLFSALAEAGLPVICVETRHMKAVLKAQINKTDRNDARGIAQMMRVGLYRPVHVKTLRSQKLRMLLTHRQLLQSKAIAIENDLRATLRNFGLKVGVVGAVKFEARIHDLVENHTDLAVLVEPLLIVRRVLRQQISILYRRLLTIVRDDEVCRRLMTVPGVGPVVALTFRATVDVPARFRNSKAVGAVFGLTPSRHQSGELDRMGGISKCGDAMMRTVLFEAAQSMLTRTIKWSWLKGWGMKIARHRGMRRAIVAVARRMAVVMHRIWVDGTEFRWTRAAAA

SEQ ID NO: 439697 - protein, 342 aa, unidentified
MDEYDGKQFVGIDLHRQRSVIVRQSESGEQLSAVRIVNDPVALQLELERAGTDPEVVLEATYGWYWAVDVLQAGGARVHLAHPLGVKGFRYRRVKNDLRDAGDLADLLRMSRLPEAWIAPPQTRELRELVRYRAKLVAIRSGLKAQVHAVLAKAGVLIAVSDLFGVGGRQRLAKVPLRAAYAQRVRSLVELIDVLDAHEARFAGLIAKRLDAHRGYQALQQVPGIGPVLAAVFVAEIGDVHRFTDPAHLCSWAGLTPKHRESDTVVHRGHITKQGSKLVRWAAIEAVQRHPTTTKIAADQDRIEARRGKNIAKVAAARKLLTLVYYGLRDGHIRALDQARAA

SEQ ID NO: 439698 - protein, 362 aa, unidentified
MVYFKYKLVKMKKMVKQVLGIDVSQDGLVVCLGKMYDDWTPELVAHKTFENTAKGFPALLDWVAKLTDESTRVGYAMEATGVYHEPFAYFLHDQGMDVHVIVPNKISNYARTLDVKTVTDKTASEAIAMFGLERKLDNWGPPKGIYRRLQQLTRERGQLMDESTVIKNRLHAEKAGAKPNKKSIERGTTRLELIGKQLKEIMAGVSELISTDSETQAIVLLICSITGIGLLTAATILGETNGFELIRNKKQLASYAGLDVREKQSGTSVKGKPSISKKGNKHLRRAMHLPALAAIRHDERFKAIFARLVPKHGIKMKAAVAVQRKLLEMVYTVFKTKKKYDKGYFKKEQMKKEEEVMEVVVE

SEQ ID NO: 439699 - protein, 344 aa, unidentified
MGEITTVGLDLAKSVFQVHAVDAEGRVAIRRQVRRPQLVKFFAGLPPCLIGMEACATAHYWARELTALGHEVRLMPPAYVKPYVKRQKNDAADAEAICEAVTRPTMRFVPVKSPEQQSAAMLHRSRALLVKQRTMLLHAIRAHLAELGIATGAGVSQVTKMVGALVRGEPLDLPDLARVVLETLARLVFDLQERLRTIDKQLAHWHYTNDLSNQLETIPGIGLVTASALASSIPDPSTFRSGRHFAAWLGLVPKQNSSGGKTRLGRISKQGNRYLRQLLILGATSVLRYLRREGSQPSPWIAGLLRRRPPKVVAVALANKMARIAWSVMTRGGEYEDKPALRAV

SEQ ID NO: 439700 - protein, 356 aa, unidentified
MPKIKQLDFEGQTIFCGIDVHKKSWRVNVRSEDFELEDYSQDPSEELFLKHLQKRYPGASFQVAYEAGFCGFGIQRSLKSSGVSCMVVNPADVPLTDKDKKRKNDRIDARKICRHLSNSSLRPIYVPSIKMEHARTLVRQRIRLVSDQSRCKNRIWGFLMFHGLKLEIDKPNEYWSRRFVESLKTLPGLTPLLRQALNTALEEYLLIRKLVGDMTKQLRTLSEQKSFASLQNLIQGIPGIGLLNSMVIITELQDMKRFKTLDRLCSYAGIVPDTASSADRTTVKGITHRSNDYLRTALVESSWVIIRKDPAMLHLYKKYCRRMVPNKAIIKIARHLLSRIKYVWTNRIEYEVGLVG

SEQ ID NO: 439701 - protein, 346 aa, unidentified
MTTPAADSTYQLFVGVDIAATSFAATWTRGGTARERARTFDQTPDGFTAFQGWLATTGSAPAATLVVVEATGSYWVALAVALHHVGYAVSVVNPAHAHAFAQSLPRRAKTDALDAQVLAQLAAERQPTPWVPPEQVYHELRQRLVVRDGLLQMRQQARNQRHALVQWPVIIAGALDALDTVITELDTQLQALDAAIRAVLCEGAWAESATLLASIPGIGLVTTAWLLVGTLNFTACASAESAAAYAGLVPMARESGTSVRGRAQIGHGGHARLRTALYMATLTAARFNPVIRVQYERLRAAGKPSKVARCAAARKLIHLAFAVVTKKRPFDPSYRMASAVAVAGKA

SEQ ID NO: 439702 - protein, 338 aa, unidentified
MALYCGIDLHSRDCWLAILDKDRKVIQEAKVGNDLNALLEVLEPYGDEMEGVAVESTYNWYWLVDGLADAGYQMHLTNTWAVKQWEGLKYSDDRHDARWLAHLLSLGILPEGYIYPKHERPVRDLLRRRSFLVKKRTSFLLAMRGAFECRTGLPITSSEVKQWTAEEVESYLDDPTAALAITCLLEPMRALDDQIRIIEKGALKQARLRAEFAPLQTVWGIGKVLALTVMYEVGEIARFKKVGNFASYCRLVNSARLSAGKRKGSGNVRNGNPYLSWAFSEAAHFAVRYHPEAKKYFQRKRSKTNGIIAIRALAHKLARAAYYVMKDQVEFDPDKVFG

SEQ ID NO: 439703 - protein, 457 aa, unidentified
MEKTGFLGIDVSKGYSDFLLLDSAGYVMEEGFQLADNKQGRQTLKEIIAGWQKEGLEELFCGVESTGGYENNWYTYLKTGFKGSKVHVCRINPKGVKAVGDATLKRTITDAVSAENIATYMISFPKKLDYGLNALPANQVFKEGRQHLTYIRMLQKQKTQLSNQLEKLLYQYFGEILVYCRHGAPVWLLTMLVKYPTAETVLKAGVKQISAIRSVSPEKAKSILAKAKNNIHSVSPQIARVISATAREILHKDVLIKEEKTYLTDMYKMSGDVVLLSSIPSIGVDSAVAIMLEIEDVKRFETVKKMASFFGVHPTFKQSGDGLWGNHMSKKGRGEIRAVLYMSTLSAVRYNPILKQVYARFRAKGMKHNQAAGVVMHKLLRIIYGVLKNQTAFNAETDEANQQNAAEKQLSKEQKDKAAEKVKKQKKHRFQETSTDAPISRRAEQKIRKQIASQASD

SEQ ID NO: 439704 - protein, 413 aa, unidentified
MEAYYVAGIDVHKAMLAVVVSEVKPGECEFHKRRFGTTRSQLRELNQWLTEVGVQEVVMESTARYWRPVWVALEETGIKRHLAHAHSNGARRGRKSDFRDAERLVHRLVAGELVLSYVPEDEQQGWRWLTRTRYQLVCERGRVQSQIEGLLEDAQIKLSSVITDLLGASGRRILEALAQEQGSHDAAKPAQLGHAKLRASREELTDALDGRWLDRHRFLLGLHLDRIRQLDSQIEQIQQQTAAAMQACQEAVARLIQGPGIRTEGALQMLAQIGPTAAAFPSPEQLASWVGVCPGQQESAGQSYNQRSAKGNWQMRRLLSQAAHAASHAKGSFFESLYRRLVVKIGPPKAIWAVAHRLCRLIWKILHEGVQYHEQGAPTSSSKSIRRRQLKLTAEFRKLGFQVQFTPINPSHP

SEQ ID NO: 439705 - protein, 409 aa, unidentified
MRSVVAFDVSKGHSYMVVYDNQKHCIFEKDIKHCLSSFEEVRHQIEAQMAHDGMMPYIVLEATGVYSKALERFMQECAFEYALMNPLEAKMQTLTMRMHKTDRSDAHKLAQSCFTHPPRNKKIQDTYYEDMRSLSRHYAELEKEVIRLRTRMHALVQMTFPELEHLFSRNSDLYLSILQLFPHPEMVKGLSRTKVKNLILNNTKKRQSRKRTEEKADSLLMAAADAYPALTEQDVRVEQLKNYAERCQELLNLKKTLIEQMVNLSQDRVEYHILRSFPGIGDITAVRIIAEAGDIRRFNTSKQLNAFTGIDIRRYQSGIILYKDKINRRGNKHLRKILYYTIENMIRNQSNGGNHLVDYYQRLKKQPYDKHHKVACIACVNKFLKCFFHLVSTEQRYDYAVATNHRVHS

SEQ ID NO: 439706 - protein, 370 aa, unidentified
MKQSIRKPKSPTRSIKIRKTDRVTIGMDLGDKTSRYCALNGAGEVLVEGACATTKKGMAQVFGAMAHCRIAIEVGTHSPWVSRELNRYGHEVIVANARQVKLISQSSRKNDKVDARMLARLARVDTELLRPIRHRGEAAQQDLMTIRIRAALVEARTQLVNAARGLAKAAGERLGSCDADQMGVEKLKDLPAGLGETLRPLLEQVESLTEKIKGCDRTIEQIARQRYPETELLRQVHGVGTLIALTFILTIEDQKRFEKSRDVGCYLGLRPKQSESGERQPELRITKEGDIYLRKLLVQGAHCLMAQRAPDSDLKRWGRKLAGRGGKNARKRAVVAVGRKLAILLHHLWASGEVYEPLRNTRQSLTAAAA

SEQ ID NO: 439707 - protein, 425 aa, unidentified
MKNNFLSTLFVGIDVSSKTNVLCALDFQGNKLLNLKALNNQPGAESILESILDCLNSNSLKFVVIALESTSFYSTHIANFLSSKEVLLAYSPMVYCLNPKTIANYRKSFVDMDKTDPLDAYIIADFARCGRIKSQPWRGAQFLALQRLTRHRLHLVEAIAREKTYMVSNIYLKFSQLAVLEKADRPFSNTYGATSEAVLTEFLSLEDIAYSSIEDLVDFIKDKGKNRFSNPVGTAALLQKAARDSYRLDKVLYEPLNIAIASSFNVIKALQIEIKEIDKAIDKNIKGINTTEYQSLISIPGIGPVFASGILAEIGSITSFSSNDALAKYAGLTWRIKESGDYSADDTNMTKTGNKYLRYYLIEAANSVRNNIPEFNVYYRKKFYEVPKHQHKRALALTSRKLVRLIFGLLTKNQIYSNSKVGEIQ

SEQ ID NO: 439708 - protein, 369 aa, unidentified
MGKRNMFVGLDVHKDTIDVSIAEGDRRGEVRHYGVIASDLEPLDKVVRALRAPDRTLHFVYEAGPCGFGIYRHLTKRGEVCAVVSPSMIPKRSGDRVKTDRRDSLALARLHRAGELRAIYVPNDADEAMRDLVRARADAVAVGIQAKYRLKAFLLRQGRRYPGRDGWTLAYRRWLTDLRFPSPPQHIALQEYRDTIDETERRLERLTEQLRQLAPPWRWAPVVAALQALRGVSFITAVALVAELGDLTRFGHPRELMAYLGLVPSEHSSGPSVRRGAITKAGNPHVRRLLAEAAWAYQGIPRIGRVHAYRQEALPKVVCEIAWKAQLRLTTRFRRLVARGKAKPKVATAIARELTGFIWAIAREVSPTQ

SEQ ID NO: 439709 - protein, 393 aa, unidentified
MICVGIDVAKDKHDCFILSSEGEVLADVFTIQNNAEGFDTLLQTIRRCVCPGDKIKVGLEATGHYSYNILGFLLDKGLDTYVINPLHTNLYRKSLSLRKTKTDRVDARTIAAMLMSDVDLKSYTDTVYHNEELKSLTRYRFDKVRERAKLKQSVSRLVTILFPELEKLVPSLHMASVYALLSEFPSAKQVAGAHLTHLKAVLYDASKGRYGRDMATTLREAARCSVGSVMPTKSLELQHTIRLIRELDAEIEDIEAAIQSMMDEMQSPIMTIPGIGVRMGAMILAEIGDFSRFDSPDKILAYAGMSPSTYQSGQLSLSGAYSHMEKRGSRYLRYALYNATKYVCLWDPVFAAYLAKKRTEGKHYNVALSHAAKKLVRLIYAMEKSRQSYRNAA

SEQ ID NO: 439710 - protein, 324 aa, unidentified
MNIIGIDVSKNKLDCAWPREEGKLKTKVFSNTIAGWKELIDWSLKNTGLEIEQLHFVMEATGIYHEQLATSLYDAGAKVSVVNPAQVKFYAQGQGVRTKNDKKDSVVLARYGLKESPKLWQPEAFEIRTLKALIARLDGLEKDLQREKNRQEKALISKAPEEVLISLSQLIELLETEQQRLDNLIEEHINKHEKLKENKALLESIPGVGEVIATRMLMVIGSRQFESASQCSAYLGLVPVQHESGSSIKGRSRLSKAGNPVIRAKLYMAAVVATRYNPDIKAQYERLTSKGKSKMSALGAAMRKLVQICFGVLKHQQPYQPQVG

SEQ ID NO: 439711 - protein, 323 aa, unidentified
MTKHTLGIDVSKATLHLALLKETGRPQKKQVTNDANGFSHMTAWLAAQGTETVSACLEATSTYGQAVARYLHEQGHRVSVVNPARVSGFAQGELRRTKTDSADSATIARFCQAMEPKAWTPPHPETAELQQMTRRLEDLQQIMGQEKTRLETTIESLHEEIKAHIGFIEKQMAQLKQVIAAHIKKYEALNSALTLMTSIKGISTLSGSQILAEIGDWTVFGSARQLAAYAGLTPQAKESGTSVHGRTRLCKIGNEHLRRALYFPALTAIRCCEALQPWIEGLRSRGKNKMQVVGAVMHKLIRVIYGVLKSGQPFKPELLAPTP

SEQ ID NO: 439712 - protein, 364 aa, unidentified
MPVTSMTQSACPAQHALGQEVVLGVDTHRDIHVAAVVTLVGGLADTGSFPATAAGYRQMVTWARSIGVVERAGVECTGSYGAALSRYLQAEGICVIDVNQPDRATRRKRGKTDTVDAESAARGVISGRSDSIAKTGDGLVEAMRVLKLARDSAVNARTKAINQLRAILVGADPQLRESLAGLGPGTLVRACAHLDDSGQDASEVQRTVIYTLRLLANRILELKAESYELHKRIGDLVARHAPQLLERPGVGPDSAAALLIAAGDNPQRLRRESSYAALCGVSPVEASSGNTQRRRLNRGGDRQANAALYRITMSRLRWDERTRRYLAKRMAEGKTRREAIRCLKRYIAREIFRLLPPAAPPPAT

SEQ ID NO: 439713 - protein, 338 aa, unidentified
MAIVNVGIDLAKNVFALHGVNEIGQTDLRRPSVPRAKLHELVAALPPCTIGMEACSGAHHWARLFAQHGHTVKLMAPKFVTPYRMSGKRGKTDAADAAAICEAVQRPNMRFVPVKTVEQQSRLMVHRTRQGFVEARTAVINRIRGLLAEFGIVLPQKAQVVRREAARHMDSLPGLGKLVIEDLLDEIRHLDERTKVYDAHVRSMARDCTAAQQLMQIIGIGEVTATAIVAMVGNAREFSSSRQFAAWLGLVPGQYSSGGKTRLGRITKAGDAYLRGLLVMGARSVLNAAGAKDDNVSRWAKNIALRRGYWKAVVAVAAKNARLAWAALTKGESFIMPA

SEQ ID NO: 439714 - protein, 341 aa, unidentified
MSEVSMIGVDIAKQVFHAHGADATGATVFSRRITRQKLLEFFASQPRCVVAMEACGGAHHWGRELIKLGHEVRLIAPAYVKPFVKRQKNDAADAEAICEAAQRPTMRFVPVKSEAQQASAAVFRARDLFVRQRTQFINALRGLVAEHGWVVPKGLFHARLLMAKIEDASCPLPQGARDAFLAMIASVHALDEQIVVLDREITARAREDADARRLMTIPGIGPITATAILALAPPAESFRKGRDLAAWLGLTPRQRSTGGKQKLGQISKMGERTLRRLLIIGASAVVLHAARRGPPQGSWLEQMMARKPRMLVTVALANKTARIVWAVLARQEVYRAPVAAA

SEQ ID NO: 439715 - protein, 338 aa, unidentified
MTIIATGIDLAKNVFAVHGVNGAGVVQVRQPKVARAKLGALIAGLPPGVIGMEACSGAHHWARQFQAHGHTVRLMAPKLVTPYRMSGKRGKNDAADAAAICEALQRPNMRFVPIKTEEQQAQLMVHRARQGFVTERTACINRIRGLLAEFGIVLPLKAEVVRRQAREHLEDLPGYANLVIGDLLSEVAHLDERIGQYDKYVHAMARQSTPAQQLMRLMGIGETTATALVAMVGNASEFSCGRQFAAWIGLVPGQYSSGGKARLGRITKAGDPYLRSLLVMGARAVLNAAKSKTDSISRWAVAVEQRRGYWKAVVAIAAKNARLAWAVLSKGDAFKLPA

SEQ ID NO: 439716 - protein, 339 aa, unidentified
MSKLLKNFVGIDISKTYFDAALVKVEDSSQIIHQQFSQNSEGFLKMILWLKQQDVTAGEETLFCMEYTGLYNNGLVNYLVQKKAQLWVEMLLRIKKAGGFERGSDDKTAAIKIAWYALRYHDQMKLWQPVDSNIEKIKSLIVQRDRIINAVTQLSVPINELKECSCIAEAKTMEKLQRPALTALQKTKAAIEALIIKTVQADEQINKKVQQVQSINGIGPVTAVAMLVYTKGFSSFTNAKELACYCGIVPFKKISGTSVRYKPSVSPYANKKLKKLLHLCALSAIKNDAELKAYFERKVAEGKNKMCVINAVRNKLVHRVFAVIRDNRNFEANYVRKCA

SEQ ID NO: 439717 - protein, 323 aa, unidentified
MRKHSMVCAGIDTGKRKLDATLNERSPELQVDNTSDGHGTLSAWLRRHGVKRVGIEASGGYEKAVVARLRRDGFVVVVFQPAQVRAYAQFVLQRAKNDKIDARLIAACTAATKKIHAPPDPRLAPWAEHLTLIEQIEEDLARYRTRIESCREAGNAAFWRAEFARLTKLLKSELKTLVSAIRQHQDLAARLDLIESVDGVGLRTAVAILVRMPEIGRLTREQAAALAGFAPYDDDSGDHTGARHIAGGRKRLRRSLYAAALPAAQRWNPQLIALYRRLRAKGKVHKVALVACARKLLIYVNTVVERGTPWVEKPPAPAALRAT

SEQ ID NO: 439718 - protein, 314 aa, unidentified
MVSQGYSHFYGIDVSKEWIDIATEKEVFKVKQTERDIRKFVGKYFKNADRSTLCVLESTGGHEHLVSQQLVQAGITVHIAHPSKVVAFAKAKGRLAKTDKIDAKILKEYGQFIQPHEVRLPLTQKQLELQELSSRLAQLKITHHQESCRLSEVKTPIVKQSLKKMISSINQLIETTEKAILEIINNDGALREKMTLLQSMPGVGKVLSTVLITELPELDTLNKKQIAALVGVAPLTRQSGKWAGMSSTRYGRPAVRKILFMGALVASKHNKKLKQFYDRLVAAGKPKKVALVAVMRKMIVILNAMVCNSEHYRL

SEQ ID NO: 439719 - protein, 343 aa, unidentified
MEAYAGKQFVGIDLHRRRTVIVRTTEAGEVLEAVRIVNDVQRLASVMARAGDCPEVVLEATYGWYWAVDALQAGGANVHLAHPLGVKAFEYRRVKNDFRDAQDLADLLRMGRLPEAWIAPPPTRELRELVRHRAKLVGLRSHCKAEVHAVLAKCGVQVLMSDLFGVDGTQLLDGLDLPAPYAARIASLRRLMDDVDFEITAFAGIIRGRMAQEPGYTAVQKIPGIGPTLAAVLVAEIGDITRFASASKLTCWAGLTPKHHESDTHVRRGRITKQGSRLVRWAAIESVKTISKTSEVGVLRERVADRRGRNIGSVAAARLQLEFVFYALRDGHVRALEHLPRVA

SEQ ID NO: 439720 - protein, 409 aa, unidentified
MEVLYPRCAGMDVHKETVVVCVLTPGPGPDPHKEIRQFATTTGELRKLAEWLKQEGVTHAAMESTGVYWKPVFNILESSCELILVNARHIRQVPGRKTDKADSAWLANLLRHGLLEASFVPPLEVRELRDLCRMRTTLVRECVQVGNRIRKVLEDANVKLDSVVSDTLGVSGRLMIQALMEGEQDPAVLAELARGRLRSKLAELTAALEGQVRPHHRFLLRQWTRLLSSLEQHIVEVEQEIERHMPPFEWAAALLVQMPGLDRTAACALIGEIGVDMSRFASARHLASWAGLCPGNNTSAGQSRSGKSHRGNPWIKGLMTEIAWAASRTKESYPAALYKRIAVHRGKKRALVAVANSSLQVVWHLLAHHQPYRDLGPDHFDRNNRQHLTQSLVRRLQKLGHTVTLTPAA

SEQ ID NO: 439721 - protein, 338 aa, unidentified
MQTYAAIDLHSNNGVLTIIDETDRVLRQRRIANKLEEFIRELEPFRPTLQGVAVESTFNWYWLVDGLQAKKFPVTLVNTSAIQQYEGLKRSDDQYDAWWLAHMMRLGILPKGHIYPPEQRAVRDLLRKRLTLVQQRTSNILSVQNLEARNRGTKISTNEVKHLSSADVAERYANEHLALAMTTTLAVIETLTQQTTILEKAVLKKARLRPEWELLLTVWGVGKILGLTIMYEAGEMGRFALPGNFASYCRCVDATRYSNGKKKGDNNAKNGNKYLAWAFVEAAHFAIRFYPEAKRFYDRKAAKTNTIVAIKALAHKLARASFHVLRDQQPFDPRKVFV

SEQ ID NO: 439722 - protein, 333 aa, unidentified
MTILAFDVSKAELVGVRANKNGTVQEHFIVPNTPKDIHAFLDVTKKQHETLLMGSESTGEYHRELALQAVHRDIPFYLLNPILTKQFTRSTIRKKKTDRSDAAIIARLLSQGEGTLLLKETLNPIKQINRTANSINTLKKSLFSMRIHLQGICPEKTALLAEMEAAGAGLEAVVECLRAHVQKETDPHLKKLLMSIPGIGSRVAATLIAELGTIQKFKEGKCLVAYAGLDPKVNQSGASLNKNTKLTKRGSPYLRQSVYMAAFIAVQHDPELKEYFEKKRKEGKCYREAVVATARKILYRVFAVWKRGTPYEKRDIENRGAEGRENIDKKLSP

SEQ ID NO: 439723 - protein, 341 aa, unidentified
MSEVRTIGLDLAKQVFQVHGADASGSAVFRKQLRRGQVLKFFSGLPRCLVAMEACGSSHFWAREIGRLGHEVRMIPPAYVKPFLKRQKNDAADAEAICVAAQRPTMRFVSVKSEETQGAVVALRSRDLLIRQRTQTINALRGHLAEFGKVVPQGSTNASKLIAMVEDPQTALPEAARTSLRFLTAILSQLTDQIRALDAQIVRQAREDETSRRLMTIPGVGPLIAAALVALAPSPETFKRGRDFAAWLGLVPRQHSTGGKQRLGSTTKMGERSLRRLLIMGANSVVVWRARKGAAPGTWLAKMLAHKPPMLVRVALANKMARIVWAIMARGEIYRAPVAVA

SEQ ID NO: 439724 - protein, 405 aa, unidentified
MEVVVQQRLWAGIDAGKTAHHCMVVDADGQRVLSRRIDNDESALLELIRAVTSLAEGGHLTWAIDLNAGGAALLITLLLAHDQELLYIPGRTVHHAAGSYRGDGKTDAKDATIIADQARMRRDLHPLRRGDELAAELRILTSRRSDLSADRTRTINRLRARLGEYFPALERAFDYSNNQAALILLTGYQTPAALRRIGTARLETWLQNRHARKVSSVAASAVAAADTQYTVVPGEQLAADLVARLTQEVIDLDAALKEIDVMIEDRFRRHRYAEIIVSLPGFGPRLGAEFLAALGGDIALYDSADRLAGVAGLAPVPRDSGRVSGNLHRPRRFNRRLLRASYLAAQLSIRHDPASKHYYDRKRAEGKRHTQAVLALARRRNNVLWAMLRDRTHYQQPTGDPATAA

SEQ ID NO: 439725 - protein, 343 aa, unidentified
MKLHALGIDLGKTVFHLVGLDSTGRVVIRKRCSRTQLLAFTANLEVQLIGMESCSGSHFLGRALREQGHEVRLMPAQYVKPYVQTNKSDFLDAEAIAEAVQRPRMRFVPIKTEEQLDLQALHRVRERWVMRRTAVVNQIRSLLLERGLTLPKGRSHVHELLPRILEDAELRLSDSLRVLLAQLQVELQQLTARIEQMDTAIQKTAKENEACQRLTAIPGVGPVTATALIAAVGNGSAFRKGRHLSAWIGMVPRECSTGGKQKLLGISKRGNTYLRRLFVQGARSVLQQRHKQAPGLSSWIAQLLARAHQNLVIVALANKLIRMAWAVLCKNERYRAPVLAAGS

SEQ ID NO: 439726 - protein, 359 aa, unidentified
MRIIGCDLHARQQTLAMLDTVSGEVVNRTLLHEGNEVREFYSELPRPVLVGIEAIGPMQWFLNLLEELGIECQVGDATKIRAAEPRKQKHDRRDAELILKLLAEKRFPAIWRPSQELLDLRALLLHRHQWVRLRTQVQNALQAIALANGLRRGPSLWSYDGQAKIAFLPLPPHTSLRRSALQALYRHMDEEIEKLTVQVAEQAEHRPGAQLLMTHPGVGPVTALATDVFLGDPQRFGDGKSLASYVGLIPQERSSGRRRRLGKITKQGNPLLRFLWNEAGAHAARRDPELKCFYHRKLVQKGLGKARVAVARKLGIRLWIMLRDQIDYEEFCHRGQKQSGAACAGMLGTRLVHNHRPVD

SEQ ID NO: 439727 - protein, 371 aa, unidentified
MTKKHTQNSLDTSIQWKAIGVDLAKYDNTVVAISEDGEIQHIERISTDDLLKLSTELQPTTFAIEPCNGANLLSLALQKNHEVKTISGVAVKNWVKVHCAGQKTDRNDAMALAFLAMDTMLKPIRTKSLAQMKMLSIFAARKQLVSCRSSILVSLKGMAQAWGILFSAKRRNLDQMKERFNEQKELLSESVVNAFEKMIEMVRKLDEQICDLEKVMVEQLKDDPRSERIMKVLGIGLIGTHRLLSTCGNVDDFKGPKSFAAYYGLVPNNRSTGHNYRVGKCSCHGDVEMRCSLFQSAAVLYILNAKHRLTNCALKNWIDKKIAQKMVWGKLMIALAAKLARILWALLKYGEDFDINKAGVSRSLLAQQQTK

SEQ ID NO: 439728 - protein, 422 aa, unidentified
MQNTAARKRKQVPEEYLIVGVDPHKKKHAAVVITQDFAIRDRFKLDNTKEGLEFMVHRVRAEMVKSGCQGVIFAIETGGHYWRNVAYFLDGQGIPFRFINQYTLKRRREGKDLNHRKNDYRDSEVAAQLLCTGEFVESKIPQGVYAELRSSHNTYRRLVKERTRITNLMKGLLDSLFPEFTQVFKDPCAITALCVLSCCSVPSVIARMTESEFLATIEAHYHGRRLMRKKLGILHQMAKESIGIAAGAWCVASEVAFLVEKLELIKGQICTLEPTLVRLVDETEEGKYLLSITGLNYIAVAGLLAELGCFKYYRSAKQMIKMAGSNPSESESAGKRSTHTPMSKQGRPVLRYCAWTSVIPMLRFNADFRAWAKQRRERPVYANPLGGREIVGAALNRLLRLAFALVKNQTFYQSPQLALVNI

SEQ ID NO: 439729 - protein, 337 aa, unidentified
MNYCGIDLHSNNCVVIVSDESDRIVYQKRLPNELTQIAAALEPYRHELAGVVIESTYNWYWLVDGLMDSGYQVHLAHPAAIRKYDGLKHSGDFADAAYLAQLLRLGLLPEGYVYPREERGARDLARKRMQLVRYRTAQILSIEGIMMRQTGSRISGEAVKRLTADQVNEFAFMPDVTLAVEANRAVSQALAQQIEVLEKRLMERVSLRAEYRLLKTVPGIGDTLATTIMLETGSIGRFAHVGNFSSYCRCVDSLRESNGKKKGEGNTRNGNKYLAWAFVEAANFAMRYCPQARSFYDRKKSRTNRVLAIKALAHKLARACYHMLRDQKPFDVHLCFG

SEQ ID NO: 439730 - protein, 426 aa, unidentified
MWDAKRRVLKIKSLKHGIIQDKRGNVMRAVFGIDVSKTSSEVAILVNGEKVHGYSILNDAIGFNRLLGDLKTVHNPEIIFEATGVYSRCLQAFLEECGYAYTRLNPLEAKKQLDSLRVRKTDKIDAEKLAKSQLVHNRKPTYVQEEVYQHLRDLSRFYQNMTEDLVRAKNRLHKVLQVTFPELENLLSTPTGEQYWNLVMAFPCKEFVLSLSQSDLYEIIRQSTSKRISEKRIAYLTDKLIKLAKQSFCAVKKTSPMLEEVRYYAQELLRLSERRQVVLNDMVALAQPLPKYDILRSIPGIAETTATSIIGKLGDIRRFHSANQINAFIGIDLRHYESGNFLAKEHITKRGNPYARKILFKCIHNIASASHTNPCHIADFYEKRKRQSTIASTKPHTIASIHRLIRTMYYLITHNKLYDYSLSQNR

SEQ ID NO: 439731 - protein, 351 aa, unidentified
MKFVPTAQPKLYIGIDIHKRSWKVNCTTDICAGKSFSIPPKPEVLKAYVDKHFSDHEVSSAYEAGCCGYYAHRNFVNYGWNSLVVNPADIHRKGKERFTKTDKIDAQLIARELRDNRLESIYIPDVEREQLRSLFRRRNDLVKDFRRVKSYIKMQLLYYGIEVPAAFDNDHWSHKFRNWVDALIFKHTTGKASLESRMRFFRFVDQELRDVSNKLRAYCRKHYKKDYYLLKSVPGIGGIVACGILSELGNLRRFNSVKHFAGYVGIAPGIHQSGDNSRHTGITPRAHRLMRSYFIEAAWQAIRTDPVMQSYYRKHTGRDSKTVIIKVARKLLSRTLAVIKTETPYEIGVIK

SEQ ID NO: 439732 - protein, 315 aa, unidentified
MTQTNITTAGIDTSKARLDIAVHGRTERWQLANALSGWRRLAANLADAGVARVGIEATGGYERGVVEHLRAAGFVVLVLQPMQVKAFGRVHLRRAKNDALDATLIAACAAALDEPEITPDSRLADLAEHLTFLEQVEEDIVRFKTRLEHINAPSLRRSINGDIARLKARRATQIRNIAKQLRAHHDLAVRLDLVLSVPGIGERTALALIIRMPELGRISREEAAALAGLAPFDDDSGQHKGQRHIAGGRGRLRRSLFAAALPAAFRWNKALVALYMRLTAAGKPHKAALIACARKLLIYANTVVQRGTPWTERAA

SEQ ID NO: 439733 - protein, 354 aa, unidentified
MPHESVGIIGGFDCHSAVHVGAALDSLGRLLGTASFPATPAGYRRALAWIRAFGPVVAVGVESTGSYGAALARVLGDAGERVIEINQPHRHTRARRGKSDTIDAEAAARKVLSGEATGTAKDTQGIVESIRLLSVARDGAVKARKAALCQLGDLLVTAPAAIREQITSRKSLEGKATICANFRIRHVDAADPVIAAKLALRSVARRALELTQEAKALASELDDLVARAAPTTRGQLGLGTQNTATLLVAAGENIDRLRSEAAFAHLCAAAPIPASSGRTTRHRLNPNGNRQANRALHMAVIVRLRYCARTRAYLERRVREGRSKREVIRCLKRYLAREVYRTLCEDLRTLADRQ

SEQ ID NO: 439734 - protein, 407 aa, unidentified
MEILYPRCAGLDVHKDSVVACVRCVSSPVHQEVCSFRTTTSGLLSLAEWLNSCGCTHVAMEATGVYWKPVWHILEGDFELVLANAAHIKNVPGRKTDVNDATWIADLLAHGLIRSSFVPPAAIQELRDLTRTRKQLVREVSQHSLRIQKILEDANLKLGSVLSDVLGRSGLAMLEAIIKGEADPEKLADLARGTARKKRAELIEALRGRVTQHHRTMLKFHLDVIQAIQKTLQELDAAVGKALTPICERAQLLTTMPGISDIAAQVLVAEIGVDMTRFPDQGHLISWAGLCPRNDESAGKRRSTRVRKGAPWLKTTLVTAAWAAVRTKNSYLQAQFLRIKSRRGAKKAILAVAASMLTAVFFMLRDGVAYKDLGADHFSRHDKTKTIQRLLRRLSDLGCNVATAQPA

SEQ ID NO: 439735 - protein, 352 aa, unidentified
MLIIGCDFHPGFQQVAIFDNRTGEIQEKRLQHRGEAEEFYRSLAGQEVRVGMEACGHYPWFERWLQELGMELWFGDAARVRASVVRKQKTDRRDAEHLLELLRQDRFPRIWVPSLEVRDVRQLLVHRHKQVQARTRTKNQLQAMALSQGVQKKRKLWTKAGRAELEQLPLLPYAAERRKRLLEGLDGLEAEVGELDRRVAEEARQRPEAVRLRTHPGVGPVRALAMVLTLGPAERFASGKQVGSYFGLIPSEDSSGGKQRLGKISKQGSSFLRFLLVEAGQTAARLDPQLKRFYRRLAVRKNRSLAKVAVARKLATRLYLMLREDWTYAQLCQAVMQVSPSHSVAGESEPSA

SEQ ID NO: 439736 - protein, 331 aa, unidentified
MKKKPFIIGIDVSKATLDVYIYQLEKHFVVSNNPKGYAQMLEMIIIACNCKTKDLFFCFENTGRYSKPLCALFSSDGIAFLMSPALDIKKSIGMVRGKNDKIDSKRIATYAYEKYDKLKSTTLPNNNILQIKSLLSLREKLVRQKTACKNGICDLIDCFKDGENQLIIDIQKRLINNLNIEIEIIEKKIKEIINDNDDLKKNFNLVKSVDGIGDIIAFYLIAFTNNFISFSNPRAFACYCGIAPFESSSGTVKGKSHVHNYGNKQLKSLLNLASMSASNRKGELAIYYQNRVSMGKNKMSTLNIIRNKILYRAFAVVKRGTPYVDLYKFAS

SEQ ID NO: 439737 - protein, 427 aa, unidentified
MKKIKIDYLSTLFVGIDIGSRTNVISAINFDQDFLVRMVPVANAQGGAEQMEEMVAQVLSQHHEFRAVIIGLESTGFYGVHIANYLSTSEKLAPFSTKVYCLNPNEVKQYKKSFNSLDKNDGIDSFVIADFARVGRIHTEPWRGAQYLALQRLTRHRLHITECIAREKTYMLNNIFLKFSEFAMLKKDEHPFSDKYGATAEAVLTDYLSTEDIVDASVDELVAFISSKSRGRIADPEQTTYLLQKAAQDSYRLDQCLYEPLTVSIGCSFNCISAFEKELKAINAAIQRAVKGLNPTEYQILTSVPGIGPVYASGILAELGTIKCFKSNDALAKYCGIVWKENQSGEFEAEDTPMNKAGNRYLRYYMIEAAGSVMQHCPEYKAFYDKKFAEVRTHQHKRALALTSRKLIRMLFGLLANGKLYSVEKSR

SEQ ID NO: 439738 - protein, 365 aa, unidentified
MQKVSTMRTSGKRIFKGQLTIGLDLGDRSSSYCILDEAGKILLEQKLPTTPEAMKQTFAKMPRSRIAMETGTHSPWISRLLKALGHEVIVAHAQNVHLIVKSRRKDDRIDARTLARLARIDPELLSPVQHRSAQAQLHLTEIRARAGLVSARTALVNAARGLVKSHGERLRKCGTFQVSREITSDLSTELREALQPLLREVESLNERIQEYDRRIEKMAKEKYPETTLLKQVKGVGDLIATTYVLTLEDAKRFRKSRDAGCFVGLQPGRRNSGESEPQMHISKEGDEYLRTLLVQGAHYILGPFGEDSDLRRWGQRLAARGGKNAKKRAVVAVARKLAVLLHRLWVSGEPYEPLRNSQKAISAAA

SEQ ID NO: 439739 - protein, 367 aa, unidentified
MFQLLLRQEESEMNATTVAVDLAKNVFELAVADGDGRVIERHRLTRTQFERWFDNRKVDRVVMEACGSAHHWGRVFRARGIEVRLLPAQYVRAYVKRNKTDAADAQALLEAARSADIKPVAVKSVEQQALQALHRTRSAWMSTRTRRINTLRGFCREFGLVVPEGAVTGLAQMARFLADEHSGLPAMLRGSMRLVLEEIRLMEARIGELERELATLAKTSPACQVLISVPGIGLLTSTAMVAAVADPRTFDSARRYSSFLGLTPREYSSGNSRYRGRISKRGDRYIRMLLTHGARSVLRAATVAQRSGKRLDRLRTWALAVQERTNHNKATCALANKLARIAWAVWVKHEKFQSTQAHPTMAAEVAA

SEQ ID NO: 439740 - protein, 314 aa, unidentified
MTQTFIGIDVSKDRLDVAVRPTAQTLSVTNTHAGITRVVRMAQSASPRAIVLESTGGCEMLLVAALATASLPVIVVNPRQVRDFAKATGTLAKTDRLDAAILAHFAEAVHPQIRPLADARQRLLAELISRRRQLIGMLVSEKNRLATSAGSVNRDVRAHIKWLEKRLHRVDDQLHAEIRSSPTWRAKDDLLRSIPGVGPTLSMTLLANLPELGQLDRKQVAALVGVAPLNHDSGRYRGSRRIWGGRREVRTVLYMATVSAVRHNPTIRTFWCRLRSAGKPARLALVACMRKLLTILNAVLRTNAPWRLEPASLS

SEQ ID NO: 439741 - protein, 346 aa, unidentified
MRYSTTVGVDLAKNVIQISVVSSRGKELSNRSLTRTKFAEFLGKQKPSLVAFESCASAHYWARAAKRHGHEARIIPAKAVAPFRQGHKTDSNDALAVAEAARRPNIKDAPMKTAEQQGLQAIQRSRELLIGECTALSNHLRGILLEFGVAIPQGFASLLRALPEVLEDGDNEIPDLYRPTLHRMHQRLLELREDIESMTKAVDTLVKQHPICKRLTAIEGIGPIGALSLYAVMGSGKAFTKSREFSAYLGLTPRQYSSGGKTNIVGISKKVGNRRLRSILIQGARAYVYRMKEPRSLKDRWLKDLIERAGPNRAAVALANKNVRTAWAMVTQGTEYQRRLQLEMAA

SEQ ID NO: 439742 - protein, 367 aa, unidentified
MKKVSTVTAKQSRNFSQPKLTIGLDLGDRWSWYCVLDEAGSIVQEQKLGTTPKVMKEVFGRLPRCRIALETGMHSPWVSRALSELGHEVIVAHARNVRLIGESRKKDDRLDAQTLARLARIDPQLLCPVKHRSAKAQADLTVIRPRAGLVRARTALVNTVRGLAKSYGERLRGCSVRNMNAEKAKGLSPELQTALEPLLAGIESLSEQIREYNERIETLAQQSYPQVALLRQVKGVGTLIALTFLLTLEDAHRFGKSRDVGCYLGLQPGRRNSGQSEPQMHISKEGDPYLRTLLVQGAHHILGPFGADSDLRRWGLKLAERGGKNGKKRAIVAVARKLAVLLHRLWVSAEVYEPLRNHSRRTMPVAA

SEQ ID NO: 439743 - protein, 404 aa, unidentified
MKGPIVSIDVSKGKSDYQAFKDLNVKYTGSRSIKHNKEGFDEIVNLVREMEKKLETEVCVVYEATGVYHRVLKKVLEDNNIKQFIINPLLSAKTRKNDSLRSPKTDKLDPKSIAKTYYSHSLHNSHKQETIYHELRELSRYYEDILVHIRKDKVAFRAQLDIVFPGYDTLYDDLYGPVALAIIEKYPHPEMLQKKKINTVSKVIQSKTCHRQAVSDTMADKAIEYSKTIYSGCDKDDIEVLILQRFIKKLNEDMAEAERTIGEMIKLAQELPDFNIIKSIPGIGDNLAARIIAELGDMTRFKKKNELVAFAGLDPRISESGQNDGDHMHITKKGNKRLRCLLYLAVTCSIRLKRDDNSIKDFYIKKKQQSNPMCSKAAKTACASKLVRIIYSMCKTGELYQYNK

SEQ ID NO: 439744 - protein, 427 aa, unidentified
MKNNILSTLFVGIDVSSKTNVVCALDFYSNKLFETSSDNNLPGANEILECIIKCLKQNSLSNVIIALESTSVYSIHIANFLSSHELLMFFNPKVYCLNPKTTSNYGKSFTDLDKTDPLDAYLIADFARVGRIQSKPWRGSQFLALQRLTRHRLHLIESITREKSYMLSNIYLKFSELAVCDKSERPFSNTYGTTSAAVLTDFLSLDDIAYADIEELVTFISEKGKNRFSNPEATATLLKKAARDSYRLDQTIYEPLNVSIASSFSIIQTITKEVKLIDKAITKCIQNLNTNEYQSLISIPGIGPVFAGGILAEIGTIKAFKSNDALAKYAGLTWRQTQSGGFKADVTRMTKTGNKYLRYYLVEAANSVKNNLPIYNDFYNKKVSEVSTHSHKRALAFTSRKLVRLIFGLLTKDQLYANNRVGNQQIE

SEQ ID NO: 439745 - protein, 339 aa, unidentified
MKLYAGIDLHSNNNYLAIIDEHDQRVYQKRLPNEPDVVLAELAPFQKKLVGATVESTFNWYWLVDALMDNGYTTHLANPAAIQKYKGLKYSNDSHDAFWLAHLLRLGILPEGYIYPKEDRPIRDLLRKRGHLVQLRTSLINSLQGIISRNCGSSLSGSKIKRFKENHIAPLLAGQEDLELSGEVSKDTIDFLSRQIVKVENTVLNKVKLRKQFLGLQTIPGLGKILPLTIMLETGAIERFAKVGNFSSYCRKVPSEWKSNDIKKGKGNVKNGNKYLAWAFSEAAEFARRYNQSAKAFFNRKASKTNRMIAHGALAHKLARAAYYIMRDNVEFDQKKLFT

SEQ ID NO: 439746 - protein, 409 aa, unidentified
METLHERCAGLDVHKDTVVACVRIATGRSAQREVKTFATTTSGLLELHDWLQGDGVTHVAMEATGVYWKPVWHLLEDSFKLVLANASHIKAVPGRKTDTNDATWIADLLAHGLIRPSFVPPTPIQELRDLTRSRKQLVHERTRYVQRIQKVLEDANLKIDSFITDLLGKSGRAILNALVEGYTSPEVLVSLTTGRLKASRAELLEALRGRVTRHHRFMLKLHLRQIDQLDLSIQELEARARDAIAPFRYRVEQLTAIPGISETAASVVLAEIGTDMTVFPSAAHLLSWAGMCPRSDESAGKRRSTRLRHGAPWLKATLVQIAWPATRSKKSYFRALFHRLKVRCGPKKAIVAVAASILTTVYHLLRDGTVYQDLGPGHFDSINRDRAAKSLVRRLKALGFDVDVRPAAA

SEQ ID NO: 439747 - protein, 403 aa, unidentified
MRRFAGIDWASADHAVCVIDEHAKVLFRAMVAHTREGLADLIRALRKFGPPAELPVAIERPSGLLVDTLVDAGFEVVPIHPNAVKASRPRYAAAQSKTDLGDAFMLADLLRTDGHRFKPLRPHSDQIRALRALVRTRDDLVAERVRLANQLRALLERFWPGAGVIFADVDSPIALAFLRAYPTPMSAERLGEKRLTGFLTRHSYSGRRPVSELLKRLRAAPSGLTGEAEATASGELVLAIVAVLEPLVAQLQRLTAAVEQALEAHPDGALVASFPRAGRVNAAQILAELGEDRGRFVSEEHLAAEAGVAPVTRASGKSRAVGFRWACNKRLRGAVVCFADNSRHASAWAASVYQRARARGCDHPHATRILARAWLRVLWRCWVTHLPYDPARHHAATQQLAAS

SEQ ID NO: 439748 - protein, 346 aa, unidentified
MATMARITGGVDTHLDVHVAAALNDVGGVLGTASFPTTTAGYRQLLGWLSSFGEITLVGVEGTGSYGAGLSRFLHSRHVGVVEVDRPNRQTRRLAGKSDPIDAISASRAALGGTANGAAKTRDGNVESLRVLRVAMLSARKARTQAINQIHSLVCTAPDELRDKLRHLPTVDLIRVCASLRPPASTDVAAVTKTTLRALARRVHHLDEEAADLQALIRPLVSTTAPELLAHHGVGPDTAAALLIAAGDNPSRLRSEATFARLCGAAPIPATSGKTQNRHRLHRGGDRQANSALWRIALTRMSNDPDTRAYVTRRTQQGLSKREVMRCRKRYIARELYADLPQQMLA

SEQ ID NO: 439749 - protein, 404 aa, unidentified
MYNAVGIDVSKGKSTVAVLQPGGVIIRKPFDVLHTSGELKDLSKYLGNLEGDTKIVMECTGRYHEPLAIALYDAGLFVSLVNPHLIKNFGNNSLRKVKSDPADAKKIARYTLDNWAELRQYSSMDSTRTQLKTLNSQFSFFMKQKVAAKANLIALLDNTYPGVNRLFDSPVRDDGSEKWVDYAFSFWHVDCVRKISLKAFTERYRAFCKKHRYNFQPSKPEVLFNASKELIAVFPKEKTYKLLIKQSIQQLNLASEHVEQLRKEMDILASTLPEYTTVMSIYGMGKTYGPQLIAEIGDVSRFTHREALTAFAGVDPGVDQSGQHNSKSNRASKVGSARLRKTLFQIMTALLQNAPEDDPVYSFLDKKRSEGKPYYVYMTAGANKFLRIYYGKVKECLRNLEQNN

SEQ ID NO: 439750 - protein, 416 aa, unidentified
MDLSLKKYEVKEMEEIYVGIDASKDTFEVSIKDWRKNLLVKPRSYGQSKEDMEKFLELVETTRRTMGAQTLIGMEATGIYHLPLYNELTRIGYRVRIFNALELVKYHKGRIRKTKTDKIDSGVIADALILEGYKPPKEDISENITTLREYCRVRERLVYKLSVCKVQATRDLDTILRGYDKLFDDTFCKTSKLILKKCFRHGRIKMPVEREVTVLLNRYMNKSRAEEKARKICLTFQNALRVDHLIAPSIHELDLLIAQMEMLEKQIKNTEDEIEKIFSTTKSKITTIPGIGTITGAIILSEIGNIRNFESAKQLVAYAGLDPIVKESGKSKASSTNISKRGSPALREALYLAAFGSLQHNPVSKAIYERMKSKDKHFKVALCAVARKLLHIIFSVLKNDRDFYVPSYISSPTYTT

SEQ ID NO: 439751 - protein, 401 aa, unidentified
MQDTQQRDAVDVFVGVDVGKGHHHAVALDRNGKRLYNKALPNDEAKLRALIAELKTHGRLLFVVDQPSTIGALPVAVARAEGVLVAYLPGLAMRRIADLHAGEAKTDARDAAIIAEAARSMPHTLRSLRLADEQLAELTMLCGFDDDLAAQVTQTSNRIRCLLTQIHPALERVLGPRLDHPAVLDLLERYPSPAALAGTSEKTLANRLTKLAPRMGKGLAAEIVQALSEQAVTVPGTQAATIVMPRLAQQLAALRKQRDEIAAEVERLVLAHPLWPVLTSMPGVGVRTAARLLTEVAHKAFASAAHLAAYAGLAPVTRRSGSSIRGEHPSRRGNKVLKRALFLSAFAALRDPVSRAYYSRKIQQGKRHNQALIALARRRCDVLFAMLRDGTIYQPKSAPNA

SEQ ID NO: 439752 - protein, 364 aa, unidentified
MSETITYVGIDAHKVDLQVAMLAPDAIEPVAWTVANEARAVDRLRRKLERIAPGPIACCYEAGPCGYALRRQLDRGRVRCEVIAPALVPRKPGERIKTDRRDARKLAELHRAGLLTVVRAPTPAEEAVRDLCRARDDARVDRQRCRHRLGKLLLRRGLHYPGRAWTQGHRRWVDGLSWPHPAERVVVEDYRLAIDQLEARLVELDAQLVAVASTEPYREPVGWLRCFRGIDTLTAVLLLAELHDVQRFPTARALMAYLGLVPGEHSSGDRHRRGPITKTGNTLARRLVVEAAWHYRHRPGIGRTLAQRRSGQPPRVIALADKAQQRLCRRFRRLTKFKPGPVVAVAVARELVGFLWAALRPETA

SEQ ID NO: 439753 - protein, 415 aa, unidentified
MLAQSQRRRYCPADFDLFIGMDVDKKSIDLTCADSRQLIRSVHIPNHSEGLIRYVRKHFPGQKVLFAYEAGPTGLGLYDGLAAAGFACVVSPPSMIPTAPGQRVKTNRLDSKKITEALRAGQLKSIHVPSPTYRHLRHLTKIRDLVARQIAGNKCRIKALLLLEGIPFPETAPKSHHWSRSLIIQLQKLPCSGAVRFRLDRLLEALEFQRRQYLKITREIRIFCRQEPELRRCLSYLTSIPGIGQIVAPHLLARIGSWQNLQEHRVDELAGLLGLVPTEHSTGGRVHRGSITHGGDGRLRSKLIQSAWTAIRQDPELREFYRSVCRRHPQHLAARKAIVAVARKLTTRIFAVLKEQRPFVVRPVIHSRPLLPGEIGPRERLDASQKKEDGNLPSFVLETETLPGPPPKWGASKQV

SEQ ID NO: 439754 - protein, 391 aa, unidentified
MIYVGIDVAKDKHDCIIKNSVGEVVFKTFTIKNNLDGFNDLYQRIESVMEDVSKVKVGLEATGHYSYNLLGYLIDKGLPTFVINPLHTNLYRKSLSLRQTKTDKVDANTIASMLMSDVNLKSYSDTSYHNEELKSLTRYRFDKVKERAKLKTSISRLVCILFPELEKLVPTLHMNSVYSLLYEFPGAKQVASAHLTRLSNLLAEASNGHYDKNVAITFREVARASIGSNMPAKSLELKHTIKLIRELDSEIDEIEGEIKAIMDTINSPILSIPGISYRMGAMIIAEIGDFDRFDSADKILAYAGLSPSTYQSGQLDNCHPRMEKRGSRYLRYALFNATVYVCHWDPTFNAYLAKKRAEGKHYYVAVSHAAKKLVRLIYQLEKSHQSYNKAA

SEQ ID NO: 439755 - protein, 372 aa, unidentified
MRFYTTPHRFYCGIDLHARTMHVCILTHEGNVVFDRNLPCHFQTLLTAIAPYRDGLVIGVECMFGWYWLADRCAEQHIPFVLGHALYMKLIHGSKAKNDRIDARKIAHLLKGGNFPLAYAYPRGMRETRDLLRRRMYLVHKRAELITHLEILNAQNNLAPFGKKLGYAANRAELHIAERFSHPAVQLSATLDLDLIDKLDELIARVELHLTRTAKVDDVQTYHRLRTVPGIGPILALVLLYEMHDLARFDQVGQFLSYSRLVRCDHESAGKKQGWGGKKIGNAHLRWAFGEIACLFLRASERARQWKQKQEKKHGSGKALAILAARLARSIFHMIRKQQAFDEQRFWSGQVSEPQAAKTNKKKSTKPRTKAR

SEQ ID NO: 439756 - protein, 377 aa, unidentified
MSSTDAPAEARETVYAAIELSKKTWMLGIAHPDRDRPSIHRVCGGNIMELVSRLRLAARNNRRILVCYEAGYDGFWLARGLAKMGIECRVLDPASIQVNRRARRVKTDRIDVLALLRALIATDRGERHVCAIVRVPSVEEEDARRSHRERQRLVRERTGHINRIKGLLFAQGIRDIQPKLRRTRIDFAALETAEGHPLPDRLRRELEREYARLSLIATQLREVEKERDTADAQDPVVEQKRQLLVALHGVGATSAAILAREVFARSFASRRQLGSYLGLTPSAYDSGSTTRCQGISKAGNSWARRILIEVAWLWQKYQPASPLSHWYIQRTAGQSSRIRRIMLIALARKLAISLWRYVETGLVPEGVAIAKAKLRPA

SEQ ID NO: 439757 - protein, 317 aa, unidentified
MDHDCLSIGIDVGARWLDVATWPRTIAVRFPNTAAGHRDLLAWLAPRRVERIACEASGGYERGLAETLAAAGHGIRILPAERVRQFARAGGQHAKTDRIDAGVIAHCAATFDSPALTLDPARRDLAELVEARRQLLDALTTARNQTAAARLPRLRAMAAARIDQLRAWIKELDTAIAEQIAAHAPLARANALLRSVPGVGPATAARLLADMPELGSLSRQKVAALAGVAPFANDSGQRQGKRRMRAGRREVRCALYMAALSTTRHNPLFRPVYTRLVANGKPPKVAIGALMRKLLVTLNAILRTGQPWRHNTAAIAA

SEQ ID NO: 439758 - protein, 318 aa, unidentified
MSESVYVGLDVAKATLDVAVRPSGESWQVPNDEVGVTGLVVRLRALGPALIVCEATGGFERIAIVALAAAGLPIVVANPRQTRDFAKGTGQLAKTDRLDAAVLALFAERVRPTPRPMPDEAARLLDAVLTRRRQLLEMLTAEKNRLGFAPRPLHKGIRQHIRWLERQLDDVTRDLANQIEQSPAWRAKDDLLQSILGVGPIVSATLLGELPELGALGHKQIAALAGVAPLAWDSGKLRGKRMVWGGRASVRTALYQAVLSARRWNPQIRAFYERLITAGKPTKVALIACARKLLTMLNAMVRNNTRWMTQRATIQYSC

SEQ ID NO: 439759 - protein, 360 aa, unidentified
MDVHKDTIAVAYVAKAHDAEVVFLGTIGTRHCDIDQLIRRMPSKANQRIFVYEAGPCGYWLYRYLTKKGYDCWVVAPSWIPQKPGDRVKTDRRDAMQLARLARSGDLTVVYVPQVADEALRDLGRAREDTLGDLKSAKFRLKAFLLRHDIRYTGRATWGPAHLRWLSEVVCPTPAQQIVFQEDVRAINEHTERLQRLDQELQDQVTSWRLQPVVEALQALRGTQFIAAVTMVAEIGDLTRFENPRELMKFLGLIPSEYTSAERRRQGSITKAGNTHARRALVEGAWAYRYPAKVSRHLQLRLEKQPKTIQDISWKAQVRLCKRSRHLLARGKHANVVTVAIARELAGCMWAIAKQVPVTP

SEQ ID NO: 439760 - protein, 421 aa, unidentified
MSNSTLSKKLASVKPGTLFVGIDLALDRNVAVVLSERAEQLSRFGFPNERDGYDYLYRRLDTLREHQQAPAVLVGMEPTNYFWKLLASDMEQQRPDYSYRLVNPYTVKKNREGDQLDRSKDDNRDAFTIGNLLRTGKYTETRLLHGGYAELRQYVTLHERLKGDARRQKILIRNIAGQLFPELPRVFKDLAGETALAMLRSHAAAVTPRNKSQDRFITDVRADFRGRRLQVAKLRRVHVLAERSVGLKDGTEALQLALRTHIETLQVLQQQLEEIRAAQVDTFLALPQSDYLLSVPGLGVITAAKILSEIGDPSNYTSSRQLVKLAGTQPVPNTSGRKTRSKTPMSHKGRPRLRTALFFAVMRLVQVDETFARDYLHLQTREKNPLTKMQALGVLMNKLLRILWALMQNRTFYSPGFSGTA

SEQ ID NO: 439761 - protein, 338 aa, unidentified
MSKFNTIGIDLAKQIFQVHINDANGKKLSSKKLKRSQLLDYIRQQPNALVAIEACSGAHWWARQFQSLGHAVKVIHPAYVKPFVQMHKNDQRDAQAIAEAAVRPNIPAVSVKSQEQLDLQAIHRVRERLVKEKTAISNELRGILAECGIVLAQGRSALKTGVPLILEDAENGLSDPLRCLVSDLMQQWYEQVERIARYERQLQQISRQNEDCQRLMSIPGIGPVNATLLLSHAGSARQFKTARHFAAYLGLVPRQHASGGKEKLMGITKRGNKQVRKQLVHGARSAYRALLAKTDPSRLKTWLMRCEGKHPNKVIVALANKLARIIWVVLTRQTAYEA

SEQ ID NO: 439762 - protein, 353 aa, unidentified
MAQPVRALVEGVDEFIGIDHHKKRCQVMVKDRQGRVLRRGNIPTRREALARFLGERNGAVRMAVFEAGPRYRPLFRWLVDLADEVVTANPGRLKIISETAYKDDAIDAEKLANFGMLGMVPEAYVCGDEAWDRRQWLRQRAALVKMRTSVKNRVHALVDQHPDTLPARPEATDLFGSLGMEWLRSVALPEADRKRLDQLLEVYEFLRGQVQRSDGEVRRMVKADARCQWLATVPGIGDFFAALVMAEVDDIRRFRKSKDFVSYTGLVPGRDRSDQVDKPRRMHKRGSKWLRWALVEAAVPATKSNLALENLYDRVCRKKGPLAGPNVAKVAVARKLAEIVDRILVEERPYEVR

SEQ ID NO: 439763 - protein, 299 aa, unidentified
MDNHTQYSGFAGVDLAKKVMQIHFVTADGEITDKSAKRAEFLDFFRNRGKCLIGMEACGSSQDWARKLEAMGHEVHLLPPKAVKPFVSGQKNDHNDAIEIYKAMFNGVRRVPVKSTEIRDLQTLRRIRSQVTKDKVKEINHVRGLLAEYGIVMGKSLNAFNKDISSALEILTERGDVSPLVAEELRTTVEAIKAKIERQKKLDQEIEQLARGCKNYENFLKTPGVGPFTAAMLCVLLCDPSIFANGRQFAAYIGLAPRSRGSGGKNYVTGIPSKFNCDSESRTVFVECAQAIARYKILR

SEQ ID NO: 439764 - protein, 355 aa, unidentified
MNKINSNFEGQTIFVGMDVHKSSWNLGIHLNEMFVKNVHQKPNPHIMASYLKQHFPGANYKAAYEAGKFGFWIQRQLTSLGIECLVVNPADIPKSQKDSLQKTDPRDARNLGLRLQSGVLHGIHIPDEQQEADRMFFRHRKRIWTDLCRCKNRIKGLLAFTGIDIPDQYDNASWSHNFINWLKAVDCKQKSRRRALDYMISQMEYLRKELLTISNEIRKMMREQRYKTNYYLLRTIPGIGPLTAASILVEIGDVKRFETFYHLNSFVGLLPMEHSSGQSENKLSLTVRKHRQLRSDLVESAWTAKRTDPAMALYFQEQIKRKDSKIVIIKIARKLLNRIRFVLINQQPYEMGIVK

SEQ ID NO: 439765 - protein, 355 aa, unidentified
MNTLHKNSIVVGVDVHKYSHTAVAMNAWGEEKGSLTFSNNNLETYTDWLDQMGLKNDIIVGLEDVNSYGIHLVENLRSKNYHIRYVPAILTERERKTSTNRSKSDAVDAKRVGKVILTKYEQTLPAKESIADETELETARSLDLILMERRDLTKNKTIIKNQLHCLLHQYYTENYRTICPRSFSKKAIQWFLLDLKDNTSILATSITRRLARLLFVEKQIYDISKEIAVIGETSKEAAALATIHGCGMVTACSILAEVITAKRFKNKHHFSMYAGIAPTPHSSGRKHKMHTNPFGNRQLNRAIHTIALGQIAIKGDQRGKEYYQRKLKEGKTKLWALRCLKHQLAKVVFQKLKYA

SEQ ID NO: 439766 - protein, 457 aa, unidentified
MTLFAGLDVSVRETSVCVVDAAGKVLAERKIATEPDDLIELLRSISSEYGRIGLEAGPLSQWLVNGLADAGLPVVCVETRHMKALLTAQQINKSDRNDARGIAQMMRVGLFKPVHVKTLASQEWRMLLTSRKLLQRKLLDVEADLRGTLRNFGLKVGVVSVGGFEARIRELVEGFHRLAAIMEPMLAVRRVLREQFSVLHRMLLRLVRHDPVCRRLMTAPGVGPVVALTYRAAIDQPQRFLHSKAVGASAGLTPKRFQSGESDYDGGISKAGDVMLRTMLYEAAQSLLTHSGARWSWLRAWGLRVAQRRGMRRATVAVARRLAVILHRMWVDETVSVRSWAVLAGRSPIGCRRCSMVGAAGAHQYQLGLFLADDLGEVFQTQLGEGEQRFDVGVVDPDAALFFLHPAGYFIEPVGIFAECFGDMSEGEDRFDDRHRYGAGSFATVCAQFHGSSSSMR

SEQ ID NO: 439767 - protein, 355 aa, unidentified
MTGTKYIGMDVHKESISSAVMNGLGKIVMESVIETKASTILQFIQGLHGELYVTFEEGTWAAWLYDLLKPHVSGLLVCDPRRNALLQDGNKNDRIDARKLAELLYLKKLHPVYHGEHGLRTLKELVRSYLTITKDLGRVMTRVKAIYRSWSIPCTGKQVYAPRHRGEWLPKIQEAGVRRRAEFYYQQLDALRVLRQQVRRDLLAESKKHAAWKRLCQIPSMGPIRAAVLLGIVQTPHRFRTKRPLWKYSGFAIETHSSADHRSVHGQLQRAKKQISVRGLNQNCNHDLKNLFKGAAVLASSKPGPFQEFYAALLAKGMRPEMARLTLARKIATIALIVWKKGVSFDAQYLKPQTA

SEQ ID NO: 439768 - protein, 341 aa, unidentified
MQITTIGFDIAKNVFQIHGIDAAEKVVIRKQLRRGQVLKFFAALPPCLVGMEACATAHYWARELTKLGHEVRLMPAKDVKAYVKRNKNDAADAAATCEAVRRPTMRFVAVKSAEQQAQLMQHRARDLLMRQRTQVINALRAHLAELGITAAQGREGIRDLLAIIADEADARLPIDARASLIVLAAQLQALQTLIGSIEKRIVARHRSSEASKRLQTIPGVGILGASAIATIVTEPKAFRSGRDFAAWVGLVPRQDSTGGKCKLGPISKQGDRYLRRILVVGAHAVLKRARLHPQKYPWLTQLLARRPFKVVAIALANKMARVAWALLAKGETYRMPRLAAV

SEQ ID NO: 439769 - protein, 343 aa, unidentified
MEYYAGIDVSLESSSLCVVDATGRIVREAKVASEPEALIAWLQSLGFDLARIGLEAGPLSQWLYAGLKQAGLAAELLETRHVRNAFKIMPVKTDRKDARGIAQLMRMGWFRSVHCKSLPAQETRSLLGARKLLQGKLHDIELSLRGTLRGFGLKVGKTTPKTFEARIRTLVADHPTLTLIAEALLRARAVLLDEFIKLDKKVHALARQDPRARLLTTAPGVGSMVALTYAAAIDDPARFKSSKTVGALFGLTPKKYQSGETDITGRISKTGDAAVRTALYEAANIILERPVKGGWLKAWALGVAKRAGMRKAKVALARKLAVVMHRMLVDGTPFDLNRVTATA

SEQ ID NO: 439770 - protein, 365 aa, unidentified
MKKLVQDIVNRVVRYIGMDVHKDSTTAVVLDAQGNLVMQVTLRTEGTVLVDFVRGLSGRLHLTLEEGTYSAWLHALLSPWVEKLIVCNPRQNALLKQGNKSDPIDARKLAELLRLGSLSAVYHGAPEMRTLKELAASYATLVQDGTRVMNRLKSLYRGRGIRCGGTQVYSPRHRARWLEQLVEPGARQRAKLLYQELDLLLQLRPQARRALLAESRQHPAQKILRTIPGLGPVRVALLLAWLQTPHRFRNKRKLCGYGGLGLLTRGSAQYRLEKGELVVSPKGVMVRGLNPAHNTHLKDIFKGAALAACQRPGPLREAYERLLREGTKEHLAHLTIARKIATLVLTLWKRGERFDAQRLRREQAA

SEQ ID NO: 439771 - protein, 385 aa, unidentified
MTIQDRTAPTAAESDCATVFVAIELSRSSWVVAAHTPPVDKIRLHKLAAGDVEGLLALISRQRARAEKALGRPVRMASCYEAGYDAFWLHRVLVANDVDNHVIDPASLLVNRRARRAKSDRIDAEGMLRALMAYARGERRVFAVVRVPSRAEEDFKRLHRGRQQLIKERTRHVNRIKALLAGQGIYGFQPRRADAVTHLAELRTGDGHVLAPRLHAEIGRELERLALVQIMIGEVEAERNALLEPAAAGDARDKMRLLVQLRSIGPEIASVLVGEVFYRAYDNRRQLGSYVGLTSSPFNSGAVTRDQGISKAGNRRARTTMVELAWLWLRYQPDSALSQWFRERVNGAKGRLKRVMIVALARKLLVALWRYLETGLVPTGAVFKV

SEQ ID NO: 439772 - protein, 365 aa, unidentified
MQKAELSCEADSENNLGGSSETMYYIGLDVHKRTISYCVKDAAGRVHMEGKIGSTRRELDGWIQTLPQPRTIAMEATIFTGWIYDHLLPHAEKVKVAHPLMLRAIAAAKRKNDRIDASKIADCLRCDFLPECHMASTEIRDRRRTLRYRGLLVKQMVQMKNRISGLLMEKGVTHTKRRLHKVGYFAELMGGNEEIDQSIRPLLKLSREHIVRAQKLDYARVSSLERDPLLAERLKRLRTVPGVGPITALTWALEIGDISRFRSIKQAISYCGLCGAEKSSADKVMRTPISKQRNKHIQHVLVEAAKLAPRLNHDLALIYEKEMHRGNRNRATLAVARKIVAYLLAVERRQKDFVPAEEFGGTAAA

SEQ ID NO: 439773 - protein, 298 aa, unidentified
MAVRPSGERWRTTNDERGIRELVSRLRPMGAMLVVMEATGGYETALALSLVEAKIAMRIVNPRQVRDFAKGKGLLAKTDSLDAAVLAEYGEIYRPEARVLLDKQAREMADLLSRRRQLIEMKTAENNRLEHARGQVHKEILAHLSWLSRRIKKIDEDLDKRIRNSPLYLDKRERLKSVPGVGNQTALSLILNLPELGTLNRKQIAALAGVAPFNKDSGRRRGKRSIWGGRAQVRAVLYMAAVVASRHNDVFRDFYAKLCAAGKPKKLALTACMRKLLTVLNAMAKNQTSWTPSLATAR

SEQ ID NO: 439774 - protein, 411 aa, unidentified
MELLVARCAGLDVAKDEVVACVRVPDGRGGRSQEVRTFQTFTSGLEALAGWLAAEGVIQVVMEATGQYWKPIWYVLEEGGFELLLVNARHVKILPGRKTDVCDAAWLAELLEHGLLRGSFVPPAPIRELRDLTRYRKRLIQAHAAEGQRIQKTLEDAGIKLDSVAADVLGVSGRAMLAALINGERDPQVLAELARGRLRAKLPQLRQALRGRFRGHHALLIRLALGHLEQLEGAIATLDHRVDEVIAPFAPARDRLDTITGVGKRAAETIIAEIGTDMTVFPTAGHLASWAGRCPGNNRTGGKRRSGKPTKGNRWLGEVLIECAWAAARSRDTYLSAQYWRLARRIGKKKAAVAVGHSILVIAWHLLTNDCDYADLGGDYFVRRDTDRQRQRAVAQLQALGYRVVLEPVAA

SEQ ID NO: 439775 - protein, 452 aa, unidentified
MSRKRKRNQKKSGVPVLSCLNLNAAGVDIGATEIYIAVPGDRDPQPVRCFPTFTEDLLAAADWLQACHIETLAMESTGVYWIPFFQILEARGFKVFLVNAHHVKNVPGRKSDVSDCQWLQYLHAVGLLRGSFRPEQAVCTVRSILRHRDSLVQMASSHVQHMQKALDQMNLQLHHVISDITGMSGVAILEAILAGERNPHTLAALRDRRIKASADTIAKSLVGDYRREHLFTLRQSLAAFRHYQELIAACDREIAQSLEEFESKLDPPPGSPSPSQDGSQAKASEPGFDLQTHLHRIFGVDLTQVPGIHVLTTQTLLAEIGPDLSSFDDGAAFASWLGLCPDNRVSGGKVLSVKTRKVKNRAATALRMAAQSLHHSQSFLGHFYRRMRAKLGAPKAITATAHKLARIIYHMVTTRHAYDETICAQNEVQNRQRMEARLRKQARELGLQVVAI

SEQ ID NO: 439776 - protein, 459 aa, unidentified
MARRNRTSPQPAARPKRPSPRGAALQITHPNAAGIDIGANSHFVAVPPDRDDEPVREFRAFTTDLMQLADWLRACRVDTVAMESTGVYWIPLFDLLSSRGFEVLLVNARHVKNVSGRKSDVLDCQWLQQLHSYGLLRGAFRPSDGVVALRAFMRQRHALLRTQARSVQHMHKALVQMNLQLTGVISDVAGVTGQAIVRAIVAGERDPAKLAALRDHRVKASEADIARALHGNWRHEHLFALRQALAAFDFCGQQLAELDAQLEAQLQSLRLNEDEPAKGKKRSTARNAPKFDLRTRLFQMCGVDLTRVDGVDVTTALVVVSETGADLSRFPTAKHFASWLGLSPGTKISGGKVLSGRTLPNANRAAQALRLAAAALRTSKSALGAYYRRLCARMDKAKAVTAAAHKLARLIYAMLTRGQEYTDQGQDYFEERYRQRVVASLSRRAQQLGLKLVPEAPTA

SEQ ID NO: 439777 - protein, 332 aa, unidentified
MKTRYIGIDVGKRRCQACVIDERGSVVDEFKFENSFEGISYLVGKVKPSPAKAVVESTGNLWLRIHEALEGVGVEVKLANPFKTKAIASARIRMDKLSARILAHLLRADLIAECYVSSKETRKVNALLRQRASLTRIQTMVKNQVHSLLDKYGLKSDWSDMFGAHGMEWLRSLQLDPVDRCILDTHLRHLECLRRETGMLDSKIAAKASESQEAKLLMSFTGIDYHSAMLTTSEIGDISRFPSSKHLVSWMGLCPSLHQPGNSTYMGRMKKDSNRRVRSILIQAAETAAIHDPRMKSLYDRVAARHGHNKAIVRVANKMASITWHVLTKKGP

SEQ ID NO: 439778 - protein, 338 aa, unidentified
MKVYVGMDLHATNTYVGMVDEENEVLHKQRFRNELPLILAGLDPFRKDIEGVVVESTFNWYWLVDGLMAEGYRVHLANVSAIKQYEGLKQIDDKRSAFWLANLLRLGILPTGYIYPKEERPTRDLLRKRLHLVRHRTSHILSVKNILARNLGLRMKSEDVKKLEDPEVKRFFPDKEMQTAVLASVGLIRHLEVEISGIERMITKKLKIRKEFAKLMTIPGIGKILTLTIMLEVGDIRRFPTVGDYSSYCRCVKSIRTSAGKIIGYGNRKNGNKYLSWAYIEAAQAARRFHETVRSYYEKKMAKTNRIVAIKALSHKLTRASYYVMRDQVDYDPARLFR

SEQ ID NO: 439779 - protein, 425 aa, unidentified
MKITQTAQKIKGNFAMDVSVDVHKDTLNFFFETEGREYVDECSNRTTVIQKKLKEYHEVALEHGIKTLRIICEPTGEYQNKMFRIARKMGFLTCFVNAESVAKFRIVETNDNGKTDTKDPRVIRTLGKLNKTIKHRILDDDYLTLRKLNKVLDEVDEVKKAIRCRISKLLVELFCDYSFEKDFLYGSSGKALVDKYGCNPYLLVKAGYRRFSTYMKKTVPRIRQMTLKRLWDDAKSSALNEQPEEYIEVIEIQLKQLMQDYWRHEARSDAVIERMIEVLNNLREKDPNIPKATKGVINDKHIARLLGETGPLGDFVNWRMLMRYAGLNIRMRQSGKFSGQNKITKKGRPLLRKVLQRIVFPLVRQNWLYGPYYHRKKEIDKMPGNKIVTCVSRHFLKKFYGWYKSGEAFSQQRFFSCETQYKKAA

SEQ ID NO: 439780 - protein, 388 aa, unidentified
MYRIIKIGMDVHSKNYTLCAMEPTIGSEDRIFGEVQVAPDYKEIICFIESLKMKLGFYDDYSVECGYEAGCLGYTLYHQLTNAGVKCVILAPTTMLTQQGKRIKTDKRDARLIAQCLCYGGYHPVYIPTGEDDAVKEYLRMRDDHKLALKRLKQQINAFVLRHGHSYTGTKWTIKHVAWLKKVELDPIYRETLNEYMASYEEQETKIERYDKRIEEIASEARYQEKVKKLVCFLGVRTHTALSLIVETGDFNRFAKGNTYAAFLGLAPGEHSSSENVNRLGISKAGNTHLRCLLIEAAKGICKGAIGHKSKELRSRQSGQPAEVIAYADKANTRLRSKYYKMIRHGKKTNVAVAAVARELACFVWGMMTGNISIRPTAGTSGPAASQG

SEQ ID NO: 439781 - protein, 416 aa, unidentified
MTQPVLPTVERHLAVDLHKHYLVIGGVNARQEVILSPRRVDLDDWPTWAKTNLKASDVLVVEATTNTWWFYDQTYQSVGQLLVADPRKIAWIAQTKVKTDAHDVMKLARLSAAGLIPLVWVPPLAVRELRALLAHRRRLVRTQTVLKNRLHSLLHRLQIAPPDGDPFCAKHRAWWDALQVSPTERLHVRHDLATLDQIVGQLDEIDDELRRLSCSEPWSEVIPYLMHLPGVGLVVAMTILAAIGDITRFPTAKKLVGYSGLAVSVHDSGQTHRTGHITKEGRKEFRYVLVEAAWHAVETNDFWTAEFERLCRRMEKNKAIVAIARQLLVVIWHVLTERTADQHADPDMVAFKLMTWSWKLTDQQRGGLTTRQFVRYHLLRLGLGHDLTHVIRGGGKYLIAPPDEVLKLKPELPATT

SEQ ID NO: 439782 - protein, 344 aa, unidentified
MLIIGCDFHSGFQQLAIFDNQTGEVVEKKLLHAGEAMGFYQGQSEPVRVGMESGSPCQWFRRLLSECGHELWIGDAARIRAAEPRRQKTDRRDAELLLKLLLEERFPRIWVPSEAERDVRQLLLDRHHRMRMRTRAKNQLQSLALNQGLQKGRKLWSEAGREQLRRLPMMEHAARRRDQLLQTVADLDGQIAELDQLVRRQAEGREDARRLMTHPGVGPQTALGMVLTLGEVGRFAGAKQVASYLGLTPREHSSGGKQRLGHISKQGSSLMRFLLVEAGQSAVKGDAPLRRAYRRLAAKKSRAVAKVMVARRLAVRLYWMLRRQWTYAELARHAGEPGSFCGEQ

SEQ ID NO: 439783 - protein, 454 aa, unidentified
MSRRKKKAKKFQTSNLPAHLRHVNLDAAGIDIGSDRHLVAVPEGRDQICVREFGTFTADLIALADWLVHCDIKTIALESTGVYWIPIFEILESRGFEVKLVDARRVKNVPGRKSDVLDCQWLQQLHTYGLLAGAFRPPDQVCVLRGYMRQREMLVQSSSMHIQHMQKALQQMNLLLHNVVSDITGTTGMKILKAIIAGERNPKVLASHRDPHCRNSAHTIAKSLVGNYREEHLFALTQAVELYEFYQSKINDCEAAIARHLSVQSKCTEDPPPPSQKRTQAKNTVRAGVDMRTQLFKLTGVDLFSISGLGADTLLTLAGEVGFDMSPWKTEKHFTSWLALCPGTRTSNRKVLSSKTRRSSNRAAAAFRIAAATLGRSKTALGAFYRRISARVGPPQAVTATARKIAVIYYSLLKHGTSFVESGQAAYEQKYQQRRFKGMQKQALAFGYQLVPIS

SEQ ID NO: 439784 - protein, 342 aa, unidentified
MNYYAGIDVSLEQSSVCIVDAGGEIIREGKVTSEPEALIEWFNALGFEPARIGLEAGPLSQWLFTALKQAGFAVELLETRHVRDAFKAMPVKTDRNDARGIAQLMRLGWFRPVHCKSMSAQETRAMLTARDLVQTKLRDVEMSLRGILRGFGLKVGKTTPPRFAERIQKLVAEHPQLQAIADSLLAVHGVLLREFKTFERRVRMMAAADESAKLLMSAPGVGAVVSLTYASAIDDPKRFTSSKRVGAHFGITPKKYQSGETEFNGRISKIGDKRVRKALYQAAHVIITRPVKGSTLKSWALKLAKRIGHKRAAVALARKLAVIMHRMLVERKPFNFAPAAAA

SEQ ID NO: 439785 - protein, 346 aa, unidentified
MRILALDLGKYKTVACEYEAESGRHRFATVLTTPKALHDLIVDREPQRVVIEICSIAGWVADLVRSLGIELQVANTSDERWQWRKVKQKNDRRDALKAAQLSAVNQLCPVHVPELQMRQWRALIAYRSKLVQRRTKVKNHIRDLLLREGQLLPRGRTAWTQAGMATLAALAQPFATLDSEQLWRGELGLELAQLNELQQQIMTVHAKLDELAAADARVQLLRTIPGVGPRLAEAIVTMFDEVTRFSTAGQVGAYIGMVPKQFDSGETQRSGRITRHGNRLVRSLLVEIAWASLRHNPWARQTFQRISGGKKSRRKIAIVAVGRKLLVRCWGMLRHQTPWHWRPGVA

SEQ ID NO: 439786 - protein, 369 aa, unidentified
MKHFITFVGLDVHKDTIDIAIAESGDNKEVRHYGKIGGDLAALDKAIRKLRSKGAELHFVYEAGPCGYDIYRHLTKQGFSCIVVAPSLIPKKSGDRVKTDRRDAMSLARLYRSGELTAVYVPREDDEAMRDLSRAREDAVNASRIARQRLGAMLLRLGYRYRKTLWSTAHFNWLSTIKMPHPAQQIAFQEYIHAIMECGDRVNRLTEQIQKLIPDWRLAPVVKALQSLRGVSLMVATTTVAEIGDLSRFANPRQLMAYLGLVPSEQSSGKKEKRGGITKTGNGHVRRALVEAAQAYHHQARVSRILLARQEDLPDSIRKISWKAQVRLCGRFRKLTGRGKTRNKVVTAIARELSAFMWAIAKEVPIQYA

SEQ ID NO: 439787 - protein, 416 aa, unidentified
MKKGQDTRGYERYMALDIHREYLLVGAWNEEKDWVLTPRRVSTEKFPEWAKKNIRAGDIVVLETTTNVWATYDIVASLASRVLVANAAEVGEIANARVKTDKEDIKRLLKLLIGGIVPEVWVPPIPVRELRAFISYRGRLVKTSTMIRNRLQSLLHKHNLQLSEAGLLDQAWWEAQKNVSTLEKMQIRQELVLLQEVEKLKMTVDEELQRQSTSAMWSKPALQIMQLPGVGYVVALTVLSAIGDISRFENASKLVGYAGLGAGVHDSGKTHKEKKITKKGRRELRWAMVEAAWRAVRMSPFWKSEFEKYLKRLRKPNQAIVVIARKLLVAIWHVLSKEETDLHASEDDLAYKMLLLSWSLSEEVRMGLTYKQFAKYALMKLGVETDITRFVRKNIPRRLAPREEVLARMTELGLRA

SEQ ID NO: 439788 - protein, 352 aa, unidentified
MKKKVAYLGLDVHAEHCVLGHMDSKGTFIGNKTFGTSEQNIAEALKAVNAKDKYLALEESNLAYWAAQVAKPYVTEVISSDPRENALIFRSPNKRDKVDTKKLCRLLRLGELKRVYHPENDDRAVFKAAVQHYIDFRNQQVVLKNKIKAMYRHWGVIDVAGEAVYGKKGRHDYLKKVKRLAVRSQLRRLYFLMDQAEAMQKQALKSMKQLGRRYPEIKEFKKIPGIGDVLAHIYDAFIQTPERFANKRKLWRYCRLGVTDRSSDGKQLGYKRLDRSGVSELKSTSYQAWLCAMKGDNEIKRFYLQSLRRTLSRVHARLNTQRKIIAVMYGMWKTGQAYRPELFLDSPQAGVV

SEQ ID NO: 439789 - protein, 337 aa, unidentified
MNARIKVGLDVHLRNIVARAIDADTGEIFASVFDGSDFAGLLAWLEALPGQREAVYEAGYCGFALARLLISHGIPCMVTQGRTLGLGRAKTDALDAEALATLLLCKRLQPVYIPTEKQEAQREAARQRYALAQQRTVVKKRLSAFSHRHGLPRTMAPDARARILGSLSSDDRISFDSLTAQLESAECELAHLDQFMGREVERNSDMSALTQLSGIGSVTAFTTAAEAMDFKRFDTARDYVSFLGLVPIPHDSGGKIVQLGNRKRTPSGACFYSAATTVMRTGGSFQTDGLADPENSAIRECLASLDRSSRQHGKTHRAAIMARCIAEQAWALAHRLD

SEQ ID NO: 439790 - protein, 362 aa, unidentified
MSITMIGLDTAKSVFQIHGVNETGKVELRRKLRRSDLIAFFEKQERCTVVMEACGAAHHWARILSGLGHTVKLIAAEAIKPFVKKGKKNDAADAAAICEAASRPDTQFVPAKTVEQQGILALHTARSLLVKQQTMLANAIRGLATEFGLVVPRGLHNLEPLVELVNTDEAMPKQARQAIAELHDRFGELTKSIKAFEVAIVAHARSDATARRLATIPGIGPITASLIAATVVDISLFKTARQFAAWLGLVPRQNSTGGKTRLGRISKAGNREIRKLLVLGATSMVGRADGWNSAVGAWLRDILQRRPVRLVTVALANKMARIAWARLAKAPASRLRLVGRPGEGVMTRKEVYRPQGGIAVAA

SEQ ID NO: 439791 - protein, 315 aa, unidentified
MSKMVVIAGIDVSKDKLDIHVLPSNQTFVVGRDPRGLASLARRLRKAGVEQVALEASGDYERIVIEALEADGFVVQLLNPARVRAFAEAIGMLAKTDPIDARLIALYCQHFPDTGLTRRPEQARKLGEFLNMRAMLLKLAGEIRNSLEHVREPGLKALADTLSADIAAKLKDVDDRIAKVIAGDDATMRKARIIRSFTGAGPVLTSGLLARVPELGGVTRHAAARLCRAAPTDRQSGRTRHRSSIEGGRDQVRPVLHMAALAAIRSNPIIKAFAHRLSAAGKPKPLVIAACARKMVVILNAMLRDNTEWKYAKAA

SEQ ID NO: 439792 - protein, 345 aa, unidentified
MQSMYYIGLDVHKKSISYCVKDASGQIHAEGAIPATRFDLDRWMKTLPQPWTAAMEATLFTGWIYDHLLPHAAALKVAHPLMLRAIAAAKKKNDQIDANKIADGLRCNFLPECYMASTEIRERRRTLRYRNLLVRQAVQLKNKISGLLMEAGVSYNKQKLHKVGYFRELLATNQEIGEGLRPLLRICRETLVRLQKTESALVRSLEHDPLLAERVERLMTIPAVGPITALTWVLEIGDVKRFSSIKKAISYCGLCGAENSSANMIKRTPLSKQRNKHLQSVLIEAAKLAPRRSSGLALVYDRERQKGNANRATLAVARKLVAYLVAVDRRQKEFLTVERENRTAA

SEQ ID NO: 439793 - protein, 384 aa, unidentified
MRADRADAPAECEYATVYIAFELSKSNWHLGVMTPGSEKMSRYRIDGGDLAALSAVLGRARAKAERLGKPVRVLSCYEAGLDGHWLHRWLTTQGVINHTIDASSIEVSRRARRAKTDRIDLAVLMRAFLAYLRGEPRACSVVRVPTPEEEDRKRRTRERERLLTERTAHINRIKALLHGQGIRDAMPLKPGFLSELEKVRSGDGRLLPPHLTDEIRREHERLLLVHKHIKALEAQNAAAHRAPAAGPVEAKAVALARLRGIGGQTAQVLVNEVFYRDFNNRRQVGSCFGLTDTPYDSGESRRQQGISKAGNHRARTAAIELAWLWLRHQPASELSGWYRKRVGDLKGRIRKIAIVALARKLMVALWRYLETGLVPTGAVMHPSF

SEQ ID NO: 439794 - protein, 412 aa, unidentified
MLEVMFSHCAGVDVHKKSVTVCVLIPGKKGRVRRIVRSFGTTTKALLEMRAWLLSLGVTHVAMESTGVYWKPVYNILSDELEAWVVNAQHIKQVPGRKTDVKDAEWIATLMRLGLLNNSFIPEESQRDLRDLTRYRTQLTNERSASVNRVQKVLEDGNIKLASVVSDIQGVSARRMLEALIGGQEESEAMAELAKGRLRSKIPELVEALTGQVRGHHRFLLAELLEHLDGLNQRLAQLNERIGQQTAPQAELIERLDAIPGVGKHTAEILLAEIGHTVEQFPSEKHLASWACLCPGNNISANKRRSGKTRKGQKWLRTALTEAAWAASRTKDTYLGAQFHRLRVRRGAKRAAIAVAHSILTIVYHLIKDPNATFNELGGDYFIKRNKGDQQRRAIKTLTALGFAVELTPVAA

SEQ ID NO: 439795 - protein, 451 aa, unidentified
MSLPVLDPLAAFVDVGSEHMHVSIAGGPPEVFGAMTGELHRLRDWLKERGVSSVAMEATGVYWLPLYGVLEESGMRVLMVNGKHTRNVPGRKTDMQDCQWGATLHAHGLLRGGFVPPAQIRQLQDYLRLRDDHIGLAGSHVQHMQKALERMNLKIHDVISNVVGASGLAVIKAILGGERNPERLLAVCDVQIRKRKAEAMKEALRGTWGEEHLFALKQALESWEHYRKQIEACDKQIHEVLLRMQASMTPPESQAQDGSPGEGARGESAPRKRAGINAPSIEGLEGLMKRLLGGKDLTVLPACTSYSMLQLIGEVGLDLGKWRTAKHFTAWLGLAPGSYQSGKRNRGVGRKRNRAGRLLCVLARSLVRSKDIALGGFYRRMAARRGGLIANIATARKLGVLIWQAMVKGLDYVDEGLRRYETRVLETKQRTLRRMAKDLGMEVTVRQNQAA

SEQ ID NO: 439796 - protein, 410 aa, unidentified
MEVLIERCCGLDVHQAKIVACLLVGASERKRTRQVRTFGTMHDDLQALHKWLTDNGCTHVAMESTGVYWVPVYEALEDHFELIVGNAMHIKNVPGRKTDVNDSQWLAELVRHGLIAKSFVPPKDIRELRELVRYRRKLVEAQADERNRLQRLLESADVKLASVASDVLGVSGRRMLRALIEGKSTPLEMAELARAGLRKKLPELRRALSGQLTDTDRFLLQMQLDRVEQIEADIDKLDQRLDEHLKPYQEQHTRLQQIPGVDRVTACTIIAELGADMTVFPTAQQAAAWAGVCPGNNESAGKSKKSACRKGNVHLKTALVQAAMCASRKKKSYLKAKYWKLKAKRGPKRAAVAIAHKILLAAYHMLRNGTDYRELGEDYQDTQGIERKRQNLVRQLEGIGFEVTLKKRAA

SEQ ID NO: 439797 - protein, 347 aa, unidentified
MRFYNRQHRHYCGIDLHVKTMYICILDTTGQVLVHRNVASTPEAFLEVVAPYREELVVAAECMFTWYWLADVCAAESIAFVLGHALAMKAIHGGKAKNDKIDSHKIASLLRGGLLPQAYVYPAGMRSTRDLIRRRLHLVRKRGELLAHIQNTRAQYNLPAFERRLAYPANRDGVSAHFADPSVRKSIDVDLALIDQYDTLIVDLELTIVQEAKRHDADAFHRLRSVPGIGKVLALTILYEIHDVTRFDRVQEFASYARLVKCVKKSGGKILGTGGAKMGNVHLKWAFSEAAVLFLRHTKDGKKILARIEKKHGKGKALSILAHKIGRAVFYMLSRGTVFSMEKFLAA

SEQ ID NO: 439798 - protein, 413 aa, unidentified
MDVFCGIDWAEDHHDIALTDRDGQLLARRRISDDAAGLALLLGLLAKHGDSADDPVPVAIETPRGLLTACLRATGRNVYSINPMAVARYRDRHSIAGRKSDHGDAVVLANILRTDLHAHRPLPADSELAQAIAVLARAQQDAVWERTCAHNKLRSHLREYFPGFLAAFADSRGGIMRPEARAILAAAPAPAAAAALTLAQLRSLLRKAGRSRGIDPEAARLRDAFRAVQMHQPPLVEQAMGRQSLALLRHLDAACASAEELEQAVIASFDQHPDAGIITSFPGLGSLTGARVLAEIGDDRSRFADARGLKAYAGAAPVTRASGKTLAVLHRRVKNQRLAAAGYIWAFAALTASPGARAHYDRRKTAGDRHAAAQRNLFNRLLGCLHHCLATGQHYNESTAFPAPGETTRRAAA

SEQ ID NO: 439799 - protein, 393 aa, unidentified
MVYVGIDVAKDKHDCFIANSDGEVLYDVFTIQNDMDGFEDLFFKIKTASRDLSKVKVGLEATGHYSCNILGFLHNKGLTTIVINPLYTSLSRKSVSLRKTKTDKVDARTIASMIMSDVSLKPYSDTLYHNEDLKSLSRYRFDKVSERAKLKQSVSRLVNILFPELEKLVSSLHTKAVYELLSEFPGAHQVASANLKHLTALLSTASKGHFGREKANAIREAARRSISSYLPAKSLELRHTIKLIRELDAEIAEIETEIKKIMDSIDSPTLSVPGISYALGSVIISEVGDFSRFDNPDKLLAFAGCSPSTYQSGQIYSTHAKMEKRGSKYLRWALLNAAKYVCKWEPTFAVYLRKKLAEGKHYNVAVSHAAKKLVRLLYHLETTGEKYIPQTLS

SEQ ID NO: 439800 - protein, 404 aa, unidentified
MIFVGVDWAENHHDICVMDHDGAVLGKRRVPDSVAGIGELHELVAEHTEDDEAVAVGIEIDRGLVVTSLVAAGYQVYAINPMASSRYRDRHGTSGAKSDPGDAKVLADLVRTDRHNHRPLAGDTDLVEGVKLLARAHQSAIWGRQRQLNALRSALREYYPAALVAFGTDLSHGDATQVLSLAPTPELGRTLSRSKIASALRRGGRVRNVERRTEEIQAALRAQYLEAPLTIAGAYGTITRSALRLIETYTAEIASLETALSEHFEQHPNAKVVHSLPGMGTVLGARVLGEFGDDRTRFASAKCRKNYAGTSPITKASGHSRVVLARFARNRRLSDACDQWAFCSLTRSPGARRYYDELRARGKTHRQALRQLANRLVGLLHACLEEGVLYDETIAWRAAEQSAA

SEQ ID NO: 439801 - protein, 375 aa, unidentified
MSNVRFVGLDVHAETIAVAVAEREGDVRSLGVIPNRAEAIRQVMKKLGPPEQLRVCYEAGPTGYVVYWQLAKLGVACEVVAPTLVPTRAGDRVKTDRRDAVKLARNYRAGELTPVWVPDASHEALRDLVRAREAAKRDLARARHRFVKYLLRRGRRPPTAMRAWTTRYRQWAETVRFELAAQEATRLDYWHEVAHGVERLARLERAIDEIIATAPAAMRAVIEALQALRGLAKVSAVTIVAELGQVSRFAHPRQLMGYCGVVASEHSSGERTRRGGITRTGNAHLRRVVVESAWAYRHPPTLGPTLRRRQVGLDPAVLEIAWKAQHRLCTRYRRLIERGKSQQQVVTAIGRELLGFIWAIASRVETVHPNASTAA

SEQ ID NO: 439802 - protein, 352 aa, unidentified
MSIAEGERQGEVRHYGVIASDLEPLDKVVRALRAPDRTLHFVYEAGPCGFGIYRHLTKRGEDCVVVSPSMIPKRSGDRVKTDRRDSQMLARLHRAGELRAIYVPDDTDEAMRDLVRAREDAVVVGTQAKYRLKAFLLRQGRRYPGREGWTLPYRRWLTDLSFPSAAQHITLQEYRDAIAETEQRIDRLTEQLRQLAPTWRWAPMVAALQALRGVSFVTAVALVAELGDLTRFRHPRELMAYLGLVPSEHSRGPTVRRGAITKAGNPHVRRLLAESAWAYQGIPRIGRQHAYRQEALPKVVCDIAWKAQLRLTTRFRRLVARGKAKPKVATAIARELSGFVWAIAREVSPTPR

SEQ ID NO: 439803 - protein, 382 aa, unidentified
MLILRKSFLRLTPALVAGQYDERYLKPFNLFRSELVFASVLCGSANATNLSKTKEKQMILGIDIAKDKFDVALYQGKNLSATGQFDNTPAGFKKLSKWLKNKAADQVWACMEATGRYGDALALYLHQAGHQLSMVNPSRIKKYAESRLQRNKTDKLDAKVIADFCRTQEPRLWTPPAPEKRQLQEIVRRRSALVKERTREKNRLKSGLESDIVMESIRTHLDFLNEQIARLDKQIQSHISQHSVLKRERKLLTSINGIGIKTAATLLGELPDVERFDNSGQAVAYAGLSPQQHQSGSSVHKKTRLTKMGNQRLKTALYFPALTAIKFNPIIINQSARLEEKGKEKMVIVGAAMRKLLQLAYGVLKSGQPFDPNYATKMQVAV

SEQ ID NO: 439804 - protein, 346 aa, unidentified
MTNGGIDLGRRMSQICILKQDGEVIEQRIKSERERFAAVFKAHPGARILIEAGTESEWVARSLEELGHEVIVADPNYAPMYGQRHRRVKTDRRDARALAEACRLGAYRPAHRTSEAQRHVRWQIAVRETLVRTRARSIVLIGSLLRQAGLHLPGGGAETFLNRLNALALPEPLHQAIGPMLPALEMLNRQVTTADRALEEQARSDPRVRRLDTAPGIGPVTAATFVATLDRADRFAGPHQLEAYLGLVPREYSSGERQVRGRITKGGNTRLRCLLIEAAWSIVNYPKPETAALRQWTLRIAGRRGMPRAVVALARRLAGILFAMMRDETVYDSSRLTSRSRPARVA

SEQ ID NO: 439805 - protein, 359 aa, unidentified
MRIIGCDLHARQQTLAMLDTTTGEVVKTTLKHEGNNVREFYSNLPRPVRVGIEATGSMQWFVNLMEELGIECLVGHPAEIRAAEPRKQKHDRRDADLILKLLMEDRFPAIWLPTKELLDLRALLRHRHQWVRLRTRIQNALQAIALANGLRRGSSLWTPGGQHAIAALPLSPHTAYRRSELQAMYVKFETDIEILNREVEQQAGARPGARLLMTHPGVGPITALATEVFLGDPSRFADSKGLASYVGMIPGEHSSGKRQRLGSLTKQGNPLLRFLWGEAGLHAVRRDPELKCFYRRKLIQKGLGKARAAVARKLGIRMWIMLRDQIEYNEFCRRGQMQQRSGDACAGMPGRRYGAKVTG

SEQ ID NO: 439806 - protein, 358 aa, unidentified
MRKANRKGKKFNGKTIGLDLHKAFIEYVVIDEKGDEIAGGNIGTDRKKLKKLLGKFGLKVQVVMEACGLFYWVHDISAEMFGKENVHVAQSSRIKAIANSHEKNDTNDAWWLAYLLYERRLPDCWVPEGEVRDLRIYTRELRTQINNRSDSLRRLRSHFAQEGIKLVGSSLNTIKARAQLSEVISSLSEARQIAVSDIIDEIEFFDLRIEASRKRIKEFTKEMLPVKMMQDVIPGIGVTLAPIIYAELGDATRFYSAKAYAKATGLTPSYRESGGKKHGGGIARAGSAQARWALTRAVVGIMRCKSGAGLVIKNWITNQRKRKPYGKVVVAAARKLAEAVWRLFTYGECFDVAKAFGG

SEQ ID NO: 439807 - protein, 326 aa, unidentified
MAFITLPILGIDISKAKFDVALLINGKVKKSRVFENNLTDFKALSLWLVKQDITHLQACMEATGTYGDELATYLYDQGFEVSVVNPAQIKSFSGAQLNRAKTDKADAKLIAQFCASMQPTAWMPPPMHVRELQALVQRLAALLQMERQEQNRFGTAAPVIQPSIKAVLATIKAEIKVVERMIRDHIDRHPDLKDKSNLLDSIPGIGIATISRLLAFVGDVHRFHNAKALAAFVGLNPTVHQSGSSVRGKSRLSKKGNATIRKALYMPAVVARRYNPTIKEFAQRLKKAGKSNMLILGAVMRKLLHIIYGVLKSGKPYDANYAVKNA

SEQ ID NO: 439808 - protein, 382 aa, unidentified
MITMTRTSESTAPTGGLLLAFELGQRSWKLGFTVGMGQRPRIRQMPAGAVSALVTEIERAKKRFGLSSDTPVTSCYEAGRDGFWLHRYLVAYGITNYVVDSSSIEVNRRARRAKTDRLDLAGLLSLLARYVLGDRRAWRVVRVPTVAEEDARHLPRTLEALTQDRSRLMSRLKSLLTTQGVSLPIDGQFLKQLKAAHLWDGTPLPPGLHERLTRTWTQLRDVNGQIRDLKALRLTRPENLTPVTSRVLAQLLTMRAIGPIGASVLATEIFGWRRIRNRRELGALVGLVPAPYQSGETDYDQGITRAGNAHVRRVIVQLAWGWIRHQPDSALTHWYQQRFGAGGKRLRKIGIVALARKLLIALWRYLETGAVPDGAQLKPMEV

SEQ ID NO: 439809 - protein, 348 aa, unidentified
MTMLAEVFDTVIGVDTHKHTHTAAVLAAATGAVLDEVTVSTDPDGFDQLIEMADRHGTLRAWSIEGAGSYGAGLARYLAAREELVIEIERPERPGRRHGAKSDPIDAVRAGREALAQEHHAQPRAEGDRAALAVLLAARRSAVKATGDAQRQIHALITTAPETIRARFRGLTVTKTMAAAASLRVGSSWDTETRTYAEALRTLARRCRTLQAEAITHEHAILAIVKAWRPDLLEVQGIGPINAATILCAWSHPGRCRNEAAFANLAGVAPLPASSGLTVRHRLNRSGDRDLNRALHFIALTRLRHDPETRAYAERRRADGKTDREIKRCLKRYIARRIYNQLEHHPTP

SEQ ID NO: 439810 - protein, 404 aa, unidentified
MWYVGLDWADTHHDVEVLDEAGKRVGARRFAHSHDGLNELKQFLLGIATSPEHLACIVETNHGLLITFLLEAGIPVYPVNPKTANQLRKAAGAKTDQIDAHLLAKMGRLDLGELRRLAPDSPIVAELKTLTRDQDALIQTQTRLVNQLTACLKEYYPAALHLFAKLQQRSTLVFLQAYPTPQAAASASVEEITTTLRTGKHTNPRGVAPKIFQEVHRPQLVASAVIVRAKSRLMLSLVKQLLIVVEDIATYDEAISTLFLTHKDQQMWRSLPRAGKRLAPRMLAEWGDDRRRYVDAASVQALAGTAPVPFQSGNFAKAHKRFACLKPLRNALHQFAWQSTLKEAWALAYYQRKRAEGKTHSMAVRALANVWVRIIYRMWANKTCYQTATFEAAKLAHAPRQHAA

SEQ ID NO: 439811 - protein, 456 aa, unidentified
MGRARARRIPARTVEDEEYQLTHERTCGIDIAKDKADVCVRLPPAREGGRRTSRIEALPATWRDITDLGQRLLDDGVQIVVMEATSEYWRSWYYLLEACGLNVWLVNPSHARQLAGRPKTDRLDCQWLARLAEMGLLRPSFVPPPEVRALRDLTRTRLHLVRDRTRLWQRLEKLLEGALIRLSSAVGDMAGNKSARRILEAIADGERDPGRLAALAHAGVKGGRDGIRAALEGMMPGEHHIRLIRTLLGLIDGLDREIGALEDEISAHLATMAGAWGVTADGVPSPDPGPDPAVLPAGERLAEVPGISADLATAIIAETGLDMTRFPTAAHLVSWAGLSPVAQQSGKRGKRAKKGKGDAYLKGYCGQAALGAARTSTFLGERYRRLARRIGGARAQVAVARSILTIVWHLLADPSARYADLGPDWHARKVNRDRATRNHVEHLKALGYHVTLTPAA

SEQ ID NO: 439812 - protein, 345 aa, unidentified
MKIVGCDLHTRYQQVAMLEQETGELIERRLEHENGEARAFYAALSSPVRVGIEATGHTRWFERMLAELGHELWIGDAAQIRASMVRKQKTDARDAAHLLDLLISDRFPRIWRPTLQERDLRQLVWHRQKLVWMRNAIGNQLHALAMGEGVCRKKKLFTKKGRVELESLALGPWASHRRQELLKMLDQLDASLHELDQAVEEQAEQNADAVRLMTHPGVGPVTSLAFVLTIGPVERFQRSKQVVSYLGLNPREHSSGGRQRLGAISKQGNPMMRSLLVEAGHTAARLDAELRQDYQRLKLRRGSGVAKVAMARKLAVRMYWMLRSPANYAQLVRMQGSPRGTLVGQ

SEQ ID NO: 439813 - protein, 346 aa, unidentified
MQKDKDIVLAVDYHAENTEVRWLNCHTGEERCLNIPTARAGILRLVDKALAEAAEVGGQVIWIMESTTGWARVKELIGSRVQFIMANVLQMPLPPKAYRRKSDKIDTGRILREFLNGSLPRSYQPVSRWRELRRLVDSRQDLVERQTAVKNWITHFLHHETWGDHDGLWTLKGLKRLGGLNLSASDRMVLNLKLQELEQLADRRKQMEAAMQAAYDQWPEAQHVDEVRGIGMVTAVSILAHIGSIRRFGSAEDLISYAGLAPGHRQSDGTRHTGKIGGGGTDSHLRYLLIESMQWVCQIPRYRDAFDRAVAKHGKNIARIIVARMLLRSLFKMLKDQVRFNQVRAA

SEQ ID NO: 439814 - protein, 414 aa, unidentified
MDVIHGRCAGMDVSKRDAKVCVRIAGRGRRKTVETVRRWASTTNAVLALREHLVDEQVSLVVMEATGDYWKPFYYLLEDAGFEVMLVNARQVKNLPGRKSDVSDAAWLAQLGAHGLVRGSLVPPAPIRELRDWTRARTMMTRERGRDIQRLEKLLEDAGIKLSSVASDITGVSGRLMLQALIDGQRDPAVLADLAKRRLRHKLPQLTEALTGRFADHHAFLARMYLEAIDQRSRAITELTARIEVVIEPFRSFCNLIGTVPGIGVRCAEVIAAETGADMSVFPTAAHLASWAGTCPGSNESAGRVKSTLTRPGNPYLKAALGAAALSIANTRSTYLAAKYRRIAARRGPKKALVAVEHAILIAIWNMAHTGAEYDDLGADYYTRRDPERVRLHAMNQLQRLGYHVTLSPAAATA

SEQ ID NO: 439815 - protein, 410 aa, unidentified
MEVLYRRCCGLDVHKETVVACLRVVSGGEVVREVRTFETTTVSLMALSEWLAENGCTHVAMEATGVYWKPVWHILDDGDFQLILANAAHVKNVPGRKTDVNDATWLADLLAHGLIRASFVPDTQTQELRTLLRTRKQLVREKSSHILRVQKTLEDANIKLDSVITDIIGMSGRAMIEALIAGESNPAKLARLANYRLRASQEKLREALRGRVTKHHRFLLRLHLNQIDALDASIATIDQQVEAGIAPFRVAVELVTSIPGVSDLGAQVIVSEIGTDMSRFPSEGQLISWAGMCPRNDESAGKRRSNRVRKGAPWLKTTLVQCAWAAVRKKDSYLKAQFLRIKARRGPKKAIMAVAASILTAIYHMLKDGTLYQDLGSNHFQNRSKGQQTKRLVKRLADLGYDVALTPLAS

SEQ ID NO: 439816 - protein, 432 aa, unidentified
MHDVEDEPLFAERVAGIDIAKAGIEVTVRVPSDSRRGGRQQETRSFRTTRKELLALADWLRSWGVTKAGMESTGDYWKPVYFLLESQGFDCVLYHAAQVKALPGRPKTDKLDSVWLAKITERGSLPSSFVPPEDIRRLRTHTRYRRTLTQARTAEMQRVEKLLEDAHLKLSSVISDIHGVSGRAMLEAIIAGERNPVTLAQLARGKMRGKIRQLEEALDCSFLTGEHVFILAMMLAVIDGYTARIGELSARIEQLTEPYWHQIEQLDAVPGTGIITAQDVIAEIGVDMAVFPTAAHLVSWAKWCPQVARSGGKRKGSNATGRGNRYLSASLGEASMGAARTNSFLGAKYRRLNKRMPKRKALVATGNSVLTIYHVLLSDPAASYHDLGPGYYEQRAGTRRQARNHLKSLERLGYKVTIEPLTPDTTLPATAS

SEQ ID NO: 439817 - protein, 413 aa, unidentified
MEVVHPRCAGIDISKKDAKVCVRIQGRGRRATTATVSTWGSMTNQILALREHLLAERVTCVVMEATSDYWKPFFYLLEDVLPVMLVNAHNAKTMPGRKSDVSDSAWLADLGAHGLLRGSLVPPPPIRRLRDLTRARTALTRDRGRQVQRIEKVLEDSGIKLSSVATDIMGVSGRAMLAALIDGQDDPAAIAELAQRRMRSKIPMLTEALTGRFTAHHGFLIRMHLTLIDQYSQALTELEARIEEAMEPLAAARELLVSIPGISTTVAEVLLAETGGDMSVFPTAGHLASWAGTAPGSNESAGRVKSTKTRPGNRYLKGALGTAALAASRSKNTYYSAKYRRIASRRGPNRALVALQHSMLTAAWNMLTNGDLYQDPGADYFSARHPARTKARAISQLEALGFHVSLQPLADTA

SEQ ID NO: 439818 - protein, 340 aa, unidentified
MNVTMIGLDLAKNVFQVHGADAAGAVIFRKQLRRDKLLAFFAVQPACIVAMEACSSAHYWAREIGKLGHTVRLIAPAYVKPFVKRQKNDAADAEAICEAAQRPTMRFVTVKSEEQQASAAVFRARDLLVRQRTQTINALRGHLAEYGLIVAQGPTHVTRLVLHVEDSRSRLPEAARTALAILVDTLKSLAQRIQKLDVEIARRAREDEDARRLVSVPGVGPITATALIALAPEAAGFKRGRDFAAWLGLTPLQRSTGGKQKLGETSKMGLRTLRRLLIIGASAVVLQARRRGTPEGSWLGRMLARKPPMLVTVALANKMARIVWALMAKGGVYKAPAAAA

SEQ ID NO: 439819 - protein, 310 aa, unidentified
MDAIVIGIDVSKDKLDVHVLPAAQAFAVARNGAGIEELAARLAALAPAVVAIEATGGFETIVAAGLAGAGLPVVVVNPAQIRAYAKAIKQRAKTDPIDAAVIAKFARATRPEVRPLPDEATRQLADLVARRRQIVEMMAAEGQRGRRVDHKRVARSIARVKKTLEAELAELDQEIGDQVRGSPLWREKEDLLVSVPGVGPVVARTLLAELPELGRLDRREIAALAGLAPFTRQSGQWRGKSFIGGGRKAVRTALFMGAMVAKRHNPVLKAFFDRLIDSGKPKMVATIAVARKLLTILNAILRDSRPWQSA

SEQ ID NO: 439820 - protein, 364 aa, unidentified
MSEYITWVGIDDSADQLDVAILYGNEVLPRHQFQVNNDTQGRGKLVKRLKSMPGEVRCVYEAGVNGYHLYRLFQKQGISCDVVAPALTPRKPGERVKTNKRDARKLASLHRAAELTSIVVPKEGQEALRDLMRAREDALEDLQRMRHRLSGFLLRRGLRYRTGKAWTQGHLKWLGGLRFEHTHSQEVLNEYRLALEEAAERLKRFESHVEETAKQGPYKKLVGFLMALRGVKVVTAMTIIAESVDLKRYLNAPGYMDAIGVVPSEYSTGDNRRQGSITKTGNAHLRRVLIESAWHYRWAPGLSKTMKKRRTGLPPEILAIVRKADQRLHTKYTRLVNRGKLSKIAAVAVARELAGFIWAIGQAA

SEQ ID NO: 439821 - protein, 342 aa, unidentified
MQVTTIGLDIAKNVFQVHGIDAAEKVVVRKQLRRSQVLEFFKALPPCLIGMEACATAHYWARELTKLGHKVGLMPARDVKAYVKRNKNDAADAEAICEAVRRPTMRFVQVKSAEQQSQLMLHRTRDLLMRQRTQVINALRAHMAELGMTAAQGNAGLRELLAIIAGAADERLPAEAHASLIVLAAELQAMRTLIASIEKRIIAQHRSDEASKRLRSIPGIGLVGATAIVATITDPKAFRSGRDMAAWIGLVPRQDSTGGKQKLGPISKQGDRYLRRILVVGAHAVLKLARQKPEKYPWLTQLLARKPFKVVAVALANKMARIAWALLVKGGPYRARALVAAA

SEQ ID NO: 439822 - protein, 300 aa, unidentified
MNNSHIIGIDLGKNSFHLVGHDHAGNQLFKKKLTRQKLLELLSCHEPVIIAMESCGGSHWLARKCTEFGHTAKLIPPQYVKPYVKTNKNDFIDADAIAEAASRPTMRFSSAKTESAQVISTIRKIRSGYIRERTACMNRIGSILLEFGISLPKGHASMKGLFQWLVDKNQNLPPLIIFELSELHEHYQNLNERIDSQADKVERILADNEQMKQLQSVPGIGPVIASACLSSVGNPNDFKNGRNFAAWIGLVPIQYSTGGKSTLLGISKRGNKELRTLFIHAARSILWRDKSVKNTLARGL

SEQ ID NO: 439823 - protein, 378 aa, unidentified
MHSMTQENTLVVGGVDAHADTHHAAALDQRGALLSTKSFPTTTSGYRQLLDWLSSHGQIDVVAVESTGSYAAALVRYLREHDVRVVEVNQPHAHTRRRVGKSDPIDAEMAARLFQAGKARAVPKRTDGIVESIRLLRVARNSAVKSRSAALLQVRDLIITAPHEIRDQLSSRKTLRGKVTVCARFRPSGRELRSPSQAAKFALRSTAQRIEALDQEIAALDRQLEQLVATAAPRTVQLLGISTGHAGQLLVTAGQNIERLRSESSFSMLCGASPIPASSGKTTRHRLNYGGDRQANRALHLIAVCRLRYCDRTRAYVKRRTAEGKTQREIMRCLKRYIAREVFNSLRDDLADTAQPRPVVSTTIMCGTPGFGINRTRA

SEQ ID NO: 439824 - protein, 482 aa, unidentified
MKPKPEEQNKRATNHPTQHHWHEMNRKQRREMMRKMQTEDLSLAVIHPDAGGIDIGNESHYVAVPPGRDSQSVRRFGCTTAELKAMAAWLKQCRIQTVAMQSTGVYWVAVYDILEQGGLEVYLVNARDTKNLPGRKSDVQESQWLMKLHTYGLLRNSFRPSQEIRVMRTYWRQRNDLVQSAGRHILRMQKALTQMNLQLANVLTDISGATGQAIIKAILGGERDAHKLAEFRDPRVKASEEQIAQSLEGNWQEDLLFVLKQEHEGYEFCQKQMVECDRQLKQYLQQREDRSHGAPLPEEKRKGRLKKKKGNAPQFGLREGLFRMTGTDLTRIDSIDVMTATTIVSEAGYDMSKWETENHFVSWLRLCPDNRISGNKVIGKGRLPTNNPVSIALKMAASTLRLSKTYLGAQFRRFRTRLGAPIAIKAMAAKLARLVYRMLRYGMKYVDQGAAFYEAQHRQLQIKQLKWKAAKLGFQIVQAPAA

SEQ ID NO: 439825 - protein, 416 aa, unidentified
MRKRNYRAQKVNEIRWEAVGQRVEGKAMVFAVDVAKVEQYGVLMDSEREVVVTVKWAHPAETPALLERLRDLACESLTAVMESTGVYGDTLHRQLREAGIEVHQMSAKRVHDACEVYDGVPSMHDAKAAQVIGRLYFEGASRVWIEPTEQQRSHDAVGRLYRLYQKQHQQQQNRLEAALQRHWPELTHYLDLDSVTLEELLLSFGTPAELSARAEEGRERMRLVSRGKLAAEKIEAVLESARHSIGVPCVAAERDYLMALGAELRHSREQKERVALRLSALTQADPQLQSMGATLGRVTTGLLIAEGLDPRAYANSGSYCKALGLNLKERSSGQHKGQLKITKRGSGPARRDLYLATLRLINHNEIVNAWYEKKVQAQGGRYKQKIVVALMRKLSRALWYVARGQAFDARRLCAVG

SEQ ID NO: 439826 - protein, 422 aa, unidentified
MEGVVYPRSIGLDIHQKMIVCCFTAVQADRTIIKETAEFETFKRGLKALASWCRERVPDVVLMESTGIYWKAPYAYLERAGIVPAVVNARHIKNLEGKKTDMADAEWLAVVASAGMFCRSYVPKEAYRNMRVLSRHVLGVTRSRQQYKNRISKILADAGARLNVVFSDISGVNAQRCVKGLIAGMNPEDIAATLDYSRLKATREDIAAAMECDLTPAHLAALEALLEIVDFLTKQIDKGRKALLDMLPEGDREMLMILQTIPGIQETAALELLVELGGDNLEPFANADRLASWVGLCSGNKESGGKRRPAHTRKGNMYLRRILCEIAHAAVKTKGSTFQSKYKSLRIRKGAGKTIVAIACKIIKLVYTLVKKREGYRDPHIDYEKMRLQKNPKRHIQNLFKLEDWKIRAVNTKTGEVLESTH

SEQ ID NO: 439827 - protein, 344 aa, unidentified
MIGIDIGKNSFHVVGHDARGAIVLRQKWSRGQVEARLANIPPCLIGMEACVGAHHLSRKLASLGHDARLMPAKYVRPYSKGQKNDFNDAEAIAEAVQRPTMKFVATKTAEQLDLQALHRVRERLVSQRTGIINQIRAFMLERGIAVRQGIGFLRTELPTILATRTDALSPRMLRVIEELAGDWRRLDQRIDGLSGEIEALARQDQACSRLMTVPGIGPIISSAMVAAIGTGDVFSKGRDFGAWLGLVPKQISTGDRTILGKISRRGNRYLRVLFVQAAWVVLVRIKNWERYGLKSWIEAAKRRLHHNVLAIALANKLARIAWAVLAKGRAFELTRTDDAGVRPA

SEQ ID NO: 439828 - protein, 358 aa, unidentified
MITTTERVEPARVVAGVDTHKHLHHVAVLDLTGRVLGNAAFSVNAVGYQEALEWMTGFGVLDRVGIELTGSYGAGLTRHFTAAGITVLEVNTTDKATRARRGKNDTIDAIAAAEKVLSGMATATAKDTTTVVESVRMLTAVRDSAVKARTQALNQIKDLLITAPAQVREQFDGLPLKTVAKNAARLRPDTTRLTDPAQAARLALKRLGNRIADLTAEITDAEKQLDALVQDTVPTLLSRPGIGTLTAAQFLITAGANIDRITSEAAFAHLCAAAPIPASSGMTNRHRLNRFGDRQANKALHLVIIGRMKYDDETKTYITKKLAEGKSKKDAIRALKRFVARRVFHDLATDLRPPRLTA

SEQ ID NO: 439829 - protein, 405 aa, unidentified
MKRSHFIGIDVHCQFCELAVVNAAGQVVQRDRCDTAIPALLQVIDGVARPRAVVIEEGPLAGWLWRELHGAVERLVVSEPRRNRLIVEDGDKDDDIDAEKLAQLLRGGFVKEVHQVASLERAVFKQQVAVYHFRVRQRVRESLRLTSLFRQHGMMIREKAYAASTDRPALLARLPANAVLREAVRLLWLAYDELVDQEETWRRRLVELARQQEVVHRFQALPGVGWIRAATLYAYLDTPWRFRSKAALWKYLGIGLERERSGNGPGHVGVPVLTHRLLKSTILGAARSAVAQGENPFADLYRRWMEQGLSSRLARRNVARALSATLWGLWKNGRAYRPEWVGVAAAAQRGDAGVSARTMADERAERSSFAMHGPAWRSPHRLNEPAPIGSLRSVIFMDLPRESPR

SEQ ID NO: 439830 - protein, 412 aa, unidentified
MDVVYERCAGIDISKADVKVCIRVPGAGRRRRGEVRTFTSMTSGLLAMRDWLLAEGVTVVGMEATGIYWKPVFYLLEHDMECWLLNARHMKAVPGRKTDVKDSEWIAKLVEHGLVRASFVPPEPIRQLRDLTRYRTEVIRERTREAQRLEKLLEDAGIKLSCVVSDILGVSGRAMLEALITGERDPRVLADLAKRRLRLKIPDLIEALTGRFGDHHAFLARAMLDRIDAATAMEVRLSARIGTALEPMRRSVDLLTTIPGVSTRAAEVILAEIGADMARFASAEHLASWAGVCPGNHESAGRQPTGRTRHGDPWLKAALGQSAMAAARTKNTYLAARYRRLVARRGKRRAVVALEHSLLIAVWHMLTHGVPHQDLGGDYFLERTGKTRATRRLISQLNQLGYQVSLQPTGTS

SEQ ID NO: 439831 - protein, 286 aa, unidentified
MENHSIVWVGMDTDAKRNQVALYRGWETEPAAEWESGMDGKGIRKLIERLKREAGEVRCVYEAGPCGYPLARKLRQAGIGCDVIAPSLTPRKPGDRVKTNRRDARNLARLYRAGELTSIEVPNESQEAVRDLTRAREDVREDLTRRQHRLSRFLLRHGYSYTDGDKWTLKHWAWIGKIAFEDRNLQTVLEESIRMVEQSQEQMKTYDARIEENARQPEYAKKVARYQVLRGIKTVTAMTIVAEAADLRRYATAPQFMGSTGLVPSQHSTGDPQNRGKIPKTRKANF

SEQ ID NO: 439832 - protein, 326 aa, unidentified
MDDTGKIVREVKVASEPEALLAVLKNPAYHFKRIGLEAGPLSQWLFSALAEAGLPVICVETRHMRAVLKAQINKTDRNDARGMAQMMRVGLYRPVHMKTLRSQKLRMLLTHRKLLQSKAIAIDNDLRGTLRNFGLKVGIVGTVRFEARIKKLVENLPDLAALVEPMLVVRRTLREQFCILHRRLLAIVRDDEVCRRLMTAPGVGPVVSLTYRATVDVPARFRKSKSVGAVFGLTCAKYQSGEVDWDGRISRCGDEMMRVMLYEAAQSMMRSKKWSWLKAWAMQVARRRGMKKAIVALARRLAVIMHRMWVDGTEFRWTREQAALAA

SEQ ID NO: 439833 - protein, 442 aa, unidentified
MARKPSKQRFTVVHPDCAAIDVGGREHFVAVDPRHENPVQSFTSFTDDLLKMANWLESLGIKVVAMESTGVYWIPIYEILSERGFEVYLVNARATRQITGRKSDVLDCQWIWQLMTHGLLRGAFRPDDLTCCVRSLVRQRASKVKDQAQTLNRMQKAMSQMNIQLANVISDISGVTGMKILRAICAGERDPVQLAELTDRRIKAGKEAVARSLHGNWRREHLHALTQELAAYDFLEQQIADCDDAIKAALEQLPVLQNKPEPSNKPLRSPHRNGVQQTELHQTLWKVLGVDLTAIPTIGVDTALVLAGEIGTDLSRFPSSQHFCSWLGLAPPTRISGGHRLAGGGPKIVNRAAQALKQAASNARNDKGFIGASHRARLTRMDTSCAIKATAHQLARLVYNLLTKKQAYVEQGLEEFESRSQDRQVRALLRKARKLGYQLVAA

SEQ ID NO: 439834 - protein, 366 aa, unidentified
MKKISTVAKRGNKIFNEPKLTIGLDLGDRTSHYCILDEAGNVILEHSLPTTPKGMHQIFSKIPRSRIALETGTHSPWVSRQLTQLGHEVIVAHARNVRLIGESSRKDDQLDARTLARLARIDPGLLGPVRHRSATAQIHLTVIRARAGLVSARTALVNTARGLAKSYGERLRKCGTGQMNREIAKGLSQELRDALEPLLGEIESLNESIAEYDRRIEQLAKEAHPEVALLKQVKGVGTLIALTYVLTLDDPHRFRRSRDAGCFLGLRPGRRNSGMSEPQMHISKEGDRYLRTLIVQGAHYILGPFGEDSDLRRWGLKLAERGGKNAKKRAVIAVARKLAVLLHKLWVSGEVYEPLRNNHKVVSAVA

SEQ ID NO: 439835 - protein, 342 aa, unidentified
MDEYDGRQFVGIDLHRQRSVIVRQSESGEQLSAVRIHNDPLALQLELERAGTDPEVVLEATYGWYWAVDVLQAGGAHVHLAHPLGVKGFRYRRVKNDVRDAGDLADLLRMGRLPEAWIAPPQTRELRELVRYRAKLVAIRSGLKAQIHAVLAKAGVLIAVSDLFGVGGRQRLAKVALGGAYAERVRSVLELIDVLDGHEAQFAEMIAKRLDAHRGYQAIQQVPGIGPVLAAVFVAEIGDVNRFGDPAHLCSWAGLTPRHRESDTVVHRGHITKQGSKLVRWAAIEAVQRHQTTAKIVADKDRIEARRGKNIAKVAAARKLLTLVYYGLRDGHIRALDRTRAA

SEQ ID NO: 439836 - protein, 347 aa, unidentified
MKQIIRIGMDTSKHIFQLHGVDTAEQPVLRKRLGRKQMVEFLAKLPPTVIGMEACGTSHYWARELGKLGHTVKLIAPQHVKPYVKRNKNDGRDAEGLCEAMSRPTMRFVPVKTAEQQAALMLAGLREQMVARRTQLSNMIRGHAAEFGITVAKGLNQIGPLLARLAQDKSLPELARDLFALQGRDYAQLQVELRAIEVKLRAWHRANADSRRLAKIPGVGPIGATTLVMKTPDPRAFASGRHFAAWLGLTPKDHSTAGKTRLGKITRAGDERLRSVLVAGATAVIQQAKQGRGDPSPWLLALLKRKPPKLAAVALANKIARIAWKLMATGESYDGAQMSKASVAAAA

SEQ ID NO: 439837 - protein, 313 aa, unidentified
MNGDGCAVGIDVSKAVLDVAVLRTGEAFQVSNDKTGWKTLVDRLGDQDVKVIGLEPSGGYERGVVRTLATAGLPVRLVNAHRARQFAKAMGLLAKNDRIDAVVIARFAAELPPRPPRTNPLIEQMKELVTARRQLTDEKVRLGNQLEQVCEATLRRMRRRRIMRIEAEILLIDKRLTQIVASDPDLAAKNRLIRSMPGAGPVLSHTLLAMVPELDDADRREIAALVGLAPFDDDSGKRKGKRAICGGRAEVRNVIYMAAQAAARCNPPLKAFKARLIAAGKTPKMALIAVARRMLGIIIALLRSGQEWSATHA

SEQ ID NO: 439838 - protein, 315 aa, unidentified
MSKMVVIAGIDVSKDKLDIHVLPSNQTFVVGRDRCGLTSLVRRLRKAGVEQVALEASGDYERIVIEALEAAGFVVHLLNPARVRAFAEAIGILAKTDPIDARLIALYCQHFPDKGLTRRPEKARKLGEFLNMRAMLLKVAGEIRNSLEHMREPGLKALADTLSDDIAAKLKDIDGRIAKVIADDVATTRKARIIRSFTGAGPVLTSGLLARIPELGSITRHAAARLCGAAPTDRQSGRSRRRSSIEGGRDQLRPVLHMAALAAIRSNPIIKAFAQKLSAAGKPKQLVIAACARKMVVILNAMLRDNTEWKYAKAA

SEQ ID NO: 439839 - protein, 324 aa, unidentified
MKNASEAFASFVGIDVSKSRLDVCLPGSKATISIANSEDAIVRGLLPKLKSLAAPLVVVEATGGCESVLVQVLQQHQVATAVVNPRRVRDFAKGVGMDAKTDSIDSLVIAKYAEVVKPAPVLAKSEEEEKLSALVNRRNQLLDLIAQERNRLEQTRDPEIQEFIRQTLNTLKKQQQAVESRLAKCVQKDTANARKVEILESVAGVGTVTTCTILADLPELGRLNREQIAKLVGVAPLNRDSGSWKGQRFVAGGRAHVRRVLYMATLVATRRNARIQEHYRHLLSCGKAKKVALVACMRKLLTILNTLIKQNVLWSDNRNVSSVA

SEQ ID NO: 439840 - protein, 429 aa, unidentified
MSVTQNEKIRQLTESTMVVGMDIASDRHWARAFDWRGIELSKPFHFENDAEGFAYLMAWMRDVAVREKKDRVVIGAEPTGHYWFTLEQYLRQSDIKLVLVNPHHVKKSKEMDDNHPSKNDMKDPKLIARLVLEGRYMLPYIPEGIYAELRNAMNIRERIVRDMTRIKNQTQRWLKIYFPEYKAVFGGIYGVGSMAILREGLLPADLTALGAEGVNAIWRRMKLRAVGIKRAQRLCAAAETSVGCTNGLSMARIEMQLLMQDYDTKLRQLEDIMNVVEALCEQIPGISGLLEIKGLGLITVAGFFSEGWGIRRFDSPRQIQKLAGLAITRNSSGSRKGQSEISRRGRSRLRRILFQMAIGIVGKNGSDAFRRLHRYYTTREKNPLKKMQSIIAMSYKLIRVIYAVTTKGCVYDPAKMLADIHRNAPQIAA

SEQ ID NO: 439841 - protein, 346 aa, unidentified
MSYSTTVGVDLAKNVIQISVVNGRGKELSNRPLTRKKFAEFLGRQKPCLVAFESCATAHYWARTAERHGHEARIIPAKAVAPFRQGHKTDSNDALAVAEAARRPNIKEAPIKTVEQQGLQAMLRARDRLIAECIAQSNHMRGILLEFGIAIPLGFAALLRTLPEVLEDGDNELPDFYRPTLHRMYHRMLELRQDIDAMTKEVTVLVKGHPVCSRLTDIEGVGPIGAMALYATLGSGAAFSKGREASAYVGLTPRQYSSGGKANIVGLSKYVGNRKLRSVLIQGALAYVYRMKEPRSKKDLWLKDLIERAGPRRAAVALANKNVRTAWALIAQGTEYQRRAQLEMAA

SEQ ID NO: 439842 - protein, 358 aa, unidentified
MKGLHAYTCLGKKRSKEVHSPCGASVWTSTRSIHIYTDVDDGGAVLRRGKIANEALPALFADDERRRVVLEAGRNWYHFFDSLEGLVEDVQLAHPLRTRAIAAAKVKTDKLDSATLAHLLRTNLIPTAYTAPAHVREEREVLRYRASLVELRTRVKNKIHAVLAKRGLSSPWSDLFGKSGRRWPAEVALPDVYRQTVDGNLRVLDTLNTEIDVVTEEVKRRVELSPEAKLLTTIPGIGLYSALLLVAEIGDIQRFPDRQHLVSYAGLAPIVRSSGGKTRYGPISKQGSPWLRWILVQAAHVSPRHDIEFRERFKATASRRGGKVATVALARYILKVVYQVLKSRSPYQAASRSSSNCQ

SEQ ID NO: 439843 - protein, 377 aa, unidentified
MKRIKFVGLDVHAETISVAVAEQGGEIRSLGVIPNREESIRKLVKKLGPVEELRFCYEAGPTGYALYWQLTRMGAQCEVVAPTLVPVKAGDRVKTDRRDALKLARNYRAGELTAVWVPDAAHEALRDLVRAREAAKKDELRARHRLNKFLLRHGRRPPMGVKAWTMKYLEWVKREVHFEQMAQEATLLDYLHEVEHGAARIARLDGAIEEAVKLAPPQMRAVIEALQALRGIAQVSAVTVVAELGEFSRFARAKQLMGYGGIVPSEDSSGERRRRGNITKAGNAHLRRVVVEAAWAYRHRPAVGTTLRKRQEKVSEEIKEIAWKAQQRLHERYRKLLAKGKNKGVVVTAVGRELLGFIWAIGIQVETAQKESLQRAA

SEQ ID NO: 439844 - protein, 310 aa, unidentified
MDATYVGIDVSKDRLDVHVWPSGEAFAVARHHAGLLELQARLDGLGPARIGVEATGGYETVVAASLAGQGHPVVVVNPAQVRAFAVALGQRAKTDPIDAAVIARFVAATRPEIRPLPDAATQLLADLVARRSQIVAMIGAEQQRRKRTGERRLLRSLDRLVAALEKELSQVETAIDDAVRGSPAWREKEDLLASVPGVGPQTARRLIADMPELGALDRRQVAALAGLAPFTRQSGRWRGRSVIGGGRASVRSALFVAAMVAARHNPVLKAFADRLKAAGKPRIVALVAVARKLLTILNAVLRDKTPWRTT

SEQ ID NO: 439845 - protein, 340 aa, unidentified
MKRYIGVDLHRRVFTCCVRLESGRQFLSEWRLQQLPQFVKKLRATDEVAVEVTSNTRLFHDAVTSHVARVAVVDPHQFRVISQSVKKTDPNDARNLALYLAKGLLPEVRMKEKEQAQVASLTQTRDRLVKLRTALKNKVNNLLSARGIELKKEELSGEKGLTRVLAMDVEELTHFELQVLVDQIRSLNHSIAELEKVIDREGKKLQGHGNLTSIKGIGSLGASILLSVIGDVRDFPDEGRLASYFGIVPRIHNSNETERSGHITKRGSKLGRTALVQCALIAKRYSPYLGNYYERIRSRRGTGRAIIALARKLLGIIYHTLKNNWVFQDFPNFALREAAA

SEQ ID NO: 439846 - protein, 322 aa, unidentified
MNTYTNYLGIDISKNTFDVVNQTGKHLTYSNDLVGFRKFKKRINKDDLCLMEVTGIYHLQLAKFLYSKGVNISVENPLKIKRFAQMHLLRNKSDKLDAKMISLYAQKQEVKLWKPAPEVIEQSKDIYQIMEQYIEFRAGLKNKLDGLKSKNAPEELIDSIIYQIKSIGISIDELQAKVDNLIKDYNPALLSNISSISGIGVRTAALLIVATEGFNNFQNAKQVSSYFGLAPTETSSGTSIKGSGKISKMGNPLVRKKLYMCSLQASRHNKACIDLYQRLLAKGKPKKLALIAVANKLLRIAFAIANSGLPYDNEYKSINPQK

SEQ ID NO: 439847 - protein, 368 aa, unidentified
MSKCTIPSFIGQAIFCGFDVHKKLWSVCVRHCGREIACFSTAANAGDVAKKLRKDYPDADIHSVYEAGFSGFEAHRVLADEFGIHNIVVNPADVPTNNKERVHKSDRIDCRKLAKSLEAGLLESIYVPSIDHLQLRNLVRRETQASGAITRTINQLKSHWYFNGEPVPGKVGKLVLAYRLEQARSRNDQVTVSLIDQFWYLVKSRKQIVSCEHETIRKLHLSEKLKHLMSVPGIGSRSAIVLLSELWDMSRFPDKNHLASYVGLAPHLVGSGEKEETVSGGNRKQKQLHYILIQAAWRASRYDPGLISLFGRLHKRHLSSQRIACIIAKKLLFIIRAVLLENRGYQRVFPETKITFGQSESNLNPTTT

SEQ ID NO: 439848 - protein, 343 aa, unidentified
MNIIRVGVDLAKNVFQVHGIDRNEKPVWCRRLDRAEWLKAIQATVPAHCEIGMEACGGSHHWARQLQALGYRVKLIAPQFVKPYVQSNKNDANDAEAICEAMSRPRTRFVTVKTVDQQDVQAVHRIRSGLMDERKAKANQIRGLTSEYGLVAPRELLHLRRAIPIWLEDQDNGLTSRFRRLLVGLSNDLRVIDERINELDQEINAIAAADPVARRLQQLRGVGPMVATALLATVGDASQFKNGRQMSASLGLTPKQNSSGGKERLLGISKHGDAYVRCLLVHGARSMIYAAKKKTDPLSLWVMHIANKRHANVAAVAMANKTARIAWAMIRNGTDYQAPAIPA

SEQ ID NO: 439849 - protein, 382 aa, unidentified
MRTANPRTDESSLWVGPLYVGLELSTREWRLAYTSGLGARIWQTVIPAGDRARLRTVLAQATGRCGLVTTARVRSCYEAGRDAFWPHRLLEAEGVENVVVDSSSIEVSRRARRTKTDRLDAQKLVTMLVRWVLGDVTVWHVVHVPSAAVEAARHAPRTAATLTKERTRWRNRIHAALATRGVRLRLTGDFPARLAAAQQWDGTPVPPAVQERVLLDWGLLQQIEAARRTVQRTLQTARRAEPSAAAATVRQLTQLRSIGEGFAWMLATEVCSRDLRNRRQVGALTGFTSTHYRSGDVARDQGISRAGLAAVRRAAVETAWVWVKWQPASELTQWYLRRFGHGGAAQRRVGIVALARKLVIALWRYDREGTVPAGAVLRAGAA

SEQ ID NO: 439850 - protein, 399 aa, unidentified
MAASRRVVVGADTHLDTNHLAVITDTGQPLADAEFPTCPAGYEDALRWARSFGSIVIAGVEGTSSYGAGLTRVLQAAGIEVAEVSRPDRAARRRQGKSDPLDAYAAARAALAGDRVAVPKDAHTSALRALLSARRSAVKAHTAATNQIHALLVTAPAELRERYRRHSITALVTALARCRPATHRDPTTVAVLTAAKALACRAEFLERQKRDLTAQLDVLVGQINPALRAAHGVGPDTAAQLLVTAGTNPHRLRNEASLAALCGAAPVPASSGKITRHRLSRGGDRAANNALYRIALVRMSAHPQTRDYVRRQEANGRTKKEILRLLKRAIAREVFKLLTRPAPIDDYSDLRPARQAKNITLAAVAHYFGVPIITVSRLERGHQRNDTLANNYRQWLTAA

SEQ ID NO: 439851 - protein, 430 aa, unidentified
MKSNTQNAKIEAITEKTLVLGIDVGSETHYARAFDYRGIEYSKKPFKFSNTEDGFVTFKEWILDLKERHEKDKVVPGMEPTGHYWFNLGKFLQDNEMKPVLVNPHHVKKSKELDDNNPTKNDRKDPKVIAGLVREGRYMIPYLPDGVYADLRTASNIRFQLQAELTRIQNRISRWFNIYFPEYKTVYGKPDAKSGMLILKEAPLPEDILTLGVDGVNQIWRDAKMRAVGKVRAKTLVEAAEHSVGSKEGAVSARMEIRMLLEDYESRNIRLREVMALIEELVNQIPMAEKLLEIKGVGIRTVSGFLAEVGDVSRFNNPKELQKLAGLALVENSSGKHKGETTISRRGRKRLRYLLFEVAMSLVAKNPEFRELHNYYTTRKLNPLKKMQSLMAIAAKLIRVFYAMLTKGVDYDPKKMVSDIKRPAVYLQAA

SEQ ID NO: 439852 - protein, 312 aa, unidentified
MERAYVGIDVSKDRLDVHVLPEGESFVVARDGEGLAELVERMGTLGPERIAVEATGGFETVVAAALAGASLPVVVVNPAQVRHFAQALGRRAKTDPIDANMIARFVEATRPDLRELPDVATQLLADLVARRRQIIEMIVAERNREKRVVVMRIRKSIARLIAALEKELAEIDAEIDASVRGSPAWREKEDLLASVPGVGPITARTLIAELPELGTLDGKRIASLAGLAPFTRQSGQWKGKAMIAGGRKSVRSALFLASLVACRHNPILKAFRQRLIDAGKPKMLVVIAAARKLLTILNAILRDKQPWRPETA

SEQ ID NO: 439853 - protein, 344 aa, unidentified
MVEYVGFEVSKEETAFCVKDAAGKILARGKVATDPEALFEALREHCLCPARIVLETGTLSGWLARGLGGLGITVEVIDARQAHAVMKLQHNKTDANDAELLAEIARTGFCRPVAVKSETAQEGRVLLKARAHLVRQRRDTENAIRGLLASLGFRFPKGTGKLAGRVRAALENHPELSPAIEPLLSSVAALKGKIEGLDKAVMARAKDDPACRLLMTAPGVGLVTALAYVATIGDAERFASSRAVGAYVGLTSRRWQSGEMDYSGRISKHGDAMLRSLLFEAANSLLTVVRRAHPLKDWARRVRKRTSHKKACVALARKLAVILHRMLITGEAFRWPEKEAATRA

SEQ ID NO: 439854 - protein, 413 aa, unidentified
MTTNSQPQSITSNVCLHMSIELAATSWKLGFADQLGRNPRVRSIAAGDLLKLRKEIAAAKKVLGLDPEAPVISCYEAGRDGFWVHRCLITMGIESHIVDPASIQVTRKKRRAKTDRIDAQQIVNALMRFKAGDRFACRMIRIPDAEAEDARNINREMRTIKTERTAHTNRIKGLLVTQGIPKVIIDGSFPRRLQRMQTAEGKPLGENLREQLLREFDRLALVTAQIRTLQMQQAEMIREAAKEVEKLEAERTLPKCAVTAEFLARLSGIGPVTSWTLSSEVFSWRDIENRRQLAALAGLTPTPNASGDEEKEQGISKSGRGELRVLLIEVAWGWLMHQPQSELAKWYHKRFNDGTKRNRKIGIVALARKLLVALGKFIRYGEIPAGAKLKSELKFNYLRLLKIPGTELDCLAV

SEQ ID NO: 439855 - protein, 368 aa, unidentified
MKQYKLKAAPTAVSKEENSQKEPKANRIVIGVDVHLKSYEAARKIDNGAVGVAQSFRSKEAFLLYVEKQREQAEEVAVVYEAGPLGYTLYRELKASDIECLVCAPRSGEQKRKRRKNNSIDARTLSSDLFNYLNGNEQALQAVRVPSEAQEQARVESRQHDALVEERKRIGAMGNSLLLSQGYGSWSNWWRPKAFERLSKGVAPWIVKHLGRWVGILRELDQQIQQAKAELTQHYQGPRPKGMGAPSLAQLNAEVLDWTLYSSRRKIGCLAGMVPSEWSTGEGQRLGAITKVGVPAIRRIITEMVWRMILFQPEYKPVQKWREVLEGPNRGLKKKAVVAIGRQLIVDIWRLQTGRITAQELGLIMIEA

SEQ ID NO: 439856 - protein, 350 aa, unidentified
MTQRNKPRDAAVFGIDIGKNTFHVVGLDGTGAPIQRATFRRDTLLQFFERAARTVIGMEACPGSQWLARKLKAFGHTVRIVPAKFVKPYVKSNKNDIIDAEAIAEAVTRPTMRFVEIRSPEQVDLQALHRVRDRLVAQRTRVICQMRAFCLEYGIAMHQGAGKFKADLPRVVADKENDLSPAMRRLLTELFDDVKNLEGRIKEVTGEIEDVAAADDTARRLMTVPGIGPLAATALLAAAGRGLQFRKARDMAAWIGLVPREYSTGGKTTLLGISRRGSSYLRRLLIHGARSCLLHLDRSRDRLGSWIDGLQSRMHNNKATVALAAKMARVAWVVITKPGATYERRGPVAA

SEQ ID NO: 439857 - protein, 412 aa, unidentified
MSSEYNEVVAGIDIHKSMLAVVVAGRGQNESEYEKRKFGTGRYQLEELRDWLLELGVKRVAMESTAQYWRPVWYTLEEYFQLILAQPRSTAAPRGRKTDFADAKRIVRRLLADDLTISFVPEAEQRRWRLLTRARTSATQITQLRNQLEGLLEEGRIKLSGLLSDLLGWSGWRILTALAAGESNPETLAKLAHEQVRASQEQLREALDGKLESAHRLLLKQHLDQIELLRKQIQELEQETMQILQPQHEAMHRLCGMPGINELAASQILAEVGAEAAAFATPGKLASWVGYCPGREESAEVSVNNRCPKGNKAMKRLLNQCAWAAVRNKDCQFYRLFQRWRAQLGVKRAIVAVTHRMVIVIWKLLHEKQDYKDPGCQLSPEAIRRRMKKYVKNLEALGFEVTIKPVSGPTPA

SEQ ID NO: 439858 - protein, 436 aa, unidentified
MNENVRTWGEREAFAGFDWASDHHDVVVVDPHGAVRDDFRIDDTADGWQQLRERLARYSQLAVAIETSSGAAVERLMQAGYAVFPVNPRAAKRYRERQAPSGTKTDRLDAWSLADALRLDGGHWRPLQPDHPLTVELRLLCRDEITLIEQRTALVNQLRAALREYYPTALQAFDDWTARASWAFVERFPTPQALRAAGKRKWENFLHAHKLWHSKELYAKRLTLFAAAEQFCGSPAVTNAKSLLARALAGQLRGLEDHLDEYRRQITERFEQHPDHDLFGSLPGLGEKLGPRLLSELGDDRTRFDSAQGLQCYAGTAPVSYESGQVRQTRFRRACQKTLRATVHLWANLSRQLCPWAEAYYQHKRAAGQSHACALRCLGQRWLKILWKMWQTRSPYDAELHHRNQVRHGSWVIALQAADHPRTLITVPAGSTLVTL

SEQ ID NO: 439859 - protein, 466 aa, unidentified
MENNYILYVGMDSSKGKADAAILKVSDRRSVKPKFLRKKLSFKFVKSEVTSFLETVRSYSDDNCTSICFALEVTGIYSTNVYNFIKDNLNDNESIKFLNTDFVNQWRNAHNIAKSDPLDAQTISTIIGTDSDVQYVNDNVFENKNGYQDLKALVHRHYQIKKIYSQEINRLIAQCDCLFPELQYVFEPKSAAFIAVLSSYPTTHDIINASRLEVFNVVYEATKHRCSMDKIDKLFDLCHDTLVPDNISSYGRSIILDLVENIKNIKGQLKMIERYIRDVASLNPAYKLLLTITGCGPLTAATVIAETGDIKRFKNADCFVSYSGTSPRNKRSGTSVETMGKISKRGSRYLRHAIYMIAEFARRHNPVLKHQFERIKNGNKKRHKLANIAIANKIARYIYSIMKNESGFVIFHEHIMRLPEETQNTFFNSISLDFPENTRKQIYQYSDINGEVHKFVYTKLEETMII

SEQ ID NO: 439860 - protein, 467 aa, unidentified
MDDKVKERRKVDKLSPMNPNAAGIDIGAESHFVAVPADRDEQPVREFEAFTSDLYRLAEWLDKCGVETVAMESTGVYWIPLFGVLEERGFEVILVDPRRLKNVPGRKTDVVDCQWLQQLHTYGLLGGAFRPEEEIRQLRSYLRHRSMLVDYASHHIQHMQKALTQMNIKLQHVVSDITGKTGMDIIRAIIAGERNPRELAKLRNFRVKASEDTIAKALQGHWRDEHLFELAQAVELYTTYQNKIAECDRRIEALLNTFEDRSEGPVPPKAERRSKRSQGNTPAFDTRSHLYRMTGVDLTSIDGIEAHTALKLISEIGLDMNRWPTVKQFTSWLGVCPGSNITGGKVKSSRTKPSANRAAAALRLAANSLHRSNSALGAFFRRMKARMGAPAAITATAHKLARLVYAMLRHGTEYVDAGQDYYERQYKRRVINNLVKRAKHLGYELVELGPGTAPDRSDLPNALKAVT

SEQ ID NO: 439861 - protein, 357 aa, unidentified
MGKSIRNLSTVTRVGLDLAKRVFQVHAVDAKGEIVVARKLTRSQLIPFFAALPPCVVAMEACSSAHHWGRALIELGHEVRLIPPAHVKPYVRRNKNDPVDAAAICEAMGRPGQRFVPVRSIDNQAELMRHRARELLAGQRTAALNALRGHLAEIGVIAPQGVQHAYDLKRLAVDSFDEYGEVVVPDCVRVALRPLLSQIDALDEAIGAIDKEIAMSVKADETAKRLMTVPGVGPVTASAILATIQDIGDFASGREFAAFLGLTPRQSSTGGKPRLGRITKMGDRYLRKLLVVGACATLRHRQGHNDALRLWASGMLERKTVKYKFKLTAVALANKVARIVFVLMTRGGQYDDRPVAA

SEQ ID NO: 439862 - protein, 461 aa, unidentified
MPKSKTKKARNRRAKKFKTTQSLPVLRPNAAGIDVGSTELYVAVPCDADEQPVRSFATFTEDLHALADWLVACKVETVALESTGVYWIPIFQILEARGLEVCLVNARHVKNVPGRKTDVSDCQWLQYLHSVGLLQASFRPPARVCAVRSLWRHRDTLVRYAASHVQHMQKALTQMNIQLANVISDLTGKTGLAIIDAILDGERDPQKLASLRDHRIKADTKTIAKSLTGDWKIEHVFTLRQARLIYSHYQQMVAECDIQIAALLRDFESRIDPLAVPLPPPTTSHVRPQRNEPKFDLRGELYRILGVDLTQVPGLQSNTGQAFLSEVGPSVDRFASSKHFASWLGLCPDNRITGGRVLSAATRDVKSRTAYALRLSAQCLHRSQSALGDYFRRMKARLGAPEAITAAAHKLARIIYHLVKHRVPYDQSVFAHEEDLHRKRREKNLRKQAALLGLQLTPLPQ

SEQ ID NO: 439863 - protein, 325 aa, unidentified
MSQQSNNCAIAVIGIDIGKNSFHVVGHDQRGAIVLRQKWSRGQVEARLANLPPCLIGMEACVGAHHLSRKLQLLGHNARLMPAKYVRPYSKGQKNDFRDAEAIAEAVQRPTMKFVATKTADQLDLQALHRVRERLVGQRTGIINQIRAFLLERGVAVRQGLRFLRAELPGILATQTDVLSPRMLRILEDLSTDWRHLDARIEGLSGEIETFAHQDQHCERLMTVPGIGPIISSAMVAAIGTGEVFSKGRDFGAWLGLVPKQISTGDRTILGSISRRGNRYLRALFVQAAWVVLVKLGPKQWERYGLKSWIEVATALQCARHCAGQ

SEQ ID NO: 439864 - protein, 476 aa, unidentified
MNCAAQPFRWRQQEELEMNPKRSKSRHGHKMPLVHPNAAAIDVGATMHMAAVRADRTPEPVRSFGTFTADLHRLVDWFTQCGVETVVMESTSVYWIPVFELLDARGFTVCLVNARDAKHVPGRKTDVSDAQWLQRLHSYGLLRASFRPKGQIAELRSYVRQRERLLEYAASHIQHMQKALTEMNLQLHHVVADITGATGLRIIRAILAGERDPEALAALRHYSCHSSAETIAKALTGSYRAEHLFALEQALALYTAYREKASACDMRIEAVLKELSIHRGRDHGAVPPPRRRHRTDQVNALAFDVRAALFALLGKDITAIDGLGAYLSLKLIAECGDDLSSWPSAKHFTSWLGLAPSNKISGGKMLSSRTRRSGGRAAALLRLAAVAVGRTDTALGAFYRRLSSRIGKAKAVTATARKVAVLFYNAVRHGMEYVDPGASSYETRYRTRVVNNLHRRAKAFGFVLQPLEPKAGAAVS

SEQ ID NO: 439865 - protein, 344 aa, unidentified
MTNIQPNKTDTESKVSHFAGIDVGAEELVLVILKNGKPFDPQKFSNTPADRARLVKKLVKLPGIVVCLEATGIYHFDLAIALHDAGVLLMVVNPKASHNFAKVLMKNSKTDAVDAHTLAEYAARMDFVAWTRPSDETLNLRSFARRINALTGQKAAAKNHLHALTSTQETPKAVLRDAKLAITQLEKRIDRLTADALILIGKHSELTRILALLIGIKGIGETSAIALMGELLLLPPGLSHREWVKFAGLDPRAFDSGKSVHKKTRISKAGNAHIRSALYMPALSAKQHDPHVKAYFQHLVDNGKKPLQAVCAIMRKLLHAIHGMLKHNKPYDNTRFYAIPVAAR

SEQ ID NO: 439866 - protein, 477 aa, unidentified
MRKSADVMKSSAKTFPRQKMNNVKTVSTGKSNYEKSLAMVNVHVAGLDLHKETIWGCVAGGADSDKSVQTFGTCTAELRRLVRWLQDSGVESVAMESTGVYWIPVYGILEEKGLKPVLVNAREIKAVKGRPKTDRLDCMWICRLHSYGLLRGSFVPSANVAALKNLCDCREKIISESSRSIQRMQKSLQRMNCRLDNAVSNIVGDSGIRIIEAILRGERDPVKLAELSDKRIEKEKSEIARDLDGNFQTELLVVLGEWYEHYRFYNKRLGTINEKIVALLEKFPKKTNRKNLPPKPLNYREDKMTFSVPMRPLFFEIFGADLTQLAGVGPSVVLSFLATVGPDVSAWLTENHFVSWLGLAPNPQISADYRKKGKTKRVKNLLACDLKTAGMTVQRTDSFLGAFHRRLKIRVGPAKAKNAAARKIAIILYRLVKCGKQAIKFSSEQYEQLYKKRKLENLTRQAKHLGFDLVSTEMTKI

SEQ ID NO: 439867 - protein, 437 aa, unidentified
MRTKKSKASKRMNLQSLSILHPDAAGIDVGAKQHLVAVPADRDQRPVRTFQAFTPELHELAQWLKHCGIRTVALESTGIYWIALYEVLEQHGFEVRVVNARHVKHVPGRSKTDVLDCQWIQKLHSFGLLNGSFRPDQQIRKLRTYQRLQDSLVVNSAQAIHHMQKALFEMNVKLSNVISDVTGETGLRILEAILAGERDPEQLAALCSSRIKASRQTVAKSLHGNWDPALLHCLKTALDTYRFTQRQIQECHLCIQRQLTELDSRAPIPGSATSLKAQLHRVCGVDLTKIPGIKEQAAQIIISEVGLDMSKWNTEKQFSSFLGLSPDNRISGGKVLRRSTRKVYNRAADTLRLCAQSLTHSKSALGAKYRRLRARLGAPKAIVAMAHHLARLVYRMLRYGEHYVEKGIEHYERKFRLHRIKWLRKEARALNLQLVAA

SEQ ID NO: 439868 - protein, 359 aa, unidentified
MMSMNHDQSPCRVVIGVDTHKYVHVAVALDELGTVRGDTAVPADRSGYERLLAWASDMGKIAAFGIEGTGSYGAGLASLVRRRGHKVIEVARMDRRDRRLRGKNDLLDAHNAARVVLAGTATAIPKAADGVVEMLRQVKVAKDTAVKARTAAMITLRALIVNVAPELRESLQGLPKMALIERCAGLRPGQVDTPLAASKHALRSLARRWRELSAEVKEHEALLERLTREVAPQLVDAFGIGPDTAAEVLIVAGDNPQRIRSEAAWAKLCGVAPLPASSGTTTRHRLNRGGHRQANAALYRTVIVRMQHHEATLAYVARRTTEGRTKAEIIRCLKRFLAREIWALMRPLRERPTALSEAA

SEQ ID NO: 439869 - protein, 313 aa, unidentified
MPVALSNPIVGVDVAKNELVIYQADSDLLEAIPNTKTSIKQWLKALLGPVSIAIEATNIYHLEFADLAYAAGCTIYMVGGYELKHYREGVKIRAKTDALDAKLLARYLKNEAEELRPWTPPSPLYRQLLSLFRRRAALVQARVGLVQSWSNEPLLKAAFAEQIKSMQRLETMIEKTINDQLKQAGLLGQLKRCLKVEGIGFLTGARLLTAFQRGEFSNADAFIAFLGMDLRVSKSGQKDGRRSLTKRGDPEARRLLHNAAMSASRTKAWKGFYEAQRARGFSTTQALVMLARKLARVVFALLKGQSEYQTKVS

SEQ ID NO: 439870 - protein, 342 aa, unidentified
MEITTIGLDLAKSIFQVHAVDAAGTVVVCKALRRSQVVPFFTKLPPCLVGIEACGTSHHWARALAKLGHEVRLMPPAYVKPYVKRGKTDANDAEAICEAVTRPTMRFVPVKSPEQQAALALHRTRDLLVKQRTQLVNMIRGLLAEFGIEIVRGLHHAIELAARIAKGDAPEVPDLAVRVITGLAGQIGDVQVRLVALEKELLAWHRSNELSQRLGTIPGVGLISATALAASVTDPGRFRSGRQFAASLGLTPLQNSSGGKERMGRISRMGDRYLRRLLVIGMTSLVRRARAKPDSVDPRIATMLARKPARVVTVAAANRTARIAWAIMARGGTYRAPIGMAA

SEQ ID NO: 439871 - protein, 361 aa, unidentified
MSDVHKDTIAVAYVAQDHGAEVTYLGTIGTRQCDIDHLIRKMQSKAKHLIFVYEAGPCGYWLYRYLGKKDYDCWVVAPSLIPKKAGDRIKTDRRDALQLARLARSGDLTAVYVPTVEDEAIRDLTRAREDTLSDLKDAKLRLKAFLLRHDIRYTGRANWSPAHLRWLSEVVCPTPAQQIVFQEYVRAVNEHTERLQRLEQELQDHVHAWRLHPVVEALQALRGVQFTVAVTMVAELGDLTRFDSPRELMKFLGLVPAEYSSGERRQQGSITKAGNTHARKALVEGAWAYRYPAKVSRHLQLRLEKQPTMIQDISWKAQVRLCKRYRQLVARGKHANIVTVAIARELAGFMWAIAKQVPVAA

SEQ ID NO: 439872 - protein, 475 aa, unidentified
MGRDSGKQKKENMKALSPEQEAGLKQKAEEISKGLQSYTWRDLETGGKFTHNDKLTFIRDDMLIVGCDIGSERHYARAIDAKGRELSKGAYSFENSAEGFQSAKDWALCLAAQHGKNQIVLGVEPTGHYWFSLAAWMIAKGISVVQVNPYAVKQTKELADNSQAKNDAKDPKLIAELVKNGNYGVPYLPEDVYAELRVLCTLRDQLMEDRVRNMNRLHREMKIVFPEYREAFGKIDGIFTLSVLANAPLPSELVALGEDGVKDIWHAEKLRGGGYKRAKEIVRLAGVSAGLTQGAEARKIAIVSFVGKVMELAAELEEIEAQIALKCREIPRADNILEIHGLGAATVSGILAEMGDIDRFDAAKEIQKLSGLGLVACSSGKHQGQTKISHRGRKRLRYWLFQGALSVVSHNEAFRQIHAYYTTRAENPLKKMQSITVIACKLLRIIFTILKKGVRFDPDKMLSDITHPAPLDAAA

SEQ ID NO: 439873 - protein, 388 aa, unidentified
MLPSTRRISTEQTATVQPDLALYASLELSRSTWLITCLLPDRNRMSKYSTPGGDGGALLGLLERMRARAQQLTGRPVKIVAIQEAGLDGFWVHRLLEVNGIESHVVDPASIAVPRRRRRAKTDAIDGETLLRTLLAWTRGEPRVCAMVVPPTPEEEDCRRVCRERAILLQERIRHTNRIKGLLAGQGITGFNPLHKDRRQLLDAARTGDGRPLPLQLKAEILREIELIELLVRQIADVEAAREVLAGPKTAKSPSPVVLLKQLKGIGPEIASVLYFEGLFRSFSNRRQLAAYAGLAPTPWRSGTVDQEQGISKAGNPRLRSTMIEFAWLWQRHQPASTLSRWFHSRVGKERGRIRRIAIVALARKLLIAVWRYLTQGEVPEGAVLKLA

SEQ ID NO: 439874 - protein, 409 aa, unidentified
MEVVHARCAGLDVHKKSVYACVICRGTDGKKRQEIRSFGTMTADLLKLADWLREHEVSHVAMEATGVYWRPVWAVLQGHFELLLVNPHHIKAIPGRKTDAKDCEWIADLLQHGLVRGSFVPPTDIQDLRDLTRYRAELKQAQSKVANRIQKLLELANIKLSSVASNTLGVSGRKMIEAIIAGEDNPEQLAALARRRLKEKIPELRLALQGHVRDHHRFLLKEFLDEWTALAERIARVEREIDRRIAPFEHAVTLWRGIPGMDRVTACNLVAELGVDMAQFPSAQHLTAWAGLCPGNRESAGKRMSSTTRPGNKWLRRTLCQSAWAVTRKKDCYLSAQFRRLASRRGVKRAVMAVAHSMLIIAYTMLKTGNTYHDLGGNYLEQTNKEHLQRYFLKRLRRLGLNVTVAATS

SEQ ID NO: 439875 - protein, 339 aa, unidentified
MNNSVIGLDIAKHIFHLFIMLADGKTMKKKLKRSELLAFFANHPVSTIGIEACGSAHHWARELTKLGHEVILLNARYVKGFVVGNKNDFNDAAAICDAVSRPNKRTVAIKTVAQQDIQLVHRIRKELVDKRTALVNQTRGLLSERGIIINQGITQVRQQLPLILEDAENGLTALSRELFAEQYEKLKALDDEIKAQDQRINRLCNANELSKRLLDVPGIGPLTATIVAADMGDTGKGYESSRDYAASLGVVPKQHSSGGKQVYLGISKRGNRYIRTLLIHGARSVLKNCLKKTDKLSLWLQALINRRGFNKAAVALANKNARICWAMAHSNKAYGALTA

SEQ ID NO: 439876 - protein, 373 aa, unidentified
MHYSTVFVGMDVHKETFSLCCFTNEKEKAEYPQKVDAHYSKVINYIEAMRFHYGDDVLFICGYEAGCLGFTLYHELTAHNIKCVIMAPTTMAVAKGKKKIKTDKRDAAHIARCLAHHDYSAVHIPTKMDDMVKEYIRMRDDHKLAIKKVKQQILAFCLRHGFQYDGTKNHWTQAHINWLRTLKLENIYAETLEEYLLEYDYLTAKLERINKRIEELADKDEYKEKVHKLECFIGIKTHTALSIIVETGDFKRFADAQHYASFLGLTPGEDSSGGDQNRLGITKAGNGHLRMLLTEAAQCYSRGQAGYKSKLISARQEGNTPAVIAYADKANERLRRKYYRLTLKRGKKANVAKTAIARELACFIWGMMTDNVA

SEQ ID NO: 439877 - protein, 352 aa, unidentified
MAEKPTSVTVVIGIDIGKNTFHVVGLDDRGAIVLRQKWSRGQVETRLANMAPCLIGMEACVGAHHLSRRLRALGHDARLMPAKYVRPYSKGQKNDFRDAEAIAEAVQRPTMKFVATKTADQLDLQALHRVRERLVRQRTGISNQIRAFLLERGIAVRQGLRFLRAELPAILAKRCDALSPCMVSLIEDLAGDWRRLDERIEGLSSEIDALARQDAGCERLMSVPGIGPIISSAMVAAIGTGEAFGKGRDFAAWLGLVPKQISTGDRTILGKISKRGNRYLRVLFVQAAWVVLIKPKSWQRYGLKPWIEAAKRRLHYNVLAIALANKLARIAWSVLARGRGFEARSIATAQPV

SEQ ID NO: 439878 - protein, 384 aa, unidentified
MKVVCGLDVHKDSVFCCILCANGEKIQHKFGVLTEELVTLRDLMVSEGVEECAMESTSIYWIPIWRVLEGSVKLHLVNPYFIKQLPGKKSDVNDAEWIATCLSKELIASSFVPDDKIQRLRQYDRRIFDLNVSISRNLVKLDQCIQRCNIRISNYISTTDSKGYRSIVKLISQGVTDAEVLVKELHGRTINRHGRETLVKALTGVVSETDIDIINQLVEEIELQQRHKDEAQEKMTALCMEWFPQEVENLQTIPGVKERSATSIIAEIGTDMTHFQTPKKLVSWVGLRPRNEESAGKIKARGITHGNRFVRKTMIECSWGAARMKDSFFAEFSYRQCIERRKNKMKVQVAIARKILVAVWYVLSQGTQYIKPTDHYTATDMTAV

SEQ ID NO: 439879 - protein, 402 aa, unidentified
MRFFVGIDWASQAHAVCVIDQTGRVHWQGSVPHTTEGLAELLARLRRFRRRGRLRIALERPSGLLVDTLVDAGLEVVPIHPNALKASRPRYSAAGGKSDPGDAFILADMLRTDGHRFRPLRPPSDDTRALRALVRGRDALLAQRVAFANQLRALLERFWPGAAAIFADVDSPIALAFLTRYPTPHSAARLGEARLAQFLGQQGYSGRRPVAELLARLRRAPVSQVGAAEAEASGEVVGALVAVLTPLVTHLQQLSARLEAAVPQHPDGPLVQSLPRSGAVNAAQILAELGDDRARFATDEQFAAAAGLAPVTHASGQHHAVVFRWACNKRLRRAVTTFADNSRHGSRWAALVYQRARARGCRHQHAIRILARAWARILWRCWQDRTPYDIRRHRAAQMLGVA

SEQ ID NO: 439880 - protein, 393 aa, unidentified
MRISVGTDVAKETHWVVALTETGEVLLDHAVDNDPAAIEALIAELGALPGECTIGLDVLGGIATLLSAMLLAAGQRVVHVPGLAVNRARQGTTGGETKSDPRDARVIAEQVRSRRDLRSIAVEEEPLAELQLLVGRRRDLVAEQTRRLARLHDLLSRIHPGLERALDLTSKSGLCLLTRYVTPAEIRHAGRARLARHLRASGARHVEAIATAALEAAQRQQIALPGERVAADLVRELAREALAVRERLGEIDAELAQVLAVHPDSTLIRSLPGMGVILTAEFIAEVGIRDRFADADALAAAAGLAPVLRQSGKVRFLRRPLGGDKRLKRVFYQAAFCSLSCPASRAFYARKRREGKRHHQALLALARRRVNVLWAMLRDRRPYELQEPRCGAA

SEQ ID NO: 439881 - protein, 349 aa, unidentified
MIVGIDVHKESHTAALLDERGALVETLTIPNSVEGAAQLHDWLSEHGGGEAVVGIENAAGYGRLLCGALTSVGHIVLNVPAWRTKRDRHAHGPGKSDAGDATAVAEVVLRRRSELGPALEPELVRALGLLEGLRRQSIYDRTQAIQRLRAIWTQVDPPAEAQLTKCATERALRKLKRIDFGHGLAAEAATQCVRELAREIEQLNQRIGTLDRQLERLLREHGNPLADLPGAGPVVAVAVLAHSGDVRRFRSSAAYARFCGAAPIPCGSGKTASRHRLDRGGNRQLNAALHRIAIVQARVDPRARAFLARKTAEGKTTREARRALKRHLANVLYRRLHAWAGNALAAETT

SEQ ID NO: 439882 - protein, 312 aa, unidentified
MTSGRYIGIDVGKRWLDMNIEGMREVERFGNDVDGWMRLIEKLKEIQPLMVVMEATGGYERSAAKAISEAGMAIAVVNPTRVREYARSMGILAKTDKIDARVISQYAQTAKPLARVPQTPIEEHLAACVERRRQLVENLTVEKNRLSTCPASMREGVKEHIAYLEERIKQLEVQIQADIAQDPDRQARAERIDSVPGVGPVTASTLVAELPELGQLNRKQVAALAGVAPFNKDSGKKRGRRKTRGGRAGVRRVLYLAALSASRFNPVIRPFYNALLKRGKEKKVALVACMRKMLVILNAMLRKGEDWHYSLV

SEQ ID NO: 439883 - protein, 350 aa, unidentified
MNHKCKIIIGIDTHKATHVAVALDTQGTRLAALSIPTNPKGYLELERWSQSFGEVHAFGIEGTGSYGAGLSRSLLAQGHNVVEVTRPNRQLRYTQGKTDTLDAEGAARSVLSGQATARPKTQTGISEMIRHLKVARDTAVKSRSQAMVTLKTLIINAPADLRDVLDKIRGKVALIRHIAAFRPGEINNTMASVKAAMRALARRWLWLHEEIITHDKELERLVTERAPDLMTSHGIATLTVAEMLIVVGDDPTRIRSEAAFAKLCGVCPIPASSGKTHRFRLNRGGNRQANAALYRVAIVRMRSHEPTLAYVRKRTKDGKSKSEIIRCLKRYIVREIYSQLCVPKSAQIAT

SEQ ID NO: 439884 - protein, 348 aa, unidentified
MRFYKPHTKFYCGIDVHSRIIYVCIIGENKKVILHRKLGNLETDKLLAILKPYRNNIVVACENTFAWYWLSDFCVEHGFEFILGHPYYMKAISGSKVKNDKIDSEKIARLVQAGMFPLAYACSKEKRSLRDLLRRRLYYVEIRAKLIAHIQILNYQANKDSLGRISNVTAKRVDLYERFEDEAVKRSVDANLKTIDFYNKLINDLEVYIRSQARAFNRKELSILQSINGIGDIIALTILYEVDDINRFESVQKFSSYCRLVRCVHESAGKKYGSGGKKMGNVYLKRVFSEAAIFVTKFNPRIEKHFKKLESKKGKMKAYSILAHKIAAVVYHMLKSGKVFDIDRFLAH

SEQ ID NO: 439885 - protein, 417 aa, unidentified
MDVLYTRCAGLDVHKASVTACCRWLDHAGRSHHEIRRFGTYSSELRELANWLRQQQVKQVAMESTGSYWRPVWNELESKGLPLLLANAQHIKTVPGRKSDVKDPEWISDLLQHGLIKPSFVPDQQMRDLRDLTRMRSKVVSDHTRVVNRIQALLEDANIKLGNVVSDILGVSSRAMLQGLIEGRCPGELAELAQGRLRSKLEELQQALDGHFRPEHAFLLKRLLLQTHFLEQQEGVLRREIVRRLDAQARHAMALWDTIPGVNEAVAWVLVAEMGTRVEQFPDADHAASWTAICPGNNESGGKRRSGKTRKGNTWLRAALCEAAWAASRTKGTYLSALFRRIAARRGQKRAIVALAHAILIIAYEMLKHNQPYRELGENYFDKINPEKTATRLIRRLQKMGYQVSITKAAAETPCAP

SEQ ID NO: 439886 - protein, 367 aa, unidentified
MFYLGIDVSKKAARYFILDESGSKLKAFTVDTNKESLESLLERFKSLSITTDNLLIGIEATGSFWENTYSFLKNKGYNIVLLNPYNTNKFREALAKKAKTDDIDALVIAQLLRTGEYVQSQVAEENIQALRELTVLRYEFVKERKNLQRQVYSLLNVVFPEYEKTVIAKPFSQASMRILSEYPTAKHLSGAKPKHIEKIVRKIVGNNFNIGEIQNLIDTARNSIYSGRAKDARATTLRMLLAHIANLSNSIEELEKQMKAILSPSDEDDSFPGQNLLSIKGVGDKTLAAIISYLGSDGSNFPDSKSAVGYVGFYPKIYESGQSRRDNKISKRGPKVLRWALYMAAVASLKHNKEMRTLYHMHLFLYI

SEQ ID NO: 439887 - protein, 384 aa, unidentified
MKKDNILFIGLDTHKEQTQVSYTLDHRTAEVNDLGRIQTTKTGFVKLARQLQSKYPHATLHFVYEAGPCGYWIYRLLTSLGHCCFFVAPSLIPKKPGDRVKTDKRDAQNLARLLKNNDLDPIYVPEPEDEAVRDLSRAREVAMRDLNDAKHQLKSMFLRNNIRYNGSDSWSLKHLRWLTEIVLPHPCQQIVLQEMIQTISERMARLKRLDNELTHQVKQWRYYPVVKAIQALRGVRLLIATGLITELGDLSRFDTPRKLIKYVGLTRSEHSSGNTRKLGSITKCGNGRARRLLIEGAHSYRHAAKISKEMQLRQEGLPKEIIDKAWAAQMRLCRRYQRLIMRGKPRNVVITAIAREMIAFVWSISREVVLPRVDPKTRLSRVPA

SEQ ID NO: 439888 - protein, 353 aa, unidentified
MTENTSETIGCDLGDKKSEIRVFGAKGEVVQRATVRTTRQGMSAFFKRPPAHVVIEVGAHSRWVSELLVELGHRVTVANPRRVKLISQNDDKDDPVDAELLGRLGRVDVKLLAPVKHRSSEAQMHLAVPKARDLLVGMRTRLVNHVRSTVKLLGERLPSCSAESFGHKTRSLLPTALKAALEPMYEVLARIDEQIREQDKMIERLGKRYPDVAVVSQIAGVGTLTALVFVLSVEDKQRFRSSRTVGAYFGLRPRRRKSGDSDPQLRITKAGDPFVRRLLVNAANYVLGPFAPESDLRRWGLELAKRGGKNAKKRAKVAVARKLAVLMHRLWVTGEVYEPTGYQQHRTEEKAVA

SEQ ID NO: 439889 - protein, 388 aa, unidentified
MKKSSTHQKPENIDLFVGLDVHKATIDVATADEGRNSEVRHYGKIAGDLSSLDKVIHKLQSSGRTLHVVYEAGPCGYAIYRHLTAKQIDCTVIAPSMTPKKSGDRVKTDRRDAMSLARLHRAGELTAVYVPREDDEAMRDLSRAREDAKRAETRARQQLQALLLRHDIRYTGKTPWSAAHLRWLADIKLPHPAQQVAFQEYVTAIDEAAKRVARLTKQIEELLPAWRMSPVVAALQAMRGVALITAVCMVAEVGDLTRFTNPRQLMAYLGLVPSEHSSGGHRRQGAITKAGNSHVRRMLVESAWAYRLPARVTPIIQKRQEGVPKLVREIAWKAQLRLCARYRRLSNKGKTKQLIVTAIARELAAFMWAITREVTPLEVAATGKQQAA

SEQ ID NO: 439890 - protein, 343 aa, unidentified
MKVKLIGIDLAKSVFQVCALNRAGRVLFNRRLRRAQLVKQLQDLEPTTVAMESCASASYWGRRFQAMGHTVRLIPPQHCKPFLRTGKSDARDALAICEAASRPNLHWVPIKTTAQQDLQLLHRIRQRHIRNTTALANQIRGMAREYGVDFPVGLRALRNALPAALEDGENELTPVAREMLHELYEELLQMIARNQALLARIVEQARTQPAYERLQTVPGIGPVVASALIAAIGDGQQFRNGRQMAAWLGLVPRQHGTGGKIALLGISKNGDRHLRMLVIHGARAALRWARGKETPLGAWISPVVTRRGMNKAVVALANKIARISWNVVAKGCAYEPHKAFGRA

SEQ ID NO: 439891 - protein, 450 aa, unidentified
MPAHRTVPSLVPNAPAPVDFDWYVGIDCGGATHQACVLDAVGREVGVRAVPHSGAGLAAFEAWLHEVAGPSLTRVAVGLETPHGAPVALCLAAGAAVFAINPKQLERFRERVSAAGAKDDRRDARVAASALRTDRGVFHRVPVEDARLVAVRELARMGDELRTEAARLSNQLRAQLERYFPQVLTLVPAADEPWLWALLDEAPTPAAAARLTERRLTRLLREHRIRRLSGAAVRAALQAPALPVAPGLVEAVSGHVTLLLPRLELVTRQVRGCATQLEAALAALAGPDDAGPDAGPRAGGAPDAPNAPSGAPTGDLGTVVRVLRSLPGVGVGVAGTLLAEAAGPLLAANYHALRTHGGTAPVTKQSGKQRLVAMRYACNQALRTALFHWARVSIQHDPRARAYYTTLRQRGHTHARSLRSVADRWLRILTAMLTTGSLYDPARFAIAATP

SEQ ID NO: 439892 - protein, 356 aa, unidentified
MTTTTNDVTGGVDTHRDTHHAAALDAVGQLLGTREFPAGPAGYRQLLAWLESFGTVTRIGVEGTGCYGAGLTRFLRRQHLRVLEVNRPDRRSRRRRGKSDPLDAESAARRALAGEDRVEPKDTTTIVEAIRVLRIARNGAVKSRTAAYNQLKDLVLTAPEDLRETLRGKTLPRVATESARLRPDTTRLADPTHATKLALRSIAARIAALNSEVAALDKELRQLVTRAAPRTLSLLGVGPDHAAQLLITAGANPDRLHSEAAFAALCAASPIPASSGKTTRHRLNRAGGDRDANRALYMIIVTRLRYCPDTQAYIKRRMTEGLTKPEAIRCVKRYVARQAYHAIRAELAAANPLDAP

SEQ ID NO: 439893 - protein, 354 aa, unidentified
MASATNDEGTCICISKVRWNDYTHSSLFSLFSKQNNYTTKMNTIGIDMSKDTFHAAFDDAEVRIFANTKPGIKQFIATLKNKNFTTEDTMIGTEATGVYHLLFCAELSKKHWQVKVINPLLTHKMISSSIRRVKTDRTDALAIRKTVLTGAGYLYTDTPEVLALKALVQERSALCNMRAQTKQRIHVHNKRTEATGVKSHDSFKGVIKLLSHEIVEIEERMAKCVPETQKLLRSIPGVGKVSAATLVAYVGDIKRFSSAEKLTAYIGLDCRVYESGISIKGKGYLTKRGNTYLRFVLFNAAGIARRKIPQLKAYFEKKIKEGKHYFSALCAVERKLVHLIFAVWTRGTHYEKRV

SEQ ID NO: 439894 - protein, 361 aa, unidentified
MVKVRSWAGLDVHARSVLAVTLDAESGELRSRRLPGETAKVLEFLVGLPGPTRAAYEAGPTGYGLARALEAAGIGCIVAAPGKIERPAQDKVKTDQRDAERVLRLLMIDALHAVRVPSIEEEALRDLVRAREDLRGDLMCSRQRLSKLLLRHGIVYDDTHSTWTQRHRAWLRAQDLGGGAQATLLDYLGAIDTLEHRRDQLETTIAKLVPGSPYAQTVARLRCLRGIDTLSAVGLAAEIGDFQRFERPGRLMSYLGLVPSESSSGETRRQGKITKTGSKHARRLLVEAAWHYRKTPARGTTLQRRQEGQDATIVAISWQAQRRLHHVWRRLADERGKRRTIVAVAVARELAGFCWALARAD

SEQ ID NO: 439895 - protein, 402 aa, unidentified
MNCVGIDVSKGKSMIAVMRPFGEVVISPFEVLHTANELSELAGLLKSLDGETRVVMESTGNYHAPVAWLLHGAGLYVSVVNAMLVHDYGNNSLRRAKTDKKDAVKLANYGLDHWLTLPRYVPEENTRLMLKSCYRQYQQYSKVQTMLKNNLISLLDTAFPDANRLFTSPPRADGSEKWVDFVAAFWHCECVCGLSEKAFTAKYQKWCRKHGYNFSKDKALDIYASACGHFGVMPKTDTAKLLVEQAISQLQTTSAALAALKQEMQSLAASLPEYPIVMGMFGVGPTLGPQLMAEIGDVRRFHSKKALVAFAGIDSPPYQSGQMDVHSRSISKRGSASLRRTLFLVMGVLLQCAPMDEPVYQFMNKKRSEGKPYRVYMMASANKFLRIYYASVKTYLDSLEHN

SEQ ID NO: 439896 - protein, 407 aa, unidentified
MTTTTKKKVRFVRPNSSTSSTPRLDSGETAHVGVDVHKASHHVAVVTDLRGLVASRTPPADPESLSERPKPIGSQVARVVYEAGPTGFTLARRLRSSGLRAGVIAPPKTPTMPGPEAESDRLDRRKLAVFARKGPLQPVRVPEEREGADRRVLRLREQLARKLRAAQQQVQAFLLQHGIAEPAGLTRWTAASVDAPRRLELTPEPRLRPDVMLDERQHDRERVARAPRRLEESAGAGRHRETVATPRTAPGVGPITAMTSRVELHDPARFRDGGQVARVIGLAPQVSQGGPTRREGRRLKSGNARLRTAPVEAARRWVAGDEAAKARYRRLVATTGNGKKAIAGMARRLAILLWRLSLSGEPYRAAAWRPGPAPATPERPGSRPRPLPERPSSGAGRPRASEDLRVR

SEQ ID NO: 439897 - protein, 454 aa, unidentified
MSSGTIPRLYYKPFAETKRLLKGGNVNGQLESHSSDEPTFGAFVAIDWADQKHVWSMQAASSEQRQYGEIPHTPEAIEAWVGGLFSRFPGQPIALAVEQSRGALVFMLSKYEHLHIYPIHPRAAAQFRAALYPSGAKDDPVDANLLLDLLVHHRGHLRRLSPDTEQTRLVQQLVEARRKLVNEKTRQGNRLTSKLKLYFPQILTWFNEVDSALVGVLLERWPTLEALQKARSATLRSFFTQHNCRRAELIEQRLEQIRQAIPAIRDAAVIQSAVAMVSVLVPLIATLREGIAALDRQIEQAAAAHPDFAIFNSFPGAGPVLAPRLLAAFGSQRDRYQSAAEIQQFSGIAPVLVRSGKTAWVHYRWACPKFLRQTFQEWAGHSIGFCDWARAYYQQQRKRGVGHHAAVRALAFKWIRIAFRCWKDRVPYDDSRYLQSLRQRGSPLAIGGQSGLAD

SEQ ID NO: 439898 - protein, 392 aa, unidentified
MVAETRLSSKAHPLTVGIDPSSRKLHVSVVFFPEGEKPKKTYRELPIQASSFAWFEDLRRQYGEFPIAIEGSGLLGEVALLELQSRGMNLWEVSPIRSKGARELFGSHHEDETDATVMAYAARFVPGLTPIRTSQTKSALKQLTRVREMLLEHQIAGQRQLQSLLRQTYGAVYQDLFLDTASLKALRFFTQFPTINGALDRLADVTLALGDKKAKALEQAGRFTVDVFLQAVGQAVLSMVEVILKLKEEIRALDRQIRKQAEQDREVQAIRRCLNVKASLLPSTIVANLQDIGRFSKESKAAAYAGLGRVRWVSGKTNTSRKRMLFHRRLKRALMLLAHTKVIHDPDWHKLYQKYRDMGMWHWRALKRVARKLMKINYYELRSVQPDVQNAA

SEQ ID NO: 439899 - protein, 347 aa, unidentified
MNFYNNTHPYYCGIDLHARILYVCIIDHQGTVCVHKQIQAKPEPLYQILAPYIGNVVVGVECMHCWYWVSDFCQDISVDFILGHALYMKAIHGGKAKNDKIDSYKIAKLIRGGNFPLAYAYPAAMRATRDLLRRRTKIVRHGAHLKAHVVNTASQYNLPPLKVNLKNVCAREQLKTTFPDKAVQRNIDLDMALLDCYAGELDKVERFIERQAKQHNPIHLQLLKSIAGIGRILSLTILYEIGTIERFDTVQKFASYARLVKCKAESAGKTYGTQGNKIGNAYLKWAFSEAAVLYLRGNDKAQRYLQKLQRRMSKAKALSVLAHKLGRCVYFMLKNETVFDEQKFLKR

SEQ ID NO: 439900 - protein, 397 aa, unidentified
MQKGKNGTGMKKSSKKKTKQAERKAKADRQEELVQLSALVERQPNTLVIGIDLGDKTSSYCVRTRDRQVVTEGVVATKAEAILESFREMQRQLMVMETGTHSRWVAQLLHLMGHEVIVANARKLKLISENNQKSDRVDPRLLSELGCTNVDWLHPVYQRSEGKHCDLLVVRAREALVEQRTGLINHVRGTVKSYGCRIRKCSAESFVGVAGSAIPEALQPASSGVLETLEEIGEQIYGYEAQIEHLCQTKYPETQWLRQVKGVGPVTALTYVLTIDDPHRFGCSRDVGAYLGLVPKRRQSGQRDPQLGISKTGDELLRKLLVNCAHHMLGPRGAESDLRRWGLELVAASLRAGKAQGARKRAAAAVARKLAVLLHRLWVEEEVYEPLRQRKSDEAAA

SEQ ID NO: 439901 - protein, 345 aa, unidentified
MTLYCGVDFHSRRQTVCYCNTADGEVKIKDLHHYDDDVRSFYEQFKDEQVIVGYETSGYARWFEQMLFELGIEVWVGDATEISRLAKRRQKNDRRDAEHILDLMIKGEFPKLYRTQVKSQEILRLLRHRNKLVKHVVMVKNSLRRILIETGSIFKEALATKKGKQKFRDLKLPPLLADERDRWLELLLEIEKQIAELERKLKHEAKDDERVQRLLTHPGVGLLTALCIVHTLGEVNRFATTRKVAAYAGLEPMEHSSGEKRHYGAISKAGNRLLRFLLGEAAHTAVRSDPELKQFFRRLKAKCGMAKAITATARKLLIRCFIMLRDEIDYAEFRRRGIEARSARY

SEQ ID NO: 439902 - protein, 356 aa, unidentified
MNKSNRLDFTGQPIYIGLDVHKKSWSVSIFTQHCEHKTFTQPPEVDKLAYYLGRNFPGAQYYSVYEAGFSGFWIHDQLRAKGIDCIVVNPADVPTRDKERTKKRDPVDCRKLARSLRNGEIEGIYVPSRGKLEDRSLIRTRQSMVRKQTRCKNQIKAILFFYGVVIPEEREMGHWSRRFIQWIERIRMERTSGDIALKAHLEELSHLRQLIASLNRAILRLARTEEYRSLVRLLKSVPGISTLTAMILLSELGEVTRFPSLDELSCYIGLIPDTQGSGEKEYVGGMTQRRHSQLRWLLIEASWVAVRKDPALLMAFQEYCKRMRKTKAIVKIARKLLNRIRYVLKNQAEYVPCVIE

SEQ ID NO: 439903 - protein, 343 aa, unidentified
MDIATIGLDLAKNWFQVHGVDAQGQAVVRRKLRRGDVLTYFRSLEPCLVGMEACATAHHWARELTLLGHEVKLMPPGYVKAYVKRNKNDAADAEAICEAVTRPTMRFVPIKTVDQQAVLMLHRARNLLVRQRTMLVNALRAHMAEFGIIAPQGLHHVEDLTKELAHEQERLPELARSILLTIVDQLRDTVARVREIEIRLTRWHKGSKVSQLLASIPGIGIMGATAIAATVSDPSLFRSGREFAAWLGMTPRQNSSGGKERLGRTSKRGDKYIRCLLVAGAVAVLRHTRTRTTKDAAWVQGLLARRPTKVAAVALANKSARIAWAVMARGEGYRSKDQIVQAA

SEQ ID NO: 439904 - protein, 454 aa, unidentified
MAKNGRKNIAKDYDYAYVGIDVAKLNHEICIKASPDLYIKKKFSITNTVSGYEKLVSVLQGLKVDQDHILITMEVTGNYGLNLYQRLRNDGYRALMISSSSVSDYRRYKSLVKTDAIDADVIATIASREEAREAWVPKKEYADLRLYIRLKDKYSTDLKKYRIRLLNLLDTIFPNIQKVFKTGRNTMYAVLRAYPTPQSIIDADAEELFYVINTASRSRYGLDKVRELIVAAKDDISVPTYSDDAIRIALDDCLDFIEEYSGKVREYKKRIKDIVEDMPMYKLLMSFPGCGEDTAAVCISEIGDISRFEDARKLVAYAGMSIAIKLSGTSVKSNGRITKKGSKYLRHSLYLITEYARRLNPVIGAFFEKKKQGKQKRHVLAVNSCTNKVIHMIYSVLKHKSEFILYHKDLQKLSEEAREEFFGRIQFDVENHPRRKVFLLEDEHGEIRKFVYKR

SEQ ID NO: 439905 - protein, 327 aa, unidentified
MTRTHETDVVIGIDVSKHKFDLALLRNGKLRHKSFPNTAAGHAALIDWLKAQDIVAAHACMESTNVYGEALAECLHDHGYAVSIVNPARIKGFAQSELSRTKTDKADAGVIARFCAALKPAPWTPEPVEIRELRALVRRLDALMDMRQQEINRLHVAPAVVAETVKAHIDFLDRSIRETKQRIRDHIDNHPDLKHKKDLLATIPGIGEATIAVALSEFANIERFRSAKCLAAFAGVAPRERQSGSSVRGRTALSKMGRGKLRKAFFMPALVALRYNPLLKAMKERMLAAGKAKMAIVGAAMRKLVHLIYGVLKSGKPFNANYATAQA

SEQ ID NO: 439906 - protein, 324 aa, unidentified
MTRTNEKRNMEFVGIDIAKEKFDTCWGNSNTNSTFPNSQKGFLVLKKQLPNPGDCIVVLEPTGGYEKELIVFLQKNSYSVVLANALKVRRYAEAMGYLAKSDPIDSYVIKSFGEDLYPKGKLAVLTSKTDSFRKLEAWLSRSRQLVKLLTSEKNRLEKTSDKQIEKSIGRVIRNIEKELASIDKKMKKISEQCHLTEQAEKFQQVKGIGKVCSNALVAYLPELGKFSHSKIAALVGVAPYCSESGKHRGKNKIKGGRATLRSILYMGTLSAIKHNPVIKSFYDRLTSKGKHHNVAMIACLKKLLRILNAMAKNDTPWQENYGIK

SEQ ID NO: 439907 - protein, 356 aa, unidentified
MSHDVKYIGMDVHKEAVVIAVLNSSGQQVMESIVETKASSILQFIHGLRGELHVTWEEGTWAAWLYDLLQPQVKRVLVCDPRRNALLKEGNKSDKIDARKLADLLRTGMVRPVYHGEHGLRTLRELGRSYQTISQDLNRVMNRIKALYRGWSIPCAGTQVYAPRYREEWLQKIEHVGVRRRAELLYQQLDGLQALRRTLRPELLAESRKHKASKLLRQIPCIGPIRAARLIALMQTPHRFRSKRQLWTYSGLGIETRDSAQYCYVHGQLQRTKKPQQIRGLNRNHNHEMKEIFKGAATRASCGVGPLRDFYVALVAKGMKPEMARLTLARKIAAIALTLWKKEERFDTEQLKPQAA

SEQ ID NO: 439908 - protein, 324 aa, unidentified
MNSMAVGVDIAKQVFQVHYVERETGEIVNKPIKRAKFLEHFANRARCLIGMEACGGAHHWARQLTQMGHEVRLMPAEFVKAFNIRNKNDAADARAIWPAVQQPGKPVAVKTEMQQAMLALHRMREQLVKFRTMQSNGLRGLLTEYGEVMSKGRAKLDKEIPAALGRIAERLPTALIDTLREQWDALAKLDEQIAEIERRMREWKKEDRAVKAISEIPGVGLLTATAAVAMMGHPKAFRSGREFAAWAGLVPKQTGSGGKVNPRDQQERRHVPAHAADSRCARGIDACEGTRPVGRADEQAATHECRDRRAGQQDGADDLGGARS

SEQ ID NO: 439909 - protein, 373 aa, unidentified
MFHFTTLFIGKDVHKESFSLCYYDMMANQFKHSTKVGPNVSYIVNYVNELRRLYGQYAEVLCGYEAGCLGFTLYHQLQAHGLPCIVMAPTTVMKEGSKRVKTDKKDAAQLAKALAFRSYRPVHIPTAEDEQVKEYIRMRTDHKVALKKIKQQVLAFCLRHDFRYTEGSSNWTQKHVRWLHSLNLDGLYAEILTEYLLTYEKLVDQIERYDARIEQLGQSDSYQEKVSQLFCFIGIKTLTALSIVTEIGDFNRFATAQHFASYLGLTPSENSSGDKERRGAITKDGNSHVRRLLIEAAQSLAKGTIGYKSKELKRRQSGNRVEVIAYADKANERLRRRYRTLVLGKNKKQNVAKTAIARELSGFIWGMMTGRIA

SEQ ID NO: 439910 - protein, 304 aa, unidentified
MLYDGIKGRIKTRNIQNNRHSVENILRWLRLQHCGPEDVHVVMEATGVYHERLATELHDAGFRVSLANPHRSREFARGMGIMTKTDKVDAYMLACYAFLKKPHRWEPPAPEIRYLGALLRRRDVLLGDALREENWLEKYLSTDTPADIISSCRRMAQLLREEVSNIERQIKAHIKACPALRRDYTLLTSIKSVGPQLGMHMLVVLRSHNFASAEQAAAFLGVVPIEKRSGTSVRSRPRMSKIGPPQLRAKLYMSALCGKIYNKRMRNIYDEMCLRGKPKMVAIGALMRKLVHWCYGVLKTGTVF

SEQ ID NO: 439911 - protein, 455 aa, unidentified
MLFLLTSLILNDQREGMEMNQADRPSSPVDASSFQIVVGIDIGSQTCSMCTLTPDKRQVIKPTEFANAPAGFGVLQEQLEQLGVPPEQVLIGLEATSRYGENLYHFLESRGYQLCLLHPRQTHQFAQQRGLRAKTDKLDATTIARVLLSGEARRGYVPSDLIATYRELVRLHTQLSDEVARYKNEIQALLTVLFPEFSQVFADPCRATALALLKLYPSAQAIATAGVEAIAAKLHELAPRNYGRSTAEHLVQLAQHSVSRGFAVAARSTSLKILCDQLEHTQANMAQLEREIDTLLETDAGAKGLISVPEFGHKTVAVLRAELGDVTRFQRTDQVVAYAGLDIEVKESGKWKGQAKLSKRGSGRLRRILYMATVRCIRLPGSAFGAYYHRLVARGMKKCDAMMAVMRKMLIVAYRLLRTEETYDPTKVCAVVVTQPVELPPLHTPSSTKVVAAKA

SEQ ID NO: 439912 - protein, 325 aa, unidentified
MSQAYLGIDVAKQSFVCSLCTGSKPAHRTFRNQLEGLKELDKWLEKHKVSEVHACMEATNRYWEDLAWHLQGQGHRVSVVNPGRIHDYARSKLVRNKTDKLDADLIADFCATQQPPLWTPPPAEVRELQALVRHLEALKEIHTQESNRLAAGAPSAIVRKSLEDHLTYLDQAIAKVEQMIRDHIDHHPGLKRDRDLLNSIPGIGDTTAAKLLSENIQAFTSTREIVAYAGLNPQLRESGSSVHGRPKLSKVGRAGLRRSLYFPAISAMRHNPLVMRFCARLEQKGKPKMVQIGAAMRKLLCIALGVLKSQVPFDPAFLLPIQAIP

SEQ ID NO: 439913 - protein, 437 aa, unidentified
MSDQPGWFVGVDWASETHHACLLDARGEIVGERSFAHGGEGLAALGAWILAQTSAAPDAVHVAIEVPHGPVVESLMERGFRVHAINPKQLDRFRDRFSPAGAKDDRRDARVLADALRTDPHCLRALAPLDPVVVELREWSRIAEELRQDRNRLANRVRDLLWRYYPQMLELADDAAAPWFLDLWRLAPTPDKAARLPAATLERLLKRHRIRRFDAPAILARLRSPAIAVAPGTVAAAAAHLAAVAKRLDLVNRQIAEANRQLDRLTDRLAAAGSDSPGQPTEQRDVTILRSLPGVGRIVLATLLAEAFDPLRRRDYHALRCLTGVAPVTKRSGKSHVVVMRQAAHVRLRNALYHWARVAMQHDLTSKLKYAALRARGHSHARALRSLADRQLNVACAMLKSGTPFDPARHKTCPHPQHTTLRASRKPDRPPGQRRLA

SEQ ID NO: 439914 - protein, 382 aa, unidentified
MAILAIDVSKSSLSFYSDFIGKGFVDNSPQGIFDLFNKASSSSSDFILVLESTGVYSFDVANYFFQNHIPVFWVKTDNMKLYRKILNRPKTDKIDAKLIFDIASKFPDSLVPFVNNSYIISELRNLTRLYLKLNEDIARLKLRLYSYVSLYFPKLDFKLNKTYESLLKDFTVEEIATMPLEELFEYIAKVSRHIVSSKDLAEKIQSLAKNALRLSPNPSNTLRLSIVSTIELIQHYEKQINLVKKEISKLIKRIPNTLTTVKGIGDITAAGIIAEIGDINRFRNASALASYAGLVWNIKQSGNYKSENTQLTKKGNKYLRTYLVMAANSLRIYDPVFKDYYQRKYAQTTTHKHMRALILSARKLVNLVYYLLKNNVPYVPNR

SEQ ID NO: 439915 - protein, 423 aa, unidentified
MMKLKYSICCGLDVHKNVIVATIVTTNKDGISEYLQKSFSTINSDIQRFHNWLIENNCYHVCMESTGKYWIPIFNYLENDIDICLTHPKYVKAIKGKKTDKKDSKWIADLYKFDLVRCSFIPPKDFRQLRELARYRFKLVCMKSSEKNRIQNCMTISNVGIASVLSDPFGKTATEIISYLLEHTADSMDEKAVRKLIKKGAKSKSDEIIEAIKGYNIETDQAKKLELARGHLEYLDDMITQTEVELYVRIKPYYEFVEFVSTMPGMTELSSTIVLAETGVDMDIFDDAKHLCSWCGLSPANNESAGKKKSVRIAKAGDYLKPMMVQCALAAIKSKKQPYFAIKYGRIKKRRGHKKAIIAIARMMMVCIYHMVSEKKPFTPTDYEELMNPQNHVERVVLNENNVFAYLESLGYDSSKLVKRNDN

SEQ ID NO: 439916 - protein, 452 aa, unidentified
MHPASGSPFFDKSRGELRRHLCLSASTGTDSRKRQVGIRKETALQTDFQWYVGIAWASKKHRIYVMDAQGKRLGHRWIDHDGKGMKELVDWLHTFCGDHHEQMAVAIEVPHGALVETLVEQHFAVFSINPKQLDRFRDRYSPAGAKDDERDAMVLDDSLRTDRHCFRLVRLAPADILRLRELSRLEESLGKQRQRLENQLWDLARRYYPQLLQLCSTPDEPWLWDLWEAAPLPAQAAQLSMSKITRILKQHRIRRVDTAEVHQILAAPALRLAPGAAEAASEHALVLLPVLRLLHRQEAEVIQRVASLLEELATAEGESNEHRDAAILLSLPGVGRKVTATVLSEAYQAIAERDYHGFRQQGGVAPVTRRSGNKTVRLMRYACSYRLRNAMHHWAAGSMLKDPRSQQIYQQKRAAGKSHSRALRGLGDRLVDVLFSMLRHHAVFDPQRRAAA

SEQ ID NO: 439917 - protein, 345 aa, unidentified
MPIVGGLDIHRKQITFDYLDTGTGQVQRGQISPADREHLRGWLARFTGSDDVAFAVEGCTGWRYVVEELAAAGVAAHLAEPADTAFARGRKRHAKTDKTDSRHLRQLLADGRLPECWIPPARILECRALLELYHDLRAEHTAWVQRIHAVLFHHGAPALGAGTLRTGQGVAALQAVTASCLSPAGQLQISTALEVIEALEARMHAVRHQLLAAARHLTGAKVLAARLYGVGPVTALAMTCWLAGEGRFSSSRQAVRFAGLDVTVWSSDRKGPPGRLSRQGPPVLRWAVYEAGKTHARSSAPDHRYYAQVKDRCNGKRAALSEARKILRQAHHILAELGDDALSAA

SEQ ID NO: 439918 - protein, 321 aa, unidentified
METVTFEQVVIRGCGIDVHKKLLVATISGEGIKTETREFGTVTRSLTELKDWLLKNGVTHVAMESTGVYWKPVYHILEPSGLTVWIVNARHVKNVPGHKTDKQDSRWLCKLLLAGLLKPSYIPAREQREVRDLTRYRQKLIQDVASNKNRIIRILEDCNVKLSSVLSDTGGVTATRLIDKLCDEKTVTMADIDEVYTKKIEASKEEIFEACNGSITDHHIYLLGTIRENNRHIESLIQDLDDKIKDVLAPYDNALERLREIPGLNRKSVEDLIAEIGLDMNVFPSEKHLCSWVGVSPGNNESAGKKKVVALPTETNRPKQS

SEQ ID NO: 439919 - protein, 347 aa, unidentified
MSKHSVQAGDIAGLLRRFAQLKEKARARTGRDFPIIVIQEAGLDGFWIHRVLQSEGIESHVVDAASILTSRRRRRAKTDRIDGETLVRTLMAYKRGEPRVCSMARAPTPQEEDRRRVCRERRTLVGERVRHVNRIKGLLFAQGVFGYEPLRKGRRERLENLQTGDGRPLPVHLKAQIIRELDRLEILLEQVKAVEAERDALLKPATDEAASPAAMLARLKGIGPQTAAVLWSEGLFRRFDNRRQVAAYAGLAPTPWQSGSIDHEQGVSKAGNPRLRTTMVELAWLWLKNQPTSALSLWFHERVRLGGRMRKTIIVALARKLLIALWRYTTAGVVIEGAVMKAAPTTI

SEQ ID NO: 439920 - protein, 408 aa, unidentified
MEVVHPRCCGIDVHQASLAVCVSIKETRKAEKYQMCCGTTTADLLRLADWLDGHQVTHVAMEATGVYWKPVWHILEGQFELLLANPVQVQALRGRKTDLKDGERIADFLQHGLLEGSFVPPQPIQQLRDLTRSRTTLKQEQVRIGNRIRKVLEDANVKLSSVMSDVMGVSGQAMLRAMVRGESDPEVLAGLARKRLRGKIPVLRQAATGTLNEHHRFLLEQWLAHWDELKERIAKFDQRIEEQMRPFAEAVETWTSLPGIDRITAWTMVAEMGPNMRQFPTVAHAASWAGLCPGEEESAGKRKSGRTRRGNVWLRRGLTQAAWGASMKRGSYFKAFYQRLAARKGKKRAIVAVAHALLSTGYMLLWTGRKFSDLGEDYFDRLDRERLTKRLVKRLEKLGHQVSIQPAA

SEQ ID NO: 439921 - protein, 366 aa, unidentified
MKKNSTVVVGRKQILKQARLTIGLDLGDRTSYYCILDAAGNVIWERSVPTTLNGIRQGFGRMPRCRIALETGTHSPWVSRQLSEMGHEVIVAHARKVQLIGQSSRKDDQLDARTLARLARIDPGLLSPVKHRSAQAQIQLTVIRARAALVSTRTALVNAARGLTKSYGQRLKKCGTEQMNRDSSEGLSQELREALDPLLREIESLNERIAEYNRRIEEIAKEVHPEVARLKQVQGVGTLIALTYVLTLDDPHRFRRSRDVGCFLGLRPGRRNSGQSEPQLHISKEGDRYLRTLMVQGAHYILGPFGQDSDLRRWGLKLAERGGKNAKKRAVVAVARKLAVLLHKLWVSGEAYEPLRNNHKGARAVA

SEQ ID NO: 439922 - protein, 288 aa, unidentified
MRRIDNTAAAARRFAKASAKAGVWVILEASGGYDRLLRDALEATQARFSRVNPRQARDFARALGVIGKTDRIDATMLARMGATLDLEARAPKSELLYDLTELHVTRQGLIRDRTAQKNRLNTAILALIKRQQRARIDQIDALMAEIDPAMLDCIKEDETLPQRYDILSSIPGIGLVSACTILIEMPALATMDAKQVASLAGFAPMTRQSGEWKGHAHIQGGRAGLRRSLYMPARVATRFNVPLTEKYQKLIASGKAAKIAITAIMRKLIVLANALLRQNRKWTPNAPC

SEQ ID NO: 439923 - protein, 559 aa, unidentified
MELTELIHHRDHRESTEALLCDPTVADQTGGLDNEERNYMVYADDACASAVKTEGSLVLPSPTCSVVLDPVLNTVMTSAVHRLWRISFGRLPSLHGPGRRTDAERREVMPKKRAKAVSLPIVEPDAAGIDVGATQIFVAVPAERDPDPVRCFQTFTADLEKLADWLQQCRIRTVAMESTGVYWIPLFQILEKRKIDVRLVNAAHVKNVPGKKTDVEDCQWIQHLHACGLLRGSFRPADEICAIRSLWRHRDNLIELATIHLQHMQKALDQMNVQLHHVISDLAGTTGLAIVDAILSGERDPHTLAELRDWRIRASKETIMKSLVGDYREEHLFTLRQSLESYRHYQTQIQKVDAHVKQMMQTIPSKVAEGEKPPNEKNPRKTPWRNEPPQLRDDLYSAFGVDLTQVPGINTLTAQMIFTEIGPDFSRFPTAAAFCSWLRLCPNPKISGGQVLSSRTRPTKNRAALALRMGAQGLYHSQSYLGDYFRRMRARMGTPKAMTAAAHKLARIVYYMVSTRQEYDATFFQEQERRTQDRKRAKLQAQARELGFQLVPVATVSVP

SEQ ID NO: 439924 - protein, 456 aa, unidentified
MKTTRVKRARANKSNDKMITMPTVNPHAAGIDLGSRSHFVCVAQDNVKEFGVFTSDLHSIAKHLQSCGVKTVAIESTGFYWRPIYLLLLDYGFEVFLVNAAHLKNVKGHKTDVVDSRWLQLLHSIGLLSNSFQPDVLTHELRTYTRHRKNMIRDASHIISKMNKVLVLMNIQLHGVLRNITGESGLKVIRAILQGERDPKNLSSLVSLRVKAKREDIEKALTGEFRKEYLFELDQCFQLYNFYWQKIDEADKQIEVWLKEYVSNMPPDDGYKRPKNKNRGTNDPKFNIGKYVHQISGGIELLDINGVGSNTILTLASETGLDMSKFKTAKHFASWLGFAPNRKVTGGREISSHTRKKTNPLAKVIRDAANSTGNSKSKLGDSFRHLAYRKGRTVAIGATARKIAVIIYKMLTEGKPYCYEYAQEQTEYLKASKLKNIIKTMDKFNISKAELQMAWS

SEQ ID NO: 439925 - protein, 414 aa, unidentified
MEGSYPIAGIDVHKSMLAVVVSDVAREGEFQFERRKFGATISELKELTTWLVGQGVREAVMESTAQYWKPVWQQLEGHCELFLAQAHSNRAPRGRKRDFADAERLLRRHVAGELIVSFVPHAEQRLWRTMTRSKHPLTRDRVRLQNQIESLLEEARIKLSGWVSDLLGVSSRRILQALARGETDGAKLAALADPGLRATSEQLQDALSAAATLGALHRQVLGLFLERLALIEKHREILDQSIAGALHRYHEAVERLAEVPGYGIDSAHPVIAEVGAGAESFPSPEQLSSWVGTCPGREESAEVSNNNRSPKGNRMMRRVLTLVANAAVKSKGSVFQNLYRKWVVRMGHNKAIWAVAHRLCRLTWKILHQGVRYVEFGTRANPQAVKKRANKLLRDLKALGYQVQITPLQPEATA

SEQ ID NO: 439926 - protein, 341 aa, unidentified
MEQKLSVRGIDLAKQVFHLVGMDAHGTMLVRKRLYRAQMMAFIAQLPPTLIGMEACGGAHYWARRFREHGHEVRLMAPQFVTPYRKANKNDMRDAEAIAEAMTRPTMRFVPVKSVAQQDLQALHRVRERLMKARTALINETRGLLHEYGIIVPQGAATFRQHVLEKLTTEDAKLTPHSLALFRQLLEELAALEARVATYDAQLAQVAQTHPVCQRLMTIPGLGELTATALVAAVSDATQFKNGRQFAAWLGLVPRQHSTGGKSRLLGISKHGDSYLRKLLVHGARSCLRWVGRKRDRRSQWAQSLMERRGWNKAAVALANKNARVAWALMGTEQVYRVAEA

SEQ ID NO: 439927 - protein, 418 aa, unidentified
MYYLGIDVSKKKSDYLILDEKGERFQRAFSLENSREDFQTLARKLEELNLTPENLLSGLEATGSLWENLYSFLTEKGYKVILLNPYQTRKYHQALRQKAKTDRVDALVIADLLRSNRYLSSSVPEEETEALRELVKLQYQLEGEKKRLQRRILSLLFVVFPEYEKTALKKVFGIATRKVLEKWPTAKDLAIAKPKQIEKLVRSIKGNNFNISAIEKSIETAKNSIYSGRAREVRSFTIRLLLSQLDRTLSSLKKIKDEIEKILSPRDESGSFPGDNVLSIPGVGKGTLATFLAIAGQGGSFFSSAKKVIGYLGFYPQIYQSGEKRRDNVISHQGPNYARQALYMAAVSSIRHNQEMRTLYNKKVSQGKSHKQALIYVAKKIAQMMLALLKSGKSYQPERVFVSPTALPYFRERIPVCV

SEQ ID NO: 439928 - protein, 427 aa, unidentified
MNYNQNRKISQITPSTLIVGIDIAKDKHVARAQDDRGYEFGKRLVFDNRIHGFQQLLDWVFRLQKDNEKTNVIFGAEPTGHFWLGLAYYLIAKDNDFVLVNPMHVKKSKELDDNSPTKNDTKDARVIAQLVKDGRYSVPNLLQGIYAELREGIKLRDQLTKQLMIIEGRIQNSIQRYFPEFDDVFKEWDGKTAFFTLRHFPFPSDIRDMTPEEVLAQWKTVVKAGVGIKRARNLVDKANKSIGIEIGLRFARKELNSLLEQYRLYHDQLEELEQEIADLMEDIPGAKEMIAIKGLGATTVATFFSEVGDITKYKHPQQLVNMAGLSLREHSSGKFKGQTKITKRGRKKLRKALYLAVRPLVAKNPTFKALHSHYTTRPDRPLKKQQSLIALCGKLVRVLFAIGQKQCEFDGSKLLQGISQSDSLQAA

SEQ ID NO: 439929 - protein, 350 aa, unidentified
MRFIIGCDFHPGYQRVAVLDGKTGELQEKQLVHERKEEVRKFYAGLSEAAEVGIEASGQSQWFEQLLRELGHCVGMGDAGKIRKEDGRKQKHDRRDAKLIVRLLREQRFPEIWVPTPEERDLRQMLLHRAKLVRLRTQVKNQLQALALNQGLQCKRKLWTAAGRRQLEALPMMPWAGRRRRELLQLLEQLQAPIAELDVVVDQEANTRAEARRLMTHPGVGPLAGLGFVLTIGPVERFAGSKQISSYLGLIPSEWSSGQRGQRLGHISKQGNSFLRGVLVEAAQSAVRYEPQLRREYQRLAQKKNRAIAKVAMARKLAVRLYWMLRRNLDYAQLVRGSHAGEPESSCGRG

SEQ ID NO: 439930 - protein, 344 aa, unidentified
MNSIDYIGFDIHKKTISFCAKAQDGQILDEGTITARRYDLEAWAKRRARPWVGAMEATLFTGWIYDYLKPLAQELKVAHPPMLKAITASKKKNDKVDARKIADLLRCNLLPECYMAPSPVRAMRRVLRYRNLVVRQATRMKNRISGLLMETGTPYNKQKLHGKAYFIELLGSLQQMPDAVVELLQLSRGQLELFDSIQKRLLKELHQRPELSQRVERLQTIPSVGEILALTWALEIGEVSRFSAIGEACSYCGLTSAERNSAGVEQRGPISKQRNKHLQTILIEAAKLAPRFNPQLAVVHQRELQRGNRNRATLAVARKLVAYLMAVDKSGKPFQLRTSAGEQV

SEQ ID NO: 439931 - protein, 391 aa, unidentified
MIYVGIDVAKDKHDCFITNSNGEVLFKAFTISNNQDGFNDLYQRIESVMEDITKVKVGLEATGHYNYNLLGYLIDKGLTTYVINPLHTNLYRKSLSLRLTKTDKVDARTIAYMLMSDVNLKSYSDTSYHNEELKSLTRYRFDKVKERAKLKTSVSRLVCILFPELEKLVPTLHMASVYALLSEFPGAKHIAGAHLTRLTNLLSDASKGRYGKDTAITFREAARASIGSNMPAKSLELKHTIKLILELGSEIDEIENEIKFIMDEINSPILSIPGINYRMGAMIIAEIGDFSRFDSPDKILAYSGFSPSTYQSGQLDSAYSHMEKRGSKYLRYALYNAAKYVCHWDSTFAGYLAKKRAEGKHYNIAISHAVKKLVRVIYHLVKSNQQYIKVA

SEQ ID NO: 439932 - protein, 419 aa, unidentified
MKVEYGNVAEDAVWAGVDTHAATNWLSVVDARGSELFSGEFATDPEGYRKLCDEIRRLGSPVAAGVECTGTYGAGLVRAMAAYDIACYEVITPGRPRRGPGCDKDDAADALRAAKQALSGENLAVPKSQDGWVEEVRNMTVAREELVKQCTSLANLALATVRKGPDEIRARLERLGTAKMMGVLAGWDEAEADPICDAVMFSLAALGRVWAEARRSARLLEERIERTLKAGNPALASMYGCGPISAAMLAIAAGDNPERMGSEASFAALCGVSPIRASSGKVERHRLNRGGNRNANKALHIIAMHRMRTDPRTTEYVERRRAEGLSDREIRRCVKRYIAREAYRLIMHPYDVPIEGKGPEMRAERIASGVSQKDAAIALGVTASTLCDLELGHHQFRELALRYRQWIDDGFPLEAGIAS

SEQ ID NO: 439933 - protein, 323 aa, unidentified
MSKNTNYFGIDISKDVFDVVDMKSKHFQFSNNPKGFKDFLKLLDRSSYCVMEATGYYHIQLAYYLLENNIKLSVENPLSIKRFIQMKLSKIKTDKSDAKMICLYAQSVDLRLWVGNTKSQRECLQITRALSIYTKQNTALKNKIHGENTLDNPSKLVVRSLKRSLKNLKKEMELLEAKLLELIRVDYQNLLTRLETIPGIGRKTAIMLLVLTDGFNRFEHASQLCSYAGLTPIIRQSGSSVNARPRISKIGNQKLRNLLFMCSFTASIHNKSCREIYQRITNKGKSKKLALMAVCNKLLKQSFAIAKSELIYDESYRSVLVKQ

SEQ ID NO: 439934 - protein, 421 aa, unidentified
MNKNDDSRLAGFRQLKREIRGSTRHLVVGIDIAKERHHAFFGTPSGRTLLHRLVFDNNKEGFEKLCFQAEALKTQKGLADLVFGVEPTADYHKPLGEYLIQKGHTVVLVAGTAVKKNRELLDGRWDKNDTKDAANVADLITQGKCLFYDLPSMDLRELRSLLSLKRRLKKSEQGYKVRIRNHLIAQYFPEMDDYFTYKEGPHIVRRCLDPKKLAGLDFQEFARMVPSGNGKQKERLGDIYAKASSSIGCSAHPSVGFEASILLDGLKGLRLTMEETDKRIAEVCMRFPEYPFLLSIPGFGPDVSAQVLGALGDPYRFENHRQVLKMAGLDLSASQSGKRTATTPVISKRGKADLRYGLYHSAVVASTRNPHFMRYFTDKVKGRGKEKGITTKMRTKLAAKLLVIAWTLMKKKEVFDPDCMK

SEQ ID NO: 439935 - protein, 347 aa, unidentified
MIIIGCDFHSRFEQIAMLNTETGELVERKLDHESGEARTFYEGLKEPVLVGIEATGYTRWFAEMLAELGHELVVGEAGKIRALETRKQKHDRRDAEHILNLLVRGDFPKIWLPPAEERDVRVLVEHRHQLVELRTRAKNGLQAMALSYGLRRRGRLWSKAGQEELEKIPLREGMGRRRQDLVQLVRQLGVWIKELDQRIAQEVERREDAQRLMTHPGVGAQTALATVLVLGPVERFPDDRHLTSYLGLIPQEDSSAGRQRFGHLTKQGNRLMRFLLVEAAGIASRYDPRLQRAYRRLAFRKGAAVARVAMARKLAIRLYIMLRDGIDYQEFCRRGSHAGMLVSKPLV

SEQ ID NO: 439936 - protein, 394 aa, unidentified
MIYVGIDVAKDKHDCFIVNSDGEVLYDVFTIQNNMDGFEDLLFKIKTVSKNPDKVRVGLEATGHYNCNLLGFLKNKGMTTIVINPLYTSLSRKSTSLRKTKTDKVDARTIASIIMSDVGLEPYSDTLYHNEDLKSLSRYRFDKVSDRAKLKQSVSRLVCILFPELEKLVSTIHTKAVYELLSEFPGAHQVASANLKHLTSLLENASKGHFRRDKANEIREAARRSISTYLPAKSLELRHTIKLIRELTSEIDEIESEIKKIMDAIDSPILSVPGISYGIGSMIVSEIGDFSRFDSPDKILAYAGCSPTTYQSGQLYSSHAKMEKRGSKYLRWALINAASYVCNWEPTFGAYLEKKRSEGKHYYVALSHAAKKLVRLLYHLEMTGEKYKPVPVFS

SEQ ID NO: 439937 - protein, 323 aa, unidentified
MTRIICGVDISSVSLEARIGREGACGSFPNNGEGISALASFCQTHQVDLVAMEATGGYEQQAFAGLSGQGLPVAVLNPRSVRKFAESMGRLEKTDAIDAAMIAWFAETSQSPPLCLAPASQQHLRALVTRLRQLTEVRTAQLNQQRLVTDQAVQASFDQLLGVIAGQIDTLQRSIAGLIDADPLWSELNHAFRTIKGVADRTVARIMAEMPEIGVLSNKTISKLAGVAPLARDSGNHQGKRSVRGGRATVREILFIVASVVGRYEPDFIAFQQRLSAAGKPRKVIRIALAHKLLIRLNAKAREVRQRQSVLQQAPMALPARSL

SEQ ID NO: 439938 - protein, 343 aa, unidentified
MQTVTTIGLDIAKSVFQVHGIDAAGQVVIRRQLKRRYVLAFFQKLPPCLIGIEACASSHHWSRELQALGHTVRLMPPAYVKPYIKRQKNDATDAEAICEAVTRANMRFVVTKTPEQQSGLVLHRARHLFIRQQTAVINAIRAHLAEFGIIAPVGRHGVEELLNVVADPNDKRVPEIARACLMAFGAQLRRLKEQILEFDRMIRAWHRSSETSRRLDDCPGVGPVLATALVATVADPKSFRSGRNFSAWIGLVPKQHSSGGKNRLGSISKQGDCYLRGLFVAGALAVIRYAKIHGTKHRPWLTALLARRPTEVAAIALANKIARMAWAMMAKGERYKEPIALAA

SEQ ID NO: 439939 - protein, 343 aa, unidentified
MYFIGLDVHKKTISYCVKDAAGRVYQEGKIGSTRWELDEWIRTMPQPRTIAMEATIFTGWIYDYLLPHAEKVKVAHPLMLRAIAAAKKKNDRIDASKIADCLRCDFLPECHMASTEIRDRRRTLRYRSLVIKQMVQMKNRVSGLLMETGVSYNKQRLHKVGYFAELMTANKDVHESIRPLLRLSREMISRSQKLDYALISSLERDPLLKERLRRLRTVPGVGPITALTWALEIGDFTRFSSIKQAISYCGLCGDEKSSANKVMRMPISKQRNKHIQRVLIEAAKLAPRESPELALIRARELERGNPNRATLAVARKMVSYMLAVERRKQDFVPAEEFSRTAAA

SEQ ID NO: 439940 - protein, 349 aa, unidentified
MNFYTNTHPYYCGIDLHTRLLYVCIIDNENNILVHEKIDDSPDKLLALLKPYLGNIVVGVECMHCWYWVSDFCEEHNIDFILGHALYMKAIHAGKTKNDKIDALKIAKLMRGGNFPLAHAYSKEHRSIRDALRRRTHIMRMSAQLKAHVASTVSQYNLPALETRLDLRNSPDREKMRHFFPDEAVQKSMDLNLNIIETMVSELYKIEHYVKTQAQTHCATDLHILKSFPGIGKILALTILYEVGDIKRFPSVQKFASYSRLVKCKAESAGKTHGTQGNKIGNAHLKWAFSEAAVLYLKGNDNAKRYLAKLQKRMSKAKALSALAHKIGRCTYFMLKNQQVFDEERFLNG

SEQ ID NO: 439941 - protein, 341 aa, unidentified
MKVSTLGIDLAKNVFQLHGVGCNGQTVLKKKLTRDKFLPFLMQLEPCLIGMEACASSHHFARVLRQYGHEVKLIPPQYVKPYVKTNKTDAADAEAICEAVARPNMRFVQIKTAEQQAILVLHTERNILIRERTACANSMRAILAEFGIIMPRTLSQLYKKIPEILEEYDNELSPFVRCSVARQLEHLQGVEDQITLIEQELSRWAKTQPACQRVMKVPGVGLMTATYLVASVGNGQQFHSAKQFAAWLGLVPREFSSGGKQRLGRISKRGDRYFRYLLVHGARAVAAVIERHKDNMPWLYRLLNKKAYNVAVVAQANKTARILWSMLVHHTEYTNLIRGLR

SEQ ID NO: 439942 - protein, 331 aa, unidentified
MEKNLFIGIDVSKLVLDATALFPSNEHFHRQFKNSKAGFNQLLKWVGKLNAKEGHGLVFGFEDTGVYSVGLGRFLSEKGLRFVSENAYRIRRSMGIVRGKDDQADSLMIARYLKRNLDELKFGHAAPDLLLELQQLSSQRERLLKEKSAHKTRIKEMRVLEGCLDMRFLLKVEKEMVALLDRKLREVQAEINRRIAAQRELREQKELLCSVPGVGEQTANQMLVLTRGFTRFPCWRKFSCYAGLAPFRYSSGTSVKGRTKVSKIANKKIKALLTMGALTSIKAGNEYRSYYERKTAEGKHPMAVLNAIKNKIVSRMFAVIERNMPYVCLQS

SEQ ID NO: 439943 - protein, 343 aa, unidentified
MQTITTIGLDIAKSVFQVHGVDAGGQVIVRRQLKRSYVLTFFQKLSPCLVGIEACGSAHHWSRELQALGHTVRLIPPAYVKPYVKRQKNDAADAEAICEAVTRANMRFVPTKTPEQQSSLVLHRTRHLFIRQQTAVINAIRAHLAEFGIVAPVGRHGVEELLNVVTDPNDRRVPEMARACLSAFGAQLRRIQEQVREFDRLIRAWHRSDEMSMRLDDVPGVGPVLATAVVATVADPKSFRSGRNFSAWIGIVPKQHSSGGKNRLGNISKQGDRYLRGLFVAGALAVIRYAKIHGTKHRPWLTASLARRPTKVAAIALANKLARMVWAMMARGERYKEPVALAA

SEQ ID NO: 439944 - protein, 418 aa, unidentified
MVSQVTKFSAHIGIDWADKKHDYYIQGEKQSNREFGILTHSPDKINDWVQSLHQRFGGQLAISIELTKGPIVYALQKYNFIKLFPINPLLLAKYREAFTPSKAKDDPTDAELALDLMLNYPNKIKPLLMQGEQIRKLMYLVEQRRRLVEDRRRFGNRLIYALKQYFPQLLEWFSHRDSELFCQFINRWPSLQKLKRARADTIRNFFRKASARSVPLIEKRIAAIKEVQYITEDPAIIESHQLFATSVTAQIIITVRAIKVFDDEISKLFHTLPDAELFESLPSAGPCMAPRLLVAFGENRDRFDNAFQVQMYAGVAPVTVRSGQKKWVHWRWQCSKFLRQSFIEWISKTVYSSYWAGLYYAQQRQKGNSHQSSIRALAFKWIRILFRCWKTRKIYNEAKYLKSLRERKSPLLLLETVD

SEQ ID NO: 439945 - protein, 376 aa, unidentified
MYTPFEVQHTREGMSELVSLLRGSGEEVRVVLESTGSYHCPVVAALLENGIFVSVVNSLRMKRFCSQSIRRVKTDQIDAMQIALYGLAYWQELQPTRLPENTYRELQLLARQYYQMTSLLIKAKVDFNALCDQVLPGMQELMNDHAGRHKLSDFVLRYHHTAHILKMGETRFRKDYCKWAEKKGYRNHERMAALIFATAQNGIPVLPNAPSTQIVITEAIRVLHTVEASRDAILTQMQALAKTLPEYSLVREMPCIGDTLAPRLIAEIGDVRRFHSKRALIAYAGIDAPPYQSGKFCANNRHISKRGNRYLRKTGYEVMQSYVMHKPANDPIFTFIEKKRSEGKSGKLAMVAGLNKFLRVYYGKVTELYRSLPAIE

SEQ ID NO: 439946 - protein, 514 aa, unidentified
MSEGTAQPPFSRLCPRLLRKHSAWLIRHIPLTQKFHPQPLAPARMADWVHAHCARVRSPYAAQDKPFASDFTNPYRNGGDIMVKINYMSTLFVGIDVSSKTNSVYAMDFEENKYLSTSFGNNQPGADELVNRIAACMQKHKNLDTLLIVLESTSVYSVHISNFLASSEVLMPYKPYVFCVNPKTTANYRKSYIGMEKTDPTDAYLIADFGRVGRTKKLEPWRGGQFIALKRLTRHRMHLSECITREKTYMVSNLYLKFSELQLLEGDDKPFGNLYGATSSAVLTEILSPQEIIDMPEEDLLAFLAQRSRNRICDLSKTSELLRKAARDSYRLDKCMYEPLNISLASSFNCIQAYQKEIRLIEQAIDKCIKGMNPNALIILQSIPGIGPVWASGILSEIGDITAFHSSDALAKYAGLYWPKGDSGDFISEDNQMSKAGNPYLRYYLGEAANSVRKHIPEYADFYARKYAEVSKHQHKRALALTSRKFVRLVFGLLAKNQLYTGEKLDAEYNIEPN

SEQ ID NO: 439947 - protein, 294 aa, unidentified
MHYIGLDVHKKTISYCVKNAAGGVYQEGKIGSTRRELDCWIRTMPQPRMIGMEATIFTGWIYDHLPPHAEKVKVAHPLMLRAIAAAKKKNDKIDAGKIADCLRCDFLPECHMASTEIRIRRRTLRYRNLLIKQMVQMKNRVSGLLMETGVSYNKQRLHKVGYFAELMSTNEEVNESIRPLLKLSREMICHSQKLDYALVGSLERDPLLKERLRRLRTVPRVGAITALTWALEIGDVTRFTSIKQAISYCGLCGDEKSSADKVMRMPISKQRNKHIQRVLIEQPHWLCGSAMNSP

SEQ ID NO: 439948 - protein, 343 aa, unidentified
MRIVRVGVDLAKDVFQLHGVDRNDKKVWQRKLNRNEWIKVLLEKIEPGCVIGMEACGGAHHWARLLQSKGFVVKLIAPQFVKPYVKSNKNDVNDAEAICEAMSRPHMRFVNIKNVEQQDIQATHRIRAELMDQRKAKSNQIRGLVSEYGLVAPREICHLRSAIPCWLEELDNGLTDRFRRLLHDVWHDLLILDQRIKALDQEIEALAANDPVAKRLQQLRGVGPMIATALLATVGDASQFSNGRQMAASLGLTPKQMSSRGKSKLLGISKRGDSYVRCLLVHGARSMIQMAKHKEDHLSLWVMRISNSRHPNIAAVALANKTVRMAWAMIRKGMDYQPELAAA

SEQ ID NO: 439949 - protein, 351 aa, unidentified
MPRTTTVHAVTAIGIDMGKNTLHMIGLDARGAIVLREKVSRGRITSRLANLSPCLIGIEAGMATHYVARELTALGHDVKQVPPAYAKPFRQRHKNDFRDAHAVAEAVQRPTTRFVPAKTNEQLDLQALHRVRSRLVSERTAVINQIRGFLLERGIIVRQGLRFLRQALPDILAKRTDVLSPRMVRIVADLTSDWRQLDERIEVVTDEIETLAKSDGSCRRVMTVPGIGPIISSAMVAAIGSGTAFARGRDFSAWIGLVPKQMSTGDRTILGRITKRGNGYLRTLFVQAARVILLRPASWPKHGFGVWLARAAQRLHRNVLAAALANKLARIAWTVLAQERNYEARIMKAAA

SEQ ID NO: 439950 - protein, 412 aa, unidentified
MAQDQCVVIGGVDTHKDLHVAAVVDERGKILDTAEFETTAKGYRLLVEWMVSFGELERVGVEGTGAYGAGLARHLADEGVSVVEVNRPNRTMRRRRGKSDTVDAEAAARAALNGEATVCPKAGAGIAESIRVLRVAFTSARNSRTRAALQVRDLIITAPHQLREVLVAQNTAERVARCARFRLSGDPAEPLEATKLALRTLARRYEILSEEMAEVEHTIDELTARANPALRGAKGVGVDVAAILLVAAGNNPDRLHSESAFAALCGVSPIEASSGKTVRHRLNRSGNRQANHALWRIVMVRLSHGDEATTSYIARRRAQGKSQRDAVRCLKRYVAREVYRLLVDPQVVPDGADLRCARKAAALSQGAVARALGTAVMTISRLERAQEHNTVLALRYEQWLSGLSPQTTSRAA

SEQ ID NO: 439951 - protein, 392 aa, unidentified
MSYIGIDVSKDKHDCFCCNDNLQPVFQFQFNNDSIGFNQLFEAIKSLDSPFDNIKIALEATGHYSYNITSFILDNSLPLAIINPLHSNLFRKSLSLRKTKTDKVDACVLARMLIAYPDLKFSTSLDDNDIILSELKSLTRFRLSLVKDLSKLKTSLSRIINIVFPEIEKVFSSTNSLYELLYNFPSAKEIANAHLTKLTNVLIKASKGHFSKEKAVQIKELAQNTVGNSSYALTLELKHTIKLINEYNSSIDKIDKEITTIMDKIASPITSIPGIGITLASIIIAEIGNFDNFDSPDKILAFAGMSPTIYQSGKYVASSAKMEKRGSKALRYALYNAARLTSIYCPVFKEHLARKRSQGKHFNVAISHVVKKLVRVIYHLQTKNELFKNVIN

SEQ ID NO: 439952 - protein, 321 aa, unidentified
MTYVGIDVSKATFVVAYSSAKSSETKTFKNTTKGIREFIRTISPEENHCVLEATGNYSMLLVYLLSKAGFTVCMENPLKIKNFARVMLSVVKTDEIDARLIALYGERMQPAPFKLRSDSLLLLKQKRTVLRQLKKQLTANRNLEGSLKVLPFIDSKCKKVLEKTIKFLEKQIEEMEEELTSLAEIEYKKQMDLLTSIKGIGATLAAALIIATGGFTYFDNAKQLTRYLGLSPTYQQSGTSVNVKGHINRNGDAYLRSQLYIGAMASLRCNTECKACFERLRSNGKPGKVAIVAVANKLIRQAFAVVAHEKKYIDGYKSVKP

SEQ ID NO: 439953 - protein, 349 aa, unidentified
MKKIVRQVLGIDVAQKELVVCLGRMFDMDWALELYSHRTFPNTDKGFAAMVLWVKKLTVENIPVRYVMEATGVYHEALAYFLEGKGHDVSVVLPNKISNYFRTLDVKTITDKTASEAIARFGLERKLDNWHCPKEIFRGLKQLTRERDQIVEDRTISKNQLHAEETQAFPNKKSVARVKARIKLLNKQEAEIKVEIAVLVKGEIEVAKSVALICTIPGVGLLTAVTVLAETNGFELIRSKRQLTSYAGLDVQEKQSGTSVKGKAKISKKGNRHLRKALHMPALSAIRNEERFTTIFVRLVSKHGVKMKAAVAVQRKLLELIYTLYKTNKPYDKDFLKNETGKEEQKMAA

SEQ ID NO: 439954 - protein, 397 aa, unidentified
MYIVGIDIAKRKHEAAVIDGEGAVIIKPFSFTNNCSGYNRLLAMLTKAKLPLDEVSFAMEATGHYWLALFTRLQKEGFRVQVINPVQTNSIRSFYIRQAKTDPRDALLIAEVIRFGHFSESTLHPENIYELRELCRGRHAIVSMQADVKRKVVALLDQVFPEYETAFTNLFGDTSMAILQTCPTPKELSEMPLEELCHLIEVSSRKRFRMVKAQELQELARNSFGFAMAGDVFSTMIRLYAKHLDFLKQQVREMDRKIAEIMDTLDTPITTITGIGPTLGAYILSEIGDINRFSSSAKLAAYAGIDPTMRQSGEYNGVRNRMSKRGSPYLRHAIWLAASSAVLHDPALKLYFQKKRDEGKPYMASVGHACRKMVSIIYAVMRDNKAYTPCIPNEISA

SEQ ID NO: 439955 - protein, 344 aa, unidentified
MEHYAGIDVSLESASLCVVDATGRIVREAKMASEPEVLIHWFRALGLAVARIGLEAGPLSQWLYAGMREAGLPVELLETRHVRDAFKAMPVKTDRKDARGIAQLMRLGWFRPVHCKSLPAQEVRALLTARKLLQTKNHDVEMSLRGVLRGFGLKVGPTTPRTFVSRIRELAAGHATLSTVAEALLAARGTLFEQWQQLEKRLRSLAREDRRVRLLMTAPGVGAIVGLTYASAIDDPGRFRSSKAVGAHFGLTPKKYQSGETDVTGRISKIGDGGVRTVLYEAANVILTRPVKGSTLKSWGMRLAARSGMRKAKVALARKLAVVLHRMLADGTTFLADKAAAAAR

SEQ ID NO: 439956 - protein, 355 aa, unidentified
MSIVAHSHPFVVGVDTHARNHVYAILAARTGELIDTRDFATTPAGIGRAIAWVARRTEADADTLWVIEGAASYGAVLAGAVAAAGFPVAEAPRMDAKKRRGVGKSDALDARQIAAVALPLPLEKLRRPRVNDGVRQALRILTTARDAMSTERTRSVNALTALLRTHVLGLDARKPLSNQQITDVSRWRSREEELSLTIARAEAVRLAKRVLELDDQLKANEQQLTELVQISEAAPLLQETGFGPVTAATCLTAWSHHGRVRNEAAYASLAGVNPIPASSGNTVRHRLNRGGDRSLNRALHMVALTKMVHDPETRKYVEKRRAEGRTNKEIRRCIKRYLARRVHRTLNTSCTTDTA

SEQ ID NO: 439957 - protein, 361 aa, unidentified
MKQKNLSKGCFANKKLFIGIDVHKIRWVVTVRTYDLELKTFSMSPDAEVLEKFLKDNYKDALLHIVYECCFSGFWIYDYFHQRGYDIIVTPTNRIYRDGSIVKTDKIDSRKLAFQHSRELLRNVKVPKMKIREYRSIFKIYDKEKMREGQILRQIRCILEVKNHPLKWERWNKEFIEKLKGEIFQEDIFNRKFQQLIKEYEYVKEQIKDTENRIKEIGEDKELQEKIKRIEKINGIGIISAVRLVVYLFDMDGRFETGEKLVHYLGLTPGEHSSGENTIRSRTGLIGNKKLRSIIIQLAWVAVRKDGNLLDKFERVYKRSGSKQKAIVAVSRKLMMKVHIIIKKEEDYEINMPASKSGRAA

SEQ ID NO: 439958 - protein, 344 aa, unidentified
MTIVEDRPAITGGVDTHSEVHVAAALDPVGGLLGTREFPATAAGYASLLGWLGKFGDVALVGVEGTGSYGAGLARYLAARGVRVVEVDRADRQDRRRKGKSDPLDAISAARAAQSGRAAGEPKGRDGAVEAIRALMVAKRSARNERTQAINQARALILTGPDELRARFARKRAAALAEAIAALRPRPGDAAGYAVRTALRELGRRVEFLDAQIERLDDLIVPLVAVRAAGLLSLYGIGPDTAAMLLIAAGDHPGRLRSEAAWAHMCAVAPIPASSGKTRRHRLNRGGNREASHALWRIVITRMSAHPATRAYVKRRTAEGLSKKDIIRCLKRYVAREVYPYLRG

SEQ ID NO: 439959 - protein, 353 aa, unidentified
MKYVGIDWAYRKAQWCALAPGGEIAGEGRIPADRDGLARLVLELGDEVKACLEMMSGALWVRDQLVACGWQVEVADARKVKTVAPLAAKTDKVDARLLAELSRRELVPALWLPSLDERALRERLRRRMHLVRLRTSAKGRIFGLQTQWGVRVSLQRLRRADGMALLEHAGVPEVWRRSVSECLSVIDFLDARIAPLDAELKPFAHADPRAVLLDTIPGVAELLALTIAVEIGEVSRFASPEKLVSYGRLAPRVHQSGQARPRTGPLSKSGSRLLAWAAVEAAQQAWRETNPRHDLYADVARRSRNHNSAKAAVARKILIAAWHMLSRNQPFKPAPRTTRGSSVPASSRLALAA

SEQ ID NO: 439960 - protein, 407 aa, unidentified
MISIGIDISKDKITVCALEEGSKIIWKPFDVYLNKSKVEELIEKLEKIKEEVKITMEATGKYHLPILYELKERGYFVAVINPLKMKQYCRALNFRKAKNDKIDAKQIAEYGLMYWKELEEYKVDEENYRVLKELNRSYQHYMDLRINQMNYIDQTIHQTFPGIKKLIPHNSGDFSKDKLIDFLEKWWHKDLVLEKTEEEFVEEYKTWAKEKRYHPNVNKAKTIYKIAEDSISTQPSHNSKIETNIREGINLIKQINQILKNILSQMIEISEPLEEYQEAKKFSGISEKLAVQIVAEFGNLSKFKNKKSLISFIGIDAPPYESGNFKADQRKISKRGNAILRKVGYQAMKCMMSAKNPENEIYKYMIKKEKEGKAKKVCKFAGLNKFLRIYYTRVMESKVEKKELKVA

SEQ ID NO: 439961 - protein, 388 aa, unidentified
MALIEVVINRHLIGATFRMKPKLSDYELSTIAYHRDTLGVNPVAVDVASRVMQVCYFDSDKKLLKNFQLTRSKFFEFVEKASEPLLFGIEACGSCNYLSRYFESKGHQCRIIPASKVKAFLKLDKNDKIDASGIFKAMLSSVESIPAKSLENQLLMNLFTIRDQLVKQHTQCINAAHGILYEHGIVAGSAGVATSAKITRGFTDAQESFEHDPMASAHFSVIKNAVFNILDNLKEQIETINKYLLKYGSSNNTCLNLATIPGVGIQTAVALNAAMGDPERFHGAREFAAYVGVAPIITGTGGKTTVLGIRKSGIRSLKKSLYMGAMVYLSNAMKNGTESSWVKDRLKTKRKKVIICAIMNRLARIAYAVAKNGETFDETRCNLIKKLR

SEQ ID NO: 439962 - protein, 422 aa, unidentified
MLEETRDSDQIIQRVAALDVGKAELTCCVRVPGQGSSGRRLQEVRTYQTMTRWLLVMTDRLAELGVTRVVMEATSDYWKGVHYLLEAHGFEVWLVNARDVKHLPGRPKTDTLDAVWLCKLAERQMLRPSFVPPRPIRQLRDVARYRADLVAARTAEKQRVEKLLEDAQIKLSVVASDSFGVSGRAMLAALIAGERDPKVLAQLARTRLRAKLGPLAEAFTGFFSDQHAFLLAKMLARVDGLDADLAELDAKLAELIAPFAEAVDRLDEIPGIGQTAAQLLIAELGTDMTRFPTAGHLVSWAKFAPGVSESAGKRKGRGSTGHGNPYLARVLGEAAVAASKTDTFLGERYRRIARRRGKQRAIVAVGRSILVIVWHLLADSEAHFHDLGAGFYDTRLNAERTKRNHIRQLEALGYKVTLEPAA

SEQ ID NO: 439963 - protein, 412 aa, unidentified
MEVLHPHCAGLDVHKASVVACVRHMMGGAVKREVRSVQTTTKGLIALSQWLSAEDCTHIVMEATGVYWKPVWHILSDGEFALVLANAAHVKNVPGRKTDVNDATWLAELLAHGLVRGSFVPDEPTQEMRNLLRTRKQLVRERSRHIQRLQKTLEDANIKLDSVISDILGRSGRRMIEALIAGETDPNALAALAHRRIKASPAELEAALRGRVTRHHRFLLGLHLQQIDAIDAAIDQIDPEVDALVEPFHAAVQLLTTIPGIDALSACVILAEIGRDMSRFPTAGHLISWAGLCPKNDESAGKRRSTRMRKGAPWLKTTLVQCASAAARKKASYLQAQFHRLRARRGAKKAIGAVAASILTAAYHMLKNGTLYEDLGPAHFDKRAQANQVHRLIDRLRNLGFAVQITPMEAAA

SEQ ID NO: 439964 - protein, 357 aa, unidentified
MRKIQKYILKEKEIFIGLEDSKRSWKLCVRSDKVVVHETSMPAKYENLRNYFRNKFPNCEITVLYEAGFRGFGLYDQLVSDGWECIVTPPHTVTEEKCNKKKNDRIDCRRMAKNLENGDYKSCHVPSKERREDRQISRIYGQIQSDIVRECNRIRRALEFHGLDEQFAPGRWTQGKYNKLAGMIDKMEISESLKFALNIMFGELKQLRQLRKDVLKQLRMLAKSERYKETIKILKSAPGIGPLTSIRLALEWGDLSRFNRKEGFSSFLGLVPSEYSTGEVEHKGHITKQGNRNVRSWLVESSWVAIRYDPVLLKKYQGVFSRCGSKKIAIVAVAHKLAIRLRALLLTRQEYVKGVIE

SEQ ID NO: 439965 - protein, 402 aa, unidentified
MNFFVGLDWASQAHAVCVLDATGQVCWQGSVEHSADGLAELLRRLARFGPPASLPVALERPSGLIVDTLMDAGYRVVPIHPNALKASRPRYSAAGGKSDPGDAFILGDLLRTDGHRFRPLQPLSDETRALRALVRGRDDLVAERVALANQLRALLDRFWPGAAAIFADVDSPIALAFLSRYPTPHSAERLGEKRLARFLVQHAYCGRRPAAELLARLRSAPITQTSELEAEASGEIVHALVTVLLPLVTQIQQLSTAIAAALPQHPDGPLLQSFPRSGSVNAAQILAELGDDRSRFATDEQLAAEGGVAPVTRESGKHRGVAFRRACNKRLRQALTSFADHSRHASPWAAAIYAAARRRGCHHPHAIRVLARAWVRVLWRCWQDRRPYDLTLHRAAQRVAAA

SEQ ID NO: 439966 - protein, 334 aa, unidentified
MKQVNQVGVDVDSEELVCATKHAGQRLPLATFANTAAGHKKFIRWATKGGHPARVCLEATGIYSLEFALALHQAKNVEAMVVNPRAIKDFTRACMQRAKTDAVDAGGILEFLERMPFAAWQPPAPEILELQAINRRIVQLNTELTREKNRRHASEFAGTSADAIAHDIEVNIRHLERRIERMHDSGLKLVRGVPALATKRAHLVSTKGIGETSAMRLLAELLVLPDDLAAPQWVAHAGLDPRPYESGTSVHRPRRISKVGNRYLRAALYMPALVAIQHEPNVKAFYNKLVTAGKKPMQAVVAVMRKLLHAIWGMLKNDEDFDGNKFFKIVAKTA

SEQ ID NO: 439967 - protein, 346 aa, unidentified
MSNHNLKNDVAVLGIDLAKQSFQLHGVNCHGVTVLKKKLARKNLASFIVQLPVCIIGIEACSGANYWVRVLEKLGHTVRMIAPQFVKPFVKSNKNDAADAEAICEAVQRPSMRFVPAKSIEQQDIQSLHRIRSQVVARRTAQANQIRGLLMEYGLTIPQGISYIRKSIPLILEDAGNELTAMFRELLTDLYDEMVHLDRRIKTLETKLESLCTQKEDCQRLLSIPGVGLLSATAMVAAIGDISAFKNGRELAAWLGLVPRQHSTGGKPTLLGISKRGDTYLRTLLIHGGRTVARVANKHQDKRSAWVMQLEERRGKNISAVAVANKNARVAWALLSNKSTYQASAA

SEQ ID NO: 439968 - protein, 351 aa, unidentified
MLYIGLDVHKEFCQACVIDERGRVCSNEKFSSTQDELDRFLAGFKDAKFVLESTGIWEFIYEGIEKRGFEVQLAHPLKVRAIAEAKVKTDKVDAETLAQLLRANLIPRSWIPSKDMRDLRQLVRQRAYLVRQSTSFKNRTHAELLRRGVRRPQNFVMPFSKKSIDWMRSLEIPTVISCLNCLESVQAQIEEMNTQLLEEFNRRPDAQLIATVPGIGFYGALLIHAEIDDIKRFSHPEKLCAYAGLVPTVRQSASSVHYGAISKDGSSYLRWMLTEAVHTHTHCEPGSRLSRFHAKVARRRGKQKATIATARKLLLIIYWMLVRHEPYHSQGLDPGFPPARNECDIGIGAGP

SEQ ID NO: 439969 - protein, 389 aa, unidentified
MLCIGIDVAKRKHDCCIIDSDALKTVESFTFPNSREGFDMLLSKISELGIPKDKIRVGLEATGHYSSNLAHFISEHDLPLLTFNPLLTNRYKQGFSLRKTKTDKVDACAIAQMIVSGKGSQTYSSSLYHNEEMKSLSRYRSQTMQKCSKLKISVSRLVTILFPELEGLTSSIHLASIYALLKAYPGHEQIAHCSMKRLTHLLSDASQGRFDKNKALEIHQAACRSIGTVSLSASMELVHAITDIEVLKQHIAEIDEKLKEMVDQEESSIIDIPGIGYTLCASILGEVGDFKRFPDVDKLLAYAGMSPSKHDSGDYHSKHNKMEKRGSPYLRKTLYLAARLVAQNVPKFKEYLEKKLSEHKPYKVALSHVAKKLIRLIYRLGISGCPYLA

SEQ ID NO: 439970 - protein, 363 aa, unidentified
MDECAGRQYVGVDLHRRRTVLVCHDENGQRLGWRRIVNDAQVLTAAIDEAGAAPRVVVEATYGWYWAVDALRAAGAEVHLAHPLGVKGFRYRRVKNDVVDAGDLADLLRMHRLPEAWISPPLVRELRELVRYRCKLVGMRTSLKQQVHGVLAKAGVAVPVSDLFGVRGRGLLAGTALSGAYAQRVASLLRLIDIVGAEIDTLTTAIGGRLRDDAGYAAIQQIPGVGPVLAAVIIAEIGDIHRFGSPARLCSWAGLTPPHRESDTTVHRGHVTKQGSRRLWWALVEAIQRGSTARIRATATGSPTGVAATSPRPPPPANCSPWSTTGCVTARSVPWPARPREHPGRGGRVVASLSDPHPAWSSL

SEQ ID NO: 439971 - protein, 347 aa, unidentified
MRIVSHSCAVYGVDLGKTTFHIAGADQHGRPTLRIKLRRDALLQFFATASPALVGMEACPGSHWLARKLIAFGHDVKLIPAQFVKPYLKSNKNDTLDAEAIAEAVTRPTMRFVPVKRHEQLDMQALHRVRAQFVHQRTALVSQFRCFLLEYGIAIHTGIGMFRRDATRILADDSNDLTPAMRQLLTDLWSDFLRIDERVTALSGQIEVSAKHDDVVQRLTTIPGIGPLGASALCAAIGNGKQFRSGRDLAAWIGLVPRQQTTGGKPTLLGISKRGNTYLRRLLVLGAQSCLMHLDRSRDRLGRWLDTLESRMHHNKVVIALANKLARVAWVVLTRPGALYEKMDPRF

SEQ ID NO: 439972 - protein, 348 aa, unidentified
MVHFVGLDVSVKETSVCVVDDAGKVIFEQKVLTEPADIIALLTSLGVSFGRIGIEAGPLSQWLVNALTAAELPVICVETRHMKALLTAQQISKTDRNDARGIAQMMRVGLFKPVHVKTLVAQEQRMLLTSRKLLQRKLLDVESDLRGTLRNFGLKVGVVSGGRYEARVRELVAGFPRLAAIAEPLLSVRRVMRQQLAVLHKMLLDTVRDDPVCRRLMTAPGVGAVVALTYRATVDQPQRFLHSRAVGAHVGLTPKRYQSGETDYEGGVSKCGDALLRTTLYEAAHALLTRGAKWSWLKAWGVRVAQRRGMRRAIVAVARRLAVVLHRMWVDGSEFRWSKDSTAVPAVA

SEQ ID NO: 439973 - protein, 338 aa, unidentified
MKKYTGIDLHSNNSVVVVTDEEDRILFQKRLANNLNEILAALAPHREETVGVVVESTYNWYWLVDGLMDAGFQMHLANPSAIKKYEGLKYSGDFADAAYLAHLLRLGLLREGYIFPRELRAVRDLARKRMQLVRCRTIQILSIENILVRETGGRMSSDRIKTLTSEKVNELGLTPDVTLAMESNRVICHALQQQIKVLEDRLEAQVKLQPGYQLVKTIPGIGQVLATTIMLETGTVTRFAGVGDFSSYCRCVDSLRESNGKKKGEGNAKNGNKYLAWAFMEAANFALRYCPEAKRFYERKKNRTNRIVALKSVAHKLARACYHILREQQPFDVKRCFV

SEQ ID NO: 439974 - protein, 335 aa, unidentified
MSFSIMIGVDSASEKFDWHALNPEEIELGYAETKNSSTAIHAEFEALCQKHKVRPHQVLVCIENTGLYSLRLAYELSLAKFAVWMQDAFHLNHSIGRVKGKTDKLDAYRIAKYAVRNINDFSNFVPDSKAIAELKTLMKQRKRLVKTKNILLVPINEERKHSPHDLSDCYEETDAVLEIIKAKIRVLDKKIDKALKTNPIYSQTYAILQSVPGIGPVTARLIITKTNHFANGYHARRLCSLIGVAPFPRESGKCLKKKPSNGSGSDRELKSCLYLGMLGQIKKDTKLSKYYAKKIAEGKHHNSVINAMSNKVIHMVVACQRKGVMYDENFKCNLA

SEQ ID NO: 439975 - protein, 386 aa, unidentified
MDYRKDTAPAVGSDVATIYVAIERSRKSWLVALQSARQERASRHKLAAADAAGLWSVIARERDGLLRSGAGEVRVVSCYEAGRDGFWLHRFLVAHGVQSQVVDPGSVLVNRRARRAKTDRLDVEGLLRLVMRHDAGDRHLGRMVVVPSVAEEDTRRPERERRRLLSERTAHSNRLQGLLALHGVYGYKPLRSDRRERLAALRCADGQALPAWLRIEIERELERLELVEAQVAALERARRAAQKAAPEDDRVAAIVRQLMRLKSIALETGSVLAHEVFYRHFANRRAVTSFVGLCPSPFRSGGIDHEQGLAKAGNKRARAVMIELAWSWVRLQPDSEITRWFKAHVAGANRRRRKQLIVAVARRVLVALWRYLTTDELPPGARIKPS

SEQ ID NO: 439976 - protein, 356 aa, unidentified
MSREVKYIGMDVHKEAIVIAVQNACGHLVMESIVETKASSILQFIHGLQGELHITWEEGTWAAWLYDLLQPHVHQVLVCNPRRNALLKEGSKNDKVDAGKLADLLRTGMLRPVYHGEHGLRTLRELARTYQTLSQDLNRVMNRLKALYRGWGIACGGTQVYAPRYREEWLGKIKHVGVRRRAELLYQQLDGLQGLRRTLRPELLAESRKHKAAKLLRQIPCIGPIRAARLLALMQTPHRFRSKRQLWTYSGLGIETRDSAQYRFVRGQLQRAKKPQQIRGLNQNHNHEMKEIFKGAATRASCGMGPFREFYVSLLDKGMKPEMARLTLARKIAAITLILWKKEERFDAQQVKTQAA

SEQ ID NO: 439977 - protein, 360 aa, unidentified
MTTQPGSRHVVIGVDTHKLTHHAAVLDADTGKLLGDQEFLATPVGYRRLLSWARSFGELLKAGVEGTGSYGAGLQRHLQACHVVVIEVSRPNRQDRRMRGKSDPIDAINAARAVLSEMATTTPKSRDGYVEAVRQIRATRRSAVKARRAALHQIHALLWCAPDDLRAKLSDYDRAALVTRCARLRIPTEHSPDDPTITARRMMRRLAKRIQHLDEEIADANQELKAILAHRTPNLLTVNGVGTEAAGQLLITAGQNIDRLQSEASLARLCGVAPIPASSGNTTRHRLHRGGDRDANCSIHLIVISRLRWHQPTKDYMARRTAEGKTKKEIIRCLKRAVVRELYRALRADLNPCTEVLDAA

SEQ ID NO: 439978 - protein, 424 aa, unidentified
MNLTQNDRLKQVTSDTLIVGVDVGSQTHFCRAFDWRGFELSRRVFKFSNTGMGFLTFLRWTEEIMNKTEMKKVIVGCEPTGCYWLTFQKFLQDHDVQLVTVNPFTVNRSMELDDNSPEKSDLKDPKTIALLVKDGRFSTSYLPSGVYAEIREASVCRDQIMKQHVRLSNQIQGWLQKFFPEYFECYADWDSTSGLMLLREAPLPQDILKIGAGGINQIWRDAKVRAAGIKRAQTLVEAAQNSVGLEAGEAARLEIWVLVNDYILKAEQLKRLDEYLEEKVKEVPNVEKLLAIKGVGMSTVIGFIAEVGDIGRFTDPKQIQKLAGLEIVKKSSGKKKGRPRISKRGRRKLRRTMYESAKALMLWNPAFQDVFLYYRNRAKNPLGGMQAKIAVACKAIRVFYVVLQTGCDFDEEKFRKDIIRPEAA

SEQ ID NO: 439979 - protein, 388 aa, unidentified
MKIILKLAMDVHSSSFTLLAMEPTIGIEDRVWGPVKVAPDYRAVIAFIESLKLKLGLDNEYSIECGYEAGCLGYSLYNQLTEAGIKCVILAPTTMLSQKGKRIKTDKRDAYVIAQCLCYGGYSPVYVPTGQDGAVKEYLRMRDDHKQALKKTKQQINAFLLRHGHQYIGTKWTIRHLTWLHRLELDPMYRETLNEYMASYEEQQSKIERFDRRIEEIAAQERYMGKVGKLGCFLGIRKYTALSLIVETGDFHRFPKGSIYAAFLGLVPGEHSSADDVKRLRLTKAGNSHLRRLLIEAAEGICKGRVGQKSKMLRSRQLGQDAAVITYADKANVRLRSKYYRMIRHGKKKNVAVAAIARELACFIWGMMTGNIRQFPGADTSAPAVSQG

SEQ ID NO: 439980 - protein, 317 aa, unidentified
MNAQINQNEINVGVDTGKNQLDIYIRPLDIYFVVTNDDDGIKEAIVEIKKHKVTRVVIEATGRLEQPFIMACAKANIPFVIANPVNIKRFAGAINQKAKTDKLDAQLIAHYAEVIKPKLSQLKPEQIRLMSDLLSCRRQLMDMQTREKNRLQIMPKEITSSIKPVLTVLKNQLEKTDNKLHKLIESCEEYKIKNDIIQSVPGVGNVVAFNLISEMPELGYINNKEAASLVGVAPFNRESGSYKGKRMIRGGRSQIRTAMYMAMMSAIQCNPTFKAVYHRLIATGKPKKVAIIACIRKLVITLNSMVRDGVYWDPKMN

SEQ ID NO: 439981 - protein, 448 aa, unidentified
MRQHFSQINNPKDTTMPTQPQPKPQPQPRTPEPREPRNQKERTLILNATVIGVDLHSEQITACVITVADGKCAKPRFFTTPVENAEAAFRKHAKPSDPLLIEATTNAFHLAERLAAIGLNPLVVTSDCVARKERPDRVNDRIDAENLANAHISGDTVEVWQPSPQHRDMRQLFFARRDALNNATRTVNRIWGLLNARGLKTSRTQIKKAKDACELLPNGPAFALLHLGQLMDDYRAALAHRDACDTLIARHAASNPDVQRLLRVLGIHILTAFALVAFIEDANRFAGPKQLVRYLGLNPSVRTSGKYTGSRAISRFGRRDLRMLLIEGAQSAYRHGAHAMHKWARRLTGRKGIRNIGVVALARKMAVCVWHLLKGHPLPDSVAREDASFLRKLAKLASVAGKAHLQTLGFHSPGAFVQHLIGQSDSNREKATNNDFSMKHFQKEEVQA

SEQ ID NO: 439982 - protein, 336 aa, unidentified
MEPTTIAIGLAKRVFQIHYVEPETGAIHSKVLKRAQLAPFFANRPASRVVMEACGSAHHWARVLARLGHDVRLIAAQFVRPFVKSNKNDAADAAAIWEAAQRPGMRFVAVKTEDQQAMLAMHRIRQQLVRIRVMQVNQLRGLLYEFGVVLPQGRRASIEAAKAALASLADELPAMLLDSLQDQLSRLRALDEQIARIEQRILSWRRNDDACLRISEIPGVGVLTATAAVSVIGQARTFRSGREFAAYLGLVPRQNGSGGKIKLGGISKRGDVYLRTLLIHGARSVISSSKHLPERLRQMLSRRPTNVVAVALANKMARTIWALLAHGRTYEAAPSQ

SEQ ID NO: 439983 - protein, 365 aa, unidentified
MQKISTMRTSGKNIFEGQLTIGLDLGDRSSAYCVLNEAGEIVLEHKLATTPEAMKQVFGSMPRCRIAMETGTHSPWVSRVLTALAHEVIVGHAQKVRLITKSRRKDDRLDARTLARLARIDPELLSPVKHRSAEAQLHLTEIRARAVLVSARTALVNAARGLVKSYGERLPKCGTQQFRWETTVGLSTGLREALEPLLREVESLNERIQEYDRRIEKMAKQTYPETALLKQIKGVGDLIATTYVLTIEDPHRFQKSRDAGCFVGLQPGRRNSGESEPQMHISKEGDEYLRTLLVQGAHYILGPFGEDSDLRRWGLKLSARGGKNAKKRAVVAVARKLAVLLHRLWVSGEVYEPLRNSQKAMSAAA

SEQ ID NO: 439984 - protein, 347 aa, unidentified
MKHYAGLDVSVKETSVCIVDESGKLCRERKVVSHPEDLIAILSDPSFSLERVGVEAGPLSQWLFEGLARAGLPILCIETRHTKAFLDALQQNKSDRNDARGIAHMMRVGLFKDVHVKTLTSQKRRALLTARSLLQEKAIDLENEMRGLLRNFGPKVGHASGGTFERRILELVEHDVALAEIMEPLLAGRRKLREGLAKLEKRVLAEAKQDDVCRRLMTVPGVGPIVSLAYVSTIDIPRFRHSRSVGAILGLTPVLKQSGEMSRVGHVSLRGDAMMRRLLYEAAQSMMTRVVKWCWLKAWAMNIAKRHGSKKAKVALARRLAVVMHRMWVDGTEFRWTREDTVSTVAA

SEQ ID NO: 439985 - protein, 415 aa, unidentified
MTEQRWYAGVDWASESHHVLLTDGNGRKIGEKIFKHSGEGLAEMAAWLLTASGASCAGQILVAIEVPHGPIVETLIERGFMVHAINPKQMDRFRDRFTLAGAKDDSRDAEVMASALRTDPRCFRLLAALDPTIVQLREWSRIASDLGAERNRLTNRFRQQLWRYYPAMLALDDDLGAGWLLDLWELLPTPGKAMRIREETVAKVLKGNRVRRFDAAHVLAVLRQPAVQVAAGTVEAACAHTGTLIARIRLVKSQIKEANRQLDALTARLVPAGDTQAGQKKQHDVEILASLPGVGRIVLATLLAEAFDALLRRDYTALRSLTGVAPVTKRSGKSWIVIRRQACHDRLANAMYHWARIAVQYDAKSKAKYVALRSRGHSHGRALRSVADRLLNVACAMLKAGTLFNPSLKTQNAAC

SEQ ID NO: 439986 - protein, 403 aa, unidentified
MKQLTQDVRITPQLDKACGLDMHKDKIVGFISDKDGHNQELREFGTFTRQLHQIKDWLLENGGPACLMESTGIYWMSLYAVLTDAGIKVTVANPIQVKQIPKRKTDRKDARWLCTLLLNGLVRPSFVPDSNQRGLRDYCRNRLFYDWQQTKTRNRILKILEANNIKLRSVISSMHTVTAMGLVRLLAKGVTDKEQLLKCAKGRAIPKKEQLAMALEGTLTASHCLQMQMLLEDFDHVEKQINRLDTLISGIIKKYYNEELQCLDSISGIGIKSAEVILAEVGKDMTRFPSADHFTAWCGVAPGNNESAGKRKGSAVKKGNSYLRVAIIQASWAAVRLKDSYWHALFDRLRKRMKAQKAIVAIARRLLKVVYRTIGTLTIYEEKGVAHFVAIQARNLQWVRPKP

SEQ ID NO: 439987 - protein, 477 aa, unidentified
MRLVPETNSQKFSGPGLYYKTFAGTKPAPPCREVWYMTDTANLTPEPVWAAFVALDWGDKKHAWILQPADGGNRQQGFVDNTPEAVALWAADLNRRFAGQPVAVALEQKRGAVVNLLLPYAHLVLFPVPASMSASYRKTFVPSGAKDDPTDAGWILDLLLRHRDRLRPLQPDDHQTRLLLMLVEDRRQLIDDKTRLSLRLQDCLKQYFPQLVRWFQVDTPMVADLLQRWPDLQHLQRCHDGTLRTFFRQHHCHANLTDERIAAIRAAVPATHDLAVREACSTKARYLTALIVTLLDQIKQLEARRDELAASHPDAPIFASFPGAGVATVPRLIAAFGTRRERYRSAFEVECDSGIAPVHIRSGKIDRVSFRHACGDFTRQTFHEFAGQTIPHCQWAKAYYQQHGQKPTQHHVVVRALAFKWIRILFRCWKDRKPYDEQLYMDSLRRRSALLGSGAASVTSIQWATVAGFSKLSEKKA

SEQ ID NO: 439988 - protein, 352 aa, unidentified
MPRTSSVHAVTTIGMDMGKNTLHMIGLDSRGAIVLREKVSRGRITSRLANLPSCLIGIEAGLATHYVARELAALGHDVKQVPPTYAKPFRQAHKNDFRDAYSVADAVQRPTTRFVPAKTDEQLDLQALHRVRSRLVSERTAVINQIRGFLLERGIIVRQGLRFLRQALPDILAKRTDVLSPRMVRIVADLASDWRQLDERIEPVTDEIETLAKSDDGCRRVMTVPGIGPIISSAMVAAIGNGAAFARGRDFSAWIGLVPKQMSTGDRTILGRITKRGNGYLRTLFVQAAQVILLRPASWPKHSFGVWLARAAQRLHRNVLAAALANKLARIAWTVLAQERSYEARITKAAAQ

SEQ ID NO: 439989 - protein, 419 aa, unidentified
MTRKDDSRIIRIVHPICCGLDVHKESVSACVIFPDSNGEEQHEIKVFGTFTDDLKLLRQWLLDHECPVVAMESTGVYWRPVHNVLEQTVQVVLANARNMKNVSGRKTDIGDSRWIAGLLRHGLLKASFIPPMTVRQWRELTRLRKKYVQSVGDYRKRTHKLFESANIKIDSVVSDLFGVTGRNLMKLLIVDRELTLTDIEACIRGKLKGKEVELFRSIQGFFMGHHRFILKTLLGTIANLEGQIESLDRQIRSLMKDQSDLLERMKKAPGISDVSACDILAEIGPTLDSFPTDTALVSWSGLCPGNNESAGKRKSGRSPVRKHHLKTIMIEVAWAAIKKKGSYFKDKYYRLKARRGAKKAIVAIAHRVLLGVYHVIKDGAEFRDLGEDYLTLRNKEKKVLYLQKQALALGFNLIPQTIQ

SEQ ID NO: 439990 - protein, 335 aa, unidentified
MQIYGIDLAKEKFDVSFFDLTSKKVSNQPSHKVVKNNFKSIGRFLETLPSDAVLVAEHTGVYGDTLLKCCMDSNVKIAFVGGYVIHRYRATPDRAKTDVLDCALLREFGERYPDKLKFRKFPEEALYELRQLARHREMLVEQRKQLMTADKSEDCRPIRSLAVKRSMDRIKEMLDTEIAETEKEMLKVINGHESIRHNYELVKSVDGVGLITAVELLVKTENFTKITTARQYAAYAGTAPYEKSSGKMDKGAHISKIGNRRSKTLLYICAESARLHNKEIKLYYERRTLIDKKPRHYVLNAIANKLLRIIFTLVEKGEYYDANFIRQDPRVVKYN

SEQ ID NO: 439991 - protein, 371 aa, unidentified
MKDNSHSKGKLLVALELSNSKWRLAFSTGEKVRQKVVEARDRDRFLKEVDRAKEKLGLSGNAPVVCCYEAGRDGFWIYHWIESRDMVCHVVDPASIEVNRRKRRAKTDRLDAQSLVRLLQRYEDGDRYVWAVVHVPSEEQEDELRLHREMSRLKKERAAHLCRMKSLLILHGIKVSGNLKALDRELGEMTRWNQHPLPKALLAELHRECLRMGQINEQIDVLEKQKLERIKKPQTNADHQAAELIRLKGVGEVSAWVLSKEFFGWREFKNRREVGSLAGLTPTPYDSGDSCREQGISKAGSPRVRSVMIELAWSWVRFQPDSELTKWFEKRFAHGSKRMRRVGIVALARKLLIALWKYVEFGIVPEGAIIH

SEQ ID NO: 439992 - protein, 347 aa, unidentified
MLHAGLDLSRRKVDVCLLSEQGEHLDQLVTPPDADALRGLARRVEETHREPVCAVVESMTGARFVHDTLEQAGWAVEIADAQKVKGLAPLACKTDKIDSRVLATLSQRDLVPAIWLPDPRVREQRELARFRLHLVKHKSALKCRVHSTLINFGQPCPVTDLFGAEGRRLLERLRVPEPWRGNITASVALIDDLEAQIAEINRRLKQGHADHRYIPLLMSAPGIGWVLAFTIAGEIGEIERFASPEKLAGYTGLCPRVDQSGDKDRRGPLTKHGPTYLRWALLEATMHALKHPAYDQRYQRNKRRLGKQRGAKVAQIDIARRLAHAIWHMLSRNQQFAPRGAAFRLAA

SEQ ID NO: 439993 - protein, 321 aa, unidentified
MSLPNPLCVGIDVSKATLDIAASTDITPFTVSNDSDGFDAIIAELREHSVALILMEATGGLEAAVACQLQAEGFDVAVINPRQARDFARAMGHLAKTDRINARVLAQMAEVINRHPDRVRFIRSLPDVERQVLVAMVIRRRQLIAMLVAERNRLHPVHPQSRKSINIIKALEDELARVDEEMNSYIRNHFKEQAARLSSIKGVGAMTVASLLAEVPELGSLSRRAISALVDVAPVNRDSGSMRGRRTIFGGRSGVRTALYMAALVATRFNPVIKAFYMRLLAAGKTQKVALVACMRKLLTILNAMIRKNEEWNESNHYIAP

SEQ ID NO: 439994 - protein, 443 aa, unidentified
MKSLPVLDPKAAAIDVGSEKLHVSIAGDVPKVFGTFTGDLEALRDWFRAQGVRTVAMEATGVYWLYLYEVLEAAGLEVVVVNGRHVQNVPGRKTDMADCQWLATLHAHGLLRGGFVPPAEIRRLQDYQRLRADHLIGAAAQVQKMQQALERMNVKFHNVISDLVGVSGLKVVRAILQGQREPDCLLALCDPQIQKKKAAAVKESLRGCWKEEQLFALRQALELWEYFQQKMAECDRQMEKLLQQMAEHPSGQGGLGSGPVKLARAKDPGKNAPVIERCQELLARLCGGRDITQIPGLSVYLVLQLISEVGTDMERWPTEKHFTSWLGLAGGRKQSGKRKGTVKAHRNRAGRMFCAAARALAQSVDKALGGFYRRLRGRVGGLAANVALARKLALLFYRLLRYGMDYVEKGLKAYEAKVLESETRLLRKLAQKQGFILMPAAAA

SEQ ID NO: 439995 - protein, 321 aa, unidentified
MDHFAGLDVSVKETSVCVVDATGKIVREVRVASEPEALLAVLASPAYHFKRIGLEAGPLSQWLFSALAEENLPVICVETRHMRAVLKAQVNKTDRNDARGIAQMMRVGLYRPVHVKTLRSQKLRMLLTHRKLLQSKAIAVDNDLRGTLRNFGLKVGMVGAARFEARIKELIENFPDLAVLVEPLLVVRRVLREQLGILHGRLLAVVRDDDVCRRLMTVPGVGPVVALTYRATIDVPARFRKSKSVGAVFGLTSAKYQSGEIDRSGAISRCGDELMRTMLYEAAQSMLFRSTRWSWLKAWAMQIARHRGMKRLSLPWHAGWP

SEQ ID NO: 439996 - protein, 348 aa, unidentified
MQSKSQIRSIGIDLGKTTFHLVALGSRGQVVVRKKFSRQQLLLYTANLPSSLIGMEACVGAHFLGRALREQGHEVRLIPAQFVRPFVKSNKNDYRDAEAIAEAVERENMRFVPIKTEDQLDVQALHRVRERLVSRRTSVINQIRAFLLERGISFAKGPASLRRQMPEILENADEKLTTRMRRLLDFLWQEWKHLQLQIESLSEDLELIASSDEACARLQQIPGVGPLVATAVVSAIGNGAAFHKGREFAAWLGLVPGQWSTGGKTKLLGISKRGNPYLRKMFIHGARAVVLRAKREGSYLGQWMKSLEGRAARNVVIVATANKLARISWAVLSSGENDHPMAAVAVAS

SEQ ID NO: 439997 - protein, 455 aa, unidentified
MRTDRYQQKRQAVLSKSILGIDPGKAKHHGAILDASGAQQGTSFGFSVSREGFDHTLWKQIQKRLDAYRPEDLVIAVETSCNLWKTIAHYCHEKGYTVALVKPLTTYHSRSLMKHDFSRTDPKDAFLIADNTQKGHYDVFQVFNPHLEAMHQLSITYDKLWKDRVKAKLRLRSFMETYFPEYLSAFAIDTKTSLYLLGKYFLPRHFLELDIEEEAPVLLRSSMRHHGRETLVDLRAWAKTSIGVPACQVKEDALRIVLDGWVEDLQGVEDQIKRVEKALIGLAKQDPCFDILTSIPNISQNLAAQFIAETLGPDRFDHFKQIEKLAGLNLRLSQSGKYAGRRRVAKIGNTRLRRILYQMTQLTAKTVPQVRCKFRRRQLKRKCYRKSIIASTPQLLRLIVSLIQEGRCYQHKTDWNRELRKLEKAYDKQEKTSPKPTYKNSHIRRQKLVEQNRAA

SEQ ID NO: 439998 - protein, 344 aa, unidentified
MKYFTGIDVSLRSVSICVVDEAGEVRYEGKVAAEIDVIVATLRRFSVEIRQVGFEAGTLTQYLTYGLSEAGFEVVCMEARQVAASLAAMRNKTDRNDARGLAQILRTGWYRTVHVKSLESHQVRALLSSRKMILTKCIDLENELRGLLKVFGVRLPPRVGHGGFDELVRPKVLALPELAKCLLPLLDARSMLYRTYVQLDNAVRGMARQDPVCRRLMSVPGVGPVTSLTFKTAVDNPTRFRSSRTVAAHFGLTPRRYQSGEMDNPGRISKAGDPAVRQALYGAAHALMTRSDAWSVLKAWGIRLAKTRGHRRAVIAVARKLAVILHQMWIHDTDFRATRMEAAA

SEQ ID NO: 439999 - protein, 368 aa, unidentified
MGKSSKLYVGMDVHKESIDVATGDDGAGEVRHYGAIGGDLASVSRLARKLESTGKVLVFVYEAGPCGFGIYRMLRDRGHECWVVSPGMTPRSNADRVKTDRRDCLKLARLARAGELTPIHVPDETDEAVRDLVRSREDAVTMQRQARQRLGALLLRNDVRYNGKTAWSPAHRRWIAELKLPHPAQHIAFEEYAQAVDEAGKRIERLEAAIGDELSRWRWRPVVAALEAFRGIRTIHAVRLVAELGDLTRFASPRRLMGFLGLVPSENSTGNRRRQGAITKTGNSSARRALVEAAWAYRYGARVSVGIARRQSGLPKPVTDLAWKAQLRLCARYRRLSARGLNRNKIIVAVARELSGFLWALGQQVKPL

SEQ ID NO: 440000 - protein, 372 aa, unidentified
MKEDSVIFIGLDTSKLKISVAIADGSRNGEVRFFGDISSEPASVASMVSKLSKRGAKLHFCYEAGPTGYGLYRQIVELGHDCVVVAPSLVPKRAGDRVKTNRRDAMSLARLHRAGELTAVWVPDEGHEAIRDLVRAREVASDALKQVRQQLQSFLLRHGRIYAGREPWTRAHRRWLTCQAFDHPVHHILLAEYCQAIEDAGVRLDRLTKLVVETASSWSMAPVMAAYQAMRGVAFMTAVTFVVEIGDVRRFDNPRQLMAYLGLVPSESSTGERVKRGGITKAGNTRARRVLIEGAWTYRFPARVSPKIQARLDDLPRTVREIAWKAQVRFCARYRKLLAAGKPKVVAVTALAREMAAFLWAIGQEVAPTAKA

SEQ ID NO: 440001 - protein, 391 aa, unidentified
MIYVGIDVAKNKHDCCILGSSGAVLREAFTLSNDRKGFQELFSAIHEALLQEGTDQIKAGLEATGHYSENLVAFLRNSGIQPVVFNPLQVNLFRKSQSLRRTKTDKVDAKCIAQLLMSAESTPVFASYQIQELKTLTRHRSRLVSQRSKLKQYISRLVDILFPELPSVCCSATQASMRTLLLELPSARQIAACRIDRLTNLLYAASKGHYSREKALEIKQLAQQSIGANSPASELELRLTLQQLDFLLDQLKQLEKAIQTIVAAIHSPILSIPGIGPTLAAIILAEIGDIHRFSSPDKLLAFAGLDPSTYQSGKFKAGYTPMVKHGSTYLRWALMQAARLASIHCATFRDYMDSKLAQGKHYFVALGHVSKKLVRVIFHILTTNEAFVPQA

SEQ ID NO: 440002 - protein, 326 aa, unidentified
MEHELHYIGIDTAKEKLDVDVLRPDGRHRTKKFANTTKGYDELVSWLKGHKIDHAHICIEATGTYMEPVAECLYDAGYIVSVINPALGKAFAQSEGLRNKTDTVDARMLAEFCRQKRPAAWEAPHPLERALRALVVRHQALTDMHTQELNRTETAREVQRPSIDAHLLWLEAELKRLEKQIKDLTDDDPDMKHRRKLLESIPGIGEKTSAVLLAYIGLKDRFAHARQFAAFAGLTPRRYESGSSVRGASRMSKAGHVSLRRALYMPAMVATSKTEWGRAFRDRLAANGKKGKVILGAMMRKLAQVAYGVLKSGVPFDASRHNPVAA

SEQ ID NO: 440003 - protein, 343 aa, unidentified
MEYYVGLDVSLKQTSICVVDQMGAVVREGVVDSDPEAISVYVRSKAPGAIRIGLETGPTSTWLWTELKRLGLPVICIDARHAKAVLKMQINKSDRNDAIGIARIMQTGWFKEVHVKDIDSHSVRALLASRALLVKIKRDLENHVRGLLKNLGLVIGRAKFNVFAVRAEELIEDRPELVAAVRPLLEARTAVERQVSELDRKVMKLVRRDAQVRRFMTVPGVGPITALAFKATIDDPARFARSRSVGAYVGLTCRRHASGEVDWSGRISKCGDAMLRSYLFEAAGVLLTRVPKWSAVKAWGVKLAKRSGLRKVKVAVARKLAIILHRMWIDGTEFNWSKKEIAA

SEQ ID NO: 440004 - protein, 415 aa, unidentified
MEPVLDSCAGMDVHEKKVDVCIAHGPLEKSPKFEIRTFSTMTSDLEDLKSWLKKYNVTTIGMESTGVYWKPIFNIMEGEFTIVLANAQRLKAIPRKKTDIMDCKRIAKLLRYGLLPNSFIPPREIRELRDLNRTRRKLVGMMTSEKNRLTKVLESSNIKLSSVVSKITGVSSMAMIRSLLEKDRLSKEEISQLAKGSLKKKVDLLEKALDGKLTDHHRFLLKMHMENLDHLARQIGKIDEQIERKMIPFQKESNLIQSIPGISKVSASAILAEIGTDMSQFPDEAHLSSWAGVCPGNNESAGKKKSGKTQKGNSFLKGTLAEAAWAASKVKRSTYNAFYQNIVRRRGKKRALVALAHRMLMDIYRVLKTGTPYQDTGAEEANERATKRKERSMIRLLEKAGYSVVKTSTAEIAVA

SEQ ID NO: 440005 - protein, 440 aa, unidentified
MSDPHVRYIGLDVHKRVVEACIIDATGTIVQRERFALNCRTLELFATKFLKPADQVAFEATTNCWAVADILRPHVAKLVVSNPMATKAIAQAKVKTDKVDAHVLAQLLRCDFLPEVWQPDQATRQLRELTGRRSTLVGQRTMMRNRIHSVLAMRLIEVTIKELFSAEGLAWLAGLELDAQGRMLIDVDLRQLEFLQKEIATLDQELALRGHASDAVKLLMTLPGADVATAEAMLAAWGDHTRFADGEHAAAYLGLAPSTKQSAEKCYHGPITKRGNSHARWMLIQAAQHLDKHPGPLGNFFRKVMKKKCRNVAVVAGARKLAVIGWMMLKSNEPYRYAIPKTTEAKLAKLRVKATGQRRKGGAGKGVKAVAKLPGGSRTVKSLAGACQSEGLPPPRPLSPGEQRTVERADCAAFVAEIATAHVVPRPPKRGKTQEVAAHA

SEQ ID NO: 440006 - protein, 404 aa, unidentified
MKGPIVFIDVSKGKSDYQAFKEMNVKYTGSRSIKHTKEGFDEIVSLVREMEKKLETEVCVVYEATGVYHRVLKKVLEDNNIKQFIINPLLSAKTRKNDSLRSPKTDKLDPKSIAKTYYSHSLHNSHKPETIYHELRELSRYYEDILVHLRKDKVAFRAQLDVVFPGYDTLYDDLYGPVALAVIEKYPHPEMLQKKKINTVSKVIQSKTCHRQAMSDTMADKAIEYSKTIYSGCDKDDIEVLILQRFIKKLKEDMAEAERTIGEMIKLAQELPDFSIIKSIPGIGDNLAARIIAELGDMTRFKKKNELVAFAGLDPRISESGQNDGDHMHITKKGNKRLRCLLYLAVTCSIRLKRDDNSIKDFYIKKKQQSNPMCSKAAKTACASKLVRIIYSMCKTGELYQYNK

SEQ ID NO: 440007 - protein, 473 aa, unidentified
MGKRSGGNGMTRGDRRRNARRERLRGLLPRGGAVIGIDLAEDKQVLAVIDHDVRVLARKTVKVKAFRLGEALDWAVAQAKVKGFERVTVACEPTGPRWMQVQRLCAERGLPLVCVQPLMSHIAREQQDYTTHKTDESDCVLIGRLAAELHCYIPEELDETWAHLRHLGRRRAQLITAATASVQRIRDFLSVAWPTVTEACAGPFESVTWLAALQVVTGRCGGDTARLAPMGPEEFTAVVRAAVPAWGGKNGWGKICGQVFAALTDTEGVVTWSRRGLLRRVADELGDLQRTRAQLRATEADMVMVLGELGLSRLGDIPGLTAVGAAAILAETGDPRRYDSSSSLVKHAGLSPAGNASGAFEGQAHISRRGRPGLRLTVWRAVWPMLQFNPVMAAKYAALTQAAAAAAADAGSQPARAAAAAARARRAKARVACAASLLRWIYSMVVHGTRWDAAAASGAAACQHAPRCQPEAA

SEQ ID NO: 440008 - protein, 377 aa, unidentified
MSKVIMVGCDLHDRSMLIRFAVGQGDPQQASFSNERLGWGLLIQRLREVADQHQADRIVFAYEASGQGYGLCDFLHDQGVECHVLSPTHLPKTPKSAKQKTDAKDAQMLLEQVRGFVLAGNPLPVVWTPPQRLRDDRELVRARVDASDDTTRIKLQILSLLKRYGIRKPSWYSSWTKRFVKWLREMAASLDEVVAPVLDSLLDRYELFRAEQNKLDKAIKKLSQADRYRAGCEELRKLPGVGLLTAMTFLTEMGDLERFKNRRQVAAYLGLCPSSFESGEANDRKGRITRQGPSRLRKMLCQAAWVAVIHCEESSAAYHRIKGGKSNRTKKALVALMRRLAIKMWHRAVECGTPDELRGRGGPHEPLVPPSPLRAVA

SEQ ID NO: 440009 - protein, 407 aa, unidentified
MFVGIDVAKDSLVACAMDDQGEDVFPSYSVENNRPGCLKLINLIADNANLLKPDIIKVGMEATNVFWEHCYRLIKNHEKLNSNFKLQLYTVNPKVVSNFKKAYTDLPKNDNVDAWVIADRIRFGRVENSSSPEALYRALRQITRHKFKLAQHIKAEKARALNLVFLKFSDFTQKSPFGTFTKASMALLENYTLREIVNTDIHELAEFLHQNSNNRLGGSTPIEKITTALKKAARNSYRLKPEIDQAITQTLSMTFDNIRFYQSQNKRLKKVLKRQLKAIPQTLITVDGIGPVLTAGIISEIGDINRFDKETNLASYAGLTWSQYQSGSFTAEETHLTKKGNKYLRYYLVEAANSLRVHNDRYKSYYYKKYNEVPKHKHKRALVLTARKFVRLVFALLSKGEIYQPRR

SEQ ID NO: 440010 - protein, 313 aa, unidentified
MEPQQVFVGIDVSKKHLDVAIRPEPAFFTVSNDDQGIADLVRHLADLHPQLILLEASGGYEILAAAALRHAGLPAQIINPRQVREFARSTGKLAKTDKIDAAVLAHFAQLLRPPLRPWPEALQQELAALMTRRRQLVEMLVMEKNRLSTARSLKVRNSLQLHLQYLTSELQELERELHDLSRRSPLYLEKDQLLQSVPGIGPLTSQSLLAWLPELGALNRKQIAALVGVAPFNQDSGQKRGRRKVWGGRKQIRPSLYMATIAAGRFNPAIRTFYQRLLQAGKRQKVALTACMRKLLTILNAVLKHQQPWRLAT

SEQ ID NO: 440011 - protein, 343 aa, unidentified
MQTVTTIGLDIAKSLFQVHGVDAEGKAVIRRQLKRRYVLAFFQKLPSCLVGIEACASSHHWSRELQALGHKVRLMPPAYVKPYVKRQKNDAADAEAICEAVTRANMRFVATKTPEQQSCLMLHRTRHLFIRQQTAVINSIRAHLAEFGIVAPVGRNGVAELLGVVSDPSDKRVPEVARACLAALGAQLRMLKVQILEFDRMINAWHRSSETSKRLDEIPGVGPALATALIASVADPRIFRSGRDFSAWVGLVPKQRSSGGKDKLGSISKQGDRYLRSLFTAGALAVIRYAKIHGTKHRPWLTALLARRPTKVAAIALANKIARMAWAMMAKGERYKEPVALAA

SEQ ID NO: 440012 - protein, 360 aa, unidentified
MNQHTVGRKIAGVDLGDRDSWVCIIDGASGEVLERATIPTSGEAFGEYFARCEPMLVALETGTHSPWASRAVTDAGHEVIVANARQLPLIYGSKHKSDARDPEKLARVARLDVRLLAPVEHRPREQQRDLSVIRSRHALVRSRTLLINAARGMVKAFGSRLPKCDADVFHKVAWEFVPSELGLSLHPIFESITTLSRQIRALEDEIERLAREEYPHTQLLTQVSGVADLTALAFVLTLGDPRRFSDSRMVGAYLGLAPGRRQSGDRDQPMSITKAGDEYLRWLLVQCANFILRRDSPDTDLKRHGRKLAKSGSKIAKRIAKVAVARKLAVLLHALLVTGEVYEPLRNTSVRRRRQAPLSA

SEQ ID NO: 440013 - protein, 308 aa, unidentified
MTTIYAGLDIAKSNLQLHLAGRFDDLPNTAAGQQRLLELLATQPGTHVICEATGGYERAVVAALQAAGIPVSVLNPARVRDFARAQGQRAKTDQIDAVVLSAYGQAFQPKPTAARTAVEQQLTELVRRRVQVIDLLVSQRLQLTGLTLPVMRQAVQRLIRRLEQDIAQIEAQLKALRTQACTLDQRAQKLEAITGVGTITALGVLAELPELGTLNRRQTAALAGLAPHPRESGQWRGRRSIGGGRAPVRRALYMAALVAARSNRILKAFYQRLRAAGKPAKVALTAVMRKLVILMNHTLKHPNFVLQN

SEQ ID NO: 440014 - protein, 363 aa, unidentified
MREVRQADGLLVTRRPWRSECRRTFLNEPEQLSGQLSPHLQERDKRGKGAQLAKLYVGVDVSKASLDMAIHGSKEFRSFPNDALGISRAVEVLHKTEPQMVVLEATGGIEMAFVGSLVAAGIPVVVVNPRQIRDFAKATGRLAKTDKLDAGILADFGAKVNPSVRPLPDVELQQLRTLIAPRRQLQEMITAERNRLSSVAGVVRERVKAHIIWMQGELKQTDDDLSDSLKQSAIWKQKDELLRSVPGVGPVLSATLIADLPELGRLNRKEIAALVGVAPFNHDSGTLHHKRRVWGGRTSVRPSLYMAALVASRHNLVIEAFYKRLCAKGKPKKVALTACMRKLLTILNAMFKSNRPWEYEMAA

SEQ ID NO: 440015 - protein, 347 aa, unidentified
MKTMTMIGIDLAKTIFRINGVDENGKRVMNKNLHRESMVSFFAQLPACTVAMEACASSHYWGRTIESLGHVVRLIHPRYVTPYRLGDKNDANDAAAICAAAQRSDMRFVRLRSQRQSDIQSLHRVREALVVETTATINRTRALLAENGIVIKQGPANVIAILPAIIDDSELELSELMRSLLRMQYEHLSHLRGQLAELKERLKELVDEDESCQRLMQVPGIGPISATLLCSELGNGSGFRNGRAFAAYLGLTPRQHSSGGKSKLFGISKLGNRYLRTLLIHCARSIFRSICMDRYLFGGGVLDQWARTLMERRGKNRAVVAMAAKLARIAWAMMARGTTFTRTLCVN

SEQ ID NO: 440016 - protein, 293 aa, unidentified
MATWTSNEYRRFSNEPKGIQELIEWLKEFQPELIVLEATGGLELPFVAELAYAKMAVAVVNPRRIREFARSIGQLAKTDKLDAKVIAHFGVATHPEARKLPTEDEERLTALMTRRRQIIEMLTAEKNRLHSARFAMKERIETHITWLEKELKDLDDEISGFIQHSPIWKEKEKLLRSVPGIGPVTSATILAMLPELGTLNRQKIAALVGVAPVNKDSGKRQKKRRVFGGRANVRSVLYMAALSASKHNPKIKAFYDHLIRMGKEKKVALTACMRKLLVILNAIVRNNQAFCVE

SEQ ID NO: 440017 - protein, 343 aa, unidentified
MRLFVGLDVSLEKTAICVISEHGKIVREAQVISEPEALARWIEEQSGSIAAVGLEAGPLSQWLHRGLSAAGLDVVLMETRRVKSALKAMPIKTDRRDAEGIARLLHLGWFRPVHCKSVSAQEVRALLAARKAVQQGMIALEMSLRGLLRNFGLKVGAISRGRFEHRIRELATGNAMLEAATEPMLRARAALRQELAGLERHVRGLAQEDEVCQRLMSMPGIGAVVALTFRSAVDDPSRFSSSKKVGPWAGLTPSRNQSGERDVSGGITKAGDANLRRALCQAATVMMNRGPSTWLRTWAERVARRRGRKCAMVALARRIAVVLHRMWRDETAFQAGAPISHAA

SEQ ID NO: 440018 - protein, 357 aa, unidentified
MGRMMYVGVDVHKNFCQSAMMDDAGHIVKEDRFPNTDEGIQSFISRLVGFDDVRVVLESTGSLWMKLYDAIEEHGLEAVLSNPYKTRLIAEARIKTDKLDARILAHLLRADLIPRCYVPSKEIREVRSLVRHRVKLSKTRTEIKNRIHALLDKHRLKAPCSELFSKEGLEWLKSLKLSSIDDAVLKSDLVVLKALDEQIGYVESKIASIALKDPNVELLITMPGIDFYSAMVLSSEMGSIERFSTDKKLVAWAGMAPSLLQSGDVLRVGRITKEGNKMVRWIMVQAALNAIRSDARLRELYERYSSRKGHHKAIIAVAHEMLRIVWFMLKRREPYRGEDKRLSLRKHNRMCRLALDG

SEQ ID NO: 440019 - protein, 321 aa, unidentified
MKETVSIQTVYVGVDVSSETLQVRFMEKDLSFSNDTKGIKKLIKILSTVSNVCVICEATGGYETLLKNALQKASIALCIMPPHRTHAFSKTIGQKAKTDKEDAKMLALFGGKFIPEPALPLNSEEEQLKALGRIRLQVMKSYVAAKLRLKKWLDSYSKHFLNQTIKFLSKQLEQIDQKMRELIEKVPSLKNKADRLLQIQGVGFITAAAVLASMPELGTLDARSITSLSDLAPRNRDSGKYVGKRSIGGGRSQVRYSLYMTALSATVHNPVLKTYYERLVQRGKNKKVALVAVMRKLIILMNHVLKHPDFKLIDTKIPRKK

SEQ ID NO: 440020 - protein, 344 aa, unidentified
MNIATIGIDLAKNVFQLHGVNGHGKVVLRRQIHRGQMRGLFVNLSPCLIGMEACASAHYWARTLQSYGHAVRLIAPHFVKPYVKTHKTDATDAEAICEAVNRPNMRFVPIKSIEQQSALSLHRVRAGFVRARTAQACQIRSLLAEFGLVMPRGIGNIKQVPKLLQVAGKELPAPFCRLIERLLAHLKELDRQARELEEQIVDWHQRSEPSRRLAKIPGIGPITASALVASISDVRSFKNGRELADWLGLVPRQHSSGGKPTLLGISKRGDRYLRTLLVHGARSVIVRVLKRDDAKDGWLKRLLERRHINVATVALAHKTVRTVWALLAHDREYCPNYKSLPVAA

SEQ ID NO: 440021 - protein, 354 aa, unidentified
MSQKLNQETGQQQEEQSEKRIWQWFGVDVSKDSFTVAFYDGLSDATSEVLKFDSTPKGVKSFLSWRKKHASKIIPSGIVMESTGYYSARLAALMRKLDRSLRVSICNARSASYYIKSHSANKTDPSDARLIARYGYDFQPAELKVKSSEERLLHELVSERGKLVKIMTMLTNKAKSLEFSEIMEINKSVIGHLKEKIKELDQRIVEASQQSEEMNAEIKLMDTVPGVARLSAAVIYGTLGSLKQYTRLQLSALSGLYPKISQSGSSPIRSKLSKNGPSYLRQILYLDATQAMKKIPTLRNLRERLLARENSRKMTARCACMRKLLLIIKGVVDSGIPYDPNFQQKKQEISKKTA

SEQ ID NO: 440022 - protein, 349 aa, unidentified
MDRYVGLDVHLRSTTIAVISATGKRIRTLVVETNGQALVEAMRLTPGQLHICLEEGTQSAWLVELLRPYAEEVVVSLPDKIRGPKSDKRDAWKLAEELRTGAVRISVYKAPAHLAALQCAVRGDLMTAQDLVRVRNRLKAVFRSRGIVTDASVYNPELRGEWIEQLPRAQQQLAELLGRELDILEPLRDQAQKWLFAEAKTHPIVRTLSTAPGLGRTRTAQLVAVVATPHRFRTRRQFWSYCGLGVVTRSSADWKQRSGTWIHAPVQQTRGLNRRRNALLKAVFKGAATTVIRQLPEDPLHAHYQRMLESGIKPTMAKLTLARRIAATVLSMWKHEEVYDPKRHTVLTD

SEQ ID NO: 440023 - protein, 339 aa, unidentified
MEKSLISFTCFIGIDVSKLTIDVTLLNPGEAVKKYKHFTNTASGMQLLNSWLRKIDGFKYPLGIFCMEHTGIYTRTLLDFLIGKKTNVWIESSLQIKKSLGLNRGKNDQIDSLRIAEYSYRFIDKAILAVNNSPELTMLKDILTSRDRLKKSLRSIQVAIKELTRIDAKQGKTLEVLNLQALRGLKNSIQQIEKQMHEEIKKNNQFTEYYNLTTSIPGVGSILAIKLLVYTKAFARFNNVRQLACYCGMAPFEYRSGTSVRGKVGVSKFANMDLKSTLHLASISAIQHNPELKKYYLRKVEEGKSKMSVINAVRNKLLARVVAVINRKTPYVQSLAMAS

SEQ ID NO: 440024 - protein, 344 aa, unidentified
MAIVGGLDIHRRQITYDWIDTTTGETGRGQLSPATRLELRGWLARFTGQQADFALEATTGWRFVAEELERAGFRAHLAEPADTRALRGPKRRAKTDRTDAHHLRELLRAGTLPESWMPPPHIADARTQVRLRRALVGERTGWYQRIHAILFHHGLPERSQLLTADGRAWLARIELPPVARQAVDLALRMIDHLEVELDTLDTQLARIARHQPGCTALMGRYGIGWLTAVAIWAEFGDVRRFANSRQAVRFTGLDITISESDGKRARGHLARQGSPVLRWALHEAAMCAARPSSPDHAYYLQVKQRLGGKRAALSVARKLAREAYHTLRELGDQALVPAELPTAA

SEQ ID NO: 440025 - protein, 391 aa, unidentified
MVCVGIDVVKDKHDCCILDSEGTTLVDCFTIPNNMDGFKSLLQTIQDCSQKSDKIKVGLEATGHYSYNILGFLLDNDLPIYVMNPLHTNLYRKSLSLRKTKTDRVDAKTIATMLLSDVDLKSYTDTAYHNEELKSLTRYRFDKVQERAKLKQSVSRLVTILFPELEQLVSSIHGTSIYALLSEYPGAKQISEAHLTRLANILVKTSRGHYRKDKATHIRDAARTSIGSVMPAKSLELKHTIKLIQELTSEINEIEDAIRKIMDELKPPILSIPGMGFHSAAMILAEVGDFSNFNSPDKVLAYAGCSPSTYQSGKLTNCYAHMEKRGSRYLRYALYTATKYVCYWNPVFTEYLTKKQAEGKHYNVALSHATKKLVRLIYALQKSGKAYLAVT

SEQ ID NO: 440026 - protein, 349 aa, unidentified
MRHFAGLDVSLEETSICIVDETGRIVKELRAASEPEILIVSLRDTGLTLERVGLEACSLTAWLHDGLTQAGLPAICIETRQANAAMKTMPNKTDRNDARALAQIMRTGWFRQVHVKSRQCRLWRSLLVARRTILNEMRSIENVVRAILREAGVKLGTPSRADFVKRVRELVGGDSEVTPLVEPLLTILVTMLREFTRLTKRVLEVVRKEAVCRRLLSAPGVGPITALAFRATIDRPDRFQHSRDVGAHLGLTPARYQSGETDIQGRISRCGDELARTALYEAAHTLLTRSRKWSSLRAWGVKIAKHRGMARARVAVARKLAVILHRMWTDGAEFRFGKEPAAAAVAPVA

SEQ ID NO: 440027 - protein, 340 aa, unidentified
MTITTVGIDLAKNVFAVHCVDQNGKTVLVKSRVTRAALPGLIAGLPPCVIGMEACSGAHYWARLFRQYGHEPRLMAAKFVSPYRMAGKSGKNDAADAQAICEAVRRPHMRFVPVKDESQQAMQCLHRTRQGFIEEKTATYNRLRGLISEFGVIAPQSTDALRHIVFEQKNSLPLQVQQGVDDLLEHVARIEDNIAEYDRILSRMARTDHRSQRLMELKGVGPTTACALVASIGNAHDFKNGRQLAAWLGLTPSQYSSGGKSKLGRIMKAGDSYLRTLLVQGARSVLIGAEKRTDLFSRWVCSLVERRGYWRAVVAIAAKNARLCWASLHYGDDFRLYSAS

SEQ ID NO: 440028 - protein, 427 aa, unidentified
MMRLLRALPRRYEGKHVETVVRRCAGLDVHRESIVAAVRIVNTDGELNTFTETFGTTNSDLLQLNDWLSSFGVTLVGMESTGVYWKPVYTLLETDFECWLLNAQHLHNVPGRKTDVADAAWIAQLVAHGLVRPSFVPPKAIRELRELTRYRKTVIQERSREAQRLHKVLEDTGIKLANVATNILGKSGRAMLQALVDGTHDPNVLADLARGRLRKKLPALRKALVGWFSPTHRVIVSELLAHLDYLDESIERLSADVEEMLAPFAQAIDLLDTIPGVNRRTAEVLLAECGADMTRFGSAQRLASWAGICPGNNESAGKHFSGATRKGSKWLRTALVESAESMSRTKGNYLSAQYARIKGRHGHKKAVIAVAHSILVIAYHVLSRLEPYRELGGDYFIQRQQKDAYERRLVKQLERMGYDVTLTEKVA

SEQ ID NO: 440029 - protein, 341 aa, unidentified
MKKFIRIGVDLAKNYFQVHALVSDVGPAVTRKLRRSKMHEFFSQIEPSLIGMEACGSAHYWARELKAMGHEVLLMPPAYTKPYVKRGKNDAVDADACCEAMSRPGMRFVPVKSAEQQATLMLHKTRELLVKQRTMSVNALRGHLSEFGIIAAKGIGRVDELLDLVESDRTLPNAARASAKVLAQALEGLDKAIDDLEDEITNAQAQNEMTRLLYKVPGIGKIIASVIAASVPDPSVFKSGRDFTAWLGLTPRQNSSGGKQALGAITKQGNRYIRKLLVLGATSLLNVVGKRKGALRDWIVGLLAKKPARLVTVALANKLARILWAMMKTGESFRTEMFAKA

SEQ ID NO: 440030 - protein, 340 aa, unidentified
MKSYVAVDLHRRRSVVMRRCGDGSTTSVRIENSPDNLVEAVFAGHGRPHVAIEATYGWYWAADCLDAAGAKVHLVHPLGLNWGNRRVKNDHTDAEALLDLLERGRLPEAWISPPHVRELRELVRARHKLVGDRTRYKNQIHAVLAKHCLFAPVTDAFGPGGRAWLDTIALEGAYKYRVDATLDLVDHLDAQIGDYDQVIARTVRTDPAYRALTTIPRVGPVLAAVFIAEIGDIARFNNANQLTCWAGLTPRVRSSDNKTRHGSISKQGSRLVRWAAIEAVAKQPNGSHLHTEYQRHLDRRGRPGIAKVAIARKLLRLVFFAMRDLELRCLQPDAQSGEAA

SEQ ID NO: 440031 - protein, 356 aa, unidentified
MLDLNDSAFELPILNDTIDFHKNESVLYAITANGQKVEKLKVKSDRLVQYLSNKKDWVLGIEISGGVNQKVMELRASGHEVKLINSNKFRGIGIGGKKTDERDAKALAECLRFEFTPEVHLKSECSRRLKSMLVCREFYVRSRVNGVNHVRGTLREYGLNIPQGMESFRKNVGGEIDKIDHPQLKSLLEKTRALITELEECEKAAEKILEDIAVEDGRVQNLLTVPGIGLMTAVAMICVVDECSRFKNGKEFASYIGLVPSVHASADKCMMGSITRSGCEILRRYLIHGARAWMKYKPDSDKNRVWAERVLERRGANKATVALAHRMARISFSILRDGVPYTGKAKRIRLRKTEAA

SEQ ID NO: 440032 - protein, 342 aa, unidentified
MQITTIGFDLAKNVFQVHGIDVKEKVVARKQLRRSQVMEYFKVLPPCLIGMEACATAHYWARELTKLGHEVRLMPAKDVKAYVKRNKNDAADAEAICEAVRRPTMRFVRIKSAEQQGQLMQHRTRDVLIRQRTQIINALRAHLAELGIVAAQGDAGVNELKAIVADERDTRLPIDARASVIVLAAQLEALQTLIGSIEKRIKMQHRSNETSQRVETIPGIGVLGATAIVATAADPKVFRSGRDFAAWIGLVPRQDSTGGKQKLGPISKQGDRYLRRILVVGAIAVLRRAQENPGKYPWLTQLLARRPFKVVAVALANKMARTAWALMVHGGTYRAPELAEAA

SEQ ID NO: 440033 - protein, 454 aa, unidentified
MCLEDRPVLETNAAGIDIGAREIFVAVPPGRDEHQVRACATFTEDLEQLGDWLVACGVTTVAMESTGVYWIPLYDILESRNLKVCLVNARHMKNVPGRRTDWHECQWLQYLHSVGLLRGAFRPEAEVTAVRTIMRHRTELVQMSSQHVLHMHKALTQMNLQIHHVIDDITGLTGLAIVDAILAGQRDPVELAKLRNWRIKADPETIRKSLVGNWRDEHLFTLRQSRELYRTYQQQMVKCDQEIEKLVGGLEPRVDPEEKPLPPDRKRYRGAKKRAKKNGQPDTGFNLRTEAYKLFGVDVTQIPGLETMALPLFGEVGRDMSKWPTADHFASWQGLCPDNDISGGRVLWKGTRRVRNRAGQMFRQAAYSLHHNLTPMGDYLRRMKTRLGPAAATTATAHKIAVIFYTMVKNQVEYDETIWATRDVKRQQRIEARLKRQANQLGYQLVPLEEKPAA

SEQ ID NO: 440034 - protein, 349 aa, unidentified
MEAYDGPQIVGMDLHRRRSVLVRMAEDGHKLSTVRIANSPARLAAEIKRAGLHPKVVLEACYGWYWAADTLTAAGAEVHLAHPLGVKEFSRRRVKNDELDARDLADLLRMGRLAEAWIAPAEIRELREITRYRGKLVQLRTSCKDQVHGVLAKLGIEVTCSDIFGAWGTQWLDELPLPQPYSWKVASLRQLIGWLSAEITVLEQVTADLLAGHDAYRAVQRLPGIGPVLGAVIVAEIGDITRFRHPARLCSWAGLTPRHRESDTKVVRGRITKQGSRPLRWALVEAVQRTPAGTPVHELKDAIIARRGIQARNIAKVAAARKLLTCVFYAMRDGHVRSLTARSAEQEAG

SEQ ID NO: 440035 - protein, 402 aa, unidentified
MQVDDIDVFIGIDVGKSEHWATALTTAGECLHDRPLPNDEARLREVYEHLGEHGRLLVVVDQPATIGALAVAVAQDMGITVGYLPGLSMRRIADLSPGSAKTDQRDAAVIASAARTMPHTLRSITSSDEDAAALSMLTGFDLDLARQVNQVSNRIRGLYTQIHPALEGVLGPWLEHDSVLEVIATWPTPAALRKAGRARINAKLKANGCRRHAAWAQAIVEALSKQTVTVAGTDAAGVVLPHLARQLIALHTQRADIAAQVEALVEAHPLYPVLTSMPGVGVRTAAVFLAGTLGKTFTTGAHLASYAGLAPVTRRSGSSIRGEHVSHGGNKRLKQAMFLSAFASLRTDPVSRTYYERKRAQGKRHNQAILALAHRRILTLHAMIRNNTLYNPQPAQPLTTTA

SEQ ID NO: 440036 - protein, 354 aa, unidentified
MPSKVTKPNTSAYPKLMSIGLDIGKDVFHIVGFDHNGKVVLRRKFRRLELDAVFEKLPRCVVGMEACLSAHFVSRRLRALGFEPRIIPAIYVKPFLKGQKNDYNDAEAIAEAALRPNLKLVKEKTQEQLDLQACHRVRSRLVSRRTATINQIRAFLIEHGIAIRTGANSLRRSLPEILLQRADELSPRMRVLIEELHGDWLRLDARIEALNEEIEEISRQEKSCQNLMTIPGVGPLISTATVAAIGNGEAFERGRDFGAWLGLVPRQYSTGGRPILGRISKRGSKYLRTLFIQAANVILMRPQNWPRYSFGGWLVTAATRLHRNKLATALANKLARIAWSVLRYNERFDDAQTI

SEQ ID NO: 440037 - protein, 350 aa, unidentified
MEKILAIDLGKSNSVVCIFEKSSFTSEFRKIKTSGQVLHDLFVEVEPDIVLFEVGTSAGWISDILLSLKIPFKVANTNHPAWKWRNNTKKTDREDAYRLVTMYLHGTFPTVHMPSRTVRQKRSLIRYRQSIVKRVTQSKNTIRSILHSADISMAAGKSGWTQKSIENLRSLALDFDQVDSADELWKCQLHMELEILENLTGKLKEVTGELDRLSEKDEKVQLLKTIPGVGTRVAEAVVAIIDDPGRFKNAKHVSSYAGLVPRCYQSGQMERLGRITGTGNKMIRALLVEIGWLGLRYEWMRQIYDRVRRGTKSRSKIAIVALARHILVRCWAMLRDNSSWQGSKAVAVKS

SEQ ID NO: 440038 - protein, 362 aa, unidentified
MPMLAELIDAVVGVDTHRDTHEVELALPTGTAIGIRKISNDNSGFAELLAWILDHSPGPRVVVSIEGTRSFGVGLARAVAAAGLTVIECEQPNRKARRGKGKSDPIDAHLAVLAALRLDADRLPVPRADGDREALRILLGTRHELTVVTTAQTNRLRALLLGGKDSERDLARATLTDPVLLAMVRRREPPQASREQAVRHGEIRRLAHAIRAGRHALAANRAQLQAIVDQIAPELTERRGIGAVTAAQAIVSFSHPGRCRSDAAFAALSGTSPLQASSGKTVRHRLNRGGDRALNSAIHTIAVTRMRCCPTTKNYVARRTAEGKSSREIQRCLKRYIARQLYRALNASTTLTAQTSAPPTPA

SEQ ID NO: 440039 - protein, 429 aa, unidentified
MEAVENEPLFAERVAGIDIGKAEVVAAVRVPGPGGRRMQEVRTVPATRRGLEELADWLEGHGVTRAGMESTGHYWKPVFFTLERRGFECLLYNSRQVKAQPGRPKTDKADAVWLAKITENGWVRSSFVPPEQIRILREYTRYRRKKIQVMAAEKNRVQGLLEEGHLKLSSVISDIHGVSGRDMLNALAAGITDPAVLAAKARGTMKVKIPRIAEALDCTFWTIGHARLLRRMLDTLDYLAAQIAGLDAEIADLCAPFEAEIARIDQADGIARRTAEDIIAEIGVNMGAFPTAPHLVSWARYCPQIRESAGRRKGRNATGDGNAYLSAAISEAVIGSLRTGSFTAARYQRLIRRMPKKKALVATGNTMLTIIWHLLASPDATYRDLGGDYYELRNPARQARNHIRSLERLGYHVTINAINPDTGELTPAA

SEQ ID NO: 440040 - protein, 366 aa, unidentified
MKKVITVATAGTGKMQARGLTIGVDLGDRSSCYCVLNEQGEIVQEEKVATTPKAMRERFAEVPRCRMALETGTHSPWVSRLLRGLGHEVIVAHAQRVELIAKSRRKNDRMDARTLARLARIDPQLLSPIRHRSAEAQAHLTVIRARAGLVRARTALINTVRGVTKSTGERLRGCNPRKVGERAQELSPELQHALGPVLSEIDSLSDRIREYDERIRSIAESSYPKVELLKQVHGVGTLVALTFMLTLEDPHRFSKSRDAGCYAGLQPGKRDSGDSEPQLHISKEGNKYLRAMLVQSAQHILGPFGADSDLRRWGLRLSERGGKNAKKRAIVAVARKLAVLLHHLWVSGEVYEPLRNSLRMATAAAA

SEQ ID NO: 440041 - protein, 348 aa, unidentified
MTKSKTWRYNFFIGIDVSKSDLDVVLMVRNTFVGHYKIANEPYEIKALIKQLKEENQLTIASTLFGMERTGIYCNHLINTLEKLKANIVLENPVQIKNSLGLLRGKSDRVDAERIAKYLVIRKDDLVLFCSRRTIIDKLARLAALRGRLIATQGALKTPLSEENHFLNKSDSELNQSLCNSTLQALRNDIIELEGFIRKLWRGDERICNLMKLIMSIPGLGEVTSLQIVIITNEFININDPRKFACYAGVAPFEHKSGSSVRSKTQVSHMADKKLKSLLHTCALSASIHNPEIRAYYLRRVEKDGKPKMSVLNAIRFKLITRIFTCVKQNRVFTEEYNSHHIASTEAK

SEQ ID NO: 440042 - protein, 428 aa, unidentified
MNETDRIRVAEFRQFKKEIRGSAEHLLVGIDVDKDKHHAFFGTATGKTLFKRLVFENNVEGFRKLLAQAEAMKVQEGLKKVVFGMEPTGNYHKPLGEHLIRCGHGVVLVSGVAAHENRKTLDGRWDTNDTRDAANVADLVSQGKCLFYEFPVGAIQDLRNLLSLKRRLKRQEHGYRVRIRNHLVAKYFPELDGYFKQSEKTSLAIVRWCLDPSVIAGWGYQKFVQAVSSGPRRLSQENRLQAIWKMAVDSIGCEVGPAVEFEAQVMVEGLKQIREAIQDIEEKIHEVCSQFPEYEFLLSIPGFGPDVSSKVLGAIGDPFRFQNGRQVLKMAGLDLSAERSGKTSASAIPVISKRGKADLRYALYQAAFIASTKNQDFIVYYTHKLRGREREAGIKTKMRVKLSAKLLIIAWTLMKKKESFNPDYLAIE

SEQ ID NO: 440043 - protein, 482 aa, unidentified
MKKRNIYQDRSQELFQLFEQAGNYSNVMCIPIDYAKKDHVVMFCNGYGDILRKPFNVKNTPEGVKYLIDQTLRSCRHRSIRKGHVFFGGEDVNSYAENFVNTLRTKGWLVANVNAHDAKKQRENIQASTDRLDLMGIATMMLNCRANCSPAQSGVYRNLRTIARHRKKLVKMKTEVRNRIHTVVDRLFPGFLSEKKSGITAFSQASLYLMEDRFSARQIRRRKRTTLVEKLRKKGVKKPEETAEKLQTYAAQVLTTPSEYTATLQVSLSSHINHVHCLLDGADQLEKELAMLLAQTPGAFLTSIKGMGIVLAAGVTSEIGDPFSQKPTNNLVSYAGIVPRIKQSGGSEGQTRVGHVSRRSNHILKDYVVQSGFHIGMYGPDELRQDYRRRDAAGQHADFGIARRFVRMAMCLIKTSQVYLPPNLRNTDVKPRERGDYYLSMWPLLKNKWAKQDALKVAFSKERPLGQWRHAVQEIYGVKLKL

SEQ ID NO: 440044 - protein, 320 aa, unidentified
MLSFCGIDVSKDRLDVIVLPEEQCCSVSNDRTGWADLVERLRGRSIAGIGIEASGGYERGVTRALLAAGMPVRQVNPFKLRQFARASGVLAKSDPLDARMIASFVAIMPTRPAQRTPARAAQVAEMLAVRRQLSAEKVAAENASRLLEDAMLRRLSRRRIGRLAGDIDLLDKRMVEIVANDPALAHRYRLLTSMPGVGSLLACTLIALLPELGCISRKQVAALVGVAPYAFESGTLKGRRCIWGGRANVRQVLYMAAMSASNWNPALKPFHDRLNAAGKKPKVTIVAVMRKMITTLNAIVRDDVLWADRHSGRHSVTTTR

SEQ ID NO: 440045 - protein, 373 aa, unidentified
MSKIIMVGCDLHDRSMLLRFCADQGEPQQASFSNDREGRARMIARLQQFAQRQQARRIVFVYEASGQGYGLCDLLYDHGIECHVLSPTDLPKTSKGKKQKTDVKDAQMLLEQVRGYVLAGNELPVVWTPPQRLRDDRELVRARIDAADETTRVKLQILSMLKRRGIAKPAGSGSSWSKRFVVWLRQVAASLDAAVTPVLESLIARYELQVAERARLDHAIAKLSQTERYRAACRELRRLPGVGLLSAMTFLTEMGDLHRFHNRREVTAYLGLCPASDESGETKDRKGRITRQGPARLRKVLCQAAWISLRYCPESAAAYARIRGGKRNRAKKALVALMRRLAIRMWHRALTCGVACELEGRGGPHALPPPISA

SEQ ID NO: 440046 - protein, 428 aa, unidentified
MSYRIAGIDVHKKMLAVVVSDVEIESEYQFERRMFSSNPEQLRSLAAWLVEQKAEEIVMESTAQYWKPVWETLERYWKPLCEKREGARRRSGTLHLAQALSNRGRRGRKRDFVDAERLVKRLVARELTLSFVPDAEQRLWRTITRKKYQLRRDLVRIHNQLEALLEEAHIKLSGLVSDLLGVSARRMLKALADGETNPAALAALAHERLRATPEQLCDALGACTELKPVYRRLLKMTLEHLQILEQQIGQLDQELATLLHPHQDAVERLAEVPGFAVDSAQQIIAEVGPAAATFPSEKCLSSWVGACPGEEESAGVNYSHRSPKGNRHMRRLLNQTSNAAVKAKGSIFEIIYRRCVPRLGHNQAIGVIAHRQCRLIWLILHQGTRYEERGPAVSKRSRYQRTWRMIRQLRNLGYRIELPNPDASQAQA

SEQ ID NO: 440047 - protein, 359 aa, unidentified
MEKRSEFILKDAEIFVGLEDSKKTWKLCVRSGGVVVNETGMPADYENLRKYFKNKFPGCRIKVMYEAGFSGFDLHDQLLADDWECVVTPPHTVTQEKCSKQKNDRIDCRRLAKNLENGDYHSCCVPDKELREDRQISRTYGQVQKDIIRVCNRIRRTLEFHGLDRLFPPGRWSGAAYNQLKQKLEDMDISRSLKISFGVMFKELESLRQLKAELLLELRNLGKSGRYRKSVDLLKSAPGIGMLTAIRLALEWGDMSRFERKEAFAKFLGLTPSDYSTGETDRRGHITKQGNRWVRSWLVEAAWRAIKYDPVLLDKFRRVYSHNGSKKKAIVAVARMLAMRLRRVLLDGKPYENGLVSCS

SEQ ID NO: 440048 - protein, 408 aa, unidentified
MRLYVGDDWAEDHHDVEVMNEAGEVLAKKRLPEGAAGMSQLHGLIGRHVPEDADDAEVVIGIETDRGPWVAALIAAGYTVYPANPLLASRYRERHGVSGAKSDGGDAHMLADMVRTDSHQLRPAAGDSPEAEGIKVVARTHKTMIWDRTRTVQRLRHQLREYFPAALEAFDDLDAPDALELLAKAPDPARAAKLTRAQVAAALKRARRHHVQDRTGAILAALRGEHLGQPAALTAAYAATVRSLVAVLVTLNEQVRLLEAQVKEHFGRHPDAEIYQSQPGMAAVLGARVLAEFGDDPYRYESAKARKNYAGTSPITRASGKKKVVAARFVRNNRLIDALMAWAFTSMHASPGARAFYDEQRAKGFEHNDALRRLANRLVGILHGCLKTGTPYDEDAAWGHREELKPAA

SEQ ID NO: 440049 - protein, 382 aa, unidentified
MQASRKSTPTADHCGTIFVAIELSQKTWLITVHSPDRDQFSRHRLEGGDHAGLLALIEKVRARATQQLGSTPRVVSCYEAGYDGFWLHRLLEAAGISSLVFDAASIAVEQRSRRAKTDRIDGELLLRTLMAHLRGEPRVVRIVRVPSVEEEDARRASRERDRLITEQTAHTNRIKSLLRLLGMAVGNPRRRDWLAWLKRQRDWQGRPLPPHLLAEAQREHARLMLVREQLAALEQVQAAQASAVPAPMAERRDLLQRLKALGPAFTATLVNELFYKDFRNRREVASYCGLAPSPWQSGGIDREQSISKAGNRRARHKAIELAWLWLRHQPNSALSHWFRTRTANAGRRAKRIAIVALARKLIVALWRYLTAGLVPEGATMKA

SEQ ID NO: 440050 - protein, 345 aa, unidentified
MTIVETRAVTGGVDTHAGVHVAAALDPVGGLLGVREFPATAAGYASLLSWLAAFGTLALAGIEGTGSYGAGLARHMAAAGIQVVEVDRSDRQDRRRNGKSDPLDAVSAARAAQSGRARGAPKGRDGAVEAIRALMVAKRSARNERTQAINQARSLIVTGPDDLRTRFARHSAAQLVTGLAALRPRPGDVPGFATRIALRELGRRAQFLDTQIGRLDELIIPLVTARAPSLLALYGVGADTAALLLIAAGDHPERLRSEAAWAHMCAVAPIPASSGKVRRHRLNPGGNREANHALWRIVITRMSAHPAIRAYVDRRTKEGLSKTEIIRCLKRYVAREVYHHLRAGG

SEQ ID NO: 440051 - protein, 409 aa, unidentified
MDQLIERVAGLDVHKASVVATVRTPGPDGSRVSRTETFGTMTADLIALRDWLHAYGVTHVALESTGVYWKPIYYVLENAFQLLLINMVALKHVPGRKTDVKDSDWLAQLLECGLLKASFVPPPAIRELRDLTRYQVQQVRDRAQEVNRLCKVLEDAGIKLSSVATDVMGASGRAMLDALLQGTTDPTVLADLARGRLRKKLPELRRALRGQFRRHHAFLVEQILAKIDFLDETLDRITTELDARLVPFAPMLANLDTIPGVNRTTAVSIIAETGGDMTRFPSAGHLCSWGAMCPGHDESAGKRRSGKTRKANRYLRAALIQSALGASHANGTALQARYHRVKRHRGHKKAVVAVGHQILEIAYYIMRDGITYTELGADYFDRRHADRTVRRYVRQLEALGFHVTIEKAA

SEQ ID NO: 440052 - protein, 314 aa, unidentified
MKEREVVYIGIDVSKETLDIDAGEYGVRKIENTSAKIRPALAAIARKADTPPQVCFESGAYLARLMAECQGQGIAYSVLNPCKVSYFARSIAPAKTDALDARAIRLYAEITRPAPRPPPRPMLTRLRELVRVRGTLKKHIGALHPTLETVTDPDATQFIQSSMAFLKKKVEKCDRLIAEVVKADEEMSGLVDALSGVKGVGTLTAIQMVARMPELGTLGRRKAAALAGLAPRTRESGQWQGKSFIGGGRKEVRTALFMSATVATRHNPEMKALYERLKATGKPHKVALTAVMRRLLCHLDSVARNYHAHRKTTA

SEQ ID NO: 440053 - protein, 355 aa, unidentified
MSSEKYIGLDVHQATIVVAVMDSTGKVVMESILETEAATILQFFAGLRGTLSVTFEEGTWSVWLYDLLNPHVDKLVVCNPRKNALLKDGNKSDRIDARKLAELLYLNKLKTVYHGETGVRMLRELSRSYLTIVKDLSRVMNRLKAVYRSWAIPCAGRDVYYRRHRAQWLDKIREAGVRRRAERLYEQLDMLQQLRQQARRELLAEGRKHAITAKLRQIPYLGPIRSVLAVALMQTPHRFRSKRQLWAYSGLALETRISAEYRLVEGQVRRSKKLLSIRGLNKDHNHDLKGLFKGAATMASVRPGPFQDFYQAALAKGIKPTMARLTLARKIAAITLTLWKKGENFDAEKLKSQAA

SEQ ID NO: 440054 - protein, 364 aa, unidentified
MSNCITWVGIDDSAKKLDVAFVFNQEENPREQFEVMNDPDGLGRFVKKLKAQRGEVRCVYEAGVCGYTLQRLLKKKGIPCDVVAPSLTPRRPGDRVKTNKRDARKLAKLYRAGELTSILVPNEQQEALRDFLRAREDSLEDLTRQRHRLSKFLLRNGMRYRTGKAWTKGHWGWLRTCHFDDPLKQEVLMQCRTTVEETQERLKTFDEKIEEIVKRPEYARLASYLMALRGVKALTALTIIAEAVDLKRYVSAPAMMSAIGIVPSEYSTGDSQRQGGITKTGNGHWRRVLIESAWHYRHSPVTSGALKQRRKNLPEEVVAIAEKADRRLHKKYVKIVNRGKRATVAAVAVARELAGFVWAIGQLA

SEQ ID NO: 440055 - protein, 350 aa, unidentified
MLIIGCDYHPGFQQVAFVDTATGECGERRLNHTEGAEQFYRDLHARGMEVRIGMEASGHARWFERLISGLGFELWVGDAAEISTKRVRKHKNDRQDAELLLRLLVENRFPRIWVPSCENRDLRQLLWHRHRLVQTQTRLRNQLHAVALNEGVRRKKALWRPKGRAQLESLVLAAWASRRREDLLQLLDQVDSTIVELTAAIGKEAEKRPEVLRLMTHPGVGALTALAFVLIVGTPERFASSKQLSSYIGLVPSEESSGERRCLGHISKQGNTLLRFLLVAAAQATVRSDPEWRRKYLHLAMRRERAIAKIAMARMLAVRLYWMWRNGWDYAQLTKLGSHAGQPGKRLGLQ

SEQ ID NO: 440056 - protein, 355 aa, unidentified
MDSVKYIGMDVHKEAISIAVLNSSGKLVMECVIETKAITILQFVQGLRGSLQVTFEEGTWAAWLYDLLKPHVTKIVVCNPRRNALLKEGSKSDRIDARKLAELLRSKLLRPVYHGEQGVRTLKELARSYLTISKDLGRVMSRLKAIYRSWGIPCTGKQVYAPRYRSEWLGKIAEVGVRRRAELYYQQFDALRLLRQEARRDLLAEAKKHSAWKLLREIPFIGPIRAALLIALLQTPHRFRTKRQLWTYSGFGIETHSSAEHRYVDGELQRSKKQPSIRGLNRNHNHDLKNLFKSAATIAAAKAGPFQEFYAALIAKGIKPEMARLTLARKIAAITLVVWKKGVRFDAQYLKPQTA

SEQ ID NO: 440057 - protein, 421 aa, unidentified
MKGLRGKRVKTVKEGTLIATVDIGLTTNTGYCTTLDGRDTKPFKFDNTKEGFEKFWGMTVASKNRFGCEEVVVGYESTGPYAEPLVHYLAHKQVKIVQVNPLHTKKMKEVNDNSPLKTDDKDPRVIADIIRLGHALTIIVPEGDAAYLRRLNNARERHVGEQTALLNQLQQLVFLIFPEFQTVLKNMKGKTAQYLLKKYTTPERIATVSKEVLGEEMRKRSMGKFGIQEAESLISLARETVGIHEGLDGIFIDIRHILMQLEAEERFLSEIEAEMGATLERIPFSGRLLSIKGLGIVSVAGLIGEVGDFSKFRTQSEILKLAGLDLYEISSGKRKGQRRISKRGRGLLRKILFYAAIQMIRKNGIMYDYYARLTGRGMERMRALIAVSRKLLRIIHALMRDNSDYVGQNQAGERRVIKLAA

SEQ ID NO: 440058 - protein, 374 aa, unidentified
MTMMHHRSLRYIGLDVHKATIAVAIADEAGAPTSYGSITNDPAAVRTLMTRLGGPDVTLRVAYEAGPTGYALHRQLTKLGIECSVVAPSLIPKRAGDKVKTDRRDALKLARLLRSGDLTPVWVPDEAHEALRSLVRARADAKADQLRAKHRLSKFLLRQGCWPPTGVRASSQRYFVWLRHLEFAHLPDRVVFADYLAEVTAGGERIKRLEAALHQCAQSSSQVALIRALQAFRGIGFLSAVTLVAEAGDLRRFRTAPQFMAYVGVVPSESSSGSKQQRGSITKTGNSLLRHVLGEAAHHARRAPRISNTLKRRQTDLPPEIVELAWRAQLRLHARYRHLSVRIGAVKTVTAIARELAGFVWAAGHILPEVPVAA

SEQ ID NO: 440059 - protein, 444 aa, unidentified
MACSGMILIREVADAPVIMGISKPAGLKSPCGEVKIVNPLFVGIDVSSKNNVAYLMKPDGSKHSSFSVQNNLGGAKLLSEKIVSALRSMQLERVVIGLEATSIYGDSLVYALREDGRLGRFQRKIHVLNPKQVRKFKEAYSDLPKNDWVDAFVIADHLRFGRINREVYMDDYRYKALQTLTRARFDVIQNLTREKQRFANYLFLKCSGMAQDKDIQNTSATTIALMEHFETVDDLANADLEELTAFITETGRGKFADPDATAKAVRAAAKGSYRLPKTVNDTVNQAMAVSIASMRALKGQVKVLDKAIEQQFEIIPNTLTSIPGIGKVYSAGIIAEIGDIHRFDSQASVAKYAGLVWNRSQSGDFEAEHSRMIKSGNRYLRYYLLEAANSVRRCDSEFRRYYDLKFKEVNKYQHKRALALTARKLVRLVFRLLKDNRLYIPPEG

SEQ ID NO: 440060 - protein, 416 aa, unidentified
METENEIVCGADIHRDFLVATIVSRSGLKLQERFDMNQDGLLAFKTWVLDNRCQKVAIESTGSYWYPIFYILEGHVEFLLANAYQIRSIDGKKTDRLDSERIAIYCLNGLLKPSRIYPKDYRDLRNLTRSREALVNARSKVKNQIHQLLATCCIKLSSVISDSFGKSGRYIIERLLEGKTIDQIISGIPSKRVRKKADELREAIRNSIDPNIVFLIKTDLEVIDAISEKIKLLEAEISVKVKPFEEDLKIVLSMPGTGLISAATIIAEMGNFWDFPSADKMAMYFGIVPSVYQSAGKLRTGKITKHGSKHMRRILVEVAKAISKTKKDSKLKRFFQRVLARSGKNVAAVALARKVLCILYHLLTKRENYQEPDFKKAKPKIPSCSSPASIMDIDEMIRIISKAGYLVERDLKDGCG

SEQ ID NO: 440061 - protein, 404 aa, unidentified
MLFVGDDWAEDHHDIEVQDATGRRLAKARLAEGLAGVAQLHALIGQYLDGEADEVAIGIETDRGPWVIALIAAGCRVFAINPLQVARYRERQSVSGAKSDAADAHVLADMVRTDSHQLRQVAGDSDQAEAVKVVARAHKTLIWERTRHAQRLRNALREYFPAALQAFEDLTAGDTLELLAKAPDPDAAARLTTAQITAALRRAHRHHVADKARVIQAALRTEQLRQPAAVTTAYAATVRAQVAVIGTLNAQIKAMGAQVEAHFGQHPDVEIYLSQPGMGPIVGARVLAEFGDDKNRYGDARARKNYAGTSPITRASGKKKTVLARYVHNNRLVDALGQQAFSALSASPGARAYYDDLRRRGLGHRAALRQLANRLVGILHGCLKTGTLYDEATAWSHHCAAAAA

SEQ ID NO: 440062 - protein, 314 aa, unidentified
MSEKIFVGIDVSKDRLDIAASNGERWSCANREGDFTELLERLRGWPVELIVLEASGGYEGAVVGSLAGAQLPVVVINPRQARDFAKACGRLAKTDQIDASTLALFAERIRPEVRPLKDEQTRELEALLQRRKQLLNMLVAERQRLQIAAPTVRTDIREHIHFLVKRLKDVNGDLDELMRKTELWREREQLFKPVKGVGPQTLRTLCASLPELGKLNRRQIAALVGVAPYNCDSGTLRGKRHCWGGRAEVRCALYMAAITATRCNPVIRTFYARLLKAGKAKKLAITACMRKLLTILNAMARDTSAWNQNMHVIA

SEQ ID NO: 440063 - protein, 425 aa, unidentified
MNYKQNEKINQVKESTLVVGIDIGSTTQYARAFDWRGIELGKVFTFSNSREGFESFKAWMQHLQDKYRKSDVIVGIEPTGHYWFDLGAYLEDEGILLVMVNPYAVKQTKELDDNSQSKNDRKDPKVIAKLVTEGRYSAPYTPDGVYADLRIMVANRKRLIREMTQIKNRFARWFAIYFPEYTDVFGDYEAQSSMLLLKKVCTPEAIVELGAEKINQIWRDAKLRAVGMKRATTLCETAKRSIGLKKGSSAARYEMKLLLEDYEYKKAQLDAVMEEIEKLCRKIPESGQMLAIKGIGVITVAGFLAEVGDVRRFESPRQIQKLAGLSLRENSSGKHKGQTTISKRGRSKLRAVLFNAAIPLIAKNPEFKSLHEYYTTRANNPLKKKQSVIAISCKLIRVFYAILANGVTYDPQKLLSDIHRQPQVA

SEQ ID NO: 440064 - protein, 346 aa, unidentified
MHYIGMDCHITTLEFAVVNEAGRLVKAHRVATSVNGFMEFVKTVPPPRTIYMEEGTLAAWALETCVRFGEKLVITDAKKNHWIGSSGQKDDAIDALKLAQLARGGYIKEIHHPVGQRRRFRELMIAYHDAVRSTTRIKNKIKARFRQNGIQCTGTTVYSETHREEWKEKLPQEATLLLILDGLWRQLEQSEQTKKELLAAARAQAKHYPEIKHFKALPGIGFISAATISAILETPYRFADKRKIWMYAGLGIMTRSSGGKTYSEKLSTDYNRLLKYSIKQAAEAAIQAKDNPFRRKYLDMTLLHGIAPHRAKLTIARDMLATMWAIWRKGEKYSPEIREKAAYKQG

SEQ ID NO: 440065 - protein, 362 aa, unidentified
MQHQGNELDFKGYNIYVGIDVHLKSWTVTILTEAQPHKTFSQPPKPEVLAIYLEKHFPNGSYHSAYEAGFSGFWAHYRLISLGINNIVINPADVPTTQKEQYHKNDPVDSRKIAKALRSGLLIPIHILGNETIEDRSLVRTRSALVKDMTRFKVRIKSFLFFFGINYPENFENTRTHWSRNFMQWLKEIKLETWSGRTALDMLIREAENQRQLLLEINKKIRMLCRSDRYKQNVDLLQTVPGIGMTNAVVFITQIESVERFRTIDELASYVGLVPTSHSSGEKDNKGEMTFRGQKILKSMLVESAWVAVRIDTALSLSYNTYIKRMQPNKAIIRIARKLLNRIYYTLKNKRPYQTGIVGQNL

SEQ ID NO: 440066 - protein, 315 aa, unidentified
MQKLLNIGVDVAKDAVVVGCDEGCSAVRSIPNQRTALTAWLASLPSGSRIGMEATGCYHELLADLAHQRGHTVFVLNPKDTRHYAQAVGLRAKTDRVDALLIARLIAHEHARLHPYHPATREQRQLGRLLRRRAQLVKLKGALKQSMKGMTGLARDTSALVERMDALIAKLEQRMDALIASIPGIRDDRRKLETIDGVGPVVSIALIEPLVRLPFRSSDAFVAFAGLDPRPRDSGRKMGKRRLSKRGPAELRRLLFNAAMAAARTRVWKPVYEHYRAHGLPTTAALVIIARKIARIAWSIHRYHTSFDPQRLKTT

SEQ ID NO: 440067 - protein, 327 aa, unidentified
MWYAGIDWADQHHDAVVIDEAGQRVATLRVAHTAEGLADLTTFLRGIGDVAEHPEHLACLVETSHGLLISALLEAGLPVYPLNPKTVDRHRKPAGAKTDAIDAYLLARTGRSDLADLRRLAPDSPLITELKVLTRDQDTLIQSQTRLLNQLTACLKAYYPVALDLFGKLHQPTTLAFLQTFPTLEQARAASVDQMAAVLTAAGHPHAAAKAQQIGQQVRRPQLQADPALTRAKARLMLALVAQLQPLIAQIAAYDQEITRLFRMHSDSRAFASLPRAATRLAPRLLAEWGDDRGRYTDAASVQALAGTAPVAFQSGKFAAVHRRYAC

SEQ ID NO: 440068 - protein, 321 aa, unidentified
MTYVGIDVSKATFVVAYSSAKSSKTKTFKNTTKGVHEFIQTLSADDYHCVLEATGNYSSLLVYLLSQAGITVSLENPLKIKNFARVMLSVTKTDETDARLIALYGEKMHPAPYKLRSDAILILKQKRTVIRQLKKQLIATRNLKGSMEVLPFFDSKCKKTIEKTIAFLERQVKDLEEELANLAQGEYRKQMGLLTSVKGIGVTLAAALIMATGGFAYFDNAKQLTRYLGLSPTYQQSGTSVNVKGHINRNGDSSLRSLLYVAAMASLRCNAECKECFNRLRSNGKPGKVAVVAVANKLVRQAFAVVTQEKPYIDGFKSAKP

SEQ ID NO: 440069 - protein, 374 aa, unidentified
MKKNTIFVGLDVHKNSIDVALADAGRDGDVRFYGSIGGDLASLHKVVRKLQSTGATLRFVYEAGPCGYDIYRSLIKQGHDCVVVAPSMIPKKSGDRIKNDRRDALNLARLHRSGELTPVYVPSEEDEAMRDLTRGREDAVKALRIARQVLLAFLLRHGHRYSGVTHWSKAHWNWIADIKMPHRGQQIVLQEYVHTIQEQHARVQRLTQQIQELIPQWDMALLVKALQSLRGVSLVVAATTVAEIGDLTRFDSAKQIMAYLGLVPSEHSSGGTTKRGSITKTGNGHVRKVLIEAAHAYCHPARETRALLTRLDGLPQEIRDIAWKAQLRLCGRYRKLMGRGKNRNTVITAIARELAAFMWAIACTFLPASKDIGR

SEQ ID NO: 440070 - protein, 447 aa, unidentified
MNAPALSVLDPHAAFVDVGSEHMHVSIAGGPPEVFGTVTTELHRLRDWLKERGVKSVAMEATGVYWLPLYGVLEAAGFKVSMVNGKQTRNLPGRKTDMKDCQWGATLHAHGLLQAGFVPPAQIRRLQDYLRLRADHLTSAAACVQHQQKALERMNVKLHDVISSLVGDSGIRVIEAILAGERDPERLLALCDVRIQNKKAERVKESLRGTWAEEHLFALRQAVENWQHYQRQIAACDRQMEAVLRQISGPDEPGGGTVKTQAVKRGGVNAPQIDDLHHLLAKLCGGKDLTVLPAHTDYSLLQLIGEVGTDLSQWATEKHFTAWLGLAPGSHQSGKRKGTVQRKRNRAGRLFCMMARSLARSKNIALGGFYRRMMGRRGGLVATVALGRKLAVLFWRVMVKGLAYAEAGLKAYEEQVLETKRRALSRLAKQLGRIVLPSLAELQATES

SEQ ID NO: 440071 - protein, 384 aa, unidentified
MVKKTTRNIQFTEKPGILYLAFELSNTTWKLGFSTGLGQRVRERNIPAGNVKKLRAEISAAKKRFELSDVSKVKSCYEAGRDGFWLHRYLCSQGAENLIVDSSSIEVNRRARRAKSDRLDVQKLASMLIRYHTGERKVWSVVRVPSVEEEDRRQLHRELKGLKKERTRAINRIRGLLANQGVRIRSSRPKSMEWLERIRLWDGSTLAEGLKVRLRREWERLQYFREQILVVQRQRRKALKEIHGKKGEDAEKIRRLLKLRGIGMNGSWVLVEEFFGWRKFQNRRQVGALGGLTPTPYASGDTKKEQGISKAGNRYVRGVIVELAWAWLRYQPHSKLTLWYEKRFGHGGKRMRKVGIVALARRLLIDLWQYLEFGVLPEGALLKP

SEQ ID NO: 440072 - protein, 373 aa, unidentified
MPKYSTAFGMDVHLRSTTVCALDADTGEAVTRRFPGNPWGEIAGWMDGFPGPSLAAYESGYLGFAPQRELAGLGVECVVAAVSKIPRSAADSASKNDRNDAARMAKAILAHDISPVWIPSPEVEGIRDLAGAYDGATARLATAKQRLLAFLAKRGFVYGGTTPAGNPRKYWTYDFLRWLDKVRPEDDGGVRTLAALRNEVEAAAEARADLLSEYRAAVDASPIAAEVAALQSIKGCAFALAAAFSAEVGDFTRFRSGRQVTAYFGLAPSQRSSGDSVRLGGISGAGNALVRKLAVEGSWCYAAARHQPKLMPRDTGVPLEIRMHGRKGSERLLRRREEMLARGVPAAKANAATAAELVRWLWALGMMCREGAE

SEQ ID NO: 440073 - protein, 455 aa, unidentified
MAKRKQKGNPNATISMPVMNPNAAGVDAGSRSHFVCVAQDNVKEFKTHTAGLHEICDHLLTHGAKTVALESTGFYWQQLFAMLQSYGFEVIVINARHIKNVKGHKTDVVDSKWIQLLHSIGLLSNSFQPDGFTKEVRQYTRHRRSLIGTSSKFIQKMNKSLVLMNIQLKTVLRDLSGESGLKVIEAIINGERNPGVLENLVGKRVKAFRDEIKKALTGDWRPEHLFELSQNYGFYKFTWEQIRETDKQIENLLKDWEGENGDKTKKKEYSQKKFKKPHQKNDPKFDVKSFAYQMTGGVDLSRIEGVNINTILTMMTETGFDITSKFKTPKHFASWLGFAPNRKITGGKTMSSNTPKVKNPLTYAIRQAANSVGSSKGRLGDFFRRISYRKGRSVAIIATARKLAVIIYRMLETGMEYSYGYGEDDIGRIKRAQIKGILKKINQFGIKTEELNLAQ

SEQ ID NO: 440074 - protein, 341 aa, unidentified
MEKATIIGVDLAKHVFQVHGAGADGSVAFRKKISRVKLLPFLSSQPRCVVAMEACAGAHGWARDIQAQGHEVRLIAPAYVKPFVKRQKNDMADAEAITEAAARPTMRFVAVKSAEKQASGMVFKTRDLLVRQRTQTINALRGHLTEHGIIAPQGVFHIGRLAAEVENANNHLPVIVTELCTLLLRHIATLDEQIASLDRRIRDRAREDETARRLMSIPGVGPVCATALEALAPPPETFARGRDFAAWLGLTPRQNSSGGKVRLGRISRMGQRDLRRLLIIGATAVVRWAARRGAPAGSWLARMMARKPRMLVAVALANKIARIAWALMAKGGIYRSLAAAA

SEQ ID NO: 440075 - protein, 314 aa, unidentified
MGVVGLDVAKSKVDACIRSAGRRLSAPSTPEGEAELAAWVRANRVGRAVMEASGGYERSWAEALRAAGVEVVIVDPKRIRHFAKAAGRLAKNDPIDAETIAWFAETFPDGEAQAHDPAREEVDRLVQARTALKELEGRVAQQGEHGPPAIVAKALGAIAKSMRAELRKLEAAIAAKIKANPAFARRAEIIASVPGLGDQAVAGLIAWAPELGRIRNEAAAALIGAAPYDDDSGERKGQRRIKGGRRKLRNLLYMPVMGAATQHNPVIKAYYQRLRARGKQAKVALIACMRKLIVILNTMLARDETFSPPPRAAA

SEQ ID NO: 440076 - protein, 410 aa, unidentified
MEVLHPHCAGLDIHKDSVVACVRHMLDGKVTTEVKTFKTTTQELMALSDRLSAEGVTHIAMEATGVYWKPVWHILCDGEFELVLANAAHVKNVPGRKTDVNDATWLADLMAHGLIRPSFVPDEPTQQMRDLLRTRKQFVRERTGHTQRIQKTLEDANIKLDSVISNIVGISGRRMIEALIDGQAAPEALAALAHGRLQATPAELEASLRGRVTAHHRFMLRLHLDHLDALDAAIARIDKEVEDNVEPFRVAIEMLTTIPGVSRLSAEVIVSEIGIDMSRFQTEGHLISWAGLCPKNDESAGKRRSTRMKKGAPWLKTTLVQCAWAATRTKGTYLHAQYLRLRSRRGAKRAIGAVAASILTAVYHMLENGTLYQDLGANHFDNRAKGKHVLQLVNRLKNLGFAVQITPVAA

SEQ ID NO: 440077 - protein, 411 aa, unidentified
MEQIHDRVAGLDVHRDQVTVCVRTPGPRGGVHTDKARFSTTTGGLAAMASWLAGCAVTLAAMEATGVYWKPVYYALEGRFELWLCNAHHVKNVPGRKTDMSDAEWLADVAAHGMVRPSFVPPPAIRELRELTRYRKTQIDVRAAGIARLEKVLQDAGIKLTSVASKVLTQSGRAIVEALIAGQRDPRALADLAKGKLRPKIPQLTEALDGHFGVHHAIVASCILGHLDFLDAAIAGLDEQAAARVGGGYQPAARLLADVPGLERRSIEVIIAETSADMSRFPSPGHLASWAGLCPGNHESAGKRRRVATTHGNQWLRRTMIESARAAARTKGSYFGAQYRQIARRRGPNKAAVAVAHSLLDAIWHILTTGEVFTDLGEDYFTSRHDKEHQARWLTAQLEKLGYAVELTTTT

SEQ ID NO: 440078 - protein, 332 aa, unidentified
MEYIAFDAHKHYTLASVARPDGQLVREQRIAHARGALQQFLERCEPGSPVAVETVGNWYWIVDEIEAAGCVPRLVHARKAKLMMGEINKTDKLDVRGLNQLQRTGTLPTVSIPPGELRDQRDLPRTRMVLVRQRTQLKNRIHSTLAKYALHDLEVSDLFGARGRALVRQRLELLPPCTAYTTDPLFKPTPTNQHLLTLPGVGLTLAVVIALEVGDVARFPTAEKLAAYAGTTPRVHASGGKTRFGPSRPDVNRYRKWAFVEAANAICLNRGRTPRRHVTRLYERVAQRKGHQKAIGAVARHLAEATYWVLTKQQPYREPTTAAVSSTGDKRG

SEQ ID NO: 440079 - protein, 432 aa, unidentified
MEKIRNNVSGIDIGAKKVFTAVEGQPVVSHFTFTEDFLKLRDYLIQQKVESVAMEATGVYWVTLYEILEEAGIDVWLVDGRQTKQVPGRKTDVKDCQWIQELHSYGLLNRCLVVEADIKELRSYLRLREDHIRSSSMHINHMQKALTQMNIRLKEVLSQLHGKSGIAIIEAILDGERDRDVLVGLCHISILKGKRDLVYKSLEGRYTESGLFALKQAYDAYKFYQHQIQQCDARINTVLNKMGKSGQGQNTDQKRKPIRHHKPQVDHLGSNLLNIFEGKDATLISGITDYSWVQLLSETGNDLGKWPSEKHFTSWLGLSPGQNDSGKKKKKVKQKGRPVAGQIFRTIAQGLINSKNIAIGAFGRRLRGRKGAAIAIKAMARKLAILYWRIMQKGLDFAEKGIKKYEEQLAAQKLKTVMRLANELKLNVTHYQ

SEQ ID NO: 440080 - protein, 461 aa, unidentified
MPTPTRRPKKLQLDGLPTILPNAAGMDIGTEEIVVAVPPDRAPEPVRAFPTFTPDLHALVAWLVACGIDTVAMESTGVYWIPIYELLEAHGITPYLVNARHVKTVPGRKSDWNDAQWLQKLHALGLLQASFRPDAEIAALRTLVRYRAEVIQHRSPHILHMQRALKQMNIQLPEVLTDIMGETGQAILRAIVAGERDPVKLAQLRNPACKSSVEVIAKALTGTWKDELLFVLQQALVLFDVYTAQLAVCDAQIERYLKAMESRGEPDASLPDLPPAKADSKSKNAPNFNARAQYARILGVDLVAVMGLSASSVQTIITEIGTDMSRFPSAKHFCAWLGLAPHNEISGGKVLRSRTQKTTNRAGQAFRQAAQAVSRSDSAAGAYYRAMRARKGPQQATVATAHKIARVIYHLLKFGEAYEEESAEAYEQKRQERELRHLTRCANKLGYTLTRVGDLSPAAAT

SEQ ID NO: 440081 - protein, 408 aa, unidentified
MDAFCGIDWAEDHHDIALVDRDGQLLARARISDDAAGLARLLELLAEHGDSPEEPVPVAIETPRGLLVACLRAAGRQVYPVNPMAVARYRDRHSVAGRKSDKGDALVLANILRTDLHAHRPLPADSELGQAVAVLARAQQDSVWDRTTAHNRLRSHLREYYPGFLAAFAAAKGGIMRPEARTILAAAPTPAGAAKLTLAQLRALLKKAGRSRGIDAEAQRLREAFRAEQMRQPPLAGDAMGRQSLALLRQLDAACTSADDLEQAAIESFNQHPDAGIITSFPGIGPLTGARVIAETGDDRSRFQDARGLKAYAGAAPVTRASGKTRSVTRRHVKNNRLAQAGYIWAFSALTASPGARSHYDRRRDHGDRHAAALRNLFSRLLGCLHHCLVTGQHYDETTAFPAQAAAA

SEQ ID NO: 440082 - protein, 417 aa, unidentified
MKIVHQICCGVDVHKSFIVATIIKTEGLMPQYTKKRFSTFNNDILRFKQWLLENNCRDVCMESTGKYWIPVYNLLEDEINVVIASPKWVKAVKGNKDDTKDSKWIGDLFRLGLVPGSFIPPKPIRVLREYTRYRYKLVSCKSSEKNRFQNSMTVCNVALDSVVSDMFGVSASKITDYLIESDEFDPEHVISLLHGRMKPKADAIIESIQGYQLSNAQKYRMSVINSHLDFVEKSIEKLDVKLNTLVEPYESHIALLCTVPGISRQSAITIISEIGVDMSVFSNSKKFCCWAGLTPGNNESAGKKKSVRITRAGVYLKPALVQVAHAAVKAKDSPYYKNKYERISKRRGKKRAIIAIARMILTAIYNMFSTGEVWNPTDLFKVDMPCALQERQKKKAIRNAFILLQREGLLDDSQITA

SEQ ID NO: 440083 - protein, 406 aa, unidentified
MPRLINRGDTLVTIAGFDNAPTPPIFFDHATTIVGVVELSKKTWVVGGYIPGLERRPLKRVNNHAAGLLDVLVAWRKKAEQAGRTIARIVVAFEAGRDGFWLPRWLQANEIEAYVIHPSSIPVPRGARAKTDRLDTAMLLRAFSAWLRGDTDACRMVAIPSREQEDLRRPSRERAELVTERTRLINRMRSLLTLHGLSQVNPNTPATRRNLAQLRTAEGEPLPPNTFAELERMFERLELIKKQIKAIEDDYIHPARQCVLEREESGLVEQAQKARRQLATIAGVGAATAATLVSEVFTRNFAHRRALARFVGLTGTPDESGSRRRDRGLMKAGSARVRHTMIQLAWRMLYHQPNATLVQWYRERVARANSAGRKTFIVALARKLVIALWRFVQTGELPNGMHLARA

SEQ ID NO: 440084 - protein, 345 aa, unidentified
MEQIIRIGMDTSKYIFQVHGVDASEQPVLRKRLGRKQILEFFAKLPPTVIGMEACGSSHHWARELKQLGHEVKLIAPQHVKPYVKRNKNDGRDAEGLCEAMSRPTMRFVAVIEQQAALMLAGLREQMIARRTQISNAIRGYAAEFGITVAQGLNQIEPLLARLAQDDSVPELARDLFALQGRDYAQLQMELKAIEARLMAWHRANADSRRLAKIPAIGPIGATTLVMKTTDPGAFASGRHFAAWIGLTPKDHSTAGKTRHGKITRAGDERLRSVLVAGATAVIQQARHGRGHPSPWLIALLKRKPPKLAAVALANKTARIAWKLMVTGESYDGARMPKASVIAAA

SEQ ID NO: 440085 - protein, 350 aa, unidentified
MTIVADVVDVVIGVDTHKHTHTAGLVNADTGAELGDLTVSADPDGYAELIEFAERQPGTRIWAIESTSSYGAGLTRHLQTAGEWVIELDRPDRPTRRNGAKSDPLDAYRAAREALSRTRLASPRAPGTRAALAARLAARRSAIEATTTAKCQLNALVITAPETLRARFRGHSTLTMIPIAARLRGHNSWDLETAETALVLRALAKRIIALETEAADHERALTVTITSWRPDLLKLCGVGPINAAVVLCAWSHPGRIHSEAAFAMIAGTAPIPASSGQTMRHRLNRSGDRQLNRAIHNITICRLRHDPTTRAYAERRRSDGKTDREIRRCLKRYITRQLFRQLQHPPLDTP

SEQ ID NO: 440086 - protein, 397 aa, unidentified
MLHESVNIEPVVERVLAGAAQHLPKNRSRRPAGDRRPCGAKNAVAQRDPGRSGILSPNSRQSRRPRASSSHLQGRDGSNMLESIITWIGIDVGKDSLDVAWGEGHKSQRLSGTNSPAGRSALVGQLPPATESRVVVEATGGYERALVTALVEAGYRVAIVNPRQVRDFAKALGVLAKTDRIDALVLARFGHQVQPRILEEDPAMREELTQLVSRRRQLIDLRTMELNRRQQVSVRQAQKSIEHVLKLLAKEIDHIEAEIARLLQSDDDWRAKIKLLSTTPGVAKVTSATLVAEVPELGRLNRQAIAALVGVAPFNDDSGHHRGTRRVKGGRASVRRVLYMAALSARRCNPVIRAFSERLAAQGKKPKVIITACMRKLLVILNTMLKNNTPWKDCHAC

SEQ ID NO: 440087 - protein, 315 aa, unidentified
MTQTSITTAGIDTSKAKLDIAVHGRIERWQVANALPGWRALAANLTRAGVTRVGIEATGGYERGVVEHLRAAGFTVLVLQPMQVKAFGRVHLRHAKNDALDAILIAACAAAMGPPRIAPDPRLADLAGYLTFLEQIEEDLARFKTRLEHIDEPRLRSLVGSDIRRLKARRKAQIRTIAKLLRGHDDLASRLDLVLSIPGIGERTALALIIRMPELGQVSREEAAALAGLAPFDNDSGLRKGQRHIAGGRGRLRKSLFAAALPAAFRWNKALIALYARLIANGKAHNAALIACARKLLVYANTVVQRGTPWVENAA

SEQ ID NO: 440088 - protein, 368 aa, unidentified
MNTVKFIGMDVHKKTITIAIIDQGRKKQPRIYGSIANDLDALDKFCRKMVSTSTRLHFVYEAGPCGYCIYRHLTEKGFDCMVAAPSMIPKKSGDRIKNDRRDAAMLARLHRAGELTAVYVPEAQDEAMRDLTRAREDAVTAVRKAKQRLNAFLLRNGLTFAGRTKWSKAFFGWLSDIAMPYPAQQVAVQEYIDTVHESLKRVDRLTDQIRQLVPGWRLAPVVSALQAARGVSLITAVTVLAELGDLRRFDKPSQLMAYLGLVPSEHSSGQSIKRGAITKTGNGHVRKALVEAAWAYRMQARVSRLLLKRQQGVPERVCQIAWKAQLRLCARYRRLTARGKTKQKVVTAIARELSAFLWAMAKQLQPVV

SEQ ID NO: 440089 - protein, 317 aa, unidentified
MSMTEHFIGIDVSKTQWDLAIHMTGKPWQVAYDTAGVKQVVKYLRTLAPTLIVLEATGGLETCVVSALAAAQLPVAVVNPRQVRAFAHATGTLAKTDRLDAHVLAHFAAAVQPTPRPLPDAATQQLSAVLTRRKQLVDMMTAESNRLGAQPNPAVRKRVRAHLAWLTKEGGRTEKELTQLIQQSPLWRVQDDLLQNAQGVGTVLSQTLLADVPALGHLTHKKMAALIGVAPFNRESGGYRGNRRIWGGRAHVRAVLYMGTLVATRHNPVMKAFYERLLAAGKEKKVALTACMRKLLTILNAMIREQVKWQDRRSITH

SEQ ID NO: 440090 - protein, 422 aa, unidentified
MNESKQFKATIGLDWADQKHDLWIRPANGSKSEHLRLEQSPEALHEWAAKLRKRFDTGQVAIGVETSRGPVISALMSYDFIVLFPINPKALKDYRAAFSVSGAKNDRTDAQLIEEFIRLHSEKLKPLQPDTELTRKLSGFVQDRRHLVDERTRIVNQTHAKLKTYYPLAETLVGSEMNSLMAAEFLSRWPDLESLLAAQAPTLRAFFYKHNSRSAKKMEQRLEAIKTAKALTTDPGIIEPARELVLALAGMLKCLHKSVARLEKTIELAMDRHPDAPIFRSLPGAGPALAPRLLVAFGTQRDRFQSAQEVAQFYGVAPVVIQSGNSEVVRLRRRCPKFGRQTFHENASCVSKTEPWGRTYYEQQRKKHDDKHHQACRALAYKLIRIYFSCWKTRTEYKSNTYLNALQKHGSPLHNKLKRIGE

SEQ ID NO: 440091 - protein, 343 aa, unidentified
MEHYVGLDVSLKLTAICIVDQTGRIEREGVVASNPEAIAAFIKSHAPHVARIGLETGATSTWLWTELNKMGLPVICIDARHAKAALKMQINKSDRNDAVGIARIMQCGWYKEVRVKDLDSHAIKALLVSRALLVKIKRDVENQVRGLLKNLGLVIGRAKMNVFALRAAELTEDRPELAGAVEPLLKTREAIERQIADLDRKVLRLARNDAQVRRFMTAPGVGAITALCFLATIDDPTRFKRSRSVGAYVGLTTRRYASGEVDWTGRISKCGDKLLRSYLYEAANVLLTRVAKWSALKAWGIRLAKRSGLRKAKVAVARKLAVILHRMWIDGTEFNWSTKKAAA

SEQ ID NO: 440092 - protein, 352 aa, unidentified
MSSQELFPNLTIGLDLGDKVSRTCEIDAAGKTVKTAAVATTPGAIERYFGERPPCRVVLEVSTHSPWVSRQLSSLGHEVVVANTGEIFSRRRRKRRNDKLDAEFLARQGRADVKLLYPIQHRGVEAQQDLALLRARDQLVQARTRLISHVRGAVKSLGARISKCDTDVFAKRAAAQLPEPLRPALAPLLEVIGDLTRRIRELDRQVERMQEKYPEAVHLQQPVGVGPLTALAYVLTVEDPKRFKHSRDVGPFFGLVPKLDDSSDSSPQLHITKAGDALVRRYLVSAAHYILGPFGPDCDLRRYGQAIAARGGKNASKRAAVAVARKLAVLLHHLWVTNADYDPNWLESRRAA

SEQ ID NO: 440093 - protein, 413 aa, unidentified
MEVIYQCCCGLDVHKRTIAACVRRLLENGGMHQETRTFGTMTRDILALADWLAAESVTHVALESTGSYWKPVYNILEGRFKMLLVNARHVKHVPGRKTDVKDCQWLAQLLQAGLLRGSFIPERPQRELRDLTRHRSQLVGERSRAANRIQKILEDANIKLASVASDILGASGRDMLRALIRGETDAEKMADLARRQLRSKIPELRPALEGKVTAHHRFMLGELLHHLEYLESRIEEFSRRIEEVSRPFALAIARVATLPGFDQRSAQNVVAEIGVDMEVFPSAPHLASWAGVCPGNNESAGKRKSGKTTKGNRWLRAALSQSAWSAARKKDSYFQAQYRRLAGRRGKKRAIVAVAHSLLTIIYHMLKNASDYQELGCDYLDKLNARSLLPYLLKRIKDMGYQVSLQELSQEAA

SEQ ID NO: 440094 - protein, 411 aa, unidentified
MEIVFERCAGLDVHKETVVACVRQPSEGKLKRRGEVRTYSTMTRGLSELAAWLQSERITHVAMESTGVYWRPVYAVLEEQFEILLVNARHIKGVPGRKTDVRDCEWLAQLLECGLLRGSFVPPQAIRDLRDLTRFRKSLVHERADHVNRIAKVLEMANIKLGSVATDIMGKTGRAILEALIAGQDDPVHLSQLAQGLLKKKTGQLREAVTGRMREHYRFMLRQQLKLIDALDAQISELDVHIEHTMLPFDEAYRLLQTVPGVAQRSAQAILAEIGVDMSRFPSAAQLASWARLCPGNHESAGKRQAVGTGHGNRWLREILQEVAWAAARTKRSYYSAFYQRIRARHGTKKAIVAVQHSLLVAIWNMLRKSAAHEDLGADYFERRSKDQIRRHHVDRLKQLGYEVVLKKEAA

SEQ ID NO: 440095 - protein, 344 aa, unidentified
MKHFVGLDVALKETAICVVDEAGKIIGEGKVLSEPEAIMAWLTPLDLFIGKVGLEIGGLARWLHDQLRAAGLPAVCIDPRRLRGLTKTMPVKTDRNDARAIAQVMRVGWYRAVHVKSEASQELRMLLTNRKTLLTKQIDIENEVRGTLRVFGLKLIGRVTQASFERRALELVAAAPRLAAMVRPMLAARAALRQQCAVLHQMMLDVARRSSTCRRLMTVPGVGALTAVTYLTTIDDPGRFQHSRDLGPHLGLTPRKYASGEVDRNGAISKSGDAPLRATLYQAALALLTRTQRWSTLKAWGIAIARRRGLRRAVVAVARKLAIVLHRIWVDGSEFCWSRQEAVV

SEQ ID NO: 440096 - protein, 406 aa, unidentified
MISVGIDVSKGKSMVCILKPGGEVLEPPFEILHTMESVLSLVRQIKEYEEDVKVVLENTGYYHWPVVTMLVEKGVFVCVVNALRMKKFCSQNIRRVKTDRIDSISIAQFGITYWSELTPVMPQQDTYRELRLLARQYYQTTSMVIKAKVNFCNLCDQAIPGLQSVLCDNKDNHKLTDFVAHYKHSENILKMSETRFTSNYCKWAQKKGYRNCEQTAPRIYAAIQNGIPVLPNSLSTTIVITEAIRVLHEIELSRKTILTQMQELANTLPEYQTILDMKCLGETLAPRLIAEIGDIRKYHNKHSLIAYAGIDAPPYQSGTFNATDRHISKRGNRYLRKTGFEIMQSYIQHKPDDEPVYAFIEKKRNEGKCGKEAMIAGLNKFLRIYYGKVSEVYRNIDEQLTSSVTI

SEQ ID NO: 440097 - protein, 316 aa, unidentified
MVAKSVFVGIDVSKRQLDIAIRPTGEFFSLNNDEAGIASLIRRLLELQPELVVLEATGGYEIPLVFALAQEKLPAVLMNPRFIRDFAKSLGKLAKTDKIDAQVLAHYGEAVQPEPRPLPEPAQLELAALVSRRRQLVEMIAGEENRRQMATPRVRRNIEVLLSELRRLLEELDLDLGDFLRQSPLWHENAKIIRSVPGLGKVITCGLLGYLPELGTLNRKKIAALVGVAPLNRDSGQQRGKRMVWGGRPKIRSLLYMGALVGLRHNPVLRAFYQKLRLAGKPAKVALTACMRKLLTILNAMIKNRTVWCCHESPAV

SEQ ID NO: 440098 - protein, 336 aa, unidentified
MSLYCGIDLHSNNHVVVVIDEEDKRLYEKRLPNDLCTTLQALEPFKGQLVSTVVESTFNWYWLVDGLIDHGYHLELANPTACAQQYSGLKYSDDKHDAFWLAHMRRLNILPTGYIYPPEQRAVRDLLRRRLQLVAMRSKQLTSIQNQVWRSTGIRVKTGDIKRKKFQIPYLEGLLLQAAQTNLTLYRTLEFEIKQLEKTILSKIELAPEFKVLKTIKGVGDILGMTIMLETGDIGRFATMGNYASYCRCVKSVRISNNKIKGRGNAKSGNKYLSWAFSEAAHFTVRFDDRAKRFYQRKKAKTNGIIAIRAVAHKLARASFCMLKNQTEYDPKLAFG

SEQ ID NO: 440099 - protein, 467 aa, unidentified
MKHNRRRPSPGSPRVSPTLLEQLHPHVAGIDCGSAEHYVAVPPDRDSNPVQSFPTFTGDLERLADWLTACRVTSVAMESTGVYWIPVFEILEARGFDVLLVNARQLKNVPGRKSDVTDCEWIRDLHSVGLLRGSFRPTDAMVALRAYLRHRQTLVESAATYIHRMQKGLGQMNLQLALVVSDVAGATGLRILRDIVAGRRDPVQLAEHRDPRCHASKADIIAALTGNYRPEHLFVLDQNLALFDACQAQLAACDRAIDAHLQTLAARVAPSPTPLPAPRVKKRVASNEPRFDIRSPLYRLTGGVDLTQVDGFGPYNALKLISEIGTDMSRWPTEKHFTSWLTLAPNNKISGGRLLGSRTQPSANRAAATFRMAAMSVGRTQTALGAFYRRLAVRIGKPQAITATARKLAVLVYRVLSGTLVYADPGATAYDVQQRTRALRHLHRRAATLGFQLVNRDTGEVLSAAGA

SEQ ID NO: 440100 - protein, 344 aa, unidentified
MTVTTVGIDLAKNIFQIHGVDQHGKTILKKKLKRDQLFTFFANKEPCLIGMEACSGAHFWARVLANQGHHVKLMAPQFVKPYVKTNKNDAADAEAICEAVTRPNMRFVGIKSPDQQALLSLHRARSGLIKAQTAKINQVRGLLTEFGIIIPIGKAAVNRYLPLILEDADNGLPDTFRQVISRLYEHLKELGEHIEQYDRLLNEHFKHCELSQRIASLPGIGLISATAIVGTIGDASEFKNGRQLSAWLGLVPRQHSSGGKNTLLGISKRGDAYLRTLLIHGARSVLIARKNKVSSESWLGGLIHRRNTNVAAVALANKNARTLWAMLTRGEDYNPKQYPDAFAS

SEQ ID NO: 440101 - protein, 344 aa, unidentified
MPHSIKDPHRVPPPETPCCPNGSVVGIDISKDYFDACFEGQHRRYAYSLEGIEAFMSETACLGEARFVMEATGNYFYKLALALVEAGRKSDVVNAYRVRARGKSRLQRHKNDKADARLIDDFAVANREAMMLWQPESQTIAALRQLRTVRRQLQKTATVYENQLHALLQLPESQQSQDALQICKQMIAHCQKQLNLIGKQMQALSDDELKKNDELLDTIAGIGRESALMLLILTGNFTKFRSAKAFADYIGIAPTHYESGTSVKGRGSISKMGDARARQVLYLAAMSAVRHNVACRVFYVRLRQTGRAHKHAVVAVANKLIRQAFAVIRQQAPFETRGAWSVST

SEQ ID NO: 440102 - protein, 342 aa, unidentified
MKETMIGVDLAKSVFQLHGASMTGDVRFRKKLSRPQFMKFMAEHPAAVVVMDACSGASYWARELVRAGHEVKLIAPQYVKPFVKRQKNDAADAEAIVIAAQRPEMRFVLPKTEDQQARAVLFRARERLVHQRTELTNALRALLYEYGHTVPQGKVHLKRIAEIIEAETCDLPGLAREEAQDLLEQIAEKTARIEAKTRKIAAQAALTPTARRLQTMPGVGPMTALAIEAFAPTMAMFKRGRDFAAWLGLVPRQMSSGGKERLGRISKAGQSDIRRLLIIGAMSRLNWMGLKGVREGSWIDRLRARKPKMLVAIALANKMARMIWAMLTKNEDYKDPALAEAT

SEQ ID NO: 440103 - protein, 352 aa, unidentified
MDRYVGLDAHAETCTLAVMGPTGKRLTSRVVETNGHALLEAIRGIPGTIHLCLEEGTQSTWLYEILEPQVSEIVVAMPEESKGAKDDLRDAWARADELRTGRIRTRVYKAPKHMTALRSSAVAYRMATQDVVRVKNRLKAVFRSRGILAESDVYLPRSRSKWLKQLPAGHRELAEWLGRELDTLVPLREEAEERLLKEGKTHPITRKLGTAPGMGPVRTAQLVAIVATPHRFRTSRQFWSYCGLSVVTRSSSDWVRDKHGQWVRAEVQQTRGLNRKRQPVLKAIFKGAATTVLTQLVGHPLHADYQRRLQAGIKPNLAKLTLARRIAAIVLSMWKHEEVYDPARLKVVTDKS

SEQ ID NO: 440104 - protein, 421 aa, unidentified
MENNAARKLKQVPVGYLRVGVDPHKKKHVAVTMTEDFLVQGKFKFTNSRDGFEEALERARADMGKAGCQGVIFAIEAASHLWRNFAYFLDEKGIPFRLINPFSLKRRREGKDLNRRKNDFRDAEVAAQLLCTGEFTETTLPQGVYAELRATYNAYRRVVKERSRLINLLKGLLDGLFPEFTQVFKDLCGQTALRALSICPIPGLIGGMTEEEFVKFAKEGYRGRLMMGKLLALHYVAQHSAGIKAGAWSVSSEVSLLVEKLCLFDRHIQQIEQALVRLVDEAEEGKYLLSIFGLGYISVAGLLAELGSFRSYHNARQMIKMAGSNPTESESAGKRQSKTPMSKKGRSGLRHCGWTAVLSLLRHNPDFRTWAKRLRERPAHANPLTGKEIMGAAINKLLRIGFVLAKKQAFYQLPRVPQLVI

SEQ ID NO: 440105 - protein, 393 aa, unidentified
MIFVGIDVAKLKHDCVIINSDGEILENAFTIENNSKGFSTLKDNILKHLPDMDFKKLKVGLESTGHYSNNIISFISQNSFPLTIFNPLSTNLFRKAQTLRKTKTDKIDALFIATMLFSDDSNPYLPKSYHINEIKSLARHRFRLIDYRAKLKISYGRLLDIIFPELASVVWSVNQTSVYSLLLELPSTKDITECHLIKLTNILSKASKGKYGKEKAIIIRDLSKDSIGTNSIGVSFELQQTIRLIKNVDEEINLLDKKVKALMDELDITIMSIPGISYTLASIIISEIGDIESFSSPAKLLAFSGLEPSTHQSGKFTASYSKMVKRGSKYLRWALLNAARLVALKTPTFESYLKKKRSEGKHYFVALSHVARKLTRVIYQMLKVGDKYKEQMM

SEQ ID NO: 440106 - protein, 320 aa, unidentified
MNIIGFDVSKKELVGIRTDKSALVRDKIIISNNSESIQTFIEEAKTKYPHLLVASEATADYHRNLAEHCLKSGIPFRLINPILTKQFTRATIRKKKTDLTDAWIIAKLALQGEGSLLNIKSLDPLKSINRTAFKIQRIAAMLSAIYQRFERVFPDNQEVLKELAKPLPVLNDTVKNLRSNVDKNIDKSIQKLLVSIPGIGPTIADTLIAEIGDINRFPSGKSLAAYAGLDPKVKQSGVSLKHNTKITKRGSPYLRKSVYISAYIAKRHDPELKEYFDKKIDEGKRYKEAAVATARKILYRVYAVWKRGTPYVKYPQKILT

SEQ ID NO: 440107 - protein, 380 aa, unidentified
MPDVISNQPADVRLWVALDVHKFSIVAATLPPAGGQPEVCQIETTRAAIRRFIDRLGGPEGLAVCYEAGPGGFELLRVLTELGVACDVVAPSLIPVRAGDRVKTDRRDAKKLVRLYRGGQLAYVCPPSPETEGLRDLMRCREDLRCARTAARHRVSKQLLRHGRIYRDGKSQWTKTHRAWIARQRLDDELAHKALSEMLTHLDGLDRQLDALDRDLEQIARGERWSETVQILTRFKGVSTRTALGLIAEIGDFHRFSHPRELCAWLGIVPSEYSSGQQRHRGHITKTGNHHARRLLIEAAWSYHHPPRVRERGPQTDERAWQAQIRLHRRYKHLTEHGKRSTVATVAVARELAGFLWAAATHQPLAQAAAKDQPILEAAA

SEQ ID NO: 440108 - protein, 350 aa, unidentified
MQYLGIDWGTRRAAWCSLTASGELTEGAISADEEGLMRLVARLGPDVRGCIEMMSGAPWVRDRLAECGWTIEIADARKVKAIAPLACKTDRVDARVLADLARRDLVPTVWVPPLDDRAIRERLRRRSHLIRLRTSAINRTFGLQTQWGLRRNLTALRKPGALDELAAHGVPEVWRHSIVTLLSVIDDLDRQLAPLERELRPLARTDARARLLMSIPGVAELLGLTIASEIGDIARFPSARKLVGYSGLTPRIKQSGQSSRVGRISKAGPDTLRWAAVEAAQHAWRPTNPWHELYSDIKRRHGKSNPAKAAVARKILIAAWHILSLGEPFKPSAPRATEPAPASSSIRLAA

SEQ ID NO: 440109 - protein, 418 aa, unidentified
MSPIIAAIDIHKKVIMVARTSATVEVENAYESIKFECRRFGTGNAERERLIRWLQDRSVAEIVMESTAQYWKPIWLDLEPHFAKLHLAQAHSNRAPKGRKNDFRDAKRLARRLLAGELMLSFVPGPEQRTWRTLTRSKQQLIRDRVRLQNQLESLLEEMRIKLSSIISDLFGLSGRRILQALSKGETDPVKLAQLGDDRLKCSRQELADALRGSPTATQLAVLKMGLERLEVFDRQIQDLEQLLALDLKKHEDAVIRVAEIPGFGANSAQQIIAEIGVDVATFPSAGEFSSWTGICPGSNVTADENKGSRSPKGNRFVRTILTQAAQAAVRKKGCHFQSVFRRLLPKLGYNGAIWAIAHKLGRLVWKILRHGVHYIEQGDETNPKAKKRRAQKLAQALRKLGYSVTLTPLTPQSQAEG

SEQ ID NO: 440110 - protein, 385 aa, unidentified
MSQFSGCPQAAINYDSTIIGALELSNKKWVVAVQLPGVSRHSRHVLDASGDGLVSFVERLRAKCAASGRKITRVILTHEAGRDGFWLARFLARRGIEVHVIQPSSLPVDRRARRAKTDIIDVEMLLRTLMAWLRGEPRVCSMVPIPSEADEEARRAHREREDLTGERRSIVNKIDAILATLGVKGYKALRRDRREQLNGARQPDGDPIPARAKARIERLLDRLDLVLKLIERVEAERDAVLKKDAPADEAEGMIRSLTELRAIGPDFATLLVREAFVRPFRNRRALGGYVGLGGTPFSSGGSEREQGIGKDGNRRVRAAMVELAWMWLRWQPDSGLSVWFRARVGAMGGRIKKIMIVALARKLLVALWRYVKDGVIPEGAKMKAA

SEQ ID NO: 440111 - protein, 438 aa, unidentified
MSNKVIFNLDELFISVGIDVGADFSWMSIALPNQQFVGKPYKILHNSIASLTTAVSKIKEAEELYSLESRIFLESTGIYHYPLFCYLRDKGFNCSVINPIITKNSTNINIRKVHNDRFDSKKAALIGLKPDLKVSLMPSNLALNCRNLCREYYDLMDNRSAYVNKLQGELRMAFPQYLGIFSKVTINTSLTLLETYTSPSAFLEADKQEIIDIIRSTARFGLTYAQNKYNAIIQAATDANQFGYIINSNIKRIRLYISFIRKYDEEINSILESLHELVDANEDADFVKQIHLIETFKGAGFLSAVSIMGEIGDFSAFSKPKQLFAYFGLDPAVKQSGKFEGTKIQMSKRGSAIARRVIHTLTLQSISISRNGEAKNPVLREYYLKKCDSKPKLVAMGAVSHKVCNMLFAILRDNKPFKIIAPQEHIKQYNAAKCDMAA

SEQ ID NO: 440112 - protein, 347 aa, unidentified
MNTGGVPWTIGIDLGKTVFHLVGVNARGEVVVRKKCSRIQLLRFTSNLRECLIGMEACGGSHFLGRALREQGHDVRLMPAQYVKPYVKTNKNDCIDAEAIAEAVTRPTMRFVPIKTDDQLDLQSLHRVRERWVMRRTAVINQMRGLLLERGITIRKGRRHVEASLPRILEDPDNKLSGALRVLLAQLQLEMQYLHRQIEESDKLIVRIAGELEPCRRLVAIPGIGPITATATIAAIGNEAAFKKGRGFAAWLGVVPGEHSTGGKQKLTGISRRGNKYLRKLFVQGAHTVLLQRTKQSVGLSTWLTNLVTCKRKQVATVALANKMARMVWAVLFKGEAYRPPLQIVAA

SEQ ID NO: 440113 - protein, 310 aa, unidentified
MDAIYVGIDVSKDRLDVHIRPSGEAFAVARDGKGLEDLVLRLKACAPTLVAIEATGGFETIVAAALASAQLPLVVINPAQIRHFAQAVGQRAKTDPIDAAIIARFVEAVKPTLRAIPDQQARLLAELVSRRRQIIEMIVAERQREKRAENVRVRKSLARHIKVLEKELPAIDSDIDTLVRGSPVWRAKEELMVSFPGVSNTLARIFLAEAPELGTLNRRQIASLGGLAPFTRQSGRWKGKSMIGGGRGALRAGLYMAALSAIRCHPQLKIFYRRLLAAGKPKMVALIAVARKVLTTLNAIIRDQKPWQPA

SEQ ID NO: 440114 - protein, 341 aa, unidentified
MEEYIGLDVSMKETAVSIRRAGERIWRGKCASDPRIIAELIRKRAPSVKRVVFETGPLSVWFYHSLRAEGLPAICIDARHAKAALDMAANKTDANDADGLAQLAEVGFFREVRVKEFDSMLTRTLVAARTRLVRITTELSNQIRGVMKTFGLLVPAGKGSTFEKNVRSLLANQDGLASIVLPMLEAWRGIRIRAAELGRQLVRDARQSEACRILMSVPGIGAITATAFTTAIERPDNFKKSRSVGAWIGLTTRRYQSGEVDYDGHISRRGDHHLRGLLYEAAAVILTRSSTDSTLRTWGLQLRQRIGFKRAAVAVARKLAVIMHTMLKTGELFNPNAGAAA

SEQ ID NO: 440115 - protein, 311 aa, unidentified
MYYIGIDVSKKDLSVFDGKDLKFINQEGLKSFKKYLKKKYSLSEIVIIFEPTGIYSQYLKEFCAENSIKAYIINPKRSHNFARSLGIRPKTDKIDARTLYQFHKLIDLKDIKVPKIDQQAKTLASYLVSYEFAVKQRVALSNHLESLRDKQLITLIKKELKRAQELEDKIFNDIKKYVSKNQNLKEDYQRLLTISGVGEKTAIALLTLFKTYPGTNRSQITALVGLDPTRRESGTSVKGKVKISKNGKGIYRKIFYLPTVCATVHNQKIRIFYQRLLANHKTKKLAIIASMRKILLIAHAMYRDKTEYVAA

SEQ ID NO: 440116 - protein, 392 aa, unidentified
MYIVGIDIGKNHHEASIVSPEGKQIGRSLRFATTHKGADSLMSFIFKNIGNSPCVFGMEATVHYWYPIYSFLKAKGYTIYVINPIQSDSLRKMYIRQTKNDSIDSFLIAEVIRFGQFGTTSMADENILAMRQLCRYRDSVISSRTEIKLRIGTIMEQIFPEYEKQFSSLWVSTSMGILEKYLTPENIKNAPIDKLFEIIKDKSHNRLTRAKAISIKDAAADTFGIKIAQDAFSFQLKQLIDRMNFLDKQIEALDCQILEYYEKFDCYLHTIPGIGMIAAATILAEIGDINRFKSSSALVAFAGIDPTVRQSGEFSSTHNHMSKRGSPYLRHAIFLAASTCSFHNSPLNAYYKKKRDQGKHHLTATGAVARKLTTVICAVLRDSKPYEPKKFC

SEQ ID NO: 440117 - protein, 444 aa, unidentified
MAMRKREDEVFPNAAGIDIGASSHWVAAPRHLAEAAGCEPVREVGAMTEDLNALASWLVSLGVDTVAVESTGVYWIPVFEVLEQHGLKVWLVDARQMKYVPGRKSDVQDCQWLQKLMSLGLLRAAWRPSAEVCVLRAVARQRETLQTSQASWVQRMQKALVQMNIQLTEVVTDVMGVTGQAIVRDIVAGVRDPRQLARHRQRRVKASEAEIAKALEGNWREEHLFVLKQSLAMYDDIARHLADCDARLDGLLDARSRTQVALGKLPRAGSKTRVEHDIRQRLANWAGVDLTRINGLGVTVVMKLLTEIGPDVSRFASVKHFCSWLGLCPGTKISGGKVLSSGTKRSANRARQALKMAAQSLWRSESALGAFYRRLSSRMDKPKANTAAAHKLARMVYFMLTRGEAFVDQGQQRYEEQQRQRSIVALKRRAAALGFQINPVETAA

SEQ ID NO: 440118 - protein, 399 aa, unidentified
MADRLFSVFLGIDVSKEKFDVCCINSTGEKLFRTSLSMGKEGFDELSRKLSSLSVPKESILIGMESTACYHINLFSFLTSLGYTVVIINPLLISNFMKLQLRKTKTDKKDAFVIAQFLVLNRESLSESSVSSDIADLRDLSRQRESLVHQMNAVKHEIKRVLTITFPELERITGIFSKSMLRLLQHYPSAYAIRKAKRTKIAKVLIQGSYGKQDDESVQRIKEVAERSIGTTSPAKEVILKQKASLLMQMEEHLEELTDILIDQCKAMIREDVEILKSIKGVGDKTATNFLLELGGDINKFKSHRQVLAMAGIDPTVYQSGKYIGQSKISKRGNRHLRRVIWIMATKVIQFNRIFKLYHAKRMKDGLPYKKAVLATAHKLVRVMFSMLTNKTIFIAKAN

SEQ ID NO: 440119 - protein, 319 aa, unidentified
MRRIVLGIDVSKKTLDAALIFDNRTFCKQFKNSSEGFELLAAWLAFLQITQVHACLEATGSYGEAVALFLHERGHLVSVVNPLRIKGYAQSNMQRNKTDRLDARLIASFCLTQEPDEWLPPSAEVKQLQAFMRRIEVLEEMRQAEENRLANAESLVQPSIGRMIHLLKEEIIQLEKQIKEHIDRHPNLKEQSRLLETIPGIGARTAHLLLSEIEFERYSSARSIAAQAGVTPRKRQSGTSLKQTNLSKLGNARLRKALYFPAIVARQHNEIVKEFAERLKKKGKAPMQIVCAAMRKLLHIAFGVLKHKRAFDSSLAFSA

SEQ ID NO: 440120 - protein, 343 aa, unidentified
MQTITTIGLDIAKSVFQVHGVDAGGQVIVRRQLKRRYVLTFFQKLSPCLVGIEACASAHHWSRELQALGHTVRLMPPAYVKPYVKRQKNDATDAEAICEAVTRANMRFVPTKTPEQQSGLVLHRTRHLFVRQQTSVINAIRAHLAEFGIVAPVGRHGVEELLTVVADPNDRRVPEIARACLSALGAQLRRMKEQILEFDRLIRAWHRSNEMSMRLEEAPGVGPVLATALVAAVADPQSFRSGRNFSAWIGIVPKQHSSGGKNRLGNISKQGDRYLRGLFVAGALSVIRYAKIHGTGHRPWLTALLARRPTKVAAIALANKIARMVWAMMARGERYKEPVALAR

SEQ ID NO: 440121 - protein, 395 aa, unidentified
MYSLLVGIDVSKDFFATAGIDSEGKESFSRSCSMDSNGFGDFLKTITSHCEDLSKVMVAMESTGCYHINLFSFLTSQGIHAMVVNPLLIANFAKLSLRKTKTDKKDAMTIARFLMDHHEEVSHLSLSQDHQDLRDLSRERESLCHLMAATKVEIKRVLRTTFPELESIGNLYTGAMLRFLQQFPSARLVRAAKPKAITKALKQPYVGNKLTYSAKDILQAANTSIGTVSPAKEIILQGKIATLLHLQERLDEMTKLLTDLCKATRIDDLKILKSIKGVGLKTAAPFLAEMGEVQNYASHKKLIAFTGIDPSLHQSGNYIGMSKLSKRGNRHLRRAVYLMAAAVASKNPFFKAYFLRRKREGLPPQKALFATAHKLLRVIFAMLTQRTYFNPKEVI

SEQ ID NO: 440122 - protein, 415 aa, unidentified
MNRLIERCAMLDIHKSQITACVRVPDDAGGRRQEICEFRTTTAGLLTLADWLRSWAVTVVGMESTGVYWRAVFYLLEDEFECQLFNARHLRHVPGRKSDVQDAEWGCQLIEHGLVRTSFVPPRPLRELRDLVRYRKAKIQERGREVQRVEKTLQDAGIKLSSVASEVLGVSARKMLDALISGTHDPDELAELAKGALRKKIPALREALAGRFTGHHALLVGQMLAQIDFLDETIATLSARVEELTRPFSRELELLDTIPGVDQRAAEMLLAEIGPDMTRFPTEHHLASWGGMCPGQRESGAKKHSAATRKGSKWLRGTLTECSKAVVRTKGTYLSARYHRIKSRRGHAKATVATGHKILTAAYHVLNRGVPYHELGEEFFYRRDAEASERYRRRLIHQLERLGHKVTLEPLPDAA

SEQ ID NO: 440123 - protein, 311 aa, unidentified
MDKVQAGIDVSKATLDVSVSNQKVIKSFPNEERGVKQVVSYLRKHKPELTVMEATGGMEKLLAACLVEAAIPVVVVNPRQVRDFAKAKGKLAKTDSIDACILAEFAREIHPEVRPLSDKQTEEIKAMLVRRQQLRDMITMENNRLWSADMRVIPSIQDHLNWLKQELKNMDKDLEEKIQKSQIWREKDNLLRSVPGVGPVLSITLLGALPELGSMNGKQIAALAGVAPFNRDSGKYRGKRMIKGGRGRVRAALYMATLVATRFNPVIKAYYNHLLEMGKLKKVALVACMRKLLVILNAMIRDHRYWQCATY

SEQ ID NO: 440124 - protein, 390 aa, unidentified
MAAVMIGVDPHKASHTAVVISAAEEVRGELRVHACVAQAERLLAWATAWPQRTWAVEGAGGLGHLLAQQLVAAGERVLDVPPKLGARVRLLAAGDMNKNDPNDARSVAVAALRSADVREVRADDHAAVLKIWSKRYRDLSRTRTQVICRLHAVLCDLVPGGVPKVITAARAARILRALRGGSDAVAAARRELAAAYLDDLRRIDAQQRETRKKLAVAVAATGTSLTGLFGVGPVIAAAVIGDVRDVSRFGSRDHFAAYSGTAPVEVSSGPRKIYRLSRRGNRRLNHAIHMAAITQIHHRHSQGRAYHDKKRAEGKTGKEALRSLKRQMWFLAGVVAVSCMLAVVLGAYGVLAQTSTTATPGRSCTVVQQVSVGLDLTCRWAPAWPGRAAT

SEQ ID NO: 440125 - protein, 354 aa, unidentified
MKLYVGLDVGLEETSLCIVDAEGVTVREVKVSTEPAAIRSAFEGCADHLDRVGVEASSLGIWLYRELQPAGVPIIVVEARHMRVSLSTMRNKTDRNDARGIAQMMRLGWYRAVHVKNIDMQKMRSLLANRKLLKRKLIDIENHIRGTLRAYGLLIGAVGRGGYEARVRELLERSDPIFSMMIEAMLDVRRAIFEGYERLHKVLLQVVQHDMVCRRLMTVPGVGPVAALSFKVGVDDPRRFARSRTVGAHFGLTPRRHQSGTSIDYEGRVSKQGDVAVREALCEAAASLLLRVRKWSALRAWGLRIAKRSSMLCAIVAVARKLAGILHRMWVNETDFHVGFGAKVTQRLRLKPAQ

SEQ ID NO: 440126 - protein, 408 aa, unidentified
MQKRENLLYVGIDLHKETHTAVMVNCWNEKLEVVVIENKPSEFKKLAEKVNRKSNYLGLEPIYGLENAYGYGRSLAVWLIEYGYIVKDINPALAYDQRKSAPMYRKNDEHDAYCVATVLINQLHTLPDAKPKDNEWTLAQLVNRRDLLVKDGIRFKNGLHEQISMAYPSYSKFFSDVDGKCAMYFWKTYPSPVHLQEKTVEELTMEFKEISPIIRKDKAELILDCIHNDGDTFREYQESRDFITISLVRDLEHQKEELAGLDKEIEKILLSFEYKLTSMPGIGTSIASKLIAEIGDIRRFPSADKLARFAGVAPVKFSSAGKGKEQSSRQGNRQLHGLFYFLAVTMVSRPKNGAPNHPVFYEYYMRKIGEGKTKSQALVCIMRRLVNIVYGMMKNKTEYREPLPEIEQ

SEQ ID NO: 440127 - protein, 328 aa, unidentified
MCELTGIDVSKEKFDVGWLRDVKTDKKKTKVFINTAVGHQQAVDWLLKNLKVPAEDIVITLEPTGVYHEALLYFLHDCGFQMLLVNPGKAKKYAESMNQLHKTDKLDAITLAYYGHAQHYKLTLWQPESPEIRELKAMIRRLDALEKDLQREQNRQEAALVSLSSDRVAQSLKDMIETLKAEIQRLQQDIDNHIDRFPELKRNRQLLQSIKGIGPVMSRELVYLFASKRFKSAKQAAAYIGLIPRLNESGKRKGRTTLSKMGSARIRAKLYMAAVCASAHNPDIKAQKARLLKAGKVKMQALGAAMRKLIQICFGVIKHQCEYQPQLV

SEQ ID NO: 440128 - protein, 420 aa, unidentified
MNESIEEAAELVQRVAALDIGKASLVACVRVPHDTNPGKRRQETRTFATTTSSLLGLRDWLVCQGVTRCVMEATSTYWKPPFYLLEDDIECWVVNARDVKNVPGRPKTDRLDAVWLCKLAERGMLRPSFVPPPWQRELRDLCRYRRTLIRERTREKQRAEKLMEDTQIKLSSVISDMFGVSGRQMLEALIAGQRDPKVLADMARGSMRAKISVLREALTGHFRDHHGYLLRMMLERIDALSAQIHQLDARIDQALLPFAHQVAQLDEIPGVGRTGAQEIIAEIGLDMERFPTAGHLVSWAKFAPKAKQSAGRNKSSSTGKGNPWIGGTLGEAAMAASRTKTFLGSRYRRVAKRRGKKRALVALGNSILTITYHLLSDPHAHFADLGADYHDRLTPERRKRQLIRELERLSGRKVTLQQAA

SEQ ID NO: 440129 - protein, 402 aa, unidentified
MNAVGIDVSKGKSMVAIMRPFGEIVSTPFEIKHTSSDINSLVKLIKSIEGESRIVMEHTGRYYEVLAHQLSEANLFVSAINPKLIKDFDNDSLRKVKTDKADSVKIARYALDKWQNLKQYSVMDELRNQLKTMNRQFGFYMKHKTAMKNNLIGILDQTYPGVNTYFDSPARSDGSQKWVDFASTYWHVDCVRKMSLNSFIDHYQNWCKRKKYNFSQSKAEEIYGKAKELVPVLSKDAITKLIIKQAVDQLNSASTTVESLRTLMNETASKLPEYPVVMAMKGVGTSLGPQLMAEIGNVSRFTHKSAITAFAGVDPGVNESGSYEQKSVPTSKRGSSDLRKTLFQVMDVLIKTHPQDDPVYQFLDKKRAQKKPYYVYMTAGANKFLRIYYGRVKEYLASLPES

SEQ ID NO: 440130 - protein, 361 aa, unidentified
MVVMVGVDVHKDTHCAVAVDEVGRQLGSARTFRTTDAGCLQLLRWAQQQAREHAGDGVAVMVAVEDCRHLTGRLERALLAAGTRVVRVPPKLMAGTRQSARTRGKSDPIDALAIARAALREPDLPVAEHSHASRTLKLLVDHREDLVNTRTRVQNRLRWHLHELDPGIDPKSRGLGQTSELDRVEQRLRVLPDEAASATVRRIALELVGDVRALTVRINDLERELRVLVRQQAPQLLDLPGCGVLTAAKIVGETANPSRFRSEACFAMHSGVAPIPASSGRTDRYRLARGGNRQLNAALHRIAVTQTRLEGPGKIYYQHRLARNDSKMEALRALKRRLARVVFQRLKPTNQPAAAPLPQAA

SEQ ID NO: 440131 - protein, 322 aa, unidentified
MSLPGPLCVGIDISKATLDIAASSAIAQFSVANDADGFDSIIAELRKHSVALVLMEATGGLEAAVACALQAEGFELAVVNPRQARDFARAMGYLAKTDSIDARALAQMAEVINRHPERDRFIRALPDAERLALNAIVVRRRQLIAMLVAERNRLYPAHPQSRKSLNIIIKALEDELARIDDDMNNHIRSHFKALSERLSSIKGVGTMTVAALLAEVPELGRLSRREISALVGVAPVNRDSGTMRGRRTIFGGRAGVRTALYMSALVATRFNPVIKEFYTRLVAAGKPKKVALVACMRKLLTILNAMLRKNEEWNESYHHVVP

SEQ ID NO: 440132 - protein, 334 aa, unidentified
MSIVSTVGIDLAKNVFSVHGVDVRGVVLIRRTVARAKLAQLVAQLPPCLIGMEACSGAHEWARRFAAFGHIAKLMAPKFVTPYRKSGKNDGNDAEAICEAVARPNMRFVPIKSIEQQADLTLHRVRQGYVEERTAMLNRIRGLLAEFGHVLPLRAAEVRRRVPELLEKLPTRVANCVRDLLEHAVRLEAKVLEYEREIRAHVRTNALAQRAQTRLGIGPITASALVATIGNAHDFKNGRQFAAWLGLVPRQYSTGGKTRLGHITKRGDPYLRTLLVMGARAVLQGALRLNDPLSRWALALQQRRGYHRACVAIAAKNARIAWALLAKDTVIAAA

SEQ ID NO: 440133 - protein, 355 aa, unidentified
MNSIKYVGLDVHQSTISVAVLNAEGKLVMQSILATEARAILDFFQGLRGTLHVTLEEGTHAAWLYDLLVRRVARLVVCNPRKNALLKAGNKSDAIDARKLAELLRAGMLSPVYQGQRSTAAIKQLGRSYSALTEDTTRTMGRLKALYRSHAIACAGEKPYSPRHRDEYLRQLDEPGMQRRAQRLYQQLDLLQQLRREARHDLLLECRKHRENQLLRSIPWLGPIRTALLLARVQTPHRFRSKRQFWAYCGLALETRSSADYQMVNGQIQRRSKPVFIRGLNLNHNHDLKNLFKAAATAASGGSGVFRSFYENLLLKGIKPELARLTLARKIAAITLHIWKKGVPFDADYLMPHAV

SEQ ID NO: 440134 - protein, 425 aa, unidentified
MLEEVEDTEQVIERIAALDIGKAELTCCVRVPSTKTPGRRMQEVRAYSTMTGSLLALSDRLHELGVSRVVMEATSDYWKPPYYILESAGFEVWLVNAKDVKHLPGRPKSDTIDSVWLCKVGERQMIRPSFVPPVEVRALRDLTRYRVDLVAACTADKQRTEKFLEDACIKVSSVVSDLFGVSGRDMMRALIAGERDPRVLARLARGRMRGKIATLEEAFTGYFTDHHAFLLAKMLARVEAIEADIADIDAKIDTEMAAIAPFADAADRLAQIPGLGRVSTHALLAEIGLDMTRFPTPGHLCSWLKFTPITSESAGKKKGKNATGHGNRYAGRILGEAAVAAGKTNTFLGERYRRVARRRGKKKAIVAVGRSILVIVWHLLSDPDTRFHDLGSDFYDRRINPDRRKHNHIRQLQALGYKVILEPAA

SEQ ID NO: 440135 - protein, 456 aa, unidentified
MQNYYLGADVSKGYADFVILDAHKQTVEPNFQLDDTFDGHCKLYEILSRFLQEHPDGMLFAAVESIGGYENNWLHTLMRFQATLNMKSARLNPFGVNANSKASLRRVITDKISARDVAEYMISHPEKVSYQQEDYWGSLRKLWGFFNMLTKQKTQLFNQLESLLYSANPEIMAYCKKKSPLWLLEVLRRYPTAQKLSEAIPESLALIPHVSAVRAQELIDKAKRSVASRSDGITEELIVETVEQIIHLKTVIQVQEKKMGDLCSLPEIALLMTFKGIGITSAIGLMIEIQALERFASVKKLASFFGLHPVFKISGDNIGGYHMSKQGRKNPRRILFMVTMASLSNNPHIRGIYEEHTQKGMKGMAAVGLCMHKILRIIYGMLKHNQPYDPEIDVNNREKMVQKQIAIVKDKNRRYQSFDDKAPVSRRKYKKRTERKVSHSDNFTNCGIIVSAPSRN

SEQ ID NO: 440136 - protein, 389 aa, unidentified
MSQAFDASRSLTALEQHNTIIAVVEMSQSKWLVAAVVPGIKRQPLKKLDADQESLLKLLHRWRKEAELAGHPIKRVVVAYEAGRDGFWLARWLRMHDVEAYVIHPTSIAVSREHRRAKTDRLDTELLLRALLGWLRGEKRHCSMVAIPTAEEEDAKRPNRERDSLVTEQTRIVNQIKAILIRFGIRSFRPKLRKAEQLLRDLRTAEGSPLPDNTRAEMYRHLVRLRMVREQIRAVETERLQKLKAEHGRKKGPHAMVRLIARVVGIGVETADMLVNEVFSRQFRDRRAVARYAGLTGSPDESGKRRREKGLARAGNARVRTGMIQLAWRFLRFQEDSALAQWFQTRAADGRGSTRKTMIVALARKLLIALWRLVTTGELSDGIVLRPAS

SEQ ID NO: 440137 - protein, 389 aa, unidentified
MSQPFDASRSLTVLEQDSTIIAVIEMSQSKWLVSAVVPGVERQPLKKLDPDEEALRKLLHRWRNEAGQAGREIKRIVVAYEAGRDGFWLARWLQARDVEAYVIHPASVAVSREHRRAKTDRLDTELLMRAFLGWLRGEKRHCSMAAIPTAEEEDAKRPNRERGNLVTDQTRIVNQIKAILARFGIRTFRPTLRKAAEKLDGLRTAEGTPLLENTRAELRRHLARLRVVREQIRAIEHERLRKFAAAPAGVKGPHAMVRLIARVVGVGVETADMLVNEVLSRHLRDRKAVARYAGLTGSPDESGRRRRERGLARAGNARVRCGMIQLAWRFLRFQKDSALAQWFDARTADGRGSTRKTMIVALARKLLIALWQLVTTGEMPRGVVLRPAS

SEQ ID NO: 440138 - protein, 332 aa, unidentified
MENFYFIGVDVSKKKLDFCVMFEGKVVHEEETANHQNAIMALLHQFEEDYGIAGGQMLVCAEHTGQYTFPLACACKAVECKLWLENPAEIKYSSGVQRGKNDKVDAKRITIYAKRFQDRVQYYERPTEDIERLKQLESERTLYVTDLAKYKGQMKDQKDYMPRKLYERKMKRLQTLMDDLEKAIQAITYEMDEVIASCPVLCRQRELLMSIDGVGRVVATNMIITTEAFTRFDDPRKFNCYAGVAPFSYSSGSSQHSKARVSHRADKVMKRLLHLAAVAVTHRIGGELKKYYERKVAEGKNKMSVINALRAKIVARMFAVIKRNEKYKPILS

SEQ ID NO: 440139 - protein, 340 aa, unidentified
MIIGCDFHPRFQQIAFLDQETGEYGERRLSHPEEAQRFYRSLVGRRVRLGAEATGNFRWFRLLMQELGHEFLLGDATTIRAACPRKQKTDKRDARHILKLLVEDRFPDVWQPPEENENLRQLLMHRCRMVRMRTRIKNQLDSMAKNEGLLSKRVWCPMRRNQIEALPLAGWNVERRRDLIALLEEMNRRIEPLDEAVIKAAEQNPEACLLMTHPGVGPVVSLAYVLTIGNWERFPRGKQVGSYLGLIPVEESSSDKRRLGHISKQGNTTLRWLLVEAAATAQRYDPSWHRQYVRLSMTKHHGVAKVAIAHKLAVRLYWMLRSGEDYDKVMERGSHVGQSE

SEQ ID NO: 440140 - protein, 367 aa, unidentified
MKKVSIRAAAQSRNISQQKLTIGLDLGDRNSWYCVVDETGQIQLEQRVRTSAKALQEVFGAIPRSRIALEIGTHSPWISRLLSELGHEVIVANARKVRLIGESRKKDDRLDAQTLARLARIDPELLYPVKHRSAQAQADLMMIRARAGLVRARTGLVNTARGLAKSYGERLRGCNVRNMNPEKAESLSPELQAALEPLLNAIESLSERIVEYNEGIEKLAQQSYPQVALLKQIKGVGTLIALTFLLTLEDPHRFRKSRDVGCYLGLQPGRRNSGQSEPQLHISKEGDPYLRTLLVQGAQHILGPFGVDCDLRRWGLKLAERGGRNGKKRAIVATARKLAVLLHHLWVSGEVYEPLHNGSRVNVAAAA

SEQ ID NO: 440141 - protein, 344 aa, unidentified
MEKYSRIGMDTSKQIFQLHGVDGSERVILRRKLKRREVLRFFGGLSPTMVGMEACGGAHYWARELAHLGHEVRLIAPQYVKPYVKRGKNDAADAEAICEAMSRPTMRFVPVKSAASQAALMLAGLRERLVRNRVQLANAIRGYAAEFGLVAARGRARIEPLLSRLQADQTIPALARELFAEQAKEYAQLEAQLATIDARLMAWHRANEPSRRLAQIPGVGPVIASLLAMKTPEPHAFRSGRQFAAWIGLTPKNHSTAGKTRLGVITRAGDETLRSLLVVGATAVIWQVRRGTGRGASPWLLALLRRKPPKLAAVALANKIARIAWKLMTTGETYHAGRALPAPA

SEQ ID NO: 440142 - protein, 431 aa, unidentified
MRTHRRGVRPGPGPSSTLITPDRAGNVVGVDPHKRTLTATIVDPRGGIVAWEHFRVSGDGHRALEAWARQFGAIARVGVEGASAWGRHTAIFLAARGYDVRDVCPNRTARHDRARQRGKSDMLDAERIARETLAHPLLPRAFKRAGQDHGPDQHAELLAVWWGARCSLIKRRQHLLTEVEALLRELPLALIESLPDTERVRPRLVALARLTRRRRFDPPTMVRLTVLGSYRVEIAKLDAEEKQIRSELARLIQASGSTLEELCGLSTVSVAELLVETGDPRRFTIGGFGRFNGTAPLAASTAEGPGEPIRHRYNPGGNRRVNAILYRMALTQLRCEPRAKTIYANARANGHTKKEARRILKRHLSDVVYRRMIRDLEAQLTRPAPPGRVTVRGRRAVKSGPTGPSAASCNAAPLTAIAGHAPPSRQEGILT

SEQ ID NO: 440143 - protein, 400 aa, unidentified
MTENGITFVGMDAHKQAINVAMLLPGQSQAVEWLVANEPGAIRRLAKKLEREAPGEVRCCYEAGPCGYALQRELQHAGGIICEVVAPSLIPVKPGERIKTDRRDARKLAELLRADLLTEVHTPTVEQEAVRDLGRGREDAQEDLTRARQRMGKFLLRRALIFTASKRAWGQLHRQWLRGLRFEYAADQAVFDDYLLGIEQLEERVRTLETKLIAAAEQAPYREPVGWLRCFRGIDTVTAITLVAELHDFRRFATARARMAYLGLVPSEYSSGLSRHRGSITKTGNRHVRRVLVETAWHYRHRGKAGKILRARRQDQPGSVIALAERAQERLYRRFRHLEESGKPRPKVVVAIARELVGFLWAAMLPANRAAQAKQTMTQGSRRSTIAALRSKTEVVSLNR

SEQ ID NO: 440144 - protein, 369 aa, unidentified
MTENTLFVGMDVHKKTISVALVEGTAGAEVRFYGTISNTPDVIRGLYKKLSKGGQQLHICYEAGPCGYGVQRQSVKLGHRCDVVAPALIPRKVGDKVKTDRRDAMMLAQTLRAGQLTAVWVPDEAHEAMRDLVRLRSQAMRDLRKTRQHLLSFLLRHGLTSVYGHWTKAHRRWLGELTFAHPAQHLAHEEMLHRIERAEALCDRLKQAIVDLVPQWTLAPVVQAIQALRGVSLIVAAVIVAEVGCFSRFDSPRQLMAYLGLNPSEHSSGSTTRRGTITKTGNALARTCLVEAAWTYRFPARVTQIIRDRLKQLPEPIRNVAWKAQVRLSARYRRLAAAGKALPKVVVAIARELVGFIWAIARMVEPKFA

SEQ ID NO: 440145 - protein, 345 aa, unidentified
MTEAYDGRQVVGMDLHRRRSVLVRMTEDGRKLETVRIENSPAALRAVIARAGDNPRVVVEATYGWYWAVDVLEAAGAEVHLAHPLGVKAFSYRRVKNDERDCADLADLLRLGRLPEAWIAPEPVRALREITRYRHKLVGQRTSCKDQVHAVLAKAGIPVTRSDIFGRGGGIWLDGLPLPQPYAGKIASLRALIAVLDGEIARLEEQAAAMLAGYRGYAAIRQLPGIGPVLGAVIAAEIGDITRFRNPGQLASWAGLTPRHYESDTRVIRGRVSKQGSRMLRWALVEAIQRQPAGTRPREVKDAIIARRGKEARDIAKVAAARQMLTLVFYGLRDGHIRRVTSQAA

SEQ ID NO: 440146 - protein, 337 aa, unidentified
MNVTLIGIDLAKSVFQVCAVNQAGKPVFNRQVKRQRLLALLLEYPKAIVAMEACSGSNYWGRTLQRHGMDVRLIPPQHVKPFVKGNKNDRNDAFAITEAAQRPHLRCVPPRTLAQTDLIQAHRVRERQVNQRTALTNQIRGLLNEYGIVLPQGRRRLQSALPGLLENADNELTPEARVLLEELLIEWQQRDAAINRLDRRIDRQAKGSDAAQRLMTVKGIAEKTATALVAHAGDGRAYRNGRELAANLGLVPREHSSGGKQNLGGLTRRGNTYLRRMLIQGAGSVLRNAHRNHDRLSCWARQVAERRGKHKAVGAIANKMARISWALMYYQQSYRSA

SEQ ID NO: 440147 - protein, 387 aa, unidentified
MPQRDDLSRSLVPFQQDGTLVAVVELSRSSWLVAGIVPGIGRHPLKKLDPSEGALLALLRRWRDEAAGAGRPITRLAVAFEAGRDGFWLARWLRARGVEAHVIHPTSVAVSREHRRAKTDRLDTGLLKRAFLGWLRGEPGHCTMAAVPTLEEEDAKRPSREREGLVGERTRIVNRMKGALARLGVRGFKPGLRKAPERLAALRTAEGAPLPPNTLAELRRDMARLRLVREQIAEVEAARLQRLEEEPGSRPHAMVRLLARVIGVGVETADMLVREVLSRDLRDRRAVARYAGLTGSPDESGRRRREKGLAKAGNARVRHGMVQLAWRFLLFQRESALARWYRERTADARGGTRKTMIVALARKLLIALWRLVTTGAMPEGVVLRPAA

SEQ ID NO: 440148 - protein, 415 aa, unidentified
MHTFEQLTHFAGFDWAKDHHDAVIVDRQGATVASLTFAHTAQGWAQWREIIKAYPALGVAIETNQGAAVEQLLQSQVTVYPMQPKAAQRYRDRHVPSGSKTDRIDAWCFADALRGDGQHWRALAPEDPLTEELRLLCRDEVELITQRTALVNQLQAALYEYYPAALEAFDDWTAPYAWEFVLAFPTAGQLVQAGKRKWEKFLHTHKLWRPDTAPKRLEIFGRADQFCGTEAVTRAKSRLAVSTAQVLRALQQQLEEYRRAIEKLFAEHPDHDLFGSLPGAGAKLAPRLLSEIGSDREQYPDAQGLQCVAGTAPVSFESGKIRRAKIRWHCNRHLRHAVHLWADCSRKFCAWAGTYYRAQREKGKSHACALRCLGQRWLKILWKMWQSGQPYDETRHALNQQKHGSWLLQLQPKTT

SEQ ID NO: 440149 - protein, 417 aa, unidentified
MEGRRGVMEVMFDRVAGLDVGKDSVTVCVRTPGRRGGRRSETRTFKTMSASLRVMRDWLVEAGVRIAAMESTSTYWKPPFYCLEEVMEVWLLNAAHMKAVPGRKSDVRDAEWIAQLLEHGLLAPSFVPPPDIRRLRMLTRYREQLMGDRTREIVRLELMLEDASIKLSSVVSSLKTVSARAMLTAMIDGEQDPLVLADLAKGKLRRKIPDLAQALTGHFDVNHARLARSMLRRLELVEQALVELDAVIAEACRPWQHQIELLQTIPGVGPKVAQVIIAETGGDMARFPTPAHLAAWAGLAPAMHESAGRQFPAGKRHGNKWLAAMLVEAAGSVGRMHGKNYLAARHARLMKRRGMGRAQVAVAHSILVAAYWMLKRDEPYHDLGADWHRRRNDEAHTRRLVAQLEHLGHTVIINPAA

SEQ ID NO: 440150 - protein, 331 aa, unidentified
MKESKIILGCDLSKDKIDIASIEKQSNIVLSEKEETNNLKGFKNIIKPYSSLLCEIHVIVEATGNYHIKFTDFLESKSIKFSIVNPLRIKRFAQMKMLRLKTDKADAMVIAQYGVEQAPEAHRPLTAAQKELKALGTVRNHLIKQRTMTKNLLHSHKLLSTTTKESVSAIKSTLKTFNAEIEKLDDKIESLVKDNYNETYTKLLSIKGIGPKTASGTIAYLGNLNNFDSYKQIASFIGITPAIRQSGKSLNKTTGITKQGNANLRTLFYLAALSASRSNLACIELYNRLILNGKQKKTAIIAVANKLIKQLFAIIKYNRTFINNYNIKLVS

SEQ ID NO: 440151 - protein, 343 aa, unidentified
MQIHSVGIDLGKTTFHLIALSAAGKVLLRKKFSQKQLIAFTANMQISLIGMEACAGAHFLSRTLREQGHEVKLIPAQFVRPFVKSNKNDFLDAEAIAEAVDRQNMRFVPIKTDDQLDLQAIHRVRDRLVARRTSVINQLRAFLLERGMTFAKTPFKLKVAMPDLLENAEANLTPRMRNLISLLWSEWKDLEQQIVGMNEEIEQIASSDPACQRLRQIPGIGPLVATAIVAAIGNGAAFHKGREFSSWLGLVPRQHSTGGKARLFGISKRGNRYLRKLLVHGARSAVLRVKRERSPFGPWLDTLETRAPINVVVTAAANKLARIAWSVLSSGQDYRAPVNTVAA

SEQ ID NO: 440152 - protein, 325 aa, unidentified
MQGKDRSEQETKTKSTVGIDVCKLWLDIHILPSEEAFRVPNTKAGSNEIIRRLAHHDVQLIAIEATGKWHRDLHRHLADRGYPVRVVNPLRARLFAEAMGLLAKTDRLDARMLAIFAGSLTETRPPAPEIIEALKELVQARTTAVEEQTSLINQFKSATTAFLRRQLKLRLTQIAKHIKALEKESLKRIKGEPGLARRYDILVSIPSFGDVVAMTLLARLSELGSCNDKQIATLCGLAPWPDESSDRVGARHIRGGRQLIRNILYLAAITAKSFNPPMKAFFTRLTANGKAKKLALVAVARKLIILANTLVRADRLWHSEAPKCA

SEQ ID NO: 440153 - protein, 364 aa, unidentified
MKEVRRRYVGIDLGKREYTMAIIGRNGKMSIHVGTTTEKGRAALYRLLEKDDKVALEAGNLAFSIAREIARRVGSEVRVLNSARLPIIWSEPTKTDKEDAMKLAHLVEERRDEKLPIVPLPSEQEMERREVLSGYQREVRGRTRVVNTLHSLFWKQGQTQVVRKDLATVAKAREAVKILTGRIREDAEWQLQHLELHEKRLRELRERIKAEAKEDENMERLQGIAGVGAIVAYAFVAHVGDGSRFGSGAQVSNFLGFVPKLDYSGSIRRHGPISKRGNGYLRGLLVQAVLAMVRSGKGGALKDRYIYLTRERGMNKRKTMVTIGRRMAELMYSIMRSKTDYEVRAWKKPVGGTAGLAELARISA

SEQ ID NO: 440154 - protein, 348 aa, unidentified
MSKISQYVGLDVSLKETSICVIDDAGKIVWRGRTDTTPEAIASAVKQHAPNAVRIGLESGQLSTWLFHELKAVGLPVICVDARHAKAALSLKVSKTDANDALGLAQIMRVGWYREVSVKGLDCQAVRTLLVVRAQLVSQVTTLKNCVRGVLKTFGLVLPKGLRSQFPGRVRAAIDGHPVLGAIIEPTLLVLEATRAQLIVYDRAIIQRARSDDTARQLMSAPGVGTVVALAYMTGVEDPARFKRSSSVAAYFGMTPRRYQSGEVDHAGRISKCGDGMVRGLLFEAAKVLLSRSARPSALKTWGEALGKRIGPKKATMAVARKLAVILHRMWITGTTFQWNAEAASLAA

SEQ ID NO: 440155 - protein, 269 aa, unidentified
MTFRPHALHLKAELFVKSSRVHVRDDGFTRCNFHLKFFIMVSRGIDISKSSFVAAYPSTNGNPTKTFPNTTAGMRELIGTLAVAEHHCVMEATSNYGCCCTCYIRTVLPSVLPPPKKQIKHFSRMMMPVTKTDEKDAYMIAMYGEKMNPPIYKMPSQATIRILTTEGFTYFDNAKQLSRFIGICPTYQQSRTSVNIREHINRNDDERLRSLLYIAFWTALRYNSRECYIRLKANEKPFKVALIAVTNKLVRPVLTITTINSIYRWICPG

SEQ ID NO: 440156 - protein, 346 aa, unidentified
MLHVGLDLSRKRIDVCLISDQGELIDRFTAIPDRDGLYGLARRVAVYGEAVRAVVESMNGARFVHDELTSHGWEVLVADAQKVKGLAPLACKTDKIDSGVLAELSFRDLVPAIWLPTFELRREREISRWRLHLVKHRSTLKNRVHSTLITFGHQRHMSDLFGVAGRRLLTELEMPEPWRSHVDASLVLIDDLEARIAQIAKELRRSGADHRYIPILMSAPGFGWITSFTVACEIGDINRFSSPVKLTGYTGLCPRVKQSGQMDQRGPLSKHGPKYLRWGLMEAAIAASSHPLYRERYQRTRRRLGRQRGPKVAQIDLARQLTEAIWYMLTRNQPFAPAGAIFRLAA

SEQ ID NO: 440157 - protein, 309 aa, unidentified
MKEQLVYLGIDIAKSYLDGAIENEKRRFSNDAIGHRQLIQWIKQIPASVQVICEPSGGYERALVRAVVGAQLKISLVPANRVRQFARAAGILAKTDRIDAKLLCAFGKAMQPGTISASQLEQEHLRELESQRRHLTHLLVMEQNRAARMSDLCVCKLNRRLIIQIKKQIEQLDLLIEAQIKASPELSIKAQKLTAISGVGARTAALLLAQMPELGQLNRREVAALVGVAPFNRDSGRMRGKRAIYGGRRSVRHGLYMAALVAARHNPILRGFYLRLRAAGKPAKVALIATMRKLLIVLNSSLKPDLTYA

SEQ ID NO: 440158 - protein, 359 aa, unidentified
MNTTTVGVDLAKNVFVACVTDGAGRVIETREFNRAGFLAWLSTLPRGTLVGMEACGGAHCWGRTMQALGLEPRLMAAEFVRPYRKRQAVKNDRADAAAIVAALLAPGMRFIPVKTEAQQHRLAWHSLRLGWIEERTALLNRIRGLLAEFGMVVEIGAARLRRKLAEHEFDTAQPAPIRHLIQGVRDQLDALDLRIAECDRQIAAQQADDAAARRARELPGVGMLTADAVVASVGDATMFHNGRQFAAWLGLTPSQYSSGGKPKLGRITRRGDDYLRTLLVQGARSVLAAALRKARNTPEALTRLQQWIVTLNGRVGYHKTLVAIANKHARQLWAVLAKGEGYNPEAWRQWHDSVEQPAS

SEQ ID NO: 440159 - protein, 354 aa, unidentified
MKLYVGLDVGLEETSVCIVDSEGLTIREAKVSTEPEAIRCAVEGYADRLDRVGVEASSLGIWLYRELQPAGLPIIVVEARHMRVSLSTMRNKTDRNDARGIAQMMRLGWYRAVHVKNIDMQKMRTLLTNRKLLKRKLIDLENHVRGALRAYGLLVGAVARGAFEARIRELIEHSDPIFVMSIQVMLDVRRALLEGYDRLHRVLLQVVQHDPVCRRLMTVPGVGPVVALSFKVGVDDPHRFARSRTVGAHFGLTPKRHQSGTSIDFEGRISKQGDISVREALCEAAASLLLRVRKWSALRAWGLRIAKRSSMLCAIAAVARKLAGILHRMWVSETDFHVGFGAKITQRLRLRPAQ

SEQ ID NO: 440160 - protein, 347 aa, unidentified
MIIIGCDLHTRSQQIAGLDMETGEVEERRLEHANGEARAFYAGLREPALVGIESTGYTQWFEELLVEFGHELVVGDAAKIRKMEVRKQKHDRRDAEHLLNLLVKGDFPRLWLPSAAERDVRVWLEHRHQLVQMRTRALNGLQAVALNQGLCLRQKFWTKRGQEELKKLPLREGRARRRADLLALRAQLDGWIAELDQRLEQEVAQRPDAQRLMTHPGVGPLTALGTVLVLGPVERFPDARHVTSYVGLIPQEASSGGRQHFGHLTKQGNGLLRFLLVEAGQTACRLDPGLQRAYRRLTFRKGRASAKVAVARKLAIRLYIMLRDKIDYEEFCRRGSHAGMLGEVALA

SEQ ID NO: 440161 - protein, 374 aa, unidentified
MSDSHLFVGLDVHKATIAIAVAAQGRTGEVRYIGNFPNNPASIITQLKRFVERYGSIECVYEAGPCAYTLYRQLLAAGIPCIVVAPSKLPMVKGRVKNDHRDAVALARLLRAGDLVPIWVPDPVHEAMRDLVRARQAASFDVRKARQRIQSYLLLRDRHFAGKPWSYRHTKWISDQQFEHRAMQITLQGYVNALEQAESRRAELDAQIRELLPSWSLAPVVTALQALRGVASVIAVALVAEVGDISRFTSARDLMAYFGLVPGEHSSGSTVRPGGITKQGNSAMRALLYEAAWCYRQSAKIGQWMKARLPAGVPQFARDIAWKAQMRLCGRYRKLIARGKKSQIAVTAVARELLGFVWAIARAQASHESPAIGA

SEQ ID NO: 440162 - protein, 408 aa, unidentified
MERYYLGVDWADKFHQVWVSDTQGQKVAEHKVVENVDGLVEFGRWLDESRSKGIELWAAIEKPQGRIVDFLLDHGVLVYPVNPKALDRARDRFRMSPSKSDSFDAHVLAEFLRTDHRHLRALEPNSNEAQELKLLTRDQHRLGRHKTRLLNQIKITLKEYYPRPLEIFSDLEAKIARDFLKHYPTPRALSDLTRRQWNRFAKREHHLAEQRCKDLWEKLNQPQLGVPDHVVRAKSQLLRVLLAQLEALSGAVESYQERVKSFFAAMPAAELVKMLPGAKTGTIVAMLWAELGDSNNRWESFHHLQAEAGVVPVTKASGKSRVVHFRFSCNKLMRHASYWLAFVSLNRSEWANHYYRDQRAKGHNHHQALRALGAKWLKIIFIMWRDHKPYDENYHLANITRQKMRQAA

SEQ ID NO: 440163 - protein, 358 aa, unidentified
MNYIGCDCHISTLDCAVVNEKGHETKKQKMNTGVKGLMEFVKSIPKPRKIIIEEGTLASWLLEVCSDYGEDLIITDPKINRWIGRAGQKNDEIDAAKLAQLARGGYIKEIHHPIGHRRRFRELVTIYHSTVKSQTRIKNQLKGKFRQEGIKCSGKTVYSAEFRNEWKKKLPQDKVVQIMVEGLWRQLDQVHEVQEELLGHIRKQSKQYPEIKRFKKIPGIGTVHAATISAIVENPHRFANKKKLWMYAGLGLAERSSGEKVYSRSLTRNYNRLLKNGLKQATEAAIIAKDNQFRRQYLRLTIEKGIPSHRAKLTVARSILATIYGIWKSGEDYDASIDKKRIESDKTQVRAYHLVRNG

SEQ ID NO: 440164 - protein, 342 aa, unidentified
MQISTIGLDIAKNVFQVHGIDAAEKVVVRKQLRRSQVLAFFKALPPCLIGMEACATAHYWARELTKLGHTVRLMPAKDVKAYVKRNKNDAADAEAICEAVRRPTMRFVQVKSAEQQGRLMQHRTRDLLMRQRTQVINALRAHLAELGITAAHGIAGLKELLKIIASDEDERLPVDAHASLVVLAAELQAIQTLIGSLEKRIMTQHRADEASKRLRSIPGIGLIGATAIAATITDPKAFRSGRDFAAWIGLVPRQDSTGGKQKLGPISKQGDRYLRRILVIGAHAVLKLAKQNPEKYPWLTQLLARRPFKVVAVALANKMARVAWALLAHGGTYRAHRLAAAA

SEQ ID NO: 440165 - protein, 355 aa, unidentified
MTTVPHDEVRVTVGVDTHEDIHVAVAVDQLGRWLAETSIPTNTGGFARLVDWASEFGVIDRFGVEGTGSWGAGLARWLRAEGLVVIEVDRPKRKHRRHGKSDAIDAEAAARAVLSGEATAVPKTGDGPVEMIRVLRLTRRSAVKNRTMTANQINALVITAPDTLSQDLRPMSTRRRVAVAAKFRTGDEPTTVLDATRYALRELARRYQHLTAQITRLDTQLDRLVAETAPELVAKVGVGTHTAAALLVTAGDNPERLAREGSFAHLTGTAPLDASSGKQQRHRLNRGGDRDANCALYQIALTRSSVDQDTTLYLKRRIAEGKTKKEAFRCLKRYIAREIHQILVRTPALQVALDT

SEQ ID NO: 440166 - protein, 338 aa, unidentified
MDLYTGIDLHSNNGFYGILNEKGERIFQKKLPNELPRVLKILEPFKKDIKAIAVESTYNWYWLVDGLMDAGYPIELANPAGMTQYNGLKHADDKSDAFFLAKLLRLHILPTGYIYPREERAVRDMLRRRMMLVQHRTSHILSFQSMISRQTGSGMPGNTIKTLKEEDIQDYFNDEYLILIGETNISVIRHLTEKIRRFEKEVQKRVKIKPEYEKIQTVPGIGKILTLTIMLETGPLSRYAGAGNYASYCRTVKAIHTSNNKKKRNLNQKNGNKYLGWAYVEAANFMRRYCPEAKRYHQKKMARSKQVVATKALASKISKACFYIMRDQVDFDVKKMFG

SEQ ID NO: 440167 - protein, 386 aa, unidentified
MARTVINPPAAKHDETVRCLFAMDLSKDSWVVAYSTPLSDKISHYTLKPCDWKGLLELIDRVRGRVVRELQRPVEVISCYEAGYDGFWLHRLLQAHGVHSHVIDPASLQVNRRARRAKTDRIDAEQQLRSLLAYLRGEPKVWSVVQVPSVEQEDARRQHRERDRLIEERVSHVNRITGLCAIHGIYDYHPLRSDRLQQLERLRTVQGQPLPPALKAELRRELLRLELLLKMIAGVEKERDAIVTDTASAHPNAAKIKELYRLRAIGPEFATVLVGEVYYRSFNNGRQVGSYIGMPPSPFSSGSTVREQGISKAGNPKARKTMTELAWLWLRYQPDSALSIWFRQRVGNTKGRIKRIMIVAMARKLAVALWRYLETGMVPQGAVLKG

SEQ ID NO: 440168 - protein, 345 aa, unidentified
MQSMYYIGLDVHKRSISYCVKDGGGKIHAEGTIPATRSDLDRWMRTLPQPWTAAMEATVFTGWIYDHLLPHAAALKVAHPLMLRAIAAAKKKNDHIDASKICDCLRCDFLPECYMASTAIRERRRTLRYRNLLVRQMVQMKNKISGLLMEAGVNYNKQRLHKVSYFRELLATNPDIDEGLCSLLRLCRETVVRLQKTESALVRSLERDALLVERVERLMSIPAVGPITALTWALEIGDVQRFASIKKAISYCGLCGAEKSSGTTVQRTPLSKQRNKHLQTTLIEAAKMAPRNSPELAILYDREKQKGNANRATLAVARKLVAYLVAVDRRQKQFLVVEKENCAAA

SEQ ID NO: 440169 - protein, 342 aa, unidentified
MNKVNTIGVDLAKNVIQVSVLSPLNKELTNKELPRTKFAEFLAKQPISLVAFEACSTAHHWARAARSYGHQVKILPAKVVSSFRQGHKTDKNDALAVAEAANRPNVKEAPLKELEQQGMQSIQRSRELLVQNKTCLSNHIRGLLMEFGVFIPKGFASLFKNIPDILEDGENDVPDMFRATLNLMYQRLLNLRDDVTLLDEQVKHLVKNNAACSNLTNMEGVGPISAILLFSTLGTGEAFKNGREFSAYIGLTPKQHSSGGKASLMGISKFVANKRLRSVLIQGARSYVHRMKSVTTKKDVWLVNLIERAGYGKAAVALANKNVRTAWALLTQGTEYRKELIV

SEQ ID NO: 440170 - protein, 387 aa, unidentified
MSQVSDLSRSLVPFDQNITLTVVVELSEASWLVAGLLPGVDRQPVKKQEPEPVALLRLLERWRVEAVRAGRTIGRIALAFEAGRDGFWLARWLQARDIEVHVVHSTSVAVSREHRRAKTDRLDTAMLMRVFLGWLRGERGHCRMVAIPTLEQEDAKRPSRERESLVGERTRIVNRMKAALARLGIRGFKPTLRKAPQRLDALRTPEEVSIPPNTLDEIRRDMVRLAVVREQIDVIERARLARLEQAPASGPHAMVRLLARVIGVGLETADMLVQEVLSRNLRDRRAVARYVGLTGSPDESGRRRREKGLAKAGNARVRRGLIQLAWRFLRFQRDSTLAQWYRARTGGPKGARKTTMIVALARKLLIALWRMVTIGEIPAGVALRQVI

SEQ ID NO: 440171 - protein, 296 aa, unidentified
MAEEKLYSDIDVSKKWLDVAIQPTNETWRVTNDRDGIATLITQLQAQALQQIIVEATGGYEVHLVTELFTAGLPVARVNPLRVRRFAEGMNWFAKTDKIDARVLADFGRKANPRLLALPTAAEKRLAALLKRRKQVLDMLTAEKNRLGTADPDVQVYIHSLITSLKDQLTELEKEIEQLTKHTSSMKEKRSLLMSVPGVGKITAATLIALLPELGQCDRKQIAALVGTAPFNHDSGTKQGKRKTSGGRVDVRCVLYMATLAASRFNPVIKAQYKNLLKTGKLTKVALVACMRKLLT

SEQ ID NO: 440172 - protein, 363 aa, unidentified
MVVVGSDVHKRTHTFVAVDQAGRKLAELTVSADHKGHDRAIRWARDRFGERVQRWAVEDCRHLSARLEIDLLEAGESVVRVPPKLMAEQRRLARTRGKSDPIDALAVARAALREPDLPVATHDEASRELRLLVDRREDLVAERTRMVNRLRWHLHRIAPGDPDADPAPKTINRVGVRRRLAAWLDGLGPEAGTDARIDVRLARDVLADIDRICPQITALEREITTLVAAHEAAAALTQLPGCAALTAAKIVGETAGIDRFPDEARYAMHAGVAPIPVWSGRTRGKVRVSRTGNRQLNTALHRIAVTQLRCHEPGKAYYAKRLAAGDTRTEAIRRLKRRLARTVFNTLKSNPSTATGTPMPTAA

SEQ ID NO: 440173 - protein, 461 aa, unidentified
MRKNKPAGQQKVSAGKKTDWKALDIVHPDAAGIDVGGSEHWVAVSPDRDPEPVRPFGCFTADLREMAKWLIDKGVRSVAMQSTGVYWMPVFEVLEQHGLEVYLVNARHTKNLPGRKSDVQECQWLLKLHAFGLLNNSFQPTNEIRIARTLWRHRGNLVAQAGSSIQRMQKVLTEMNIQLSTVLSDLSGVSGMKIIGAILKGQRDPWLLAALARPEVKASAEDITKSLEGNWREELLFVLKQEVELYRFYQEKIVDCDLQLRQHLESLGSRVDTQAQPIGPKPKGKKGSRNAPQFDLRTELYRITGIDWAQINGIDVLTAQTVIAEAGADLSAFPSEKQFASWLGLCPTNEQSGGKILNRRTRKVVNRASVAFRNAASTLLRSQSYLGAQYRRLRTRLGAPKAITAMARKLACLFYRLIKHGQQYVDKGTEYYEARYREQQIRSLTIRAQKLGLQVVIPKTA

SEQ ID NO: 440174 - protein, 484 aa, unidentified
MKKPSNKARRPAPPIVARGKGPIRPATSLPVVHPHAAGIDVGASELYVCVPEDAVSPGESPVRRFGVFTGELDKLVEWLQSCGVKTVAMESTGVYWIPPYQKLEAGGLEVVLANARHLRQVPGRKTDVKDCQWLQRLHSYGMLQGSFRPAEEYCRLRSLMRHRENLVDGCVQQVHYMQEALDLMNVRLHQVVSDLNAAIGLRILDAILAGERDPKKLTSLRDERIKRSTPPEMEAALQGDWREEQLFILQQARETYRFVETQLARCDGQIEKVLQQIVVVAERRPSLETPPNPTAAPTPRKKKERRPRKTGHGLKRDLRAELQRICGIDLTRVIGLNVLSVLIIISEIGVNMSRWRSAKAFCSWLGLNPGNKISGGRVLSSRTPHVVNRVSLLLRTLATAVGRSETWLGIFHRRMKARLGPAGANTATARKMACMIYHLLKYQEQYIDVDTLIYAEKIQRIRLNKLRKTAQELGFELLPIKEAA

SEQ ID NO: 440175 - protein, 352 aa, unidentified
MMIIGCDFHPRFQQISFLWEETGECGQRRLMHTAEAEQYYRRLSGAKVRVGIEATGSYGWFRRLLSELGHELLVGDATQIRASNPRRQKTDKRDAEHILGLLIQDRFPVIWQPPAENEQLRQLLLHRSRLVRLRTRVTNQLNGMANNEGLLVPGGWSGKRRTAIEALPLPGWYGERRKDLLGLLDRIEERIAPLNKAVSQAAANNAEACLLMTHPGVGPVVSLAYVLTIGNWQRFPRGKQVGSYLGLIPSEDSSSDKRRLGHISKQGNTLLRWLLVEAASTAQRYDPSWHRQYLRLSMTKHHGVAKVAIAHKLAVRLYWMLRSGEDYEHVRERGSHARQSECPGGRSKRPIE

SEQ ID NO: 440176 - protein, 428 aa, unidentified
MPYKIAGIDVHKRMLAVVVSDVGVDGEYAFERRQFGSNPAQLRLLADWLLEQQVEEVVMESTAQYWQPVWAALERYWTPTCKKREGAGAMSGTQHLAQAQSNRARQGRKNDFADAERLVKRLVANELTLSFVPDPEQRLWRTVTRTKYQLTRNRVQLQNRLEALLEECHIKLSSLVSDLLGVSARRMVQALADGETDPAALAALANNHLRATQEQLRDALGACQELNPVYRRLLKMAVEELQLIEKQISQLDQEIADLLRPYQDQVQRLAEVPGLGVDSAQQIIAEVGPTAATFPSAGNLSSWVGACPGDDESAGVSHSHRSPKGNRQMRRLLNQAANAAVKYKGGIFEILYRRYVPRLGHKQTIGVIAHRLCRLIWKILYQGVRYEERGPDVRKKSQRYRAARMIRELQSLGYRVEQTNSRSADVPA

SEQ ID NO: 440177 - protein, 352 aa, unidentified
MDRYVGLDAHAKTCTLGVMSRSGKRLRSMVVETNGRALVEAVKGISGDVHLCLEEGTQSAWLHEILSPHTRELVVSVPEKKRGPKDDLRDAWSRADDIRVGRVQTRVYKAPKHLAGLRSAACAYRLGTRDVVRTKNRLKAVFRSRGIRSDSGVYEAASRDRWLKQLPSGSRELACWFGGELDGLVPLRDEAEEWLRKEAKSHPIIRKLRTGPGMGPIRTAQLVAIVGTPHRFRTRRQFWSYCGLAVVTRSSSDWVRSRDGEWVRGQVYQTRGLTRERHPVLKAIFKGAATSVIQQLPEDPLHEHYERMLACGIKPNLAKLTVARQVAAIVLAMWKHQEVYDPKKHVIVTDKA

SEQ ID NO: 440178 - protein, 404 aa, unidentified
MELTAIYRCVAALDVHQSKLTVCILYENESGEIITELKEFGGFKRDRRAMADWVASFQPELVVMESTGIYWKSPYAALEKQGLTIWVVNARHVKQVPGRKTDFADAQWLAILARNGLLRGGFVPPAVFRELRLIARQMQKLTGILSGEKNRLHKILSDGGIRLGVVVSDIHGKSAKAMIKGLLAGESPEQVLKYASNRLKASEEELLDALAGDLSPSHQFVLTELMAHIDELEARIETFRQALLQGLAPYQAILRSLQTIPGLDETGAALLLVEIGDDMSAFGTPERLASWAGVCPGNNESAGKKKTGKTRKGNPYVRRILCEASNAASRTQCRLQDMFKGLLIRRGRKRALFALAHKILKIVFLLIERGDYYLDATVDYEKLSVQRNAPRWIKTLKKYGYIAA

SEQ ID NO: 440179 - protein, 400 aa, unidentified
MLSIGIDVSKGKSTVCGMKPGGEIVYTPFEIQHTREGMSELVSLLHNSGEEVRAVLESTGSYHCPVVAALLENGIFVSVVNSLRMKRFCSQSIRKVKTDRIDAMQIALYGLAYWQELQPTRLPEDTYRELQLLARQYYQMTSILIKAKVDFNAICDQVLPGMQELMNDHAGRHKLSDFVLRYRHTTHILEMGETRFRKDYCKWAEKKGYRNCERMAALIFATAQNGIPVLPNAPSTQIVITEAIRVLHTVEASRDAILTQMQALAKTLPEYSLVREMPCIGDTLAPRLIAEIGDVRRFHSKRALIAYAGIDAPPYQSGKFCANNRHISKRGNRYLRKTGYEVMQSYVMHKPANDPIFTFIEKKRGEGKSGKLAMVAGLNKFLRVYYGKVTELYRSLPAIE

SEQ ID NO: 440180 - protein, 324 aa, unidentified
MQINSVGIDLGKTTFHLVALGEAGKVLVRKKFNQRQLLTYTANMPTSLIGLEACSGAHFLGRALRKQGHEVRLIAAQFVKPFVKSNKNDFVDAEAIAEAVERKNMRFVPIKTDDQLDLQAIHRVRDRLISRRTAVINQLRAFLLERGLTFARTPAKLRNALPDILENPAVDLTTQMRNLIDLLWAEWKAVEYQIEGLSRELERISAGDAGCTRLRRIPGIGPIVATAIVAAIGNGAAFRKGRDFAAWLGVVPRQYSTGGKTRLLGISKRGNVYLRKILIHGARAAVLRMKRDRAPIGAWLDALDARAPKNKVVVAMANKLARIA

SEQ ID NO: 440181 - protein, 339 aa, unidentified
MSKPIPLKQAQVFCGIDVSAATLSVAVQQEDQRFEERIFDNDAGGHKALIGWLRKGNQPVRVSLEATGIYSLDLALALDGAEGIEVAVLNPKLIHRFAQTLRRSKTDSADAQVLSEYSRRMPFVPWVAPELSGLQLRTISRHIQGLVVEHTRQVNRLHAAQQSASTPRCVVQDLKRSMASLKLRIARLRREALELVGSDEAMRKRFELLIRIPGIAAVSALQLLGELAPLSPDMSVRQWVAHSGLDPAHQVSGTSVHKQSRISRAGNRHLRHALYMPALVAVRRDPHLKAFYEILLSRHKAKLQALIAVARKLLHAIYGILRTQTPYEGRKLFPQLGIP

SEQ ID NO: 440182 - protein, 343 aa, unidentified
MDYFAGLDVSVKDTSVCIVDDAGKIVREIKVASEPDALLQVLRNPAYCFKRIGLEAGPLSQWLFSALGEANLPVICVETRHMRAVLKAQINKTDRNDARGIAQMMRVGLYRPVHVKTLRSQKLRMLLTHRKLLQSKAIAIENDLRGTLRNFGLKVGIVGRTKFEARIEELVEEIPDLAVLVEPLLVVRRVLREQIAILHRRLLTIVRDDEVCRRLMTIPGVGSVVALTYRATVDVPARFRRSKSVGAVFGLTCSRDQSGERDRPGAISRCGDEMMRSMLYEAAQSMLVRSTRWSWLKAWAMQIAKRRGMKRAIVALARRLAVVMHRLWVDGTEFRWTREAAAV

SEQ ID NO: 440183 - protein, 343 aa, unidentified
MQTVTTIGLDIAKSVFQVHGVDAAGQVLIRRQLKRRYVLAFFQKVPACLVGIEACASSHYWSRELQALGHSVRLMPPAYVKPYVKRQKNDMADAEAICEAVTRANMRFVPTKTPEQQSGLMLHRTRHLLIRQQTSVINAIRAHLAEFGITAPVGRTGIEELLRVVADPSDKRVPELVRSCLAALGSQLLGLKKQILEFDRMILAWHRSNQTSKRLNCIPGVGPLLATALTASVADPKSFRSGRNFSAWIGLVPKQHSSGGRERLGSISKQGDRYLRRLFVAGALAVIRYAKLHGTNHRPWLTALLARRPTKVAAIALANKLARMAWALMARGGRYNYPIALRP

SEQ ID NO: 440184 - protein, 425 aa, unidentified
MDCNQNEKINQVTEMTLVIGMDIAKRTHYASFIDVRGRALKKAFPVLQSKEGFETFYRSVLEAMEEYKKTDVIVGIEPTGHYWLNLAYFLTERGIPLVMVNPMHVKRSKELDDNLQTKHDAKDALVIARLVKDGRFSYPRILAGVEAELRVGTTLRKQFVEEQIAIRNKLIRWLDRYFPEFSKVFPTFGKTAMAALECTPLPCDVVGKTVEELLHDYRQVEGITSPQKHKVMRLTQIALDSIGVTEGLEMARVEIAKLVRRYREIENEIKELMSRLTNLAKNSEEYDWLSTVPGMGDATIIELLSEIGSFSYYQHPRQLIKLAGLTLREHSSGQHRGQKRISKRGRRHLRALLFRVMMPMVRCNEAFRQLHVYYTTRSKNPLRKKQSIVVLCGKLLKILHALSTKQVEFDAQRMLADIPSLEGAL

SEQ ID NO: 440185 - protein, 340 aa, unidentified
MGDITTIGLDLAKSVFQVHAVDAMGSVVMRKRLRRSQVLAFFAEIPPCLIGLEACATAHHWARELIALGHEARLMPPNYVKAYVKRNKHDVADAEAICEAVRRPSMRFVPVKTAEQQSALMMHRARDLLIRQRTMLVNALRGHLAEFGLIEAQGLHKVARLIAIVVDEKDGRIPDIARQVLKIIVSHIEHIQTRIAGLERQVLAWHKNTPVSQRLATIPGIGPIIATAIAATVTDPNIFRSGREFAAWLGLVPRQNSTGGKARLGGISKRGDGYLRRLLVNSAHTVLLCSKQAKTDPWLTSLLSRKPRLVAAVALANKTARVAWAIMSRQDIYRHAAVAA

SEQ ID NO: 440186 - protein, 343 aa, unidentified
MSKPNPSMQSTVFCGIDVSAATLTAAVHQEDQRFEQRVFGNNASGHRALITWLHKRKARVRVSLEATGIYSLDLAMALNRADGIEVAVLNPKLVHRFAQTLRRSKTDSADAQTLAEYSRRMPFTPWCAPSLNSLQLRTISRHLLGLTAEYTRQNNRLHAAEKSAATPRCVVNDLKRSMASLSRRILRFRREARQLVRSDETIQKRFELLIGIPGIAEISAVQLLGELSSLSPDMSVRQWVAHSGLDPVHQVSGTSVHKPSRMSRAGNRYLRRALYMPALVAVRLDPHLKAFYETLLSRHKAKLQALIAVARKLLHAIYGMLHSETSYDGSKLFPALMPAIIPR

SEQ ID NO: 440187 - protein, 413 aa, unidentified
MAEEIFAWFVGVDCGSEKHQACIVDPQGNIAGEREFPHSGAGLAELGDWLLSIAGAVGNVAIAIEVPHGPVVDSLIDRGFVVHAINPKQLDRLRDRFSVAGAKDDRRDAYVMADSVRTDQRLFRRLHVADPRLIELRAWSRLAEELQAERVRLSNRVHHQLWRYYPQMAKLTDDLASPWFLELWTIASTPAKARQLRKSTVEQLLKQHRIRRIDAEAVLCTLQEPAIKVADGVAEAACIHMRSLIGRLRVVNRELREVERQLDKLCTAIGETEAGSGDCLRRQDIIVLKSMPGVGRINLATLLCEGSGPLSRRDYPALRTLCGAAPVTKRSGKSQIVVMRYAAHARLRNTVYHWARVAIQHDPKSRSRYVALRRRGHSHGRALRGVADRLLGLACVLLQRQTPFDPQFGQSAT

SEQ ID NO: 440188 - protein, 322 aa, unidentified
MKMQSVCGIDVSKDRLDIMVLPEQQCFSVRNDAAGWVELVERLRGFSISAIGLEASGGYERGAMRALLAAGMPARQVNPFKLRQFARASGVLAKNDPLDARMIASFVAIMPTQPAQLRAPAIERLAEMLAVRRQLSAEKVAAENASRLLEDAMLQRLSRRRIRRLAADIEMLDRHLAEIVGTDAALAHRYRLLTSMPGVGLVLACTLIALLPELGRMSRKQVAALVGVAPYAFESGKFKGRRCIWGGRAPVRNVLYMGAMSASNWNPVLKAFHDRLKAAGKPPKVVIVAIMRKMITALNAMVRDDVVWADHLSGRHSVPTAR

SEQ ID NO: 440189 - protein, 352 aa, unidentified
MIPSQITATPKLFIGMDVHKKSWTVHIKTDLFDYKTIGMPPSPESLVGYVQKHLPGHEVTCCYEAGCCGYWIARNLQQHGWDVKVVNPADVPRTSKQNWQKTDKIDCRQLSKHLQAGNVKAIHIPGEEQEQLRSLFRRRVHLVRQLRTIKNHIKSQLLYYGVTIPDQYDNANWSGEMKRWIKSITWKFSTCLTVTNSRLKQLDFLWSEMLQVSNELRSYCRKHFRKDYYLYKSVPGIGGITAAAIISELGDLRRFSTLDELASIVGLVPGLYESSDKSQCLGLTKRSNRQLRSLLVESSWIAVGKDMALQQYYRKHAHKEPNKAIIKVAHKLLSRIRAVIITGIPYQYALVK

SEQ ID NO: 440190 - protein, 353 aa, unidentified
MAHQERPRVTVGVDTHLDLHVAHAKDQLGRCLETVSIPTTPAGYQHLLAWARGLGEVEAFGIEGTGCYGAALARFLAAQGQVVLEVNRPDRQARRRRGKSDPLDAEAAARTVQAGEATTLPKAGTATVEMIRSLRVARATAIKARTQAINALKALLVTAPAELREQLRGRSAARLVRQAAGLQPGQLDTPTAAAKLALRCLAERYQVLSAEVATLDTELDRLTAKAAPGLVALFGVGPDSAGALLVAAGDNPGRLRSDAAFSMLCGASPIQASSGKTRRHRLNRGGDRQANAALHRIVVVRLRWHQPTKDYMARRLTEGKSKQEIIRCLKRYVAREVFAVLNQPGQDTSTAAA

SEQ ID NO: 440191 - protein, 353 aa, unidentified
MDSKKYIGMDVHKESISIAVRNAAGKIVMECVTETRANAILDFIQGLRGELQVTFEEGTWATWLYDLLKPHVAKLVVCDPRKNSRQGNKNDRIDARELSDRLYMNKLSSVYHGGAGVRTLRELARSYLTISKDLARVMSRVKAIYRSWGIPCAGKQVYAPRHRAEWLAKISEVGVLRRAEFYYQQLDALRPLRQEVRRELLAESKKHPARKLLCQIPAIGPIRAALLIALIQTPHRFGSKRPLWKYSGFGIEMHSSGDYRKVQGQLQRNRKQVSVRGLNRDCNHDLQNLFKSAATIASVKPGPFQEFYAALVAKGMRPEMARLTLARKIATIVLIVWQRAVSFDAQYLKPQTA

SEQ ID NO: 440192 - protein, 338 aa, unidentified
MKLYAGIDLHANNSVVVVIDEDDRILYQKRVHNELGALLQALAPYQATLQGIVVESTYNWYWLVDGLMATGYRVHLANTTAIEQYKGLKHTDDESDARWLAHLLRLGILPEGYIYPKEERAVRDLLRKRSQLVRQRTSNLLSIQNLLTRNTGSALSGNRIKQLTIAEVEELLPQAELALAVKSNLAVLQCLEEQIEQIEAVVLAQLKLRDGFQPLLTVSGIGQILGMTIMLETGEIGRFATVGDFASYCRCVSSQKLSNGKRKGQGNVKNGNKYLAWAFVEAANFAVRYNAQIKRFYQRKQAKTNGVVAIKTVAHKLARACYYILRDQVPFEVDKAFA

SEQ ID NO: 440193 - protein, 343 aa, unidentified
MQITTIGLDLAKHWFQVHGVDAHGHIVVRRRLWRSGVIAYFRSLEPCLVGMEACATAHHWARELTALGHTVKLMPPAYVKAYVKRNKNDAADAEAICEAVTRPSMRFVPVKDAEQQSVLMLHRARSLLVRQRTMLVNALRAHLAEFGIIAPQGLRHVEILTKTIAHQQARLPELARSILQTIVDQLNGTTARVREIEVRLARWHRESRVSRLLATVPGVGIMGASAIAATVADPSLFRSGREFAAWLGMTPRQNSSGGKERLGRTSKRGDKYIRGLLTAGAVAVLRHARNRSTRDGEWVRALLTRKPTKVAAVALANKTARIVWAVMMRADGYRAKEVLGLPA

SEQ ID NO: 440194 - protein, 417 aa, unidentified
MTEEFTWFVGIDWASQSHQVCLVDARGEGLAERAVAHGGAGIAELCDWLLARTAARAEATAVAIEVPHGPVVEALLERGFRVHAINPKQLDRFRDRFTVAGAKDDRRDARVLANSLRTDRHAFRVLSADDPVIVELREWSRMVDDLQQERSRLANRVREQLWRYYPQMLEIAEDCAADWFLDLWRQAPTPAKAARLRETTLERFLKTHRIRRWQAPELAQVLKQKPLPVAPGVAEAAAAHIHAVAARIRLVNQQLKTAYRQLDQLCDRLVPPEDNTPGQRCEQHDVAILRSMPGLGRIILAVLLAEAWQPLGRRDYHALRCLSGVAPVTRRSGKTCLVIRRYACNKRLENALYHWARVAVQHDEPSRRRYAALRSRGHSHGRALRTVADRLLAVACTLLQQHTLFDPDYKVPEAAAA

SEQ ID NO: 440195 - protein, 411 aa, unidentified
MEVLVERQSALDVHKAQVTACVRVPDENGGRLELIEQFATTVPGLLALADWLAAHKVKHVVMEATGDYWKPVWHLLEEDFELMLVNARHVKQVPGRKTDVSDAAWLCRLAEAGLLTASFVPPKPIRDLRLLTRYRRTQIAERKREAQRLHKALEDTGIKLDCVATDILGKSGRAMLDALVKGTTDPEVLAELALGKMRKKIPALRDALQGRFGALHALLIGSILAHLDFLDEHISGLSEAIEEQIAPFAAARDLLMSIPGVGQRTAEIVIAEIGVDMSCFPTAGHLASWAGQCPGNDQSAGKRRSGRTRKGSKNLNLALKDAAMAAIRSNNTYLQTLYRRKRSALGHGRAIGAVKHAMLCAGWHMLSTGELYNDLGGDYFQRRDPERQTKRLVAQLQRLGHTVTLQGASAA

SEQ ID NO: 440196 - protein, 390 aa, unidentified
MDARTMNDLPPAATHDGVVRCPMAIELSKKSWIIAVNTPLSDKISNYTVKDWNGLRELIDKIRTRVGRELKQPVEIVSCYEAGYDGFWLHRLLEQAGVRNYVIDPASVQVDRRARRVKTDNVDVTKLLRSLMAYLRGEPKVWSVVRVPTVAEEDDRRLHRERDRLISERVRHVNRIKGLCAVHGVYHYEPLRSDRMKRLEQLRTGDGRQLPPRLKAEIWRELQRLELVLQMIKTIEKERNAMALGRAPSTYGNAKKVQQLVKIGSIGPEIATVLVGEVFFRQFNNRQEVGSYVGLTPSHFQSGPSSRDQGISKAGNHKARTIMLELAWFWIRYQPDSPLTIWFRERVGTAKGRIRRIAIVAVARKLLVALWRYVETGMVPTGAKLKTSNR

SEQ ID NO: 440197 - protein, 316 aa, unidentified
MGNLINTINIGIDVAKDELVIFFDGDQSSISIINNQSALTELAQVWQSFPQLQRIVIEASGGYETLAVSILANFKLPVSLVNPKRVRDFAKGLGKLAKTDRIDAALLAVFGQMTLPALYQLPSPEQAQLAELVARRQQLVLMKATEQTREKQAAAAIKPSITRHLQWLETEIQSIDTDLQQKIKDHQPFQQLDERFQSVPGIGPATSAMLLAELPELGKISAKEIAALVGLAPYAADSGRHRGQRRIRGGRRQVRKSLYMATIAAIRCNRTINQFYQRLKEHGKPTKVAIIAAARKLLCFLNAIARDDKSWSPVSI

SEQ ID NO: 440198 - protein, 364 aa, unidentified
MLQKAELNGNVDSENNHGGSSSIMYYIGLDVHKKTISYCVKDVSGQVHREGKIGTTRNELDCWVGTLPQPRIMAMEATIFTGWIYDYLLPHAEQVKVAHPLMLRAIAAAKKKNDRIDAGKIADCLRCDFLPGCHMASTEIRDRRRTLRYRHLLVRQMVQMKNRISGLLMETGVTYNKQRLHKMGYFGELLSSNEEVHENIRPLLRLSRETIVRCQRTEYALVSSLQRDPLLAERLRRLRTVPGVGPITALTWALEVGDVSRFRSVKQAISYCGLCGEEKSSADKVLRTPISKQRNKHIQRVLVEAAKLAPRQNHELALIHEREKNKGNRNRATLAVARKMVAYLLAVDRGEREFVPAEGRGKAA

SEQ ID NO: 440199 - protein, 447 aa, unidentified
MDTESATQYAAYIGIDWADKDHAYALRATEDKKVEQGKVEAKPEAIEEFVARLRLRFGGKAIAVALEQSRGSLLFTLSKYDHLVLYPVHSSTLDSYRKACHPSGAKSDPDDAALILDLLQKHPEWLQPFAPDTVPTRTLQFLTEERRDAVNDKTRYLNQLTAALKTYFPQMLEWLDVDSKVMCEMLQRWPTLEQLQQQKPSVVEEFLREHRYPVVRVKPLQEAMEKAIPATTDQAVIEAKKFTVQRTIAQLEALRANIAELDRRIEQITRLHEDYRVFASLPCAGKVMVPRLIAAMGTQRDRFQTASELQCQTGIAPVKEASGQREWIHWRWACPKFLRQTFVEWAWLSTRKSQWAREFYDRQRAKDKSHHAAVRALAFKWQRIIFRCWKDRCPYDEARYLATREQRARTAKASTDGSPQLKSSQAGGVEITWKNVSGFSRPDSISC

SEQ ID NO: 440200 - protein, 311 aa, unidentified
MSQGIYVGVDISKDNLDIAINTEKGSRRLNNNAAGIKKVIEYLRGVSPILVVFEATGGLELPFWQELTEAGIAATPVNPRQIRDFAKAKGVLAKTDTIDAQIIAQYASAMQPQAQAFPDTQELKEMIARRSQIIEMLTAEKNRLKAARRSRIQQDIKANIEWLKSRLDGVDKDLQEAIKANPEWRQKFEILESTPGIGNTTAASLVAGFVELGQLNRHQVAALAGVAPINRDSGTMRGKRIVWGGRPRIRAALYMATLVATRYNPVIKAFYLRLCAAGKAKKVALTACMRKLLLILNSMLKHNLSWRYSPS

SEQ ID NO: 440201 - protein, 380 aa, unidentified
MRKAYIGLDVHKTTISIAIAFSGNDDPVSYGKCSADINRFLKTLRRLMKNYSFEKKDISLCYEAGPCGFVLARHLLRIGFDITVVAPSLIPRQSGNKFKTDRRDAKHLAHYFRSGNLTSVNIPDESDEVIRDICRARTDAVDDCRRSRQRLLAFLLRNGHQYTGKSNWTAAHMRYLRELVLQNPAQKLVLEEYLQTIDTNMQRIAYLEDKMRTLSTDWPRSRFALALQGLRGFQLVASTIITSELGDLSRFSHPRKLMAFLGLVPSEDSSGDKRRQGAITKCGNSHARWILVEVADCYRYDPKISKELSRRQDGLSNAVKDISWRAQKRLNKRYVRLLMRRLHKNKIKVAIARELAAFIWELGQIIDKESSPNDSLRYLA

SEQ ID NO: 440202 - protein, 316 aa, unidentified
MNSKRLIGVDIGKSWLDAAVEGAEPVQRYSNDAAGIAALIEKLDPAWAIVVFERCGGWERKLEAALANKTVAWAVVHSQPVKAFRTAQGIKAKTDRIDARLLRDFGRDRLNAGKLRLGRREDITLDALIARQRQLKAMVHAENCRLETAPLEAVRASVERMITHLETELAAIEAELVRYEQGHPEPSFKEEVLCKQIGVAKATARSLLAELPELGRLDRKEITALGGMAPRVHESGSIRKRRGLAPGRKAIKVILFNPARTAMRCDPQIKEFCSRLRARGKPGKVIMVAVMRKMLVRLNALLRDAMLQAPTAAAAE

SEQ ID NO: 440203 - protein, 428 aa, unidentified
MSPLPEQPFTAYVGIDWADTKHDICVQAAGESRRESGCIAHQVAAIDEWANALHRRFGGPLAVALELAKGPIVAALQKYDFLVLFPINPATLAKYREAFQPSGAKNDPGDAELALDLLLHHPERFGPLRPQSVPMRTLVSLVERRRQLVGDQNRLTNRLCDMLKQYYPQALEWFDDRGTVLFCDFLERWPTLRSVRQARTAVLETFFHAHHCRSASRISARIESIRSAAALTDDPAIIGPCRLHVLALVAQLRAVLAAIVQFDLEIAAVVHTLPDYALFEDLPGAGACLAPRLLAAFGEQRERFRSADELQKYAGIAPVTERSGKKSWVHWRLQCPKFLRQTFVEWAAQTITRSFWAGAYYRQQRAKGSSHHIAVRALAFKWIRILYRCWQTRTPYNETVYLNALAKRGSPLLGKQGDSVKMGSCSPI

SEQ ID NO: 440204 - protein, 323 aa, unidentified
MNKDIKYFGIDISHLVFDVTETDGKYYQFKNNGSGFKKFTKLLNCDSHCVMEATGYYHYQLAYYLLESGMKVSVENPLSVKRFIQMKLSKIKTDKSDSKLICEYAQQVDLKLWKGNSKNEMECLQITRALSVYTKQSTMLKNKLHGESVLGEPSKAVVRSLKRSLKQLVKEIKSLEDKLLVLVKEVHQDLLTRLQTIPGIGRKTAIMLVVLTGGFDRFTSASELCSYAGLTPVIRQSGSSVKGRPRISKIGNQKLRNLLFMCSFNACKYNKACRDLYERIVAKGKSKKLALIAVCNKLLKQAFAIAKSGLIYDDTYRSTLVKN

SEQ ID NO: 440205 - protein, 468 aa, unidentified
MAKKRKQQKQSDQAMLPVMRPNAAGIDIGATETFVAVPADRDPEYVRSFPTFTQDLYALADWLEQCGIETVAMESTGVYWIPLFQILEERGFAVYLVNARHVKNVPGRRTDVSDCQWLQFLHSVGILKASYRPAQEVCAVRSLLRHRESLVQMAATHVHHMQKALDQMNLQLHHVISDITGLTGMAIIDAILADERDPQVLAQLRHTRIKASAEVIAKSLVGDYRPEHIFTLRQSVNAYRSYQVMIADCDREIHQWLKDFEAASKSPTPDDQGEASNHPASVSETAVKTAPSKQSDQGLGAQLKRVFGVDLTKVPGIHVGIAQTLFGEIGPDFNKFKSASAFASWMALCPDNEISGGKVLWTGTRKVKSRAAKALRLAAQSLAHSKSALGDFYRRMRAKLGAPKAITAAAHKLARIIYHLITTRQRFDESRFAAAQVRYQKRLVTKLHAKARALGFQLVPLDQAEVVS

SEQ ID NO: 440206 - protein, 289 aa, unidentified
MSKLSKPVRATVFCGVDVSAATLAVAVQQQDQPIDQRQFANSASGRKSLVAWLRKRKAAARVSLEATGIYSLDLALALDAAEGIEVAVLNPKLANRFAQTLRRSKTDKADAKALAEYSRRMPFVARRAPDRNGLQLRSISQHIDGLTVQHTRELNRLHAAEGSEAAPRCVAQDLKRSLASIHKRIQRLRREAMVLVRQKDGLQQQFNLLTGIPGIAQVTALQLLSELATLPAGMTVRQWVADSGLDPAHQMSGSSGHRPSRISRHGNCHLRHALYMPALVGVAQTDGCK

SEQ ID NO: 440207 - protein, 471 aa, unidentified
MIKRNQSSLGIDLSDKTANYCAMNADDGVVAEGKVGLRVARLAEMWRRYGPVDVVVMEAGTPSTWVQELFEGLGARVIVADPRTLQAVTASVRKSDERDARMLARLGLADEELLSPTYVRAPEHRRTMALLKVRDQQVRFRTATVLEVRSQVKLAGGRMPPCDAVDLHEHEDAVPDEIQDVLAPLFGTLRGLAESIGKLDALLEEEAARFPVVSQLTQIDGVGTIMALAFVAVVGEPTRFANTRDIGAYLGLVPRRDQSGLSDPSRRISKAGCGFLRRLLTQCAQTVCRARGKDTAQRRWAHRQIALRGKPGKRKVVVAIARKLAVLMLAIWKSGESWNPLHRVPAASPADAPHPVVHDECGSESCASERDTKRAPSSTTRTQPCTEGQPLTKSADGSTGRSGAPRTPAARTTKPSQDGMPGASAPARSATPSAPATPACAGGPADLASASRAGPSSKRGRFAAEGVPPSA

SEQ ID NO: 440208 - protein, 422 aa, unidentified
MNENYQFKATIGLDWADQKHDLWIRPADGSKSEHLRLEQSPEALHQWAAKLRKRFDTGQVALGVETSRGPVISALMSYDFIVLFPINPKALKDYRAAFSVSGAKNDRTDAQLIEEFIRLHSEKLKALQPDTELTRKLSGFVQDRRHLVDERTRIVNQLHSKLKTYYPLAETLIGSVMNSLMAAEFLSRWPDLESLVAATAPKIRAFFYQHNSRSAKKMEQRLEAIKTAQALTTDPGIIEPARELVLALAGMLKCLHKSVARLEEAIELAMDQHPDAPIFRSLPGAGPALAPRLLVAFGTQRDRFETAQEVAQFYGVAPVVIQSGNSELVRLRRRCPKFGRQTFHENASCASKTEPWGRAYYEQQKKKHDDKHHQACRALAYKLIRIYFACWKTRTEYKSNTYLDALQKHGSPLHNKLNMIGE

SEQ ID NO: 440209 - protein, 425 aa, unidentified
MTEKTAVGFAALVGIDWADRKHDICLQVAGEDEREFSVLEHRPEAIDEWANGLRVRFDNRPIAVCLEQRKGALITALRKYEHLVLFPVNPKLLAGLRRAFHPSGAKDDPRDAEIAVEILLHHSDKLTAWRPDDPRTRQLQALVEARRRLVGQRVRVTNRLSANLKGYFPQALECCESLDSTMACDFLTRWPSLGEARRAREERLRAFFHRHNVRGRELVEERVALLKSALSLTSDAGVILPSLVATATLVAELRVLIDGIEQYDDAIATLFKRHPDAFIFASLPGAGPTFAPRLLAALGSDRDRFDSPEALQEYLGIAPVTERSGKSTWVHWRWACPKFLRQSIVEWAGLSIRYSCWANAFYRQQREKGKNHHAAIRALSFKWLRILYRCWKDRRPYDEAKYLFALQQRKSPLLQYIAEPLATVA

SEQ ID NO: 440210 - protein, 454 aa, unidentified
MTVPKPARLRIDNLPTVFPNAPGLDLGSAEIVAALPPDRDVTVVRTFTTFTADLRQLVTWLLDHHIDTVAMESTGVYWIPIYEMLEAASIRVYLVNARHFKIVPGRKSDDNDAQWLQKLHALGLLTGSFRPDDEMCVLRSLLRHRAQLIEHRSPHILHMQKALKLMNIQLPEVLSDMTGVAGMAILRAIISRERRGDVLAKLRRPGCRRTEQDIIQALTGTWRDEHLFVLAQSLDLYDFYTTKITACDHRLDQQFFSMKPRFDVEGEAPAVPTSRTKKNSNSKNQPTYNVRAHLVRILGIDLVDIIGISESLAQTIISEIGTDMSRFPTSKHFCSWLGLAPHNDISGGKVLRSRIMKVHNRAGQALRQAAQSCSRSHSLFGAFYRARSARSSSEEAVVATAHKIARVIYHMLTCHDAFKPESIRAFDQKRQQREVKHLQKRAKALGFILQPVPA

SEQ ID NO: 440211 - protein, 356 aa, unidentified
MISDCTLRVPGIIVGVDTHKDEHLAVVVDKLGVRIGQRNLPTTNTGYGDLERWARSLGEIKAFGIEGTGSYGAGLAHFLRDQGHPVIEVNRPDRATRRRLGKSDPTDAEMAARAVLAGVAQGQPKSGGKKVEMIRLLKSTKDSAIKARTQAINQMKALIITAPAELRELLRDLTTSQLIAVCKGWRHCQLETPQAAAKYALRCLAQRYSQLTEEIEGLNKEIERLTQAFAPKLMELPGIGLDTAAALLITAGSNPERLKSEAAFAALCGVSPIPASSGKTNRHRLNRGGDRRANAALYRVAVVRLRYDARTRAYLQRRTEEGKTKAEVIRCLKRYIAREVFQILYQIGIQSIVQNA

SEQ ID NO: 440212 - protein, 354 aa, unidentified
MIIIGCDYHPSFQQIAFVDTETGELQERRLQHREEAEKFYRDLAAQGTKVRVGMEASGHARWFEQLLSELQFELWIGDAAEISARRVRKQKTDRQDAQLILRLMLKDDFPQIWVPSWENRDLRQLLWHRHRMVQARTRMMNQLQAVALNEGLRCKKKLWREAGREQLEAFKLAPWASQRRGDLLELLDRLNPTIAKLTQAIEEEVKKCPAARRLKTHPGVGPLTALAFVLIIGKADRFQCGKQIASYLGLVPLEKSSGNQRRLGHITKQGNSLLRFLLVEAAQVTVRSLPEWRSKYCHLTMRRGRKIAKVAMARKLAVRLYWMMRKEWDYEQLRKFGSHAGKPGNRDGVKSNIE

SEQ ID NO: 440213 - protein, 274 aa, unidentified
MSIVMGLDQHRAQITADWLDTETGEVKRGRVAPADRAGVRRFLERFDGQELEVALEATTGWRFVVEELRRVGAIVHLAEPAETAGLRGPKKRARGDRADARHLRELLMLERVPESWIPPDHILDLRARVRLRHMLGEQRSEWQQRIQATLYHHGCPERRQLMVGDGRDWLAAQPLSAVARERVTVALAMIDALDLQMRPIEKELRAYARRQAGCRALMAHYGIGELSAVTILAELGDCTRFSSSRQAVRYAGMDTVASNCTSCSGDFGLCGDVG

SEQ ID NO: 440214 - protein, 324 aa, unidentified
MDDQGRALFSKRISRGKLLDFFAAQPSCTVALEACGGAHHWARQLTQLGHEVRLIPPAYVKPFVKRQKNDAIDAEAICEAAQRPNMRFVAVKSEQQQAAGLVFRTRDLLVRQRTQLINAIRGHLTEYGWIAPKGPSHVAELAHLIEEKRMAGSLPEAARAMFRLMLDQLASLNGRIAVLDKEIARRAREDEVSRRLMTIPGIGPISATAIAALAPPVETFAKGRDFAAWLGLTPVQRSTGGKQKLGATSKMGERTLRRLLIIGSSAVVLQASKRGAPKGSWLEQMLARKPRMLVTVALANKTARIIWALLVKKENYRAPVAAKA

SEQ ID NO: 440215 - protein, 356 aa, unidentified
MSRDVKYIGMDVHKEAIVIAVRNTSGKLVMESIVETKASSLLQFIHGLRGELHVTWEEGTWAAWLYDLLKPQVHKILVCNPRRNALLKEGSKSDKVDARKLSELLHAGMLRPVYHVENGLRTLRELARTYQTLSKDLNRVMNRIKALYRGWGIACAGTQVYAPRYREEWLQKIEHAGVRRRAELFYEQLDGLKALRRKVRPELLAESRKHKATKLLRQIPCIGPIRAARLIALIQTPHRFRSKRQLWTYSGLGIETHDSAQYCYVRGQLQRSKKPQQLRGLNENHNHEMKEIFKGAATRASCGMGPFREFYVSLLDKGMKPEMARLTLARKIAAITLTLWKKEERFDAQQLKTQAA

SEQ ID NO: 440216 - protein, 321 aa, unidentified
MDTLYDIACGLDVHKNSVVACIVKTDTTSKTIDNKEILELVKRNFTTFSEGLNELKEWIVANECHRVAMESTGVYWHPVYDALEDAFDGDIEVLVCNPRNMHNMPGKKTDMSDAEWIGRCLRSGMLTGSFIPPLVIRELRELTRYRKSIVEDISTQKNRIEKTLQSAGFKLSSFLTDIFGVSGRNIIDALIQNGYLAEGDVDILTKSISAEKKMEMKRLLTNKLSAHSQTVLKTKIKHLDELLSHLIEVEALINEITIQFEVEIKNLDTVPGISETSAKAIIAEIGTDMSKFKTAEHLCSWAGLSPGNNESAGKKKALESL

SEQ ID NO: 440217 - protein, 282 aa, unidentified
MNIIVYVGLDVHKEQYTICCYTYEKDKVEYKQTLPSDYRLILKYLDQVRTKYEGDVTFVCGYEAGCLGYSLYHQLKEHAVDCRILAPSTMAVTNTHHVKTDKRDAANIARCLAFRTYSEVYVPDSEDNDVKEYIRMRDDQKLYLKKVKQQILAFVLRQGKRFEGGKTYWTIAHLKWLKSLELSALQRETLDEYLLTYEYLTEKIKRFDERIEELASAERYEEKVRHMSCLLGIKTHTALSMVVEVGDFERFEKAPKFAAFLGLVPSEDSSDKKINRYSITKA

SEQ ID NO: 440218 - protein, 342 aa, unidentified
MNSPVRIGMDTSKSVFQLHGVDENEVVVVRRQFRRTEMVRYFERLPPALVAIESCGSSHHWARLLQSFGHEVRLIPPQYVKPYVKRGKNDAADAEALCEAVTRPSMRFVPVKSKERQAACMLMSVRERLVSVKSQLSNAFRSYAAEFGIVGAAGRQNVNALIKHVLEDETLPEMARELFRFQAKEYAAVEARLEEIEAKLMRWHREDDVSRRIATIPGVGPIGSTMLSMKAPPPEAFSSGRDFAAWIGLTPKDHSTGGRQRHGGITKAGDSALRSTLIVGATALLRHIRKGRHKPSAWLAALLERKPPKLVAVALANKFARIAWRLMVTGGVYSQPRAAMPA

SEQ ID NO: 440219 - protein, 450 aa, unidentified
MSPLALDVVTKTDKTPVLGRMLSKYVGRKTSSIENDITKARNHLRQRGKIMRVVFGIDVSKASSEVAILVNGEKVHGYTIPNDAIGFNRLLEDLGTVYQPEIVFEATGVYSRRLQAFFEDNSYAYIRLNPLESKKQLDSLRVRKTDKIDAEKLATSQFILNRKPSYVQEALYQELRDLSRFYQNLTEDIVCSKNRLHKVLQVTFPELENILSSPTGKQYWNLVMAFPCNSFVLELDDAALRAIIRQSTSKHISENRVTYLVDKLTKLANHSYCAVKKTSPMMEEVKYYAGELLRLSEHRQGVVEEMVTLAQSLPEYEILLSIPGIAETTATSIIGELGDIRRFHSANQINAFIGIDLRHYESGDFLAKEHITKRGNPYARKILFKCIHNIASASHTNPCHIADFYEKRKRQSQVTSTKPHTIASIHRLIRTMYYLITHNKLYDYTSIQNR

SEQ ID NO: 440220 - protein, 345 aa, unidentified
MEIRTIGIDLGKTVFHLVGLNARGEVVVRKKCSRTQLLRFTSNLRGCLIGMEACAGSHFLGRALREQGHDVRLMPAQYVKPYVKTNKNDYIDAEAIAEAVTRPTMRFVPIKTDDQLDLQSLHRVRERWVVRRTAVINQMRGLLLERGITMRKGRKHLEASLPHILEDGDNKLSGALRALLTQLRIEMQYLHGQIEQCDQMIVRIASELEACRRLIAIPGIGPVIATATIAAIGNGAAFKKGRGFAAWLGVVPGEHSSGGKQQLTGTSRRGNKYLRKLFVLGAHTVLLQRTKQSSGLSTWLASLIARKRKQVATVALANKMARMVWAVLCKGEAYRPPLDPQLNAA

SEQ ID NO: 440221 - protein, 425 aa, unidentified
MESSELPFSELLHFGGFDYAGQKHYVVVVDRAGSKVLSMEFDNTADGWRKFLDAIKPFPKIAFTIETSCGADVERLLDAGLPIYPINPKSAQRYRDRKSVAGCKSDELDAFCMADALRTDGAAWRRLLSMDSATHELRVLCRDEIHLIELRTSLINQLRATLHDYYPAALEAFSDWVSPGAWDFVIAFPTPAELVNAGKRKWQKFLFTHHMAGQEKLDERMVLFAKANEFTNPVAAVISGKSLLATTLAKQLRALEAQLCVYRSRITALFRQHPDYACFGSLPGAGEKLAPRLLAELGNCREVFASAEALQAYAGTAPVTKKSGKSNIVHFRRACNCYLRATVHLWADLSRHYCVWAEAYYQQKRKQGMGHAAALRCLGQRWLNILWTIWQKHLAYDEATHMRNQVKHGSWVVRLLPKSEAPAAT

SEQ ID NO: 440222 - protein, 437 aa, unidentified
MDVIYERVAGLDVHKETVVATVRVMAEGKVERECRTFETTTAGLLALLAWLTEARCSHVAMEATGVYWKPVWNILSDGAFELIVANAAHIKNVPGRKTDVNDAAWIADLLACGLIRGSFVPSEKFQELRALQRTRKQLTREQTRHVQRLQKTLEEANIKLDSVISDIMGLSGRRMIEAIIAGVRGPRSLADLADRRIKATPKELYDALHGRVTDHHRFRLRLHLAQYDALADAIAALDKEIDAAIGRIDKERECAGQALFRAASRDVCEVPGVNLLAANMILAEIGLDMGRFPTAGHLVSWSGLCPGQNESAGKRKSSRLRKGAPWLKTTLVQCAVSASNKKDSYFRAQFLRLKSRRGAPKAFCAVAASLLTAIYHMLRDGAKFRDLGKDHFDKRPTQAKANRLLAQLAKLGYQADLRPLTTAVSCPPTSTAQLVSS

SEQ ID NO: 440223 - protein, 354 aa, unidentified
MEQRTTIGIDLAKEVFAICVLSPGGAVVESRTMRRAAFERWLVGLQGELVVAMEACSSAHHWGRRLAAAGHTVRLMAPAFVVPFRKSGKNDANDAEAIAIAARQPTMRFVAVKTVEQQSILSWHRAREGWIAERTALINRLRGLLTEFGFSIAQSAFRLRKALPALSTDAAVPAPIRALLLEAGEQLRCLDARVARCDEQIAAHGRDNETARRLRGMLGIGPLTSSALVATVPDAAAFRNSRQFGAWIGLVPRQHSSGGKPHLGELTRRGDKYLRSLLVQGARSALQVALRVAPDKATRLQRWILALYSRKGYHKTLVAVANKHARIIWALMARGEHFDHNAWQRHPLQRAAAA

SEQ ID NO: 440224 - protein, 343 aa, unidentified
MTISVLGIDIAKNTFQLHGAGSAGNPKLRKRLSRNKLAAFVANLPRCLIVMESCGGANYWARVFQSSGHSVKLISPQFVKPFVKTNKNDANDAQAIVEAASRPSMHFVPIKGVEQQDIQSIHRIRNRVVKNRTALINEIRGLCLEYGIIVAPGAAKVKRSLCSIISDDTNELTHVSREWLGDLYDELIEHEVRLKKLNKKIRQICQQNETCCRLLKVPGVGELTATAVVAAVPDANEFKNGRHMSAWLGLVPRQSSSGDKQVLLGISKRGDRYLRTLLIHGARAALSHYKNTDTGYGRWLVERKATLSFNKAAVALANKNARIIWSMLHTGEEFNSNVQMAAA

SEQ ID NO: 440225 - protein, 376 aa, unidentified
MKKTELYIGLDVHKETITAAVAEGGRNGEVRQAGTITNDLHALEKLLRRIRGEDKERPLHVCYEAGPCGFVIARRLTQLGLPCTVVAPSLIPKKAGDRIKTDRRDADKLARLLRAGDLSPVYVPDATDEAIRDLCRARTDAVDDRTRSRQRLKAFLLRHGFRYTGKSTWNDAHMRYLRELVLPHPAMKVILEDYLCAIDAAHERVARCEESMENLLAGWQLRPAVETLMGFKGFKIVAAMITVSELGDIHRFDHPRQLMAYLGLVPTEATSSDKRRQGGITKCGNPHARWLLVECSQHYDTPPKVSKELSHRQAKLDRRCKEISWRAQNRLHARFNRLRGRRVHRNKAMTAVARELAGFIWELLRGLPCYTKTVNA

SEQ ID NO: 440226 - protein, 342 aa, unidentified
MQISTIGIDIGKNSFHFVGFDARGGIVIRRQCSRTQLVRALANVPPCLVGMEACCGAHHLGRILIAQGHDVRLIPPQYVKPFVKSHKNDLLDAEAIGEAVQRPTMRFVPLKTMEQLDLQAIHRLRTRLVGRRTAVINQMRGFLLERGVTCPIGREALVKRFPEVLDNPALGLSVRFCRLLKQLRDEWRLLDDDIEDVDQEILSLARDDEACDRLMQVPGIGPLTATALVAAVGNGAAFAKGRDLAAWLGLVPRQHSTGGKTVLRGISKRGNAYLRCLFIHGARSVCRHHHLKPHRLGRWLTSLEARAHPNVVAVALANKLVRTAWAVLQRNTRYDGRLLAKA

SEQ ID NO: 440227 - protein, 401 aa, unidentified
MLGKLAKKCKKYQVFVGIDIHERLCVAAILNIPTGEAKYVEFFTTKASIVAFAKAHLQKNMVVGIEATSNSFFVASILKEYVAEVIMITPEKHKDGVKTDKIDAYRIAVSLAQGTFNPCWIPPDDIQSLRELIGLWIALNDLIIRLKNRIYAVLTAYGIKVSSKDLSSKKAEEEIRQAIEKLPFCAAYKLSKNFKNLKSAEEDKEELSYYLANIAKDNPQVHLLITIPGISFVAALVIISEIGDISRFSSPKRLTKYAGLTPAIYQSGKRSYTGGITKAGRRRLRWILVQAANNAVRVEGRLRKFYLRLKEKKGHNKAIVACARKLLTIIWYMLTKGEVYRDCLERLYTKKKRITEKKAEKFVAPLLSDLASEVIEFLRREDAPPPIMENVEVIERQAKNT

SEQ ID NO: 440228 - protein, 440 aa, unidentified
MSNMIFERCAGLDVHKKSVVACRRRLLPDRTIEFETATFGTTTEELLALSDWLAEWQVTHVAMESTGEYWKPVFNILESNFETWLVNAQHVKHVPARKTDIRDAEWLAQLMQMGFLKPSFIPERPQRELRDLTRMRQTLVQDRARVVNRLQKVLEDANIKLASVVTDITGVSARRMLEAMIEGEADSEVLAQLAKGRLRNKLPDLEKALNGRVTDHHRFLLKRRLAHMDFLEEEIQALSREIAHRIERMSTPSDDEPPTEARREPEASTEDQPLTWNQAIELLITMPGVERRTAEIILAEIGLDMSRFPSARHLAAWAGVAPGNHQSGGKPYSGRSKKGNHTLRTVLVQAAHSAKRKKGSYLAALYRRIVRRRGKKRAIVAVAHSMLVSIYFMLTRQQPYQDLGPDHFDSRRKEAKVDYLMRQLRRLGYQVSLQPVPIAA

SEQ ID NO: 440229 - protein, 364 aa, unidentified
MFTERTSVGLDVHARSVAAAAIDGVTGELFQSRLTPSHEHIRSWLTDLPGPVAVAYEAGPTGFGLYRHLVAAGIRCEVVAPSKLQKPAGDRVKTDAKDAVHLARLLRLDEVVAVAIPTIDQEAARDLVRAREDCRGDLMRARHRLSKLLLRHGLVYSGGAAWTGKHDMWLCDEALRQLTSRSTRLTFDADYETVLATKARRDRLDVAIEEMAADSEFTPVVRRLGCLRGISTLTGFALAVEIGDWHRFSGNSIGSFVGLIPAEYSSGSSRTLGPITKTGNGHARRLLVEASWHHRPRYRVGKIMRDRWDLAPAAARARGDQGNRRLHHRWVKFIDRRKRSTVANVAIARELAGWCWSLAVLDDM

SEQ ID NO: 440230 - protein, 343 aa, unidentified
MKLHVLGIDLGKTVFHLVGLDSTGKVVIRKKCSRTQLLAFTANLQVQLMGMESCSGSHFLGRALREQGHEVRLMPAQYVKPYVQTNKSDFLDAEAIAEAVQRPRMRFVPIKTEEQLDLQALHRVRERWVMRRTAVVNQIRSLLLERGLTLPKGRSYVDRQLPRILEDGELRLSGSFRVLLAQLKLELEQLTARMEEMDRVIQKTAQENEDCQRLTEIPGIGPVTATALIAAVGNASAFQKGRNLAAWMGIVPGEYSTGGKQKLLGISKRGNKYLRTLFIQGARSVLQQRHKQAPGLSHWLAQLLGRTHQNVVIVALANKLVRMAWAVLCKNERYRAPVLAVTT

SEQ ID NO: 440231 - protein, 377 aa, unidentified
MKNIRFVGLDVHAETIAVAVAEPNGEVRSLGTIPNREESIRKLVRKLGPVEQLRACYEAGPTGYVLYWQLTALGVKCDVVAPTLIPVKSGDRVKTDRRDAEKLARCHRAGDLTPVWVPDAAHEALRDLVRAREAAKRDQHRARQRLGKFLLRHGIRRPDTMKTAGSKPHLEWIKMKVHFDLPALEITLIDYVHEVEHGAQRLTRLETAIGEAARSAPPCMRAVIQALQALRGVAEIGAVTIVAEVGELSRFPGARQLMGYSGLVPSEYSSGARRIQSRITKTGNAHLRRVMVEAAWAYQFRPWLGGYLLKRQTHLSPEVKEIAWKAQHRWHGRYRELLRQGKNKPQIVTAIGRELLGFIWAIGVMTENQHHTLAAAA

SEQ ID NO: 440232 - protein, 350 aa, unidentified
MIFIGMDVHVRNSFLHITDEGGQLLKRGRCANTLSDFAAFLAPLDAETGYVALESTTNSRAIARMIRQAATHSHLELAVEVLDARKLRIIAESVSKCDRRDAAMLNELSRANLKLPACYMPDDEVFALREHLRARSDLVRIRTSVKNRVHAVLHRRGVLTPLGGLFTQGGRTFLAQAQLDDAGSTIMQLYLRTIDQLNGLITESNDSLKQLTRRPRWAKPAALLQTMPGVGLITAMTILAELGDPKRFRRRAAVANYAGLVPVVRDSNDKRYRGGITKRGSTHLRAVLIEAAWIAIKRVPTYNHLFERVTRRSNKLTAIVAVARRMLEDAWTMLKREEAFRYSAMPSVAG

SEQ ID NO: 440233 - protein, 461 aa, unidentified
MQKDTSKVSKKSRKKTKDFKVVNVNCAGIDIGSREHYVAVPSDRDSQPVRSFGCLTPDLHSMARWLSACGINSVAIESTGVYWIPVVEILEDHGLEAYLINARHVKGVPGRKSDVQDCQWIQQLHSYGLLSGSFRPPPEIQPLRSYWRQRACLVELCSQQIQRMQKSLEQMNLQLHKVLSDITGKTGMAMIRSILKGERDPKVLVQLKHALVKSSDEVLIKALTGNYREEHVFALKQAVELHDTFQTKIAECDSQVQAVMTVLEAKADIPKRTTQPKLLTRKRRKNQPNFDLRNHLYQTTGVDLTQIDGIDAMTAQTIISECGFDMKPFRTEKHFSSWLGLCPNNKITGGKIYSSKTRKVINRATSSLRVAAQSLHGSSTALGAFYRRMRTRLGAPKAITATAHKLAKLIYRMLKYGENYVDKGQEYYENQYQERVLNNFKNKAKQFGYQLLNPNTGEVVS

SEQ ID NO: 440234 - protein, 416 aa, unidentified
MSRVVDIVRPVCCGIDVHKSFLVACIATTDKRNHTTHQIRRFSTFKGDLQKLADWLDVCNCKDVCMESTGKYWIPIFNVLEKTCNVCLTHPKYVKAIKGKKTDKKDAKWISELFKCDLVRSSFIPPPLTRHLRELCRYHAKLTYMNSSEKNRGQNCLTVCNFKLDDVFSDVFGASATRVLDKLIELGHSDFDVAPLLHKRCKATPEQVKAAIDGELSPAQAQKLALVREHMKQLESLQNTLESSVTKLAAPYQPQIDLLMTVPGIGSEFTAIRILAEIGVDMSVFETAKQLTSWAGLTPQNNESANKKKTTRIARAGAFLKPLLVQCTLAAVSSNKYPWLKDKYQALKKRRGHKKAVIAIARKLLAAIWNMLTKHEPYNHELHQKSDPPPQNRVLTPQQAFALLRKHGFQIDETAA

SEQ ID NO: 440235 - protein, 316 aa, unidentified
MVDVPCFVGIDVAKAQLDIAVRPSGERWAVPNDAGGVVTLVDRLQALHPTLIVLEATGGLERAATAALAIAGLPVVVVNPRQARDFARATGQLAKTDALDARALAHVADVIRPTPRPLPDAQTQELRALLGRRQQLVVMRTAEQNRLAGTRGRLQTDIEAHIVWLNARLATLDDDIETLIRASPLWRENDDLLQSAPGIGPVCARTLVLELPELGTLTRQQIAALVGVAPLNCDSGTFRGRRGIWGGRATVRAVLYMAALVASRRNSVIRNFYKRLRDKGKAPKVALVACMHKLLTILNAMIKHKTRWSEIIPQTS

SEQ ID NO: 440236 - protein, 350 aa, unidentified
MQGNGRWIGLDLSKKTYEMCYFDQKGKVGRSGGETTKGGRAKLYAKLKAEDIVAMEANSLAFVMEKEMRAIGCTVVILNASQLSVIYASTKKTDKEDALKLARLVKIYEKEDLPIVDVPTEKEYYRRKLTKECKTLKDDRTQEINRLHALFLQCGITTMKRSNLQTDANRQKVLPQLFGYEVGQAKRVCERLTLLEAQIKELEQTITKECKADKDIKRLQTIPGVGDKTALAFAAYVGDGKRFNNGDEVANYLGLVPRVDCSGSINRYGHITKKGNRIVRALLYQAAWSIVRSKHGGALKAKYFYMTERGKGKKISITAIARKMAKLMYLIMKNKGEEYKELPAPASRAG

SEQ ID NO: 440237 - protein, 342 aa, unidentified
MEHFAGLDVSVKDTSVCIVDDTGKIIREVKVASEPEALSAVLKSPAYHFKRIGLEAGPLSQWLLSALAEAGLPAICVETRHMQAVLKAQINKTDRNDARGIAQMMRAGLYRPVHVKTLRSQKLRMLLTHRQLLQSKAIAVENDLRGTLRNFGLKVGMVGKVKFEARIRELVENQPDLAVLVEPMLIVRRVLREQIVILHRRLLAIVRDDEVCRRLMTTPGVGPVVSLTYRATVDVPARFHKSKSVGAVFGLTCAKYQSGEIDRSGRISRCGDEMMRVMLYEAAQSMLRSKKWSWLKAWAMQIARRRGMKKAIVALARRLAVIMHRIWVDGTEFRWTRQAAAA

SEQ ID NO: 440238 - protein, 316 aa, unidentified
MQSALCIGVDVAKDNVVVACSRASFATRTIPNKPASLKTFLRSLPAQCCIAMEATGSYHQSLADLAHQQGLRVYVLNPRDLYHYAKGVGLRAKTDRVDAAMIARFLANEGSRLRAYQPPTAEQRKIDQLLRRRSKIVTLKTALQLTCSDAPFLRTESANLLKSFVALLKKIDQQLATLQQTMPERVQQLERLQSIPGVGPLTACWLANLLDRIPFAHSDALVAFTGMDPRPCDSGQKRGQRRLSKRGPAEGRRLLFNAAMAASRCEAWKQTYEHYRERGWTTTEAIMILARKMLRIALAMHKTQKTFDAQFIGKTA

SEQ ID NO: 440239 - protein, 370 aa, unidentified
MQKTLYVGLDVHKISISVSVAEEGRDGAIRFIGEIPNAPADVAKLAQRLAKEGARLEFCYEAGCCGYEIYRQLVELGHGCIVVAPSKIAKKPGDRIKNDRRDAQKLAVMHRSGDLTAIWVPDRAHEAMRDLVRARMDAAMQLMRARQQLLAFLLRHGRSYGPKAKNWTIRHRRWLAGQTFGEVTHQMVFQDYVEAVLTAQERRDQLEQRIAEVSSAWSLAPVVDALRALRGLDLISAVTLVAALGDLRRFETPRQLMAYLGLVPSEHSSGGSVRRGGITKTGNCEARRMLVEAAWSYQYMPRVAQAKIDIVARQSKVVRDIAWKAQTRLCQRYRKLRAGGKKPTVVVAAIARELSGFVWAIGQEVPPMSA

SEQ ID NO: 440240 - protein, 345 aa, unidentified
MPVRKKEVIEIAHPNAAGIDVGSSSHYVAVPSDRDENPVREFKSFTEDLEWLSDWLKSCEIELVAMESTGVYWISLFGLLESRGFTVYLVNARHVKNVAGRESDVLDCQWIQQLMSYVLLSGAFRPKDEVCALRSVSRQRDMLLRYQSRHIQHMQKALAQMNIQLANVISDIAGETGQKIIRAILEGERDGAKLAKLKHGRIRASEAEIAKSLKGNWRTEHLFALKQAVALYDVYGEQLSECDQQLESMLKAMQTQAGDPGPSKRQSLTRNSPKFDARTHLFNTCGVDLTSINGIDATTALKVISEIGPDLSCFKNAKHFTSWLGLCPGTKISGGKMLSNALVKI

SEQ ID NO: 440241 - protein, 426 aa, unidentified
MQTVLHSKADPLAACVGWDWGCESHAIVLRAADTQEAVVEILAATPEAIHRWLDATEARFGGRTVAVALEGSKGPVFTQLLERPWIRIYAVHPATSTRMRNAFSPSGAKDDKPDALVLLDLVDNNRDKLRKVFVLDAPTARLEQLVELRRDIVDRRTQLTNQLDALLKKYFPQALKLTGAHLYSDLALDFLKRWPSLVELKVARPETLKRFYHAHNVRSSEAVEERLKLAEEAKFVTTDQQRSEIWKMELAYLAAQVGVLMEHLVGVDKHVAEALKQHPDADLFTELPGAGPVFAPRLLAAFGTDRGRYEDADSLQKLAGVAPVMERSGKSTRVRWRWQASRFLRQTFVEWARCTIATSAWAAAYYEQQKARGAGNWAIYRSLAYKWIRILWKCWQSRKPYNEAEYLNQLARRRSPLVARLKAKVA

SEQ ID NO: 440242 - protein, 416 aa, unidentified
MNAAGIDVSSRKSTVAVLRPFGEVVKLPFDVRHSAEDLTALAEQLKSIDGETRVVMEHTGRYYESIAKVLHEAGLYVSAVNPLLIKEYGNNSLRKVKTDKADAVKIAKYALDNWTELRDYTPMDTIRYDLKTLNRQFQLASKQKTVTANNLIALQEQSFPGIRKLFDSPVRSDGTQKWVDFTHDFWHVDCVRGGSQNAFTERYRKWCKRNRYQFSMEKASEVYALAKSAVVLVQKTSVTKTLVQEAANQLTAISRSVETYRSEMNKLASQLPEYPVVMEMYGVGESLGPQLMAEIGDVRRFERKQSLVAFAGIDPAPSESGDYCSRSNRTTKRGSPYLRKTLFNIMTVHLQRAPADEPVFQFLDKKRAEGKPYYVYMTAAGNKFLRRYYGKVMAYFATIEDLPPVDMDSTGLHRTE

SEQ ID NO: 440243 - protein, 355 aa, unidentified
MNSEKYIGLDVHQATISVAVMDSMGKLIMESILETKAATILEFVAGLRGTLSVTFEEGTWAAWLYDLLKPHVDELVVCNPRKNALLKDGNKSDRIDARKLADRLRLNDLKPVYHGETGVRMLRELARSYLNLVKDQTRVMNRLKAMYRSWAIPCAGRDVYYARHRAEWLGKIREAGVRRRAEHLYQQLDMLQHLRQQARRELLAESRQHPITAKLRQIPSLGPIRSALAVALIRTPHRFRTRRQLWAYSGLALETRTSGEYRCVEGQIRRSKKQISIRGLNKDHNHDLKGLFKGAATRASVLPGPFQDFYQRSLAKGIKPTMARLTLARKIAAITLTLWKKGENFDAEKLKSQAA

SEQ ID NO: 440244 - protein, 538 aa, unidentified
MVARFVWDEDVAGSNPVSPTSLSTSATRRQRAPDRAAIRADHRSGDAELVAFRVSHNNVVTGELLQRGRAGGAEPGDLGHETGPALLGRAVAGHPEIEMEPVLGGLRLGNLEQAQARRDATPVGSCSHAASIPSSNSPSNCASHSARVANGGGGRFVDVSGSGLPEHSHQLWVRTVQGEIDTGRHLPTRGRGDDSQGMAAAMDGRSLMEVMFERVAGIDVGKASLTVCVRTPGARRGQHSETRTFKTTTGSLRVMRDWLVEHQVTIAAMESTSTYWKAPFYCLEDVMQVWLLNAAHMKAVPGRKTDVRDAKWIAQLLECGLLQPSMVPPPPIRQLRMLTRYRVPLMGDRTREAIRLEMMLEDASIKLSSVASSLTTLSARVMLQAMIEGERDPLVLAEMAKGRMGRKIPDLAQALDGHFDEHHARMAKTILGRLDMVEESLTELDEVIAAKCAPWAHQIELLQTIPGVGEKVAQVIVAETGADMSRFPSAAHLAAWAGVAPAIYESAGKRTPSGKRHGNKWLTAMLVEAAGSLGLAMD

SEQ ID NO: 440245 - protein, 346 aa, unidentified
MDHIGIDLHKRNSQICILSAGGELIEQRIQTSRERFTAVLGDRPRARILIEASTESEWAARSLEEIGHEVIVADPNFAPMYAQRTRKVKTDRRDARALAEACRLGAYRPAHRTSDAQQHVRAHVGVREALVQTRCKYVYLASALLRRQGLRWESGGPETFPARVGRLSLPEALQEEIAPLLTLVTILTTQIQDADRQLLRLVANDTRAQKLCTVPGVGPVTAATFVATIDRVERFAGAHQVEAYLGLVPRELSSGEKQCRGRITKAGNGRARWLLVEAAWSILRYKKPETRALRLWAERIAARRGKFRAAVALARRLAGILYAMLRDDTIYQPEKVAAGVARRPAA

SEQ ID NO: 440246 - protein, 408 aa, unidentified
MRVIGLDVHRSMAVVAVLEKERLTSGGRIDLTRDAVIAFGRKLRPDDEVVIEATVNTAAIVHLLRPFVRRVVIANPLQVRAIAHAKIKTDKIDAAVLAKLHASGFLPEVWMPDETTETLRRLVAQRAQVIQQMTRAKNRIHSILHANLIPPYQGELFSVAGRSWLKTQSLALDEALAIQRHLADLDCRASDLSVLDQALAQQALQDERVERLMTISGIHVTVALGLLAAIGDISRFASSEKLVSYLGLNPSVRQSGDGPAHHGHISKHGRAHARAMLVEAAWAAARAPGPLRAFFIRIQSRRGKQVAAVATARKIAVLAWHLLTKNENYVWARPALLENKLRKVELLAGQPAAKGRRPGRAHAYNDRAVRQRERSWLEQAEGAYTRFVVNWQTKPGQRTGAANRKRPS

SEQ ID NO: 440247 - protein, 341 aa, unidentified
MKKFIRIGVDLAKNYFQVHALESEDGRAVTRKLKRSKMHEFFSRIEPCVIGMEACGSAHYWGRELKAMGHEVLLMPPAYTKPYVKRGKNDAVDADAICEAMSRPGMRFVPIKSPEQQAMLMLHKTRELLTKQRTMSVNALRGHLSEFGIVAAKGIGRVDELLDLADSDATLPVAAKAGVNVLAQALEGLDTAINALENEIANADAQNEMVRLLDKVPGVGKLIASVIAASVPDPSVFKSGRDFAAWLGLTPRQNSSGGKQTLGSITKQGNRYIRKMLVLGATSLLNVLGKRKGALHDWIVGLLAKKPARLVTVALANKLARILWAMMKTGECFRTEMFAKA

SEQ ID NO: 440248 - protein, 319 aa, unidentified
MAQNDLVVVGIDIAKDKVDGCIRSLSLRQTLPSTAEGRRKLISWLRKHKVTKAVMEASGGYERDWAKALREADIEVRVVDPKRVRSFARSAGRLAKNDAIDAEMIAWFAETFGEAKGQACDAAREKLVQIVHARQGLLDLQTSLQNRGEHAAPEVVQKMQGRLLKKIALELAGLEAAIAAMIEATPHFAERAAIIESVPGLGEITSAGLIAAMPELGQVSNKIAAALLGAAPYDDDSGRRRGERHIKGGRRRVRNLFYMACLGAATRHNPMLKAFYQRLLAKGKEKKVALVACMRKLIVILNTMIARGEKWDATRCAPS

SEQ ID NO: 440249 - protein, 409 aa, unidentified
MEVIHPCCCGIDIHKESVVACLRVQDGRRAKTEVRRFGTTTAELLRLHEWLSHAACSHVAMESTSVYWKPVFNLLEGSFEVVLANAHHIKAVPGRKTDVKDCEWIANLLAHGLIRASFIPPAPIRDLRDLTRHRKSLIRDRVKATNRVHKLLETANIKLANVVADVLGVSGRAMLDALVAGETDPQRLAKLAKGSLIPKMKPLAEALRGGFTSHHAFLLRQMLTQLDQLAAMVAQCDARILEVSKPFEANIRRLQTIVGVGRRSAEVMVSEIGVDMSRFSTAGHLASWARICPGSYESAGKRRSAGTGTGNNWLRTTLLESAWAAAHSRKSYLGAQFRRISKRRGPKRAGIAVAHSILVIAYHMLRNGVDFNDLGADYFDRMNTAKLTRYHLRRLAELGCDVRALAVSA

SEQ ID NO: 440250 - protein, 360 aa, unidentified
MDLHKNTSTFVVKDREGKLIDSAKILTDKNDVTRYINAIKRNGDGKELSLVVEPVSQWYYYADLIENLGVDVHLAHPMEVKAIAHAHIKTDKIDAGVLADLLRTNFLPEAYFAPAEVRGWKEQCRFRASLINLRTQVKNKIHAILFKHSLKHNFSDLFGKGGRRWLASLELKEPFKSNLDKYLSLVDYLTNETGYAEERITNTVINCPQAKLLISIPGISYCSALTIMAEIGDINRFISVKHLQSYAGLIPSTYNSGDKQIHGKITKRGSKWLRWIMIESAYHQMNCKRIPGFGSYYNTLKKRKGSKTAAVATARKLLAVVWRLLKDNRPYEVIDPRCWKSGPLASKISSVSVAVSAATD

SEQ ID NO: 440251 - protein, 344 aa, unidentified
MKIMTGIDLHSNNALCGLMDESGRRVLHKKLPCELPAILQMLEPYKAQIAQVAVESTYNWYWLVDGLEDHGYPVVLANPARMHQYDGLKHTDDVSDAYFLCELMRLGILPTCHRYDRQTRPVRDLLRRRMLLVQLRTSLILSFKSLNERTLGQRVPLARVKAMSIEEAQGRFAAPADQLLGGEQIGLMGRLQESITKIEKHILAATKEWKTFPRVQDVPGIGKILGLTIALETGDPKRFADAGNFASYCRCVRSLRQSNSKKKGENNRKCGNRYLVWAFVEAAHFACQHDERSRRFYDRKKQQTNPVIATKALACKLAKASWHVMHDDAPYDPQRVFGGGKGGA

SEQ ID NO: 440252 - protein, 325 aa, unidentified
MDDAGKIVREARVASEPEALLQLLTNTIYRFKRVGLEAGPLSQWLYSVLAEAGLPVICVETRHMRAVLKAQINKTDRNDARGMAQMMRAGLYRPVHVKTLRSQKLRMLLTHRKLLQSKAIAIENELRASLRNFGLKVGMVGTMKFEARIRELVERLPDLSVLVEPLLIVRRIIREQLGILHRRLLAIVRDDEVCRRLTTIPGVGPVVALTFRVTVDVPARFRKSKAVGAVFGLTPAKYQSGENDRTGAISRCGDEMMRIMLYEAAQSMLVRTAKWSWLKAWAMKIARHRGMKKAIVALARRLAVIMHRMWVDGTEFRWTRELPAA

SEQ ID NO: 440253 - protein, 342 aa, unidentified
MREKRSIGIDLHRRRFTCCIRLENGRNCLSEWSLEQLPRFLQKLRRTDEVAVEVTGNTRLFYEAVAPFVARVVVVDPNQFHVISHSVKKTDPHDARNLALYLAKGLLPEVRMKEKEQAEVASLTQTRDRLVKLRTALKNKVNNLLSARGIELDKESLSSEKGLTWVLEQKIEPLAHLELDIIVEQIRSLNRSIARLERVIDEAGKKLEGHRNLTSIKGIGSLGASILLSVIGNVNDFAHEGKLAAYFGIVPRVQDSNETEHRGRITKRGSKLGRTALVQCALIAKRYSPYLHRYYERIRARRGTGKAIIALARKFLSIIYHTLKNNWIFEDFPNFVLAEAKT

SEQ ID NO: 440254 - protein, 391 aa, unidentified
MSMYFLGIDISKYKHDCCIISAADQQVVSMFVIRNDKDGFNELLKTLSSLSTPQDIKIGFESTSHYALNLELFLEKAHHSFMEVNPVLISEFKKSTSLRRTKTDRVDCESIARWLMTVEYKPHPKGFYHTYSLKSLTRLRDRLIRQRSLYLVKLTNVLDHTFPEFKPFFGERFSKTALYLLENYGSAEKMACMNSASYEKLRTLSRGKFSPQQFLALKEKAANTVGVSNDIFETELTCLLTLYKGISNQIDNLESKIVALINEVRPHFMSIPGIGPLSAAVLYAEFGDVSNFSSPAQMLAFAGLEPGVNDSGTESHGGRMVKRGSSQLRYVLLNCALPLIRFDMTFATYYAKKRAEGKPHRVAMSHVAKKLIRVIFALERQKTDFTVTALR

SEQ ID NO: 440255 - protein, 346 aa, unidentified
MLYAGLDLSRKRLDFHLLDSEGATVEVGAAPPDADGLLGLTRRLDRHREPIRAAIESMNGARFVHDRLELAGWQVEIADAQKVKGLAPLACKTDRIDAWVLAELTRRDLVPAVWLPDPMVRAERERARWRLHLVRHRSSLKQRVHAVLLTHGKPCPVSDLFGVRGRQLLARLGLPEPWQATIEASLRLIDELEREITDSERELRRLGADHRYVPLLLTVPGIGWVLAYTIAAEIGDIGRFPSPRKLAGYTGLCPRVYQSGERDLRGPLAKQGPKYLRWALVEAATHACTAAVYRDRYQHTKARIGKQRGAKVAQIDLARRLSEAIWHMLSREQPFAPKGATDPLAA

SEQ ID NO: 440256 - protein, 412 aa, unidentified
MSLDPHEEPAAIQTHIGAIFISLELSRSKWLITSLVPGGGQRMSKHWVEAGDLAGLLARFWAIRDKVLARTGNSYPIVVIQEAGLDGFWIHRSLVKEGIESHVVDAASIAVSRRRRRAKTDKIDGEGLLRALLAFKRGEPRVCSMVRVPMPEDEDRRRICRERQTLTAERIRHVNRIKGLLFSQGIGDYEPLRRDRRRALEAVRTGDGRALGANMKAQIGRELDRLELLLDQIAAVEAERDAMLARQAEAETAPGAETVPEAAAAAGVQSVQSAPARVQMLMDLNGLGAETVAKLETEAFYRSFDNRRQLAAFVGLAGTPWKSGRIDHEQGVSMGNHRLRQTMIQLAWLWPLHQPNSALTRWYRERTKGATKLQKKKMVVALARKLLVALWRYVDAGVVIEGAVLKRAARAR

SEQ ID NO: 440257 - protein, 357 aa, unidentified
MRKSIENLGTVTRVGVDLAKNVLQVHAVDAKGEVVAARALRRNAVLGFFAKLPSCLVAMEACPSAHHWGRVLIKLGHEVKLIPAAHVKPYVRRSKNDATDAAAVCEASMRPGQRFVAVRSIDNQAELMRHRAREMLSSQRTALINALRGHLAEIGVVAAQGVQNAYGLKRMLSIGADEQGEIVIPECVRLALRPLSEQIDALDVALCALDAEIRTTLRTDEKAQQLMTIPGIGPLTASAILATVPDMSAFSSGREFAAFLGLTPRQHSSGGKERLGSITKMGDGYLRKLLVLGACAVLSHREGQHDALRTWAKALIGRKTVKYNFKLTAVALANKLARIVFAVLTRGEAYDDRPVAA

SEQ ID NO: 440258 - protein, 358 aa, unidentified
MTQVKKLDFSGTTIYCGVDVHKKSWRVNIADSEFELEDFTQNPDAVLLHKHLTRRYPGASFKIGYEAGFSGFSMQRTLSGPGCECWVVNAADIPASDKDKKQKQDKADARKLCNYLQSKKLKGIHIPDAAWEHARTLVRTRERIVNNQTRCKNRIWQLMHFSGLPVPAEQQEGKYWSKRFIDGLQKMDCGGSIHLQQSLQLHIKDYLQTRGLLLEATRAIRGLCREEKYAGDIKLLRSIPGIGEINAAVMLFELQDVTRFKRFDYLCSYVGLVPDTSDSGDTKRTKGITHRHNHYLRTALVESSWAVVRKDPALLMKYKDYCKRMEKNKAIIRVAKHLLSRINFVLKNKKEYVTGVVA

SEQ ID NO: 440259 - protein, 342 aa, unidentified
MKFYCGIDLHATNSFLCVIDDKDKILLKEKLKNDLGDIIYALESFSPRPSVVVEATINWYWLIDGLQEAGFDVKLAHSMALYMITGAKVKTDRRDAFSLAKLLRLDAIPEAYIYPKARRPIRDLLRKRKQVVRLRANAYGALRRVLLQYGFYGYSQATIKSLTEEQLDQHLEHFATQAGCHLEVQRIRFYSDQIKILENIILNSVSDDRCFELLQTIPGVGKILALTILYETGDIDRFQSAKHFCSYARVVPGVAQSSGVSKRGRGSKQGNPHLKWAFCQAAALSVRYNTGIRKFRQRHLARRRSKAKKLVTLCIVSHKLAIASYNILKNRVPFKQELMFGS

SEQ ID NO: 440260 - protein, 370 aa, unidentified
MLDTTTFVGLDVHARSIKAVSLDVMTGEVRCATFGYDAGAVAAWVRSVDPRARCVYESGVTGFDLQKRLSGLGVDCVVGAVSKMIKPSADRRRKNDRNDAEFLARMLSVGNVVEVWVPDDECEAARDLTRALEDARDDLSRSKQRLSKFLLGHGLVFDERTPTGRRKGNWTRAHWSWIESIRFAEGADNEVLAYYVEAVRRAAEEKSRLEGLVGAEARKPRWRRGVDSLRCLKGVDTATAADLVFEAGEFSRFRNARSFAAWVGLTPSEHSSGENDRRGAITKAGNKHLRKTLVEAAWHYLTCSGRPKDLAKGQAPDPAARRHAAKGVRRLVERREALLARGVHGNKANVATARELACWVWAVGLMAEEA

SEQ ID NO: 440261 - protein, 360 aa, unidentified
MEGNQERSAGRIVGGVDTHKDLHVAAVVDECDRVLASQSFATTRHGYKQMLDWMRAFGSLQRVGIEATGTYGAGLLRYMQKAGIEVLEVTTPDKHDRRKSGKNDDLDAQNAAHAAFAGKRTATPKSRNGMIESLRVLKACRKTAVAARRVALQMIQNTIVCAPDELRELLRKMTRMQLIRTLAAWRPDLTDYRNVTSAYRITLKSLGRRYLELHDEIADLDTMIVALVDELAPNLVARNSIGHESAAQLLLTAGDNVQRLRSEASFAALCGVSPVPASSGKTTRHRLSRGGDRAANSALHIIAIGRLPTEPRTQAYVAKRIAEGHSKLEAIRCVKRYIAREVFSLIEQRPQESHPASTAT

SEQ ID NO: 440262 - protein, 355 aa, unidentified
MNSTKYIGMDVHKESISIAVRNAAGKIVMECVIETKANMILQFIGGLHGDVLVTFEEGTWAAWLYDLLKPYVTRVVVCDPRRNALLQEGNQNDRVDARKLAELLQNNQLRPVYHGDHGLRTLKELVRSYLTITKDLGRVMSRTKAIYRSWGIPCTGKEVYGWRHRAEWLEKIREPGVRRRAEFYYQQLDALRLLRLEVRKDLLTESRKHKAWKRLCEIPSIGPIRAAVLLGILQTAHRFRTKRQLWTYSGLGIEVHSSADHQVFKGQLQRKKKPVEVRGLNENCNHDLKNVFKGAAIVASSKSGPFEEFYAALLAKGMRPEMARLTLARKIATIVLIVWKRGVGFDAQHLKPQTA

SEQ ID NO: 440263 - protein, 412 aa, unidentified
MLKIVYRVCCGMDVHKSFVVACIATTNDHGVTNYKSKRFSTFTGDLRRCADWLSENNCKDVCMESTGKYWIPIYNILEHTCNIVLAHPKYVKAIRGKKTDKRDAKWIADIFKHDLVSGSFIPPADIRQLRDLVRYHWKLTNFNVGEKNRAQNCLTVSNIKLDDVFSDVFGKAASAITTRLLESNEPFDVKPYLTKNIKKPIEQIQAAVDGEMCAEQAEKLRIIRSHMDSLELCKLNLESLILSTAEKYIPQLNLVMTAPGIQSFAAIGIISEIGVDMSVFPTSKHLCSWAGLTPQNNESAGKKKTTRISRAGAYIKPLLVQCALNAVRAKKFPEVRNRYLALKKRRGHKKAIIAIARMLLTAIYNILKKNESYNPELYRQTDRPPAHREVSVAEAIFILQRQGYLVAAPPTP

SEQ ID NO: 440264 - protein, 444 aa, unidentified
MKVIYKQVAGLDVHKKTVVAARMRVTEEDRVEWETKTFGTTTPDLLEMHDWLSEWELTHVAMESTGDYWKPVFNILEDSFEVWLVNAEHVKHVSGRKTDVKDSEWLAELMLHGLLKPSFIPPKPQRALRELTRYRTRLVEERARVVNRVQKLLEGANIKLSSVASNIMGVSARAMLEEIMAGQTDVELIADLARGQMRSKIPELEKALTGIVQPHHRFVLAQQLDHIDFLDEKVETLSLRIEQQLETMNWPDEPSPPDAGEGAEEGTAVADESELPVTWNAAVALLDTIPGVNRRVAEVMLAEMGLDMSQFPTADHLASWAGLAPGNHQSGGKRYSGRTTNGNKPLASTMVQAAWSAVRIKDTFLKSRFHSLAARRGKKRAIVAVAHSMLVSAWHMLADRQPYQELGGDYFDQRKKETKVSYLVRRLEKLTGGSVSIELQSAAA

SEQ ID NO: 440265 - protein, 430 aa, unidentified
MKSNTQNAKIEAITEKTLVLGIDVGSEMHYARAFDYRGIEYSKKPFKFSNTEAGFVTFKEWILDLKERHEKDKVVPGMEPTGHYWFNLGKFLQDNEMKPVLVNPHHVKKSKELDDNNPTKNDRKDPKVIAGLVREGRYMIPYLPEGVYADLRTASNIRFQLQAELTRIQNRISRWFNIYFPEYRMVYGKPDAKSGMLLLKAAPLPEDILTLGIDGVNQIWRDAKLRAVGKARAKTLIEAAEHSVGSKEGAVSARMEIRMLLEDYESRNTRLQEVMILIEELVRKIPMAEKLLEIKGVGIRTVSGFLAEVGDISRFNNPKELQKLAGLALVENSSGKHKGETTISRRGRKRLRYLLFEVAMSLVSKNQEFRELHNYYTTRRLNPLKKMQSLMAIAAKLIRVFYAMLTKGVDYDPKKMVSDIKRPAVYLQAA

SEQ ID NO: 440266 - protein, 366 aa, unidentified
MDHYAGIDVSLEYSSICVVDATGQIVREDKIASEPEVLIAWFGSLGYALTRIGLEAGPLSQWLYAAMKKAGLAVELLETRHVRDAFKAMPVKSDRNDARGIAQLMRLGWFRPVHCKSIGAQEIRAELTARKLVESKLRDTANSLRGILRGFGLKVGATTERSFPGRVRELVKGHPVLEAIAESLLSVHEVLLREFNGFQKRVQSAACSNVKARLLMTTPGVGPVISLTYSAAVDDPARFKSSKKAGSHFGLTPKKYQSGETDRSGRISKIGDVSVRAALYQAAHVILTKPVKGCPELKSWGMRLAKRAGQEKAKVALARKLAVIMHRMLADGTPFNPNPNAKAERMAATAAKAARKVLALPATERP

SEQ ID NO: 440267 - protein, 397 aa, unidentified
MIAVGIDVSKSKSTVAILNGDGSIRAKPFDVHHVADELQALVDYIKRTSEPPTILMEPPSHYHYPLLKAFTEAELPVCLINPYQMKKYGDTELRKAKTDKRDSLRIAQYALEKSYSLIPYTPQDQKYEDLRFLSRQYSQRISTLTVAKVQLLSLLDETMPGITTILPLKSRDPDNCVLLRFIKRFKSFDVIRKMGKTRFLDSYQVLVKKTKDRFAGSKGLAIYELVLNSVTTRGENPLSAMTQDQCVDLVSTSQKAADEINLQMRIIAETMPEYKVLRSMAGVGDRLGPIILGEIGDIRRFHSGKALNAYAGNDAPPYQSGQFESRNRHISKRGNPALRKACFEVMQALKLTKPQDDPVYLFLLKKEQEGKPYNVAKMAAVNKFLRIYYARAMELYK

SEQ ID NO: 440268 - protein, 381 aa, unidentified
MPSMQLRRDDVIVGVDTHKDNHVAVAIDGLGGRLGDIIVPTTIAGFEELLAFCLAFAGPAGRLIGFGVEGTGSYGVGLARYLRNHGHDVHEIARPARAVERRLAGKNDTIDAEHAARQLLAGHGLSTPKTADGSVETIRLVKIAYDGAVQARTTAIITLKATLATGSEALRAELEKLTDHKLITACAALEGPAPLPPVRRGAPAVVVPSDPDLAMRHVLSSMAKRWLALHEEAKAHAASLKALTAAATPHLVEAVGVGYDTAAQMLITAGDNANRIKSEAAFAKMCGACPIPAGSGKTNSRHRLYRGGNRQANAALYRVVIVRMRWHQPTIDYVARRTAEGMSKREIIRCLKRYLARELFRLLPAPDAVANPVQGELEIAA

SEQ ID NO: 440269 - protein, 417 aa, unidentified
MNEPGWFVGIDWATKSHRACLVDSDGNRVRERDVPHEGAALNELCDWLLQTTQASPGEIAVAIETPRGPVVELLLERGFAVFAINPKQLDRFRDRFTVAGAKDDSRDAYVLGHSLRTDRQAFRRLSTDDPLVIQLREWLRMREELTQQRTRLINRLRSQLWRYYPQAAEITEDVADNWFLDLWELIPTPAKAARVNEKMVARILKNHRIRRIDAAQVLAVLRKPPLTVAPGTVDAATAHIRTLLPQLRLINQQIGQAERQLDQFCQAIEAAAETTPGQICEQRDVAILRSCPGLGRITIATLLAEAGEPLRRRDYQVLRALSGVAPVSRRSGQSRIVLRRHACNNRLRTALHHWARVAVQRDPVSNQRYKQLRSSGCNDARALRGVGDRLLQLLCMLLERQTLFDPDRRTTQPLKAA

SEQ ID NO: 440270 - protein, 347 aa, unidentified
MNITRIGLDLAKNVLQVHGVDERGKALLRKRLKRGEVVAFFARLSPCLIGMEACGSAHHWARELAALGHTVRLMAPQFVKPYVKANKSDARDAEAICEAVGRPSMRFVPVKTLEQQSVLSLHRARQGFVAARTAQANQIRGLLSEFGIVIAKGIRQIEGRVPEILEEAENGLCGMNRALFQRLFEHFRQLDRQVKQLEEQIHAWHREQVDSRRLAGIPGIGPLTASALTAAIGNAREFANARQLAAWLGLVPRQASSGGKDRLLGISKRGDVYLRTLLIHGARSVLRRTRACPDPAQGWLAQLVHRRNPNVAAVALANKNARIVWALLAHGREYQPGYVGAPLPTAA

SEQ ID NO: 440271 - protein, 418 aa, unidentified
MREEVSTVELLVPRCAGLDVAKDEVVACVRVPDGQGGRRQEVRTYPTFTSGLEALADWLTAEGVTQVVMEATGQDWKPVWYVLEEAGFQLLLVNVRHVKILPGRKTDVCDAAWLAELLEHGLLRGSFVPPAAIRQLRDLTRYRKRLIQTHSAECQRIQKTLEDAGIKLDSVAADVLGVSGRAMLEALVAGERDPQVLAELARGRLRTKLPQLRQALRGRFSDHHALLVRLALGHLEHLEGAIAALDTEVDQVISPFARARDQLDTITGVGKRAAETIIAEIGVDMAVFPTAGHLASWAGRCPGNNRTGGKRRSGRPTKGNRWLGEVLTECAWAAARSRDTYLAAQYWRLARRIGKKKAAVAVGHSILVIAWHLLANDCDYQDLGGDFFVRRDADRARQRAVAQLQALGYRVTLEPLAA

SEQ ID NO: 440272 - protein, 317 aa, unidentified
MSYNIAAIDIHKKVLIVVVAAVAEEVADATGAAVELEGRKFGSGARERNHLVSWLQQRRVHEVVLESTAPYWKPVWLDLEPHFEKLHWAQAQSNRAPQGRKNDFRDAQRWGRRWLAGERMLSFVPEPEQRTWRWMTRGRLPLVRERVRLPNQVEALLEEARIKLSSVISDLLGVSGRRILEALSQGETDAVKLAELGDDRLRCTQEQLADALRGSPEPSHRALLKLHLERLKLLDQQIDQLSQRSATALKQPQDAVVRLAEVPGFGIESAQQRIAEVGVDAEAFPSAGELASWCGACPGSAVSAEENYSSRCPKGNR

SEQ ID NO: 440273 - protein, 388 aa, unidentified
MNVGADKSEPLTAIHTDLGAIFVSLELSRSSWLITSLSPGGGEKMSKHSVRGGDFAGLMERFAQLQEKARLRTGQSFRIIVVQEAGLDGFWIHRALQNEGIESHVVDAASIATSRRRRRAKTDKIDGETLVRALLAYKRGEPRVCAMVKAPTPGEEDRRHLCRERKALTAERVRHVNRIKGFLFSQGVSGYQPLRRDRRQRLEELQTGDGRAFPQHLKALVNRELDRLELLLKQIKTVEAARDALLAVEQTAKPAPAAMLLDIRGIGPEFAAILWSEGLFRHFENRRQIAAYAGLAPTPWQSGAVDREQGVSKAGNPRLRTTLIQLAWLWLRNQPRSALSVWFHERVSRNGGRLRKTTIVALARKLLVALWKYVTAGVVIEGVTMKVA

SEQ ID NO: 440274 - protein, 391 aa, unidentified
MIYIGIDVAKDKHDCFITNSDSEVLFKAFTILNNLDGFNDLYQKIESVMDDVTKVKVGLEATGHYSYNLLGYLIDKGLPTYVINPLHTNLYRKSLSLRQTKTDKVDARTIASMLMSDVNLKSYSDTSYHNEELKSLTRYRFDKVKERAKLKTSVSRLVCILFPELEKLVPTLHMASVYALLSEFSSAKHVATAHLTRLTNLLSESSKGRYGKDTAITFRDSARASIGSNMPAKSLELKHTIKLIQELDSEIDEIENEIKIIMDEINSPILSIPGINYRMGAMIIAEIGDFNRFDSPDKILAYAGFSPSTYQSGQLDGAYAHMEKRGSRYLRYALYNATKYVCHWDPTFAAYLAKKRAEGKHYNVAISHAVKKLVRVIYHLEKTKQQYIKAA

SEQ ID NO: 440275 - protein, 401 aa, unidentified
MIFAGVDWAEAHHDVCVMDDAGKVLARQRIADSLEGLAELHGLLAEHAEESEDVVVGIEKDRGLIVTALLAAGYAVYGVNPMASSRYRDRHHVSGAKSDPGDAKVLADMVRTDRHNLRAVAGDSSLAEGVKVLARAHQNAIWSRQRLVNQLRNALKDYYPGALEAFGTALSSSDAIAVLAVAPTPPLGRVLSVEGIAHALQGGGRQRNIERRATEIHAALQMPQLSQPEVLETAYGHVTASTVRLIAASNQEVAELEAALTSTFEEHPDAKVIHSLGMVLGARVLGEFGDDPNRYSDGKSRRNYAGTSPITKASGKSHVVLARFARNRRLADALDQWAFCSITQSPGARRYCDELRARDKTHRQALRQLANRWVGILHGCLEEHVLYEEERAWTRNESLAA

SEQ ID NO: 440276 - protein, 407 aa, unidentified
MIFVGVDWAEAHHDVCVMDGEGTVLGRRKIGDSFAGVGELHALVAAHLSDDDEAVQVVVGIEKDRGLIVTALVAANYQVYGVNPMAAARYRERHHVSGSKSDSGDAKMLADLVRTDRQNHRQVAGDSALINGVQVLARAHQNAIWGRQRQVNALRSALKDYYPGALEAFGTDLSHMDAVAVLGVAPTPALGRTLSRSKIVATLKRGGRQRQLDERAEKIQTALRQEQLHQPPILEDAYGTVTSSIVRTIALMTTEIAELEKALSESFEQHPSAKIVRSLPGMGTVLGARVLSEFGDDPNRYFDAKSRRNYAGTSPVTKASGKSRAVFARHSRNKRLADALDQLAFCSLISSPGARRYYDEMRAREKTHRKAVRQLANRWVGILHACLERGCLYDEEIAWPTPEEIAA

SEQ ID NO: 440277 - protein, 338 aa, unidentified
MQTYAGIDLHSSNNFVGVINDKDKILYGKRHANRLEDVLRALKPFKNSLQGVVVESTFNWYWLVDGLQENGYPVHLANPSAIQQYEGLKYTDDPWDSFWLAHMYRLGILPEGYIYPKEQRPIRDLLRRRLLFVRQRTSQILSLQSMISRNLGFKMSNNEIKKLKPEDIEQLFDCSNLVFMATNSWATIEFLKHIIKGIEKRVKSQVKLRKEFEMLLTIPGIGNILGLTIMLEVGDIGRFPKVGDYSSYCRCVESKCLSNGKKKGENNKKNGNKYLAWAYVEAAQFARRYCVKAQSFYQSKEAKTKPVVAIKALGNKLSKASYYIMRDRVAFDEDKLFR

SEQ ID NO: 440278 - protein, 360 aa, unidentified
MKQITRGESRREAVRVGVDLAKRVIQVHAVDALGRVLTSRTLGRDRFIEWCTRLPAGRIVAMEASSSAHHWARKLAAIGLDARIISAQLVEPYRLEGASGKNDANDAAAICEAASRPSMRFIPVKSIEQQSMLCVHRLREGLKQDRTACINRIRGLLAEFGLVFAQGPRELQLILSDVLEDAGNELGTLARLTLQRAQAQWRELDEHLAWCDERINAHGRDNVEVKQAATLIGIGPVTASAAVATVGDFKQFKNGAQFGAWIGLTPRQRSSGGKSNLGSITKRGDTYLRTLLIQGAKSAVMTAHRRHDKISSWALALRERSGWQKAVVALANKNARILWAVMTRGDVFDPNHLSVKPTGG

SEQ ID NO: 440279 - protein, 356 aa, unidentified
MISKKISVNKKKYNRSLNNCVSYDHYIALDWSVKNMAIARMGSNDSEPKVIDIPSDIKELKRYLKSLTGKKILTIEETTSSHWLYVELYDFVERILICDPYRNRLLIEGPKTDKIDAGKLCKLLKTGMLKEVYHSTNELYELRKLVSYYDDEVKAGVRLLNQKSALYRAENKSLKKKEELEKSSINDFIITQLDENIESYREKKKKYEDEFARISKRNRVVRSLESIPGLGPISSVTILSIVIDGRRFKSPNHYLSYCGLVKHEKLSGGRSYGRRLPRYSRRLKSVYVSAAVRVASTDNPLRVYYEYLLNEKKLPEYNAKNALARYIAKISLGIIKSGEKYKPYKWRESKRNKEAA

SEQ ID NO: 440280 - protein, 349 aa, unidentified
MKKIFIGIDFSKEKFDATVIKAEDLGEMQSIGHQEFINKATGYRKMLCWVGSLCGADTCEDWLFCGENTGGYSQMMSDYLYSKGYDLWIENALSIKRAFAMKRGKSDRSDSLMIAEYAMRYQDKARLYEPLSPALSQLREVFLYRHMLVRHKCSFEVRRIEKRLTQQKSSAKTMISQSSRHILTELKHEIQKCDQRIQELLRSDEELSRIFGIITSMPGVGTLNAVCLMVFTNNFTKFDYNARKIACYYGVAPFSRDSGTSVHSAPKVGYLANKMIKSLLSQAALAAVNFCPAMSMYYHRLVDKGKKPMVALNNVKNKMLAIITAMVKNECKYQPEYISINARSEMLNK

SEQ ID NO: 440281 - protein, 411 aa, unidentified
MELLREALPMSALVVAVDPGKMSNRVWLASGERGLLGKPVSLPVLREGVEALCQLIMTSGVAGPPIIGVEATGGLHQAWVAELERRYPGSVRLFAPSETQAARTQLGSRRFKTDDRDCAALVWLLRQGAGRPVADKPVDALLGAVRHRRGLVADRRVLQQRLHHQLQALCPGLSAPAGHGRALALDKPTGQAVLGCAAAFAGRPPTIGSLVARAPGRLTQATARFWVERWRRLLPPPADAELRAHRLGRDLARHQALQADITAVEGQLLRLLAGTDGQVLTTLPGVATVRAAAFAAHSLPIDRFPTPEHLYAATGLAPAAWQSASLKRRGHISRQGLPEHRDALMGIAWGLSQYSPSFHQRDQELRGRGMRPIQARVALARHACRLCHALLRTQQPFDEARYRSARHSRGR

SEQ ID NO: 440282 - protein, 373 aa, unidentified
MLLPRQRLKLARGAKDEEHAMSQQNARVAVVGIDIGKNSFHIVGQDGRGEIVLQQKWSRSQVEARFANMSPCLIGMEACVGAHHLSRRLRALGHDTRLMPAKYVRPYSKGQKNDFRDAEAIAEAVQRPTMKFVATKTADQLDLQARHRVRERLVSQRTGIINQIRAFLLERSIAVRQGIRFLRAELPRILAMPPEVLSPRMVRIVEDLACDWRRLDERVEGLSNEIETIARQDAGCERLMSVPGIGPIISSAMVAAIGAGDVFTKGRDFAAWLGLVPKQISTGDRTILGKVSRRGNRYLRVLFVQAAWVVLIKPKIWERHGLKPWLEAARKRLHHNVLAIALANKLARIAWSVLARGRAFEVRKINQAAPQPT

SEQ ID NO: 440283 - protein, 344 aa, unidentified
MRIAVLGVDLGKNVCSLVGLNASGAVVLRRRAKRETVIALAAKLSPCIVGMEACCGAHHLGRVFAAYGHDVRLMSPEYVRPYVKAQKNDDRDAEGIAEAATRPTMRFVELKSQEQLDMQTLHRSRDRLVGERTALINQLRAILLERGIVAPQGKRKLEQFLFNLMDEQGGPGLSPRMITLATDARAQWAELDRRIAAFDAEFVRWTKENEDARRLATIPGVGATIASALIAAIGKGETFERGRDLAAWLGLVPRQFTTGGKPKLLGISKRGNSYLRKLLIHGARAALPYVAERDVPLGRWAKSLLSRAHPNVVVVAFANKLARIAWAVLRRGEPFAAKGLPVAA

SEQ ID NO: 440284 - protein, 437 aa, unidentified
MRRKKSKASKRVNLGSLPVIHPDAAGIDVGAKAHVVAVPCDRDERPVRTFQAFTPELHDLAAWLKRCAVRSVALESTGIYWISLYEVLEQHGFEIRVVNARHVKNVPGRTKTDVLDCQWIQKLHSFGLLNGSFRPDQQIRKLRTYMRLRDNLVVNSTQAVHHMQKALFEMNVQLSNVISDIVGETGLRIIEAIIAGERDPEQLAALCGTRIKASRQTVAKSLHGNWDEALLFCLQSALETYRFSQVKIQDCDGHIERHLAEFESRAQLPNSPKGLQAHLHRICGVDLTKIPGIKEQSAQIIISEVGLDMTKWNTEKQFSSFLGLCPNNSISGGKVLRRTTRKVYNRAADNLRLCAQSLTHSKSALGAKYRRLRARLGAPKAIVAMAHHLARLVYRMLRYGDKYVEKGIEHYEKKFRQQRIKWLKKEASSLNLQLVVV

SEQ ID NO: 440285 - protein, 421 aa, unidentified
MKRESQEEFAAFVGLDWADAKHDVCLQATGTERREFLILEHRPEAIDAWVHTLRTRFNGQPVAVCLELNKGPIVSALRQYDFLVLFPVNPLTVAKYREAFTPSRAKDDPTDAELQVELLLKHRDKRTPLAPQSAMMRTLAQLVEHRRRLVGDKVRLTHRLTSALKNYFPHVLQWFPDTDTVLFCDFLSRWPTLKAAQLARRTTLEAFFRAHHVRAAEVIASRIQAIKSALALTTDDGVITPNALLVQALIAQLRVTLQAIADCDTAIAQRAQEHPDFPLFDALPGAGAVFAPRLLVAFGEQRERFTSAEDLQKYAGIAPVTERSGKKSWGHWRLQCPTFLRQTFVEWAAASTRHSFWAQVYYQQQREKGKAHQAAVRALAFKWIRILSRCWQDRTPYDESVYLQALKRRSAPFLHNLASGS

SEQ ID NO: 440286 - protein, 349 aa, unidentified
MKVTTSGIDVAKSVFQVHGVDERGNVVLRRQIRRAQLLLFFSRLEPCLIGMEACASSHYWARRLTALGHTVRLMSPQFVKPYRKNDKNDGNDAEAICEAVQRPSMRFVPVKSPEQQAELAVHRIRRRLMGQRTALINQLRGLLAEHGLVLAQGANQVRSKLPALLEDGSESLPPLAVELFRDLYEELVQLEQRIAACDRRVERLYRANPLCHRLGEIEGIGALTATAFVATVAHAAQFKNGRQCAAWLGLVPKQDSTGGKTRLLGISKRGDVYLRTLLVHGARSAMRHTPKGADPKSRWVEQLRKRRGENIAAVALAAKHARILWALMVKGESFPPPAIHSDPLEQPAV

SEQ ID NO: 440287 - protein, 320 aa, unidentified
MEAKVYIGVDVAQEWLDVSARPDGQTWRARNDEAGITELTSQLVERAPRLVVLEATGGLETALASALTMAALPVVIVNPRQVRDFARATGQLAKTDAIDARVLAQFGEAVGPEPRPLPEAATRELAALMARRRQVVGMLTAEKNRLRSAARPVRRDIQQHIRWLERRLAGLDDDLGKTIRQHAQWQDRDRVLRSTPGIGPVSSCTLLANLPELGRLNRKEIAALVGVAPLNRDSGTLRGRRTVWGGRSHVRSALYMATLVGVRRNPVLRTFYERLLAAGKPKKVALTACLRKLLTILNAMARTNTTWQDPTPTLALQDSC

SEQ ID NO: 440288 - protein, 349 aa, unidentified
MSMLCGIDLHRDQITFDALDASTGEVWRGRLFQPHRLRLRRWLAEELGPRAHGQPVAVAVEGCTGWRYVVEEVVAAGFEAHVAEPAETQDKRGPKHRAKTDRTDARLLRELLAHGELPESWVPPEPVLEWRERIRLYKSLVDQRTQWAQRVHAELFQHGLPVSENAVRSAKTRAALTSPALPVSPAAGQRIAAAYQMMAATDALLVPLHHDIVAFARRQPACRALMRAHFGIGELTAVAVWCELGDCRRFSRSEQVVRHAGLDIKVDRSDRHHGKGYLTHQGPPVLRWALYEAAKCSYRRTSPDHAYYTATKERLHDGKLATLSVARKLALRCYHTLRALDPIEVYAIP
